United States Patent Application Publication US 2015/0315605 A1 - sequence listing, part 31

SEQ ID NO: 54528 - protein, 235 aa, Zea Mays
MHPSSGAGDYAPYYPPYPSPAAPPPAAYPSVSAPASAPPYSSYPADFAPAPSYPAYPPADLPHYAPPPAAPAPPQPYYPYEPAPAPPLPPSPHNPVPSPYPSLDRAGSYGYGSGPGSGYGQELYPPKPAGGWSDDGAYAYNGGDAPEPYGSRGTAPRPGSGSALFDDYGRSIGSAADRGGRGGSAASPKVVRAVPKAETSEDVRGGVQKFRVKLLPEGAGSPMDVLCQTDPSHPH

SEQ ID NO: 54529 - protein, 77 aa, Zea Mays
MSSPSASCLPARATARGNQRRGCLWSGELLKVGKDKRALKLAKRKLGTHKRAKKKREEMAGVLRKMRSAGTHTDKKK

SEQ ID NO: 54530 - protein, 536 aa, Zea Mays
MEQATIQCLGCLKSKIPVAKSYHCSAKCFSDAWQHHKVLHERASSALNENGAEEEELFGRFGSGGSGVLSTAGSGSLSNFGQSPGVNNGPVPFYPSGTDKNSGETWFEVGRSRTYTPTADDIGHALKFECVAVDSEKKSPIGPSTSIMTSRVIPAPTPTPRRLIQVNGDVLGHLDLDSQISSLGTFTVLSYNILADAYATTDAYSYCPTWALTWNYRRQNLLREIIGYHADIICLQEVQVNHFEDFFSPELDKHGYQALYKKRTTEVYSGNPMAIDGCATFFRRDKFSHVKKYEVEFNKAAQSLTDAIIPAAQKRVALSRLIKDNIALIAVLEAKFGNHGAENPGKRQLLCVANTHINVHQDLKDVKLWEVHTLLKGLEKIAVSADIPMLVCGDFNSTPGSSPHALLAMGKVDQHHPDLAIDPLGILRPPSKLNHQLPLVSAYSAFARMVGVGYDLEHQRRTDPATNEPLFTNCTRDFTGTIDYIFYTADSLTVDSLLELLDEESLRKDTALPSPEWSSDHIALLAEFRCKPRIRR

SEQ ID NO: 54531 - protein, 66 aa, Zea Mays
MFRTGSGACALRFNGASSTAGRRVAPSHTGGATLQSKVLQSRPVTSGRAAGTGWRYGSGSEVLRPL

SEQ ID NO: 54532 - protein, 131 aa, Zea Mays
MTAALRAPQTMNLPKNQLPVQKSLLPVVAAVMIAVTVMIAALMRNQQRSPRSFQRSPLSFQRSPLSFQKNLSQQSVMVQNRLNLIAAALTVAQMRMKSLRFPLCKRRPKNLTALTVILMRMNQMIFLLKLK

SEQ ID NO: 54533 - protein, 299 aa, Zea Mays
MKMFREISVPGFDRTSFQVKQVFVPSKDGTKIPMFIMSKKDIDLNGSHPTLLYGYGGFNISITPSFSVGRVVLCKNMGFVVCVANIRGGGEYGEEWHKAGALAMKQNCFDDFAACAEFLISNGYTSSRRLCIEGGSNGGLLVAASINQRPDLFGCALAHVGVMDMLRFHKFTIGHAWTTDYGCSDKEEEFQWLIKYSPLHNVRRPWEQSSGNNCQYPATMLLTADHDDRVVPLHSLKLLATLQHVLCTSTEDSPQTNPIIGRIDRKSGHGAGRPTQKMIDEAADRYSFMAKMLGASWTE

SEQ ID NO: 54534 - protein, 363 aa, Zea Mays
MVDFVREGFLGSTHEFRNRFQNPIENGQHTNSTSDDVKIMNQRSHILFEQLKGFVQRKSMNVVKNDLPPKKVFVITVKLSQLQRKLYKRFLDVHGFSSSGYSEKSHRSFFAKYQTLSQVWNHPGLLQMAKEQRGNLRREDAVENFMMDESSSDDNVENYLPNGEKQKDKADQQSKKSNIIMNEESNWWEELLDENTYMKADYSGKMTLLLDILSKSSELGDKVLVFSQSLTTLDLVEFYLAKLQINGKEGKHWKRGKDWYRLDGSTPSSDRQNLVEMFNDLENTRVKCTLISTRAGSLGINLHAANRVVLLDGSWNPTHDLQAIYRVWRYGQTKPVYAYRLMAHQTMEEKIYKRQGAVCHFIK

SEQ ID NO: 54535 - protein, 408 aa, Zea Mays
MFVSWTMLTELNLAKNLLTAIPGSIGALPKLIRLDMHQNKITSIPPSIKGCSSLAELYMGNNLLSSIPADIGTLSKLGILDLHSNQLKEYPVGACNLKLSFLDLSNNSLSGLPAELGKMTTLRKLLLTGNPMRTLRSSLVSGPTTTLLKYLRSRLSSDEEASGSRSTPTKDDQIAAARRLSLSSKELDLSGLGVTSVPAAAWETSDVVKLDLSKNSIEDLPNELSLCSSLQSLVLSNNKIKRWPHTVVSSLPCLSSLKLDNNPLVEISSTDLVPLSKLEVLDLSGNASALPEPSAVSALPQLQELYLRRMKLHEFPNGLLGLKLLRILDLSQNHLTTVPEGIKNFTALIELDLSDNNITALPAELGLLEANLQVLKLDGNPLRSIRRTLLERGTKAVLKYLKEKLPSE

SEQ ID NO: 54536 - protein, 412 aa, Zea Mays
MHHLSGHTNVVAIKGAYEDQLYVHIVMELCAGGELFDRIIQRGHYSERKAAELTRIIVGVVEACHSLGVMHRDLKPENFLLVNKDDDLSLKAIDFGLSVFFKPGQVFTDVVGSPYYVAPEVLLKNYGPAADVWTAGVILYILLSGVPPFWAETQQGIFDAVLKGVIDFDSDPWPVISDSAKDLIRRMLNPRSAKRLTAHEVLCHPWIRDHGVAPDRPLDPAVLSRIKQFSAMNKLKKMALRVIAESLSEEEIAGLKEMFQTMDTDNSGAITYDELKEGLRKYGSTLKDTEIRDLMDAADIDNNGTIDYIEFIAATLHLNKLEREEHLVAAFSYFDKDGSGYITVDELQQACKEHNMPDAFLDDVINEADQDNDGRIDYGEFVAMMTKGNMGVGRRTMRNSLNISMRDAPGAF

SEQ ID NO: 54537 - protein, 125 aa, Zea Mays
MVFLKQGPYGHYVQIGEDKKGLFPKRASLSKVKDIDSVTLEDAIELLQYPKILGKHPEDDYPVLITHSKVGYNIKHRRSLALVPKSVDPKKMTLERALKLLSGKSVRRIGRPKGKVENKEPMEWH

SEQ ID NO: 54538 - protein, 422 aa, Zea Mays
MTSNGHARWLSADMTSNGSGMEVGKFSQDDVSRCPEKTVNLQDLQNSLIASKELVKVLAHIWGPGELNPSSVSLISALRSELDVARSHVRKLIKEKKSNPYEIEDLKKQLAEEMESWKVKQKEKVANALQFIVSELDTEKKSRKRAEKTNKKLSVALANTEASLQAVTKELERERKSKGRVEKICNELIKGIDEDKAEVEALKRETEKAQEELQKEREMLQLADEWREQRVQMKLLEARLQFEEKNAAVNQLRDELQAYLDTRKEQEPMNDPMQLSHASENGATAADDVVPDRNGGNFSEDDASEGSDIHSIELNVDGVNRTYTWSYTPSSKGRQRSASRHESFSDRGMDGVNSWRLEQSFRGMDEELEGDWAEGCSNGILTMDHDEERYLAIKNLREQMLAGSGFILSQGRENAERECCGL

SEQ ID NO: 54539 - protein, 287 aa, Zea Mays
MLKKKFRVDGSGYTTGARHGQQTLPRFNCRGRLVPVQSTFPSSSPTPPAAEPQPARMGNIFVKKPKITEVDRAILTLKTQRRKLAQFQQQLEKVIEAEKEAARQLVQQKKRDRALIALKKKKAQEELLKQVDTWQMNVEQQLSDIELASKQKAVFESLKAGNAALKSIQNEINIDDVQKLMDDTAEAKAYQDEINAVLGEQLSAEDEEAVMAEFENLEAQLAVESLPDTPVTEVRPEEKMKAPADTEAVPEDIDEAIELPDVPMKAPERPEAPEKTKGTICYGLSSS

SEQ ID NO: 54540 - protein, 130 aa, Zea Mays
MQRNRGQFTSSKPKPDEIAASEMAAADGSLNWALVEGRPPSAAECHHCGINATATPMMRRGPDGPRTLCNACGLMWANKGLLRDLSKSPVPLHSIQQSAPILNGGNGSAMSALGSELENAAAAMGNGHEP

SEQ ID NO: 54541 - protein, 754 aa, Zea Mays
MSTDDVPPSSEAGDDETDGGGGVDATPVFVWGTNISVQDVNAAILRFLRHFRDPRDAGRVDPVMDEGKYMRAIHRILELEGGESLDVDAHDVFDHDPDLYSKMVRYPLEVLAIFDIVLMDLVARIEPLFEKHIQTRIYNLKSSICLRNLNPSDIEKMVSIKGMIIRCSSVIPELKEAVFRCLVCGFYSEPVMVDRGRVTEPHICQKEQCKATNSMTLVHNRCRFSDKQIIKLQETPDEIPEGGTPHTVSVLMHDKLVDAGKPGDRVEITGIYRAMSIRIGPTQRTVKSIFKTYIDCLHIKKTDKSRLHVEDTMDIDNSNASKSTEEDFLSDKVEKLKELSKLPDIYERLTRSLAPNIWELDDVKRGLLCQLFGGNPLKLPSGASFRGDINILLVGDPGTSKSQLLQYMHKLSPRGIYTSGRGSSAVGLTAYVTKDPETGETVLESGALVLSDKGVCCIDEFDKMSDNARSMLHEVMEQQTVSIAKAGIIASLNARTSVLACANPTESRYNPRLSVIDNIHLAPTLLSRFDLIYLILDKADEQTDRRLAKHIVSLHFENPNLEELEVLDLQTLVSYISYARKYIQPQLSDEAAEELTRGYVEMRKRGNSPGSRKKVITATARQIESLIRLSEALARMRFSEVVEVRDVVEAFRLLEVAMQQSATDHATGTIDMDLIMTGISASERQRRENLVAATRNLIAEKMQLGGPSMRMIELLEELRKQSSMEIHMHELRGALGTLMTEGAVVIHGDNVRRV

SEQ ID NO: 54542 - protein, 395 aa, Zea Mays
MRLHAGARLALLLARRSLSSSPRIPRVHTGIRSEAPSRSSPFYPPSSARRSFHGTRPVAARDYYDVLGVSKSASQAEIKKAYYGLAKKLHPDTNKGDADAERKFQEVQRAYETLKDEQKRSLYDQVGPDQYEKTASGGGGTGFEGGFGNPFEDIFGGGGGGGGMNDFFRNIFGDRDFRGRDVKVALELSFMEAVQGCSKTVTFQTSVTCEICGGAGVPPGTTPETCLSCRGSGFIFMQTGPFRMQSTCTKCGGSGKTVKEFCKACRGNKVVPGRKSVRLDILPGLDNEDTIKVVRSGGEDPDGRPGDLYVTLEVREDPVFRREKGDIHVDAVLNVTQAILGGTVQVPTLSGDVVLKVKPGTQPGQKVVLRGKGIKTRNSPHYGDQYVHFNVNIPE

SEQ ID NO: 54543 - protein, 1005 aa, Zea Mays
MQPPMGSERRTPPGRPVSAFVPGAAVPPPPFAAGGPFAPPPRQGVPPPQSGAAAPAFGAAPPAAMGGGFRGPPPSQGPYGAGTLPHGPFASAPPPQGSFTSAPPSQGSFASAPPSQSPFTSPPPSQGPFAAGPPPTGPFAATPAPFRPPPSSLAQPQSPTGGALPAPPTYARPPPPLQSQGYYPGAPPANPQYSMSRPAFQQPMQNMPPPPMGPATTFGNQAAYPSAGPPVGGTLQSLVEDFQSLSLSSTPGSLDPGVDVKGLPRPLDGDEEPVKLMEAYPLNCHPRYFRLTTHAIPASQSLVSRWHLPLGAVVHPLAESPDGDEVPVINFGSAGVIRCRRCRTYINPYATFADAGRKWRCNLCALLNDVPGEYFCGLDASGRRYDTDQRPELSKGTVEFVAPTEYMVRPPMPPSYFFIIDVSVSAVQSGLLEVVAKTIKSCLDELPGFPRTQIGFLTFDSTLHFHNFKSSLSQPQMMVVTDLDDVFLPLPDDLLVNLVDSRHVVESFLDSLPNMFHDNVNVESALGPALKAAFMVMSQIGGKLLVFQSTLPSLGIGRLRLRGDDVRAYGTDKEHTLRVPEDSFYKQMAAEFTKYQIAVDIFSFSDKYSDIASLGSLAKYTGGQVYHYASFQTPTHGDKLKLELSRDLTRETAWESVMRIRCGKGVRFTTYHGHFMLRSTDLLALPAVDSDKAFAMQLSLEETLMTTQTVYFQVALLYTSSSGERRIRVHTAAAPVVTDLSEMYRQADTGAIVSLLGRIAIENSLSDKLDSVRQQLQLKLVKSLKEYRNLYVVQHRIGGRLIFPESLRFLPLYILAICKSLALRGGYADVSLDERCAAGFCMMILPVKRLLNFIYPSLYRVDEVLTMEPNKVDDVSLKRLPLTFQCLDTGGLYLLDDGFTFLVWLGRMLPPELVNNILGVSLANFPDLSKIVLRECDNELSRNFMKILRSLREKDPSYHQLCRVVRQGEQPREGYLLLSNLVEDQMAGTSSYVDWIQQIHRQTQS

SEQ ID NO: 54544 - protein, 410 aa, Zea Mays
MSGLEKSIMLDPRNQQNVKALENALASQSIFQLGLLLVLPMVMEVGLEKGFRTALGEFVIMQLQLASVFFTFQLGTKTHYYGRTILHGGAKYRPTGRGFVVYHAKFAENYRMYSRSHFVKGLELLILLVVYLVYGSSYRSSNIYLFVTCSIWFLVASWLFAPFIFNPSCFEWQKTVEDWTDWRKWMDNRGGIGMSVEQSWEAWWVTEQDHLRKTSIRAFVLEIILSLRFLIYQYGIVYHLNIADHHKSIMVYGVSWVVMLLVLVVLKMVSIGRQKFGTDLQLMFRILKGLLFLGFVSVMAVLFVVLHLTISDVFASILGYLPTGWCLLLIGQACSPLIRRTLLWDSIMELGRSYENIMGLVLFLPIGFLSWFPFVSEFQTRLLFNQAFSRGLQISRILAGQKDVSEFEFK

SEQ ID NO: 54545 - protein, 461 aa, Zea Mays
MAKKGAKRKQQPPPAAPTAKKGSKAVPPPKAAKRAPKKQELLESSDDSDTEQQLLEEASHLDVPSDSDAEELSGSDAEADELSGSDADSDGSSSSGDDVEDEEEEEEGDGSDDDPLADDFLAGSDEGSEGGDSGLESDESDDLEAKSRAIDEQKIKAEEDAEEELQTNIRSESDEFRLPTAEELEEEAHRPPNLPNLKRRISEIVRVLSNFSKLRQKDVPRKDYIEQLKTDIISYYGYNDFLVEALIEMFPAVELVELLEAFEKRPPECLRTNTLKTRRRDLAAALIPRGFNLDPIGKWSKVGLVVYDSTISAGATTEYMAGHYMKQGASSFLPVMALAPQEKERIVDMAAAPGGKTTYIGALMKNTGIIYANEFNEKRLHGLLGNIHRMGVTNTIVCNYDGKELPKVLGMNSVDRVLLDAPCTGTGTIWKDLQIKTSKDIEDIRSCAFVQKPVHAHGEVR

SEQ ID NO: 54546 - protein, 458 aa, Zea Mays
MLHAKAAPDLGCVQRGCILVYRFSFYRSTVADSDGMLEDQSCLISRSLPGSCEQESRLAYMTYHLLEITRSKRPPGTLSIEHDVVAALTKRTKSSEHQNSEALDCQGSNGQGDSDSSTLISSIGRDNSINCLARCSRSDYGSIASLNRSFRSLVRSGELYKERRQQGISEHWVYFSCNVQEWEAYDPYRSRWMTLPRMPRNECFMHSDKESLAVGTELLVFGKEILSHIILSYSILTHSWSRGVEMNAPRCLFGSASFGEKAIIAGGMDADGRVLRSVELYNSETKRWTTLPSMNKARRKCSGVFMDGKFYVIGGMASNTEVLTCGEEYDLDRGTWRVIENMSEGLNGASGAPPLVAVVENELYAAQYAGKLVRKYNKRDNSWTTLGELPERPEAVDGWGIAFRGCGERLLVIGGPRVLGGGMIELHSWIPSEGPLQWNMIGSKPSGNFVYNCAVMGC

SEQ ID NO: 54547 - protein, 641 aa, Zea Mays
MLCGQVRKRHPWGDAKAVKEEIDKRLAEILGPKTEADSIKPVKKKKEKTAKVEEKKVAVATTAPPSEEELNPYTIFPQPEENFKVHTEIFFSDGNIWRAHNTKEILEKHLKATGGKVMTRFPPEPNGYLHIGHAKAMFIDFGLAKERNGHCYLRFDDTNPEAEKKEYIDHIQEIVHWMGWEPYKVTYTSDYFQPLYEHAVELIRKGLAYVDHQTAEEIKEYREKKMNSPWRDRPIEESLNLFEDMRRGLIAEGAATLRMKQDMQNENKNMSDLIAYRIKFTPHPHAGDNWCIYPSYDYAHCMVDSLENITHSLCTLEFDIRRPSYYWLLVALGLYQPYVWEYSRLNISNTVMSKRKLNRLVTENWVDGWDDPRLLTLAGLRRRGVSSTAINSFIRGIGITRSDNSLIRVDRLEYHIREELNKTAPRTMVVLRPLKVVITNLEEGKVLDLDGKMWPDASDTDASSHYKLPFSRTVYIEKTDFRLKDSKDYYGLAPGKSVMLRYAFPIKCTDVIYGDTPDDIVEIRAEYDPLKTSKLKGVLHWVAEPAPGVEPLKVEVRLFEKLFMSENPAELEDWLGDLNPHSKEVIKDAYAVPSLATAVLGDKFQFERLGYFAVDTDSTPEKLVFNRTVTLRDSFGKAGPK

SEQ ID NO: 54548 - protein, 520 aa, Zea Mays
MGHKCTSLDQTDEGILVGASVNNGGMIIERKLHCGLLIGTDGARSTVRELAGISMEGERDLQKLVSVHFLSRDLGRYLSSQRPGMLFFIFNPGAIGVLVAHDLENGEFVLQVPFYPPQQMFEDFSAKVCEQIIFKLVGWEPADVHVLDIKPWAMHAEVAEKYICCNNRVILSGDAAHRFPPAGGFGMNTGVQDVHNLAWKLGLLLNGVASPSILQTYESERRPVAIFNTELSVENFKAAMSIPTTLGLDPTVANSVHQVINRSLGSIIPRNVQKAVLEGLFSLGRAQVSDYILNEKNPIGSLRLARLRSILDEGKSLQLQFPAEDLGFHYAEGALVVEASCEKTHEGEKLQHSKRASREYIPSAKVGSRLPHMLVREVPASSEGAFSTLDLVSGDKLEFVLIIAPVKESYEIARATLKIADELTLSARVCVMWPRGSTDAEVEESRSELTPWTNYIDVEEVPRVSGGSWWEMCRISRKSVLLVRPDEHIAWLTELDRVRDAESEIRRVFSHVLCLNSHRV

SEQ ID NO: 54549 - protein, 357 aa, Zea Mays
MTGHASKCLLARRALRALRGLVRLKSLVEGNSVKRQSASTLRCMQTLSRVQSQISSRRAKMSEENQALQRQLLLKQELENFRMGENWDDSTQSKEQIEASLISRQEAAIRRERALAYAFSHQWKSTSRSVNPMFVDPNNLQWGWSWLERWMAAKPWEGRNGADKESNIDRGSVKSMSLNLGEGEITKAFNRRDSKLEKPSPPTPRPARPTSRHSPLTPSARVAPIPARRKFVTPKNGLSQVDDDARSVLSVQSERPRRHSIATSTVRDDESLTSSPSLPSYMVPTESARAKSRLQGSATANGAETPEKGGSTGPAKKRLSFQGGTVSASPMRRHSGPPKVEIAPPQPEALVVNGGSK

SEQ ID NO: 54550 - protein, 815 aa, Zea Mays
MPILSLTGTHDSQPDSEQVVQVYCVQTMAIQQYGLELPLCLPPTADSTGFGRDPAISRVYEAPLEMAGTESSTGTSFTDSYSVSSLSKPSTVDQSAELDLKPSAPPLAYSEGDGSVPLPSAPPAPKMEAPGSGPAPGGRGIDQSAFDYTTNRNVERDVLKRQDTPMPIRKDILGKDEPRDGHSDVPMLPNPRLMFQVGGNATHLVTPSEIISGTLSSSENNDASKSDGGKSQDVSSRSSQVPEVEPKHIDESKQDQNLGLEAVKETQIVCENMEKTRSSLDQTVEMISERSVTTDKYSVEESQSSSDRPTSDQTGISENVLKKFVEMPEKIDYSSASREQSSSFTKEEKVLHPQTSGQPSPPVSAFNSTESHEPLSSTYLPITVSSYPEVGATQGMLQQLMGRQEDMEKQLSTVVPASIAKEGKRLETSLGRTVEKSIKANIDAFWARLQEENTKREKADRDRMQQFVTLITSSINKDLPSNLEKSLKKEISSLGPVVARAITPIIEKCLTSAVSDSVQKGLGDKLFNQLEKSITGKLEATLARQIQIQFHTSGKQALQDALRTSFESLLVPAFEQACKTMFEQIDGAFQKGMSEHSTAIQHQVESSHSPLALTLKEIINSASSITQSFSSELLDGNRKLLALVTSGNAMAHNTSALQPINGPMGGSQEVVVEAPLDPMKELGRLISERKFDEAFTMALQRSDVSIVSWLCSQVDLRALCAMVPVPLNQGVLLALLQQLAIDIHNETSRKVQWMTDVAMAINPADQMIAVHVRPIFEQVYNQLAHQRTLPTMTAADGTSIRVIMHVINSVLLSYK

SEQ ID NO: 54551 - protein, 485 aa, Zea Mays
MLILFLNQDPNLLRSYIVQQEGNSLLGLLVKGMVTDFGEEMHCQFLEILRILMDSFTMSGAHRDVIIEIFYERHLDYLVDVIASSCPPRSLSRPRSNSVRVGGNAEGHHIKPEILLNVCELLCFCVVHHPYRIKCNFLMNNAIEKILTLTQRREKFLVVAAVRFMRTIISRNDEHLIRHVVKFNLLKPIIDIFVDNGERYNMLHSGVLELLEYIRKENIKALTIYVIESFWYELVKFEHFGSIQAFKLKYQQYVESAEPMLNASVPNMRKKAEQRGLEKEEEDYFNKDSDEEDSGSGRRDKHAQNQHSKPKPKVPNGSEADDTDGASRPKSAGLVDYDDDDDEDFNPPPMEPSTPAEDDVPLNISPVKRKPVDVKHADGEGRRRQKIETRISCAKIAAVTSTIIKHTDLQNKHACYLPTSAAPSTEPNGVFRERGTNSEEHQHSVENTETSRQAGGDCIKDGGSMSPEKAVNTTTTSDSEPYSVR

SEQ ID NO: 54552 - protein, 296 aa, Zea Mays
MVRCSLNEETQLNKHGLVSKQLISCLAASLVFVSPPSQAIPAETFARPGLCQIATVAAIDSASVPLKFDNPSDDVSTGMMMRGMTAKNFDPVRYSGRWFEVASLKRGFAGQGQEDCHCTQVDTFCVHGGPDGYITGIRGRVQCLSEEDIASAETDLERQEMVRGKCFLRFPTLPFIPKEPYDVLATDYDNYAIVSGAKDTSFIQIYSRTPNPGPEFIDKYKSYVANFGYDPSKIKDTPQDCEYMSSDQIALMMSMPGMNEALTNQFPDLKLKAPVALNPFTSVFDTLKKLLELYFK

SEQ ID NO: 54553 - protein, 706 aa, Zea Mays
MAILSALATEVFIPVAAVIGIAFAVVQWVLVSRVKLSPAAAASGGSKNGYGDYLIEEEEGLNDHNVVVKCAEIQTAISEGATSFLFTEYQYVGIFMSIFAVVIFLFLGSVEGFSTKSQPCTYSKDKYCKPALFTALFSTVSFLLGAITSLVSGFLGMKIATYANARTTLEARKGVGKAFITAFRSGAVMGFLLASSGLVVLYITINVFKLYYGDDWEGLFESITGYGLGGSSMALFGRVGGGIYTKAADVGADLVGKVERNIPEDDPRNPAVIADNVGDNVGDIAGMGSDLFGSYAESSCAALVVASISSFGINHDFTGMCYPLLVSSVGIIVCLITTLFLLLIFFEVKAVKEIEPALKKQLIISTVLMTVGIAVISWLALPAKFTIFNFGTQKDVSNWGLFFCVAIGLWAGLIIGFVTEYYTSNAYSPVQDVADSCRTGAATNVIFGLALGYKSVIIPIFAIAVSIYVSFSIAAMYGIAVAALGMLSTIATGLAIDAYGPISDNAGGIAEMAGMSHRIRERTDALDAAGNTTAAIGKGFAIGSAALVSLALFGAFVSRAGVKVVDVLSPKVFIGLIVGAMLPYWFSAMTMKSVGSAALKMVEEVRRQFNTIPGLMEGTAKPDYATCVKISTDASIKEMIPPGALVMLTPLIVGTLFGVETLSGVLAGALVSGVQIAISASNTGGAWDNAKKYIERACQDPRPQGI

SEQ ID NO: 54554 - protein, 106 aa, Zea Mays
MGRRILNDALRTMVNADRRGNASALLRPISGVMVSFLNIMKYRGYIKKFEVIDENRVGKIRVELDGRLKDCKALTYRQDLKAKEIERYRVRMLPTRQCAIQYARFA

SEQ ID NO: 54555 - protein, 551 aa, Zea Mays
MAPKRRGNEMGVKELDSLMTLIAEKKRQMEQQESETNMQILLVFLHCLRKQKLEELNEIQTDLQYIKEDISSVERHRAELYRTKERYSMKLRMLLDEPTAQKMWPSPIDKASCRFLPNSRTPLSGSCPGTLQNKKLDLKAQVSHQGFQRRDALTSSDPPNSPIQSGNVIARKRRVQAQFNELQEYYLQRRRTGAQARRQEERDIVAMNREGYHAGLQDFQSVLTTFTRYSRLRVIAELRHGDLFHSANIVSSIEFDRDDELFATAGVSKRIKVFEFSTVVNEPSDVHCPVVEMATRSKLSCLSWNKYSKNIIASSDYEGIVTVWDVQTRQSVMEYEEHEKRAWSVDFSRTDSSMLVSGSDDCKVKVWCTNQEASVINIDMKANICSVKYNPGSSFYVAVGSADHHIHYFDLRNPSSPVHIFGGHKKAVSYVKFLSNNELASASTDSTLRLWDVKDNCPVRTFRGHKNEKNFVGLSVNNEYIACGSETNEVFVYHKAISKPAASHRFVSSDLDDADDDPGSYFISAVCWKSDSPTMLTANSQGTIKVLVLAP

SEQ ID NO: 54556 - protein, 509 aa, Zea Mays
MRGWTGMTWSWLGLLSFIHIPKLLHHFIPPSHLVLVVFRLLFDAVLSAAPACPVGGDDGEFRREMMNRAVHAAARGGSLAVLRDLLRGCSDAAAYRDAQGSTILHAAAAKGQVEVVKDLIASFDIANCVDDQGNTALHIAAFRGHVQVVEALITASPSLISATNEAGDTFLHMALTGFGTPEFQRLDRQTELIRQLASGAIVDISSSTIINAQNDDGKTALHLAVVCNLHSDVVKLLMSVPCIDLNICDKDGMTPLDLLRKQPRTTASEILIKQLILAGGFTSSRDHETRSAIASQLKMHSIVGSPGTSFKIPDGEIFFLHAAGVDVSGGIGEGGAAVPFSSVIARADVLHGPKLKRLNSFQDAAKHIKVLFRWPRRGWNKSGSGGRKGLDDDDASSVDSAKTWSHEETPTPLRQRYSRIGSLFNKRTYAAGRASPSEAVKKGGVVQPAGSTLLSTSLSSSSASLVDRFESVHQDNDQSPYVSRLIRHTPKKSGSLNSRLMNQSLRLRA

SEQ ID NO: 54557 - protein, 168 aa, Zea Mays
MMASVMNSVLLQASLEKIGVETRVQTALMMQEVAEPYIRRRAIRHLEKGRVVIFGGIGVGIGNPLFTTDTAAALRASEINADVVLKGIVGDDEYGCPPRSNSNASFEHISFRELAARGITKMDMTAVTCCEENNIPVVIFNMLEPGNISRAICGDQIGTLVDQSGRIT

SEQ ID NO: 54558 - protein, 374 aa, Zea Mays
MASPKHSHRHHRAAATKHRRPLALRRAMLHSCVCFLVGLVTGLAPSDWTDAASRAAVHANGAATAQVFRALHAMNQTAAAGALGQLLALQHYQQQPVVEKEKEKEKKPLDLVVVVTTTTTSTGLSERERRSAGLTRTAHALRLVSPPLVWLVVEAAREAGPTARLLRRTGVVYRHLTYAENFTSEAWEEERHHQRNQALAHIERHRLRGVVLFAGLADVYDGRLLEQLRRHIRTRSVGAWAVATVWEQEKRVAVEGPVVVCNTTTTTTSAASTACAWFSASDSTLLAAAAAAAPPVTADDSVHGFAFASDLLWDPSRWDRFPTSEPDQSQDSIKFVQRLVMAEYNKTRAIIPADDDYSSNRSQIMVWRVDTTLL

SEQ ID NO: 54559 - protein, 1183 aa, Zea Mays
MPRSSRHRSHRSHRRGGSADRSESDGEESAPVAGAREEAAAARVSRDPEPERRRSSSGQEAVRSGNGYAEHGKKRKERVEEAVVDVVSDRWNSGVCDDHLVDKRSKSETFGHAEVEKLADRSRGSGDESKRSSRRAVAVDDRAEEVLSKSDSGKRRSEKQKDVGRKESTGHYKDNRDRENERERGEEWERQKERDRGRSRDREREKERAREKEREREREREKDRDRERDREHERERDRQKEREWDKKDHDSKHERYEDGGSRKSGLKMSRTEQEAYSYRRDTDVNEISAKEKYNNPDMQAEKHSRRKDDSEDTDKWSTDNRDSDDRKTLSRYEHGKSRSSKEQRFDDDKYKEKYKDDYVRDKRQHDDKFSNERVARSHESDRAEYKSAKDGRRSSESHYRKDAVQDVDHYEDYNNRYKESRGKKRPPEENDDQYDLKPPSTRDQRVHLEKSSGSGRLDSLTERARPDRSSSPSKIHSRSSPSPSSYHDKDQSRHGSKVVDHGKREIPYDERNNRPRASSGRERTPASRLRDRDAENWSSERLKQKDDYQPRDVTLEISTSHYDRTPSKDKHTSPKQLSEKSPSSGDHRFSGRLSGGRSLDNKGERKSLTKYRDRDGDIAQERSHHQDRMPAKVPFREPTPSNSSISRGGHFLGSSPNNPLPPARNGDPSFQGPHDDDRRPQNGDRRFHGHQKRNDMNSVRGHGHGWNSQPNWPSPVSNGFVPIQHGGAPGFHPPVHQFPGPPMFNLRPQMKLNQPGVSYPMHDAVDRFSTHMRPFGWPNHLDESCPPHMQVWNGGSGVFPGEPYIYGRQEWDQNRPHAGSRGWELTGDVSKGPNDVPDAELLVAKKDPDSAITAVSDSGGQHNLQPEADQKEIGRLTAENFEAKNHTKSSKSLEAPQGAQLVTSMLSKNSVVFCKNYLSRISVSHDLVEPELYKRCISLLGDLDVTKTSHLVRNEIQQDNGNIGKMSTKYGNLNPFSSRYLKSDNTIFERALALHKNQTQKGLTTASASVKMEEKMAVPEDDHDMELLEPVVSNPAPQRHTDVMEEGSVSKHELGDGIGRTIAATIGSGVLDAPPEISLPQPEVVVATTVITQPNKHMEDVLPPAIEDGALQATLEHAVGIPEVTPADVLLDVAPSAVGESGDDMEIIPSAMAEPQLGKEPAPVASPDSQEKPFMLDSETDGL

SEQ ID NO: 54560 - protein, 131 aa, Zea Mays
MNSVDFLFELTNDNRQLVFLYERGKKKLMDGARIAFTDDVDPSSIAGRIVECSWNKEEQCWSCMRIRSDKSTPNDINTYRKVMRSITDNITEEKLLEEIDEISLLPMYADRMQQAHTKMAQQQRRRLPPQC

SEQ ID NO: 54561 - protein, 194 aa, Zea Mays
MLGGKKVTVVFVLGGPGSGKGTQCANIVEHFGFTHLSAGDLLRAEIKSGSENGTMIENMIKEGKIVPSEVTIKLLQEAMIKSENDKFLIDGFPRNEENRAAFENVTKISPAFVLFFDCSEEDMEKRLLGRNQGRVDDNIETIKKRFKTFVDSTLPVIEHYNSKDKVKKIDAAKPIPEVFEDVKAIFAPYSLKAE

SEQ ID NO: 54562 - protein, 581 aa, Zea Mays
MDPTNIGAASYYVTGQTRWGVSNVGKFNEAPNGSYTIDSSEQFQNALDSQLFQTARMSPSSLRYYGIGLENGNYTVELQFAEFAYPESPTWQSTGRRVFDIYIQGGLKEKNFDIRKTAGGKSYVAVYKKYNATVSKNFLEIHLFWAGKGTCCIPTQGYYGPMISALSVTPNFTPTVRNGVPKKKSKAGAIVGIVIGASVLGLAALAGIFMLVQKRRRAAQQQEELYNMVGRPNIFSNAELKLATDNFSSQNILGEGGYGPVYKGKLPDERVIAVKQLSQTSHQGKSQFVTEVATISAVQHRNLVKLYGCCIDSSTPLLVYEYHENGSLDRALFGDSGTILDWPTRFEIILGIARGLTYLHEESSVRIVHRDIKASNVLLDTDLTPKISDFGLAKLFDEKKTHVSTKIAGTFGYLAPEYAMRGHLTEKADVFAFGVLAMETVAGRPNTDNSLEEHRIYLFEWAWELYERDQALGILDARIEESDGEEAVIRVINVALLCTQGSPHQRPPMSRVVKMLTGDIEVPEVVTKPSYITEWQRRGGNSSYVTSGYSGDTTGEFSVQRETTAPLTPSPAMTGVIDDGR

SEQ ID NO: 54563 - protein, 59 aa, Zea Mays
MVYALRLLTWRGKWLLTLRRKASCTSRLTLNRSYIRGRFQSDKRRISQKRCQLPYGYID

SEQ ID NO: 54564 - protein, 221 aa, Zea Mays
MYEAFPRVTVPHFLGDDYDDEGHQLSEAISAAKVRAESCSSFMKAAIRWSAEFGTSRNGSSELHVMLAEYIYSESPETDMTKVSSHFVRGNDPKKFASMLVNFMGKCYPGEDDTAIARGVLMYLSQGNLRDANLLMDEMNEQLKSANSEFPKTDLIQFIKYLLPTLERDAYPLFRTLRQKYKTSTDRDAVFQELLDEIAAKFYNIQRQNPLEGLFSEMFKI

SEQ ID NO: 54565 - protein, 312 aa, Zea Mays
MKAVGKPHTLWVAFAKMYEKHNRLDSAEDIFKRATQVNYKAVDHLASIWCEWAEMELRHNNFDKAIELMRQATAEPSVEVKRRAAAEGDEPVQMKVHKSLKLWSFYVDLEESLGTLDSTRVVYERILDLRIATPQIILNYAYLLEEHKYFEDAFKVYERGVKIFKYPHVKAIWVTYLTKFVHRYKRSKLERARELFHEAVQQAPPEEKKPLYLQWAKLEEDYGLAKRAMNVYDESVRAVPGSEKMAMYEIYIARAAELFGVPRTRQIYEQAIESGLPDKDVLTMCMKFAELERSLGEIDRFACHLCACIQLC

SEQ ID NO: 54566 - protein, 117 aa, Zea Mays
MPSAPRLKLISTPDLRSLLSVEDVKLPPWSNGMCLAEYLPALEDSLNGLLVDASASIGSRRRFIEALAPIFGRPLEADPEGYSSFHFWNVHISGSLCHPPSIPKATTCRHTAEFSAL

SEQ ID NO: 54567 - protein, 161 aa, Zea Mays
MIHFVLLISRQGKVRLTKWYTPYPQKQRSKIIKEISTLVLTRGPKLCNFVDWQGYRVVYKRYASLYFCMCIDPADNELETLQIIHHYVEILDRYFGNVCELDLIFNFHKAYFILDEILIAGELQESNKKSVLRLVTTQDALVEAAKEEAGSLRNIIAQATK

SEQ ID NO: 54568 - protein, 494 aa, Zea Mays
MELDLNVAEVAPEKPSAALEASDSGSSGSSVLNAEAASAGGGGPAPGEEGSSSTPAVLEFSILRSDSDAAGADADDGDATPSPPRHHQQQLVTRELFPAPQHWAELGFFRAGPQQQPDIRVLPHPHPYPPPPPPAQPQQAKKSRRGPRSRSSQYRGVTFYRRTGRWESHIWDCGKQVYLGGFDTAHAAARAYDRAAIKFRGVDADINFNLSDYDDDMKQMKSLSKEEFVHALRRQSTGFSRGSSKYRGVTLHKCGRWEARMGQFLGKKYIYLGLFDSEVEAARAYDKAAIKCNGREAVTNFEPSTYDGELLLTAEASAEVADDVDLNLSISQPASSQSPKRDKNCLGPQLHHHHGRPFDGSAVLKKTKIDAPSELSSAGRPHRSFLPHLVAAEHLPPRSHPFFITHHESDASRRDPSWAAAAAWKVTAAAPPPPTTTLLPLPLPSTSSAAASSGFSNTATTAAAAPSAASSRRFDPPPPSSSSSSSHHHHHHRR

SEQ ID NO: 54569 - protein, 1547 aa, Zea Mays
MSHFHPTQHASDNDFQMWQQQMMFKHLQEFQRQQQLQQSDHGARMQLSFGQFHAPAKPLPGDQLSTMSNEMVNNETMNSGWPHNFTGGDLSLTSNSQMLNNGSTNWDQIVGSPVVGNFMNGSMFVNAHNQSMRPMGLATHQVDQTFYPMHATSSRGPGNQYSQFLGIPADPQSEAARVGPVQSEKTSRPFNSSMNELGLHMQGTTSLMHNFRGKGGFLNNSLMQSQGDNIRAGSPVTMNQLQHGFQTQDFHGRPNQVDLQAGMQEKSAMQVGQASRGASLDPTEEKILFGSDEDSNWGALLRGDNDNVNSLDNDNYGGGYSSLQSGSWSALMQEALQSTTSESPKEEWSGLSFHKTEQVMASNANLSGRNGSKFTGLSGANLENARPSPASSYADGTMNNPNLASFQHVIRPPSERRDHMSHESSNAPVNNHQSTSEVNKGYFQQGIKQIHSDARQGQAHLVNGTWPHQKTELLRSNLQSTGVHATPPGGHGFGMSQQIATDHNINRESSNNQNDWKANNALGQDMCNSQNIFNSNENSWKSTGGNANSVQRFQQRRSDVSATNESSDGKNISMMSSSMPMMTQDHYQMVTSQSGEQIGMNRNLTHRAPETSESPGKSAEQRPGDFNQEYLNAIPNERETHISNHGRHITSDSAPRRHSVSAGKESENLGQSSQQAMGSYILQNRAMGSSGMNIGLSPGNPMSNSLFPPQTRNSLQHHFGTNSHVSNSMPSASEEQLQSRHGLPNSSSASTLGGADTGLSQNRAVQNSQHMLQLLHKVDNSRNSNVVADIPNNSLGVVSAQQQLNHSSLQGFGLRLAPPSQLQSISGNLWSSQTNADGKQFYQDGDRTQLPSTPSQSLTPQHQNSLSSPFHSSETENTGQPIACFPQLGSGQQYPMADDRSGPAPMLQQQPQQSNSATVFKNVWTNISAQRLTGMQPNKITPNIIQSMMFPNNAAASNLWSSQKADDQGQRASTPSDIATSSANSQNQSPKQAADSDAKLASSQKGNLELTGTTVTGGNESLQKPSSDENSINAVSSFAQLRQQGILGAKHGENPGANFQAMNVSHNNANHSGGIVLHGSPAPTNIQQQNYSLLHQMQTSRHMDVDPGSLSGKTTKPDIGSDAAQIDWNSGQRFAHVTNNSTKSSADNIGSPGVPGSFTSDLKMLSFASRNEERNPNIPSRFPSGECPSPGMITTQDDNQNQVQHMGTGAMSNSDERSERPRINPQMAPSWFGHYGNYRNGQSVATLNAATLNAQKPMALPFNFPKASRNNENNSHAENRVEPSQSVRPGHHLPSARMEALVPSNVKVSSMMRRPKKRKTMDSTLVSWHKIIESPRKLRGISTPEMDWAWAANRLIEKDEAETPDDAPLNYLPRKRLILTSQLIQQLLPAIPATILRAQAVSAYGSATYTLSMLTLRDACSMASSSYNSCSPVEDENNPSEQPSAKKMEDRVSKVVEVFVGRIRKMENDFISLNKRASMLDVQLECQDLERISIVNRLGRFHGRSHAAAVESSSAPEMTPRRIFPERHVMSFAVPGNLPEGVCCLSL

SEQ ID NO: 54570 - protein, 62 aa, Zea Mays
MMISVLCLGWANLETDTLEQMIISHRRHSFVTIKIVSGSCDMKPWLRRILQFLRNLYQHSKL

SEQ ID NO: 54571 - protein, 145 aa, Zea Mays
MTFYTNMDLNASPVPDDDEQQPYDDSVEVGYAQTEHVESAVATLRREREERRKRLKREQQDDGSRLHSQQIRNDYAPQPKRHSRIKEAPQGWLDCPAFGEPIDKIIPSKVPLDETFNESVPPGKRYSSKQLVNKQRKAGREVRKC

SEQ ID NO: 54572 - protein, 226 aa, Zea Mays
MFEEIFKGVILLVAYFNSGSGVTVTSRESVTRSEGSCTSEVMRVLPYLKKAYGNAMQKVLHVGPDSCTVVSNLLKEGKVEAWGVEPYDLEDTDSTCKSLVRKGFVRMSDIKFPLPYRPDSFNLVVVSDALDYLTPRYLNKTLPDLARVSTDGLVIFAGNPGQQKAKVSELPKFGRPAKLRSSSWWTRYFVQTGLTENEGPLKKFEDATSKNKYKPGCQIFHLSSPR

SEQ ID NO: 54573 - protein, 128 aa, Zea Mays
MSILRTIYEELPPEYKERLQVFYFLHPGLRSRLAIATLGRLFLSGGLYWKIKYISRLEYLWGDIKKREVEIPDFVIEHDKVLEHRPLTDYGIEPDPLHLADVPAVGYSLGRYEDKWTPEDRWYSRNYM

SEQ ID NO: 54574 - protein, 1258 aa, Zea Mays
MSQSVANPARSAGLRVPMETTEAAAAHPQKDSVKVAVNIRPLITVELQDGCTDCVTVTQGEPQVQIGPHVFTFDHVYGSSGPSSSLIFEQCVHPLIDALFSGYNATVLAYGQTGSGKTYTMGTNYSGEENCGGIIPQVMDTIFRKVDTSKDGSEFLIRVSFIEIFKEDVFDLLDANQAAVRLDAGSMAKASAPGRVPIQIRETATGGIILAGVTEAEVKSKEEMASYLTRGSSSRATASTNMNMQSSRSHAIFTICVEQKRTSGTSDKSASSDYDILSSKFHLVDLAGSERAKRTGADGHRLKEGIHINKGLLALGNVISALGDEKKRKEGAFVPYRDSKLTRLLQDSLGGNSKTVMIACISPADINAEETINTLKYANRARNIQNKAVVNRDPATAEMQKLRSQLEQLQTELLFSRSGSAALEELQLLQKKVSLLELKTSELNNELKEKELSCEQLAERAQAAQLERDQLMLKIESVRNGKSLDDIENIDNDQDMDLLKGYISKIQQLESALMRQNFSNACRHGLHDQLAMDQDIFLNELGSGCEVETTDASNEVDEEEKEREHSFMQDQLDKELQELDKRLQQKEAEMKQFAKSDTSVLKQHYEKKLTDLEQEKKALQKEIENLRHALTNISSSMDDNAQKVKENYLQKLNALESQVHELKKKQEAQQQLLRQKQRSDEAAKRLQEDIQRIKSQKVQLQQKIKQESEQFRSWKAAREKEVLQLKKEGRRNEYEMHKLLALNQRQKMRKTEEAAAATKRLKELLEAKKSSRETYGSANGSGMQALIRAIDDELEVTVRAHELRSYYERQMQERAAISKEIAKLKEESKHKISDCPQAMSPSARSSRISALENMLSSSSSAMVSMASQLSEAEERERVFNGKGRWYHVRSLPEAKNIMNYLFQLASSARSQVLDKEVICNEKEHTITELKEKVVVLNGGIRQLETQVRDLRSQNTQLFTALNNAKKSARSNGTGFAGRKSVRSSQHFGYSKDNFNWVDDMDISDSEHSDELENMSDGSDSDWVQSTRKAKKHQRRVSSHSNPNLDCQNTQGSAEPEKPSDEKCILPKYISSDGCSCSKSSSCKTNKCECRGSGAQCGAGCGCKDSKCSNRDSSTIEKANQGAMLLQTAFSEKEAQDAKPRKPLTNIGNNVVNQTAETKKPRKNRRKSAIQLVPGPLLPSEPVATEAAPRDIANIPLKLPRAMSSVTPAESNPPLTDRNAAKPDESVSTGSKNSTGAAATRAPSQLRKNATTEKENQLR

SEQ ID NO: 54575 - protein, 64 aa, Zea Mays
MESHRHHHRAPCGLPWMSVMVCGTWAKDVHALRTLIPLVISHRGRHYLEPAPHRNSRVRRPNSS

SEQ ID NO: 54576 - protein, 337 aa, Zea Mays
MDDSDGGLSFDFEGGLDSAPASGGGGPVPSSTDPGAGVGGGGDGLGMHGRGRGRGSYRQTVCRHWLRGLCMKGEACGFLHQFDKARMPVCRFFRDFGECREPDCAYKHSYDDVKECNMYKMGFCPNGPNCRYKHIKLPGPPPSVEEVLQKILQMRSFNRYSQNRNNNYNHQGERPQHPQGSGLPNQNSAENATAVDPPAGGQQAQTLNQQPPQQQQKPNTNDQAQGVSNGHQATRIATPLPQGPSRYFIVKSCNRENLEISVQQGIWATQRSNEAKLNEAFESTENVILIFSINRTRNFQGCAKMTSRIGGYIGGGNWKSAHGTAHFGRNFSMQWLK

SEQ ID NO: 54577 - protein, 328 aa, Zea Mays
MRTEEVEWEHKSKEARKMHACGHDAHTAMLLGAARILHERRNDLQGTVVLLFQPGEEVGIGAKRMVEAGAVENVEAIFGFHVTVLLPTGVVGSRTGPLLAGCGFFEAVITGVGGHAASPHNTVDPVLAASSVVLSLQSLVSREADPLDSQVVTVTRFLGGGAFNVVPGSVTIGGTFRCFSAEGFLRLKRRIEEVVVAQSAVHRCAASVDFSAGGSPLLPPTVNAAPLHAHFEAVAADTVGVGAVRGAMEPCMGSEDFASFSAAVPASHFYFVGIGNEAIGAVHAAHSPHFLVDDGALPYGAAMHANLAIEYLRNHAIANRSVGPHDEL

SEQ ID NO: 54578 - protein, 142 aa, Zea Mays
MRCSGPVMAVPARACFQTTTAATPRACFWGRGMARARARLPMADERSPIRSVADPVLACLRAGVGTCLSASAGPAITCLLTAVAGTACAPARMLGGRGARPRARGHGGARTCACLRQHTPARLVVATPACVSCSLSAQSAAA

SEQ ID NO: 54579 - protein, 521 aa, Zea Mays
MAAIINKSTHMDIMPSPRDNSAGSGQEDGGSRDFEFKPHLNSHLAAPSVNNQNHHDTMQKYSSNHTTPSSNLKTENKPLCSRESSHTAHASIAPNQTVSIVCPSDNMPAEVGTMEMHQINSSENATQETQIENVAEKSAEDGYNWRKYGQKHVKGSENPRSYYKCTHPNCEVKKLLERSLNGQVTEVVYKGRHNHSKPQPNRRLAAGAVPSSQGEERYDGVATIEDKPSNIYSNLCNQVHSAGMIDTVPGPASDDDVDAGGGRSYPGDDANDDDLDSKRRKMESTGIDAALMGKPNREPRVVVQTVSEVDILDDGYRWRKYGQKVVKGNPNPRSYYKCTNTGCPVRKHVERASHDPKSVITTYEGKHNHEVPVSRNASHEMSTAPMKPAVHPIKSNMPGLGGMMRACDARAFTNQYSQAAESDTISLDLGVGISPTHSDATNQMQPSVPESMQYQMQHMAPVYGSMGLPGMPVTAVPGNSASSIYGSREENGNEGFTFKAAPLDRSTNLCYSSAGNLVMGP

SEQ ID NO: 54580 - protein, 254 aa, Zea Mays
MFGPIHLDIPDALDCQNDAAFVDLFPDNAKNYVENDAVAALASGTMGKLHGCVLIAGTGCIAYGVTEDGKVARAAGAGPVLGDWGSGYGIAAQALTAVIKAYDGRGPQTRLTRDILEKLDLSSPDEIIGWTYADPSWARIAALVPVVVSSAEDGDEVANKILHDSVQELADTVIAVVQRLRLCGEDGKDMFPLVLVGGVLEGNKKWDISGEVIKCISKVFPGTDPIWPEVEPAIGAALLAWSHHHKGLKLENGS

SEQ ID NO: 54581 - protein, 862 aa, Zea Mays
MTCAACVNSVEGILKKLPGVKGAVVALATSLGEVEYDPSAISKDEIVQAIEDAGFDAALLQSSDQDKVLLNVQGLHFEEDVDVLHDILKKMEGLRQFGVNFANSEVDIVFDPEVVGLRQIVDTIETESNNRLKAHVQDPYIRAASNDAQEASKTLHLLRFSLFLSIPVFFIRMVCPRIPLISSFLLMHFGPFRIGDLLRWILVTMVQFIVGKRFYVAAYRALRHGSTNMDVLVVIGTTASYVYSVCALLYGAFTGFHPPIYFETSAMIITFVLFGKYLEVLAKGKTSDAIKKLVELAPATAILLLKDKEGKYSGEKEIDASLVQPGDVLKVLPGSKVPADGIVIWGTSHVNESMVTGESVPISKEVSSLVIGGTMNLHGVLHIQATKVGSGTVLSQIISLVETAQMSKAPIQKFADYVASIFVPIVITLSFLTFLAWFLCGWLGAYPNSWSAESSNCFVFSLMFSISVVVIACPCALGLATPTAVMVATGVGASHGVLVKGGDALERAQNVKYVIFDKTGTLTQGKATVTATKIFSGMDLGDFLTLVASAEASSEHPLAKAILDYAFHFHFFGNLPSGKDSIKRRKEEILSQWLLEVVDFAALPGKGIQCWINGKKVLVGNRALITENGVNIPEEAERFLVDMELNAKTGILVAYDGDFIGLVGITDPLKREAAVVIQGLKKMGVHPVMVTGDNWRTARAVAKEVGIDDVRAEVMPAGKADVIHSLQKDGSVVAMVGDGINDSPALAAADVGMAIGAGTDIAIEAADYVLVRNNLEDVITAIDLSRKTFIRIRWNYFFAMAYNVIAIPVAAGALFPFTGVQMPPWLAGACMAFSSVSVVSSSLLLRRYRKPRLTTVLQITVE

SEQ ID NO: 54582 - protein, 740 aa, Zea Mays
MEGLTLIDVSVEDDLLFDIASPPHAGSLVGAVATSSGAFPSAAGRAPDPDSVMEEQALPERTDSPEQRKAKKGVNLRKSLAWDSAFFTSEGVLDTEELAIVNSTFRKTQGSRLPGIVEEMSRSGESATSTLESESWVMESVETELFDNVRASIQRSLGKPDKVPGRPVAGSNHPKATANVPRVAVAARKGVDRMPQPKIRAPVSTSQGAGVRQRAQVTTKEPVAARVNLLGAAEAKISSKPPRALPRVAMMRSSTTTAVTSGVSDKRSSTGGAANRQAAGKTASTSAGLRSGGGTKSSSISKSGPFTSAATSHGVSMDTKPEAKTKSATLSNKNRTAQRVPVHPPSKSGISKTIPSRSSGNTIPAKGHADRASPSISPSSSMDSMSSVISGASTASTVGRMSHTSESLNGLSPSLRKSNDCPPTPKLRPPVVTEGHSSGTAAPGVNLKATSEMTNQRKGFKPSGLRRPTPKIGYFDAEKYIDQNIGAQLQPQPSKVQCLPDTTQFQSMNVDAAPATYVQQDSKLTATPHEESCASESKVVKLLPLKVEVEPFKVAEPCTHQTDPVVVRPEAVQQQSMEIQCLLYATPNSQQTFGQQVLEPIVAPHEVSACKSNTVKTPLETVQMEVEAPLEAVQLEAEAFKVDKPEACRHLVSPIVVKLEDKFCDQNARALVAEREDCTLMTEAVVALATDYSKENIPVLHENIQANVDASSLVEVLTQKLSSISLGEDNSNVALRSCSE

SEQ ID NO: 54583 - protein, 341 aa, Zea Mays
MSTQRHAEGKVNSMRREDFSNTERVVSRDNERMYERVVSRDNERMHSIARNGSNQASTSKTTIQKHPSRGPIANKQPSKDSNDATLRKSSVASKHHPLEIDRPKSSQSQRMQSAGQRPQHSSHGQTPHQSMQHRTQQSLQSRRPQQMTQGQKPQQSLQSQRTQQSLQNRRPQQSSHIQKSQSSQAHRPQSLSNRSQALQGQRPLSSQGQYPEQRRVHASDRVKQAERQIRPPSKSMPSRPVSSNGIRDDHAKRKQVAKRRFDEDDEDPLAMIRNMFGYDPSRYAGRDEDVSDMEADFATIEMEEKRSARIARQEDEEQLRLIEEEERREQERKRRKMARGR

SEQ ID NO: 54584 - protein, 93 aa, Zea Mays
MRPPITPVLRGRPNSKRSIHICGRPRRVFVIFFSAVSCILWLTSCSLLTVLWALLIALFATVLHASFRTPNLKARLNTFREEFRAVWRNYSEL

SEQ ID NO: 54585 - protein, 249 aa, Zea Mays
MDHPHNAVLLVCSSHEKGCRPFMCDTSSRHSNCYDQYRKASKDSRTECSECQQQVQLSCPLCRGPVSDCIKDYSARRFMNTKVRSCTTESCEFRGAYQELRKHARVEHPTGRPMEVDPERQRDWRRMEQQRDLGDLMSMLRSGFNSNIEDDSGGLGDTEEGGEEAEMTPASITMVFIMPSRGSIMQYLSERSRTIILVSRRRASSSSGGDAEATAPDSEEGDDPMPSAEASAGSQHSSEQEEADGDPAQ

SEQ ID NO: 54586 - protein, 495 aa, Zea Mays
MDLRWPLLKPRDFQENRLLMSFVNFHEQEKISKEIVTHAIESCMKKQADNLLNSLDVISGRLSQLELYCYRLERSIGELRSDVMDYHNEANLNFRCVEKQVKEVQKSVQAVQEKQELAETQKEMTKLQIVHEDSAQKSEGTAPSVFMNRENEVALVPLHQVNAVQSPPVQFQSCSGLILQQLMPVQDQQRSNQTAVYCMRGQSHLEHRQAQMFEAAGQSLQTHTRKTQPPTVVEVSQVTSQAPEFYPHPQHQWQHQTGQQVFSQARQPQPHVLQQQYSNIQQGPAQMVQLQTSSPHAHSTPQVTVVYPPYGPHQSACGNAEARSGGIVVPPSYSTISSSHRKHHEAAPVYVQSNTVSVPLAEQHQQLHSLGNGSFVPQPSKVSPCGLASYTVQGNAQTYSPAYGSPSSNPATIVAVLNQQAHGSSPMVLHHLGPQSVLNHPIDIAEKVTRMGYSKDQVEGLALRMVAAGQPADHNPLHDRLSSVSHGVAPHAWSG

SEQ ID NO: 54587 - protein, 1007 aa, Zea Mays
MKLILEKVKSLCEEFLEYILKNHQISQEPKGILHAFNLALCWRAASLSKHKINHTESLALAVKNLNYECKEELVDFVYGKLKILKKKFARRAGEVSKQNYMVSVSDISTCEQVTSVRLRNDELVPSQVTLTDGNFENGSHHEATGDFWTEEMVSGEKELLPDPVTHEGEHLLRDELLSKIMDKRIKLVDKVFSLRGRSIYDKHSNQVSFLDMHRQKVVDKLRRACSLVVEHLRSSQNHIAQEDRDGKIKLIIEWFTMLLYAFLEHMKCQRNRLDMQQSASRIKESQLKEETLQAARCGQLDQNFDQHIPSPDFEFAMEEFRHFREVVGSCYVDPAALVPESLDDNSAMEIMLVQSATDAEVIEEVLNRPTEVLVQGPASEVVGPSVDVICNCSDGINSQRDASLAVHSLEPSSDDLRSTDHVEENTVGSQIQGGTSKHLGDAAMEVETGNRNTALADSPHFDKPALTAPSRQATLLVSRETEMLSNLVDQCAQQSLVSAQPLQDESEQADLSSAASTQPLQSERQQLISVSNNLLERAQLDQSQPNYQTDAAPGCAQSTELFPVTSMMFNHAPIDSEPLKNELHKLRLHMDTLNKVHEMKKTQLQTACSQELEKVKRKYDLLIKEHDSTHLQQKKALGDFYEKVQRNQSLAEDFRAKFISLSAAQGAAKGHTPPVRHTPQATQVVSSTSSIALSSACRPPVPRPRVQAPQVDQPLLSLSQFSRPSLQVVQPPNLELGNLFRATSTTLSHMPPQRGSYGVQSELAPRSPAPHLQFRSPRAHSMAPGNQQQSPAISVDAMSSRTQPVLAASTSPSDIHVGPLAASALSSLHSVLPSTSLPSSLHPSHLAQRVPPTPNPTLQAGAPKGSNATMPSIPTGMQLPDSGSLSLDAWLTANLGLNDASTAPAKDTASLGLSSDAPRAAPDTNTASLGLSSDVPRGTAPATNTASLGLSSDVPRGTTPATTTTSLGLISDSPRVIAPASSNSPGAIASATNGGSEIDVVCLSDDE

SEQ ID NO: 54588 - protein, 887 aa, Zea Mays
MWSAPLKRTGLDGTEYSLVLLDTEGIDAYDQTGTYSIQIFSLAVLLSSMFIYNQMGGIDESALDRLSLVTEMTKHIRVRASGGSCTSSYKPSNINLRPCYASDTFGVRRADDTVLPLLQDFYLDLAEDNRKITPRDYLELALRPVQGGGRDISAKNAIRDSIRALFPDRECFTLVRPVNNEKDLQRLDQLPIALETYLHFKQFDGIYKLCLSLHDLSNFRPEFRSGLDAFTKFVLDRTRPKQLGATTMTGPILAGLTQSFLDAINNGAVPTISSSWQSVEEAECQRAFDSAVGTYNSSFDHKKHIEEDSLREAHEDAMRKAISAFNVSAVGAGRQLEHIDAERNALRLKCNSSDDKLALLRKQLEASESHRAEYVRRYEEVLNDKQKISKDYSIRITELQAKSSKLEQRCLSLSSSLETAKRESNDWKSKYDHGILQQKADESKLKSQIASLESRVSISEGRLSATREQADSAQEEASEWKRKYEVAVSEAKTALQRAAVAQERTNKKVQEREDALRVELANQLSEKEEEIARLHAKRSQMEIHATSLISRLEATEAKSKSHESDSLALREEIRLLTDNLESIRSEALSREKEVGILEQEKNHLEEKYLSQCKKFDETDIRCKEAEREAKRATELADVARVEASAAQKDKGEAQRLAMERFALIERMERQVEALERDKAKLVEEIERLHQSEKDAVSKVALLERNVGEREKEIDEMLKQNNQQRSSTVQVLESLLATEREARAEANKRAEELSLMLQATQGKLDMLQQETTLDSKLKTSARRLRGDATESVHDMDIDGDNGRRRKRSKSTTSPFKNNHTEDGGSVFIGEDTYNGSQQGTESEDYTKFTVLKLKQELTKHGFGAQLLQLKNPNKKDIVALYEKHVIGK

SEQ ID NO: 54589 - protein, 151 aa, Zea Mays
MYIFGGNHNGRYLSDLQALDLKSLTWSKVDAKLQAEPADSTKTTQIAPCAGHSLISWGNKFLSIAGHTKDPSEGVTVKEFDPHTCTWSIVRTYGKPPVSRGGQTVTLVGTTLVLFGGEDAERCLLNDLHILDLETMTWDDVDAIGFYNGSR

SEQ ID NO: 54590 - protein, 60 aa, Zea Mays
MHLANWLCDNYLKDSLATLIVENMHLHILPTMNPDGFALRWHGNANNIDLNRDFPDQPKL

SEQ ID NO: 54591 - protein, 909 aa, Zea Mays
MDPRRLPILLSLLLAFFSAVVASDEIHGCGGVVEASSGLAKSRKASDSKLDYSDITVELCTVDGLVKESTQCAPNGYYFIPVYDKGSFMVRVKGPKGWSWKPETVPVIIDHNGCNGNADINFQFTGFMISGKVVGAVGGKSCSKRGGPAGVKIELMTDSDELIASALTSSSGEYSFTNIIPGRYILRASHPDYEIELRGSPEIDLRFGNAVADDVFFVSGYDIYGTVVAQGNPIVGVHLYLYSNDVTKVPCPQGFSDAPKEGALCHAISGADGKFTFRSLPCGSYELLPYYKGENTVFDISPSSLSVSVEHSHLTIPQKFQVTGFSVGGRVIDGYGAGVESANVIVDGQLRAITDSLGYYRLDQVTSKKYTITAEKDHYKFNRLEDFMILPNLASIDDIRSVRYDVCGIVRTVTLNSKAMVTLTHGPENVKPQRKLVGENGHFCFEVPAGEYQLSALPVDSERSSSLMFSPGSISVNVNSPLLDLEFSQSQVNVHGKVSCKQQCSQNILVSLVRLAGGVEQEKKTTTLEQDNVNFVFKKVFPGKYRVEVKNSLPEGLAKDDWCWDQSILNIDVGTDDVRDIVFVQKGYWIELVSTHDTNAYIQQPDSSRLDLLIKKGSQRICVETSGQHEIHLTNPCISFGTSSVLFDTANLMPIHINAKKYLVKGEIHVDMSSIQENIDSKDIVVDILKSDGSFIEKISTSLVLGKDNQNDFTAFEYSIWADLGEDFIFVPHDSSIGRNKVLFYPARQQYSVSMNGCQDTVPLITARTGLYLEGSVLPATSDVDIKILAAGKSNYAHLNKGDVATEAKTDSEGSFFAGPLYDDIVYKVEASKDGYHLKQTGPYTFSCQKLGQILVRIYGENSELLPSVLLSLSGEKGYRNNSISSSGGTFTFDNLFPGSFYLRPLLKQ

SEQ ID NO: 54592 - protein, 159 aa, Zea Mays
MPCWVFLPRSMCSRDVWELVRSFDQPQRYKPFVRNCVVRGDQLEVGSLRDVNVKTGLPATTSTERLEQLDDDLHILGVKFVGGDHRLQNYSSIITVHPESIDGRPGTLVIESFVVDVPDGNTKDETCYFVEAVIKCNLKSLAEVSEQLAVESPTSPIDQ

SEQ ID NO: 54593 - protein, 955 aa, Zea Mays
MLPKAELQLNFQKRRGHGLLSIIRPKFSGVLGEALDIAARWSGDVITMEKSILEQANSKYEVQGEYVFPGTRDRFPVESQSNGFIEKAMGGHLGSIMSSMGRWRMRLEVPGAEVAEMLPLARLLSRSTDPVIRSRSKELFMQCLHSVGFNAESLNDQLKALEIYHDWLDDDTMEDIAFPGLAELRGYWRGSLDASGGGNGDTMADFDFNGEDWEWGTYKTQRVLASGSFSNNDGLRLDKLFIQKDNATLHADGSILGPLTNLHFAVLNFPVGLIPALVQAIESSTTDSIHFLRQWLTPIKGILHMEGDLRGTLAKPECDVQIRLLDGTIGGIDLGRAEVLASVTPTSRFVFDANFEPTIQSGHVNIQGSIPVTYVDNSSIEESPEEADGKQGIIRIPVWARDRGSSNEISEARMVRDKTEEGWEFQLAEKLKGLSYNMLEPGEVRIDADIKDGGMMLITALSPYANWLQGYADVFLQVKGTVDQPVVDGSATFNRAIVNSPFLRTPLTNFAGTIQVISNRLCISSMESRVGRKGRLSMKGSLPLKNSEPSANDKIDLKCEVLDIRAKNILSGQVDSQLQVTGSILRPDLSGMIRLSHGEAYLPHDKGNGAAVTRLTSNKSSYLLSGFDQSTTSQDVSRILGSLSTSAERDQSDTEKTLEHGSFNPNIDARLNDLKLTLGPELRIVYPLILNFAVSGDLELNGMVHPKYLRPKGILTFENGEVNLVATQVRLKNDHLNAAKFEPDLGLDPVLDLVLVGSEWQFKIQSRASMWQDNLVVTSTRSVDQDVLSPSEAAKVFESQLAESLLEGDGQLAFKKLATATLETLMPRIEGKGEFGQARWRLVYAPQIPSLLSVDPTVDPLKSLANNISFATEVEVQLGKRLQASVVRQMKDSEMAMQWTLIYQLTTRIGCSSCVVQRLGGLIIVFFVDKQALISCTCTIAQLYCIYILSRKQSF

SEQ ID NO: 54594 - protein, 311 aa, Zea Mays
MLIGEQPTGTAATKAAMPTPVQMPDLIDTGDQDDLATSSGHASIEQNSGNSAYVSSVDDLLGGEPISDTSVTADSNGSDPFADVSFHEAETKETNDLFSGLTVEEKSSTTMHDSSSDKNELPDIFGSSPDSFNQGSVTDQGTVNDLIAGLNLNGTGHAQSAVKAEPNSNSGSQFFDTKNESGHVPSAATLNDILGQNSLYQQQQTPLQYSFPQHMMLNQSFPGQQLNYGAMGILLAQQQQLLQSFGNFNAGLGNSSFNSMNGGNTSVLPDIFNSSNQPQNHVAVMSSSKKDDNKAFDFVSDHLAAARGSRK

SEQ ID NO: 54595 - protein, 543 aa, Zea Mays
MDMNNGWLGFSLSPSAASRGGYGYGDGGGGASASACGDGEGSCPSPAAAASPLPLVAMPLDDSLHYSSAPDWRHGAAEAKGPKLEDFMSITCSNKSSGRSLYDSCGHHDDEQASKYHEVHGIHPLSCGSYYHGCISSGGGGGGGIGLGINMNAPPCTGGFPDHQHHQFVPSSHHGQYFLGAPAASAGPPAGAAMPMYNAGGGSVVGGSMSISGIKSWLREAMYVPPERPAAAALSLAVTDDVPPAEPPQLLPAPLPVHRKPAQTFGQRTSQFRGVTRHRWTGRYEAHLWDNTCRKEGQTRKGRQVYLGGYDREEKAARAYDLAALKYWGPSTHINFPLSHYEKELEEMKHMSRQEFIAHLRRNSSGFSRGASMYRGVTRHHQHGRWQARIGRVAGNKDLYLGTFSTQEEAAEAYDIAAIKFRGLNAVTNFDISKYDVKRICASTHLIGGGDACRRSPTRPPDAAPALAGGADRSSDAPGDQAASDNSDTSDGHRGAHLLHGLQYGHPMKLEAGEGSSWMAAAAAARPVPGVHQLPMFALWNDC

SEQ ID NO: 54596 - protein, 904 aa, Zea Mays
MAVVNPTNLAIDDDDDDTPISFKRTSNSTKTARPTPSKHEGSSGGNGAPVRIPKPVSPNPQKNGATGASRPLHMKPPSSSPNHRPSGSGQPNSLAQHSSKANSIDMSKLKRPLVKDERSDDSDDEVPIGLRRKVEEKKLKGVDTRVQKTDDSDDDDKPLGLKINSSRMSSNRVNKPVLQRTVPKVEQPDEDSDDDKPLASRLPSNAGPKSGGDVSEDSEDEKPLAARFSKVAGSGNPKIASSSKGLTSDTNGQQSLGKRPLDNSNQTSSALKKAKPSNVSASAIVRREIKTDDNTPLAQRLKMGESSKGKSSAKSVFKKSPASVKKDIKKMKGKGKLKKNMKNSQFSKIMKVPPGSGGGKKWTTLEHNGVIFPPPYKPHGVKMLYNGKPIDLTPEQEEVATMFAVMKDTDYAAKPTFIDNFFTDWRKVLGKNHIIKNFELCDFTPIYEWHLREKERKKQMTTEEKKTLREDKLKQEEKYMWAVVDGVKEKVGNFRVEPPGLFRGRGEHPKMGKLKRRILPSDITINIGKGAPVPECPIPGESWKEVKHDNTVTWLAFWNDPINPKDFKYVFLAASSSLKGQSDKEKYEKSRKLKGHIQRIRENYTKDFKNKDVTRRQIAVATYLIDKLALRAGNEKDDDEADTVGCCTLKVDNVTCMPPNQIQFDFLGKDSIRYFNTVEVEELVYKAIEGFRAGKKPGQDLFDKIDTSRLNAHLKDLMPGLTAKVFRTYNASITLDGILHEETEDGTVLEKIAVYQRANKEVAIICNHQRSVSKSHESQMTRMNEKIDELKSQMEELKADLNKAKKGKPLGYDSEGKPKRNLAPEAIQKKVATLEGKIEKMEMDKRIKEDLKTVALGTSKINYLDPRITVAWCKRHEVPIEKIFNKSLLAKFVWAMDVDPEFRF

SEQ ID NO: 54597 - protein, 325 aa, Zea Mays
MIAESGKDHKDITSLLRLGKTLTIDNETFEDLDEVIDRYVDPLVGHLKSMLSYRKFRKGLKNEVDEMLRAEKAENPMRIVYSFGISHEHPGTFILSYIRSTNPHHEYIGLYPKGFRFRKRDFDNIDRLVSYFQKNIDKPPPDAGPSMRNVAAMVPMKNSAWGSGGGGDANGGWRGDGSNDRDRPFSGRSGGRFDSRNSSGGRGRGRGRGRGNFGDDDNAGGGWSGGGGGGNSGRWTDNIGTGGSGGSSWGGGGGGDDSNRGGGGGGWGSAGGGADNAGGGNGAWGAAAGGSDDPGLGSAKKVVPAQDGGTGWGSEGGGGGGGGGW

SEQ ID NO: 54598 - protein, 105 aa, Zea Mays
MGQVRFIVPRLVIGVVIQLLCSYSTLPLYAIVTQMGSCYKKEIFNEHVQQGVLGWAQKVKMKKGLKGAASASKDESITNADSAGPSVKIEMAKAGEDVEIVGNTG

SEQ ID NO: 54599 - protein, 75 aa, Zea Mays
MERKRNPIVFLDVSVGDEPDERMIFELFADVAPLVTENFRALCTGELGIGHKTKKPLCYKGSSFHRVIEGFMAQD

SEQ ID NO: 54600 - protein, 191 aa, Zea Mays
MLGLSAAAMKSKLFADQEEREVQRLTATVINHQLKRLELKLKQFAEVETLLLKECEQVERVRHRISAERVRMRSALLGPTGSGLPGGSCSTMPSNPAGMSPRPVGVPGYMPQTSMPATYANNLQGHGNPQMPFLHQRPQMLSFGPRLPLSAIQTQPSPQSSNMFNSGMPNSIAPNHHQLLRSSSGNNSSAG

SEQ ID NO: 54601 - protein, 991 aa, Zea Mays
MAILEPLMQQAFIGIDTLTTVANLYNLPRREQNKTTLLKLLFHIKNRYSDMLTPEQREEMDSRVRKLVFGEKDNVSDPSTSCGTSAINVSAPSGQVSNTGGLPFESGAANLFSSLPRLEVPAKRNSPLLNLHADYDENSLPSPTRDNAPPFPALKPIGFGAFPMVPEKLSFLDRVEPTKNSLYPPLNDPLKAVSSYQQKYGQKSVYPSDDLPSPTPSGDEGKPADKGGDIFSDVSSFPVPKSIVLPSTSQMPASQPSTVSSSSISYASSTSQMAASQPITVSSSGISYASGPPGFAKQIEQSTAGPNHAIKAASKSRDPRLRFLNRDSAGATDVNWRANFSELKDGNLGGVSVGNRKQKAVDDPQVDDNALKRFRGGIANQRDMQPTGNPNQLMNIRAPTHSSSINMKTLQPPQTTAPHVSAAPAVPLPPMLLKDIAVNPALLMHLIQMEHQKKSASESQGGMSSGMTNNGIAGMVFTPGNAPKITEAAQVPSVRPQVPVQTPPLNSQNDGGIVRMKPRDPRRILHNNIAQKSDAMSLEQVKNNGTTQPDSQGTKDQTTPVPSQPALPSSIARPFSSAKHVDPVSNSQLAATAIMAPTQALSSVNKVDPRLAVEQNGQNADATTNGASATTLEATQPVSPWGDVDHLLDGYDDQQKALIQKERARRITEQHKMFSARKLCLVLDLDHTLLNSAKFIEVEPIHEEMLRKKEEQDRTLPERHLYRFHHMNMWTKLRPGIWNFLQKASNLFELHLYTMGNKLYATEMAKVLDPTGTLFAGRVISRGDDGDPFDSDERVPKSKDLDGVLGMESAVVIIDDSVRVWPHNRHNLIVVERYTYFPCSRRQFGLPGPSLLEIDRDERPEDGTLASSLAVIERIHHNFFSHPNLNEADVRSILASEQRRILTGCRIVFSRVFPVGDASPHLHPLWQTAEQFGAVCTNLVDDRVTHIVANSPGTDKVNWALSKGKFVVHPGWVEASALLYRRANEHDFAVK

SEQ ID NO: 54602 - protein, 121 aa, Zea Mays
MMRRKRLFGMINELQTVFEVVSGARQQQSKERSSMDNGGRAKPVKIENNGKVTDEAYEDDSDHGETLCGTCGGIYNADEFWIGCDMCERWYHGKCVKITPAKAESIKHYKCPSCSSKRARQ

SEQ ID NO: 54603 - protein, 346 aa, Zea Mays
MKKKGKAGEEVGEKEASSNDRITGDPSVHNGVISAVYNVSPVALAKSVKNDAEIEGMKNSHLRDAAALAEFWCWLEEEICKSVPLTEVQIAEKLLEFRQKQDGFIETSFDTISGYGANGAIIHYRPTPESCSSVGSDNLFLLDSGAQYIDGTTDITRTVHFGEASPRQKECFTRVLQGHIALDQAVFPERTPGFVLDVLARSSLWKIGLDYRHGTGHGVGAALNVHEGPQSISYRYGNLTALQKGMIVSNEPGYYEDNSFGIRIENLLLVKELNLANSFGGISYLGFEKLTFVPIQSKLIESSLMSPSEINWVNDYHEEVWEKVSPLLSGHSRDWLWKNTRPLLDV

SEQ ID NO: 54604 - protein, 1017 aa, Zea Mays
MAGVCGSPFCSREASAPAPASCGRWDELLNSSTCANNILATGAAALLAVVLALQLLVRVARNGLRHAPVVALSSPLQRAAVAANACLGLAYLGLAAWMLGTDLTQRASVYLPHRWLVSLAQGLCLLLAGFAFSVRAQLLGAAFLRVWAALLAAYAAFVCCTSVVHMVADKVLAVKTCLDVLSLPGALLLLVYGIRHAREEEEGDGNGGTESSLYKPLNAEAHDDGAADSRVTPFAKAGVFSIMTFWWLNPMMKKGYEKPLEEKDMPLLGPSDRAYSQYLMFLDNLNRKKQLQAHGNPSVFWTIVSSHKSAILVSGLFALLKVLTLSAGPVLLKAFINVSLGKGSFKYEGFVLAAAMFAIKCCESLSQRQWYFRTRRLGLQVRSLLSAAIYKKQQKLSGSSKLKHSSGEIINYVTVDAYRIGEFPYWFHQTWTTSVQLCIALGILYNAVGLAMIASLVVIVLTVICNAPLSKLQHKFQTRLMEAQGVRLKAMSESLIHMKVLKLYAWETHFKKVIEGLREIEIKWLSAFNLRKSFNGFVFWTSPVLVSAATFLTCYLLKIPLDASNVFTFVATLRLVQDPIRQMPDVIGVVIQAKVAFTRITKFLDAPELSGQARKKYCVGDEYRIVMNSCSFSWDENPSKPTLKNINLVVKAGEKVAICGEVGSGKSTLLAAVLGEVPKTEGMIQICGKTAYVSQNAWIQTGTVQDNILFGSSMDRQRYQETLERCSLVKDLEMLPYGDHTQIGERGVNLSGGQKQRVQLARALYQNADIYLLDDPFSAVDAHTATSLFNEYVMGALSDKTVLLVTHQVDFLPVFDSVLLMSDGEIIRAAPYQDLLAHCQEFQNLVNAHKDTIGVSDLNRVRSHRTNENKGSIDIHGSLYKESLKPSPADQLIKTEEREMGDTGLKPYILYLRQNKGFFNGSMGILCHVIFVCGQIAQNSWMAANVQNPDVGTLKLISVYIAIGFITVFFLLFRSIALVVLGIQTSRSLFSQLLNSLFRAPMSFFDSTPLGRILSRI

SEQ ID NO: 54605 - protein, 720 aa, Zea Mays
MDFIREVDPDIIIGYNICKFDMPYLIERAEVLKIAEFPILGRIRNSRVRVRDTTFSSRQYGVRESKDVTIEGRVQFDLLQAMQRDYKLSSYSLNSVSAHFLGEQKEDVHHSIISDLQNGNPETRRRLAVYCLKDAYLPQRLLDKLMYIYNYVEMARVTGVPISFLLSRGQSIKVLSQLLRKAKQKNLVIPNIKGQGSGQDTFEGATVLEARAGFYEKPIATLDFASLYPSIMMAYNLCYCTLVPPEEARKLNLPPEFVNKTPSGEIFVKPELQKGILPEILEELLAARKRAKADLKEAKDPLERAVLDGRQLALKISANSVYGFTGATVGQLPCLEISSSVTSYGRQMIEHTKKLVEDKFTTVGGYEHTAEVIYGDTDSVMVQFGVSTVEDAMKLGREAADYISGTFTKPIKLEFEKVYFPYLLISKKRYAGLYWTNPEKFDKMDAKGIETVRRDNCLLVKNLVTECLHKILVDRDVPGAVQYVKNTISDLLMNRVDLSLLVITKGLTKTGEDYAVKAAHVELAERMRKRDPATAPTVGDRVPYVIIKAAKGAKAYEKSEDPIYVLDNNIPIDPQYYLENQISKPLLRIFEPILKNASKELLHGSHTRSVSISTPSNSGIMKFAKKQLTCLGCKAVISGASQTLCSHCKGREAELYCKTVANVSDLEMLFGRLWTQCQECQGSLHQDVLCTSRDCPIFYRRRKAQKDMTEARLQLDRWDF

SEQ ID NO: 54606 - protein, 571 aa, Zea Mays
MKKFHESIAQLEQALCDFPYDKLDISDEAREQVELVHAQLKRAKERVDMPDDEFYNELCSLYNKSHDPSAELDILGRLSEKLHLTTIADLTQESLALHEMVASGGGNDPGEHIEKMSMLLKKIKDFVQTQNPETGPLVTAKPMGSNGKPRPVNVPDEFRCPISLELMKDPVIVATGQTYERALIEKWLASGHHTCPSTQQRMPNTTLTPNYVLRSLITQWCEANGIDPPKRPTQQPDRPTSSCSSSERASIDALLSKLCSADPEEQRSAAAELRLLAKRNANNRICIAEAGAIPLLLSLLSSSDLQTQEHAVTALLNLSIHEDNKASIILSGAVPGIVHVLKNGSMEARENAAATLFSLSVVDEYKVTIGGTGAIPALVVLLSEGRQRGKKDAAAALFNLCIYQGNKGRAIRAGLVPLVMGLVTNPTGALLDEAMAILSILSSHPEGKAAIGAAEPVPVLVEMIAGGSPRNRENAAAVMLHLSASVRQSAHLARAQECGIMAPLRELALNGTGRGKRKAVQLLERMSRFLVQQQEDAVDPRVQELEEIERQLAAFGPGVTEADVLQQLGAL

SEQ ID NO: 54607 - protein, 332 aa, Zea Mays
MEADLEHSTIWTAGLYLILLLQFLENKVAVELTRSEFVEAQEALAQMKNWFTRFPTILQGCESIIENLRGQYAHSVGCFDEAAFHFLEAKKLTESKSMQSMCETYAAVSYICKGDAESSSQALELVGPAYRTMDSFVGVREKTCIIFVYGLLLMRQHNPQEARNRLASGLKIAHQQLGNIQLVSQYLTILGTLALQLHDAAQAKEILKSSLTLAKTLFDIPTQIWILSVFTELYRELEEKENEMENSEYEGKKEDDLQRRLSEAYSHSFHHELVEKSRIQPLHMSSKQPEMAVPSANGDLDIPESVGLSAPQPFLKRLVEAEPMRRSTRRRR

SEQ ID NO: 54608 - protein, 667 aa, Zea Mays
MLQPGFSSSNHHHSATPERPSLPATPGAQVLFGPFAGDERHQDASETKLMKQPTWVFFEKESVTDLREQILQLIQHDCKDQEEKSRAELLEKLNRCKRDTLIELCRSFDLIGSRANRKEELVLFLMEFIKDHCSGSDVINSDKKYKKRKRVREEENLSAGKPSKKKKREGEEEAEDRVKHSDCDLLDNKYSCADSKNGKFPNEQTNFEPSGRINYSVSENLDGASLSEAPIPTDEQAIITTPPTKFVTAAEDDSTDVKALQRKMSSIAKKKTTSKEDCKVKLCGNRESKGDTKPRKQVIKPSKDELREAVFLILDTADFATMTFGDVVKEVDKYFGKDLFERKPLIRSLIEEELFRLADEAEKKELEESEAAEAKARAEQAAKEMAQVQTVELVINEQNVLEDGRDSNTKDSLKNANDSANKKCIDGGASVEYGFNENSCYAAEGSEEHKVDDDNKNITKDGNGGKVAVAPTANTDCTLQLQGSSNVEAETTMKSNVGTLEASKDGEVRDARNGENNGTEDGGNEGIRSGNVGSNAEAEESHGHGNNERAEHTEDDKAQECSHNENSASVGILGDGDGEAREGDINAEAEQSQADGGGNSKAEDAEHNENTKTDANSSKNGTTAAGNGKTDVDVKGATAMAQLKEALCDEMDVDCKGGGVGPRLCRS

SEQ ID NO: 54609 - protein, 885 aa, Zea Mays
MEMGDDDNSSSRKCNTSSLKMLLEKEMSKEAESKRRHPSVIARLMGLEEDLPTKEPTVHHTVSDLSRDLNATNNTLQGKEHHHFIMSKTQNYQSCHEKIEYNDVFEVSEGQPGTDCFHDRTSQKGWSSENKSEQFNIARDKIMEPEQLAIEEKLLCTKELPEALVFPCSNRDLFLEFPEEHNPTFSRQSSGLHANQAPPQTKRITVLKPIRSVDSDGIRRPRAEIGKQNVLKMRRFHQIPSSKEEIPSQPSRIILLRPTPGKPGISKAKLTSRATSFQLPNRNSLNGSLDDNQASIGSAGLVHGMMQCRQDGCHQRDDSLLSSAYSNGYGGDESSFSDSEVDYTSGSEINYIEDCDTLSDSEGGSPLSRHSWNYIRRYEGQCSSSSFSKISHFSESSVVTEAKKQISERWSMVTCNEMSQVQLSRRKCTLGEMLSIKEAKEDEATTGMFYVSSNQSCGLENELTTRSTNVTTSRKNGDNGERSSKLPRSKSVPVISSTSDNMTVNMQASNPESCKLKVAVVSNKGKSAFKGRVSDFFLSKSKRPRRQMPAYHQSDCIAEGLEGCITHNRQDCNHKMDAIEKAMHYDDEFNSFSTRISTSIPDRTTSGASVSLGSSTGNLDKLGVNKCLNGNRDQPSPTSVLDAPSEDSSCNEPETLGTTTSKNAISRSSAIETVARFLSLDDTASESQSLCNPRPSSLLPDADDDESECHVLVQNIMSSAGLGTSQSRMVFAGWHLPDHPLDPVLRNKVSQLQEKSSYRRLLFDCVNVALIEIGENALLSALPWSKRSSRTWRGTSSPDLGVEVWSILKDWIHGARMFVVSKRDNAGIILDRIVKQEVEARGWVKLMMAQVVVITEELEGGVMEELVEEAVLDFYSLFSVVRYRL

SEQ ID NO: 54610 - protein, 115 aa, Zea Mays
MAPEVVNPQQTYGPAADIWSLGCTVLEMLTRQIPYPDLEWAQALYRIGKGESPAIPNTLSRDARDFISRCVKPNPEDRPSASKLLEHPFVNKSIRSVRSMRTTPSRSNSSTRGIN

SEQ ID NO: 54611 - protein, 565 aa, Zea Mays
MAESVEAVGSAESEGAEASPENVGFSPVAGRSGANIGARIGDTEDAPLKCRLRLDRQRAARGWKSRRKGERSRRGWKNRRRIPESWRGWGFAVMETEPGAKELIAGCTSVFIWKPKGCTHEVDLDKPPVLQEVANFFKGHGVGDFTFSRGRLSQWRCRAKLAVRGTPENPLIGLYQEGTHAVIDIPECRAHHPSINAAVKLLRQGITELSIQPFDEDAGAGELRYVQMAVTTYNTSIPVDKRYEQGKVQVSLVWNSRDERSQNAEKLTSIIEYLWTNGGPKSSVHLIHSIWANFQTSTSNIIFGHKWRHLKGERDMWERYGGVDISLDPCSFGQANTLSFNSLLHKLNKYVPRSSTVVDLYSGAGVIGLSVAASRKCRSVKCIEINKQSKMSFETSASRLPANLGCTITWHNTDASVEPSHWLEGSSVVIVDPPRKGLHPSVISALQKVALSERKAYKAKSSLAKVKDEKRPWILRAREAAVHVDNTTTEEGNETWPETLIYISCGWESFKRDCKSLISSKAWQLENAHAFNFFPGTDSIEILAIFKRESEAGQKKKKKAKKKAK

SEQ ID NO: 54612 - protein, 1084 aa, Zea Mays
MAAPGRRTADVSSSSPSPSPAAPSTGRRLLRTQTVANLGESIFDSEVVPSSLVEIAPILRVANEVEVENPRVAYLCRFYAFEKAHRLDPTSSGRGVRQFKTALLQRLERENDPTLKGRVHKSDASEMQRFYREYYRKYIQALQTVVNKDDRARLTKAYQTAAILFEVLRAVNDSQSVEVDQAILDTHIKVEEKKKLFLPYNILPLDPESTGEAIMRYPEIQAAVYALRNTRGLPWPKDQDKKPEEKNTGKDLLDWLQAMFGFQKDNVSNQREHLILLLANVHIRKIPKADQQPKLDDKALDDVMKKLFKNYKKWCKYLGRKSSLWLPTIQQEVQQRKLLYMGLYLLIWGEAANLRFMPECICYIYHHMAFELYGMLAGNVSPMTGENVRPAYGGDEEAFLTKVVTPIYKVIEKEAERSKTMKSKHSHWRNYDDLNEYFWSVDCFRLGWPMRADADFFKTPKDPYLNHLNGENRSAGNVHWMGKVNFVEIRSFWHIFRSFDRMWIFLILSLQAMIIIAWNGGTPSDIFDAGVFKKVLSIFISAAILKLGQVTYAYTWENPTGLARTIKSWLGDGQNQPSLYILAVVIYMAPNILASMLFLFPFMRRILESSNVKVITIMMWWSQPRLFVGRGMHEGAFSLFKYVKMLTHLHIVLSCIASFSITEHCCPDRYTMFWIILLAMKLIIKPLVQPTKDIMREPIRTFQWHEFFPHGTNNIGVVISLWAPIILVYFMDTQIWYALFSTLIGGIYGAYRRLGEIRTLGMLRSRFESLPEAFNERLIPSDANKSKGLRAAFSSRPKASGDESEREKRAARFAQMWNAIITSFREEDLIDNREKDLLLVPDCKDRELDIFQWPPFLLASKIPIALDMAADSGGKDRDLTKRIKSDPYFSFAIRECYASFKNIINTLVFGQREKDVLVQIFTVVDKHIEEETLITGLNMKNLPALSKKFVELLELLQKNKEEDLGQVVILFQDMLEVVTRDIMEEQDLLETLDSLHGANSRKHEGITPLDQQDQLFAKAIKFPVVESNAWTEKIKRLHLLLTVKESAMDVPINLDARRRISFFANSLFMDMPNAPKVRNMLPFS

SEQ ID NO: 54613 - protein, 1022 aa, Zea Mays
MAWWSGKVSLSGLQDIAGAVNKISESVKNIEKNFDSALGLEEKRDDEEASGSRTSNSDGIGFFNPVMAFMGHNGEEDGTEVSEKPQFPKDLSVEEENHSTPTKKQTSEVDHSEVSVTTFPEQPSKSEEAHSISNESPVSKADVSEQSITPQTPAHPSVAEEKLDGCTEALASKVGDDEASETSQSPGHPSTVEENQDHQYSKHSCPSDEAEPNQLRESAGDLPDGSAFSSPIKIDKSGDTETGESIDTGKEDTSDGNASQSQPAESMLASSDNITEVEDKIAQEYNVPKELSSPQENCDTVDKVTRLEVKLHDGNIDTKKSEEESNKMEAGEVSVVVQEDNVMEQPEDLMSKSITAAHDSHSQNESVVSLTDVPAGLGGVGPADNFTEEEKIARITDFQIVDSVVSVGELEKLRREMKMMEAALQGAARQSQSKADEIARLMNENEQLKSTIDDLKSKSSEAEMDALKDEYHQRVATLERKVYALTKERDTLRREQNKKSDAAALLKEKDEIINQVMAEGEELSKKQAAQEATIRKLRAQIREFEEEKQRLNSKIQVEEAKVESIKRDKMATEKLLQETIERNQTELAAQKEFYTNALNAAKEAEALAEARVNSEAKVELENLLREAGEKENMLIKTIEELRLSLTRQEQEAAFREERLKRDYDDLQKRYQASELRYNELVTQVPESTRPLLRQIEAMQETSAQREEAWAGVERTLNSRLQEAEAKAAASEEKERSVNERLSQSLSRITVLETQITILRTEQTQLSRSLEKERQRASESRQEYLAIKEEAAMQEGRAKQLEEEIKDLRVKHKEELQEAAEHRELLEKDLEREKAARAEIEKTSSREAPKVPLPDQTRNAPLRKLPSSGSINSLEESHFLQASLDLSDNASLERRMSSESNMSYYLRTMTPSAFESALRQKDGELASYMSRLASLESIRNSLAEELVKLTEQCEKLRTEAAAVPGLRAELEALKQRHFQALELMGERDEELEELRNDIVDLKEMYREQVDLLVSQLQALGARV

SEQ ID NO: 54614 - protein, 348 aa, Zea Mays
MALTTASTVDFSGMVDDEFLDRLGIEKGTRKVINHEERGRVLRAMDGCSYKAAAGGSLSNSLVALARLGSSQSAGYPELNIVMGGSVGSDPLGSFYRAKLRRANVHFLSKPVKDGTTGTVIVLTTPDAQRTMLAYQGTSSTLSYDSDLASLVSKSNVLIVEGYLFELPHTIEAIKQACEDAHKNGAIIAVTASDVSCIKRCYNDFRDIVRNYADILFANANEARALCELPSTDSPMSATRYLSHSVPLVSVTDGMHGSYIGVKGEAIYIPPPQCVAVDTCGAGDAYASGILYGVLRGASDLKGIGLLASRVAAVVVGQQGTRLRVQDADRLAGSFEHHLDSLEFCSDV

SEQ ID NO: 54615 - protein, 585 aa, Zea Mays
MAQLVETYACSPATERGRGILLAGDPKTDTIAYCTGRSVIIRRLDAPLDTWVYPDHAYPTTVARFSPNGEWVASADASGCVRVWGRYGDRALKAEFRPLSGRVDDLRWSPDGLRIVVSGDGKGKSFVRAFVWDSGSTVGEFDGHSKRVLSCDFKPTRPFRIVTCGEDFLANFYEGPPFKFKHSIRDHSNFVNCIRYAPDGELSTEGGHTGSIYAVSWNPDSKQVLTVSADKSAKVWDIFEDASGKLNRTLVCPGIGGVDDMLVGCLWQNDHLVTVSLGGTFNVFSASNPDQEPVTFAGHLKTVSSLVFFPQSSPRTILSTSYDGVIMRWILGVGFGGRLMRKNNTQIKCFAAVEEELVTSGYDNKIFRIPLNGNQCGDAESVDVGGQPNALNLALQKPEFALVTTDSGIVLLHNSKVISTTKVNYTITSSSVSPDGTEAVVGAQDGKLRIYSISGDTLTEEALLEKHRGAITSIHYSPDVSMFASADANREAVVWDRASREIKLKNMLYHTARINSLAWSPDSRLVATGSLDTCAIVYEIDKPVASRVTIKGAHLGGVHGLTFLENDTLVTAGEDACIRVWKVVE

SEQ ID NO: 54616 - protein, 621 aa, Zea Mays
MMSFRGAEGFEGRSSHDECRDHKSDFEVSEDEKKTRMGSLKKKAIDASTKIRHSLKKNRRKSGSRVLSVSIEDVRDLEELQAVEAFRQALLLDELLPARHDDYHMMLRFLKARKFDIDKAKQMWMDMLHWRREYGTDTILEDFEYTELDAVLQYYPHGYHGVDKEGRPVYIERLGKVDPSKLMNVTTMDRYVRYHVKEFERSFLIKFPACSVAAKRHIDSSTTILDVQGVGLKNFSKTARELIQRLQKIDNDNYPETLYQMFIVNAGPGFRLLWNTVKSFLDPKTTAKIHVLGNKYQSKLLEIIDASELPEFLGGTCTCPEYGGCLKAEKGPWKDPNILKIVQSGEVHCARQIVTISNGEEKIITYAKPKHHSMRGSDTSTAESGSEADDAISPKALRSYIQHPKLTPVREEVKIVRATSFSTRLPEYDVPVVDKAVDATWRREQPRKIPFMPQDSSVKTMSRPSDSSWDKIVATLMACLMAIVMLVRSVKDLVTRRLPYKGGSEEIHSTLYPDPIQKEEFRPPSPIPGFAEADLFAVVLQRLGELEEKVQMLQEKPSEMPCEKEELLNAAVRRVDALEAELIVTKKALHEALIRQEELLAYIDRKEIAKAQRKKKAMLCY

SEQ ID NO: 54617 - protein, 297 aa, Zea Mays
MAMYSSIFGGITTNPSAMVIPIDDHMVHRGHGVFDTAAIMDGHLYELEQHLDRFLKSASMAKIPLPFNRSTIRSILIQTVSASNCTQGSLRYWLSAGPGDFQLSSSGCTNPALYAVVIESPSLQVPSCCRVVTSSIPIKSPQFAVMKSVNYLPNALTKVEGEENGAFTGIWLDDEGFVAEGSNMNVGFVTKNKELLMPRFDKILSGCTARRVLTLAEHLVAHGKLSRVISRNVSVEEGKMADEMMLIGSGILVKPVVQWDDKIIGSGQEGPIAQALYDLILEDMRSGPPSVRIPIPY

SEQ ID NO: 54618 - protein, 440 aa, Zea Mays
MNAQPHAYVYITATFTLPPSASKPNQASAALLRIQLLPDPQNRTQVETLTSAFSMSAATTAPTPAVATPMAPPPSYPASSTISASVAASVEEEDDLYGRLKSLQRHMEFVEIQEEYVKDEQKNLKRELLRAQEEVKRIQSVPLVIGQFMEMVDGNNGIVGSTTGSNYYVRILSTINRELLKPSASVALHRHSNALVDVLPPEADSSISLLGSSEKPNVTYNDIGGCDIQKQEIREAVELPLTHHELYKQIGIDPPRGVLLYGPPGTGKTMLAKAVAHHTTAAFIRVVGSEFVQKYLGEGPRMVRDVFRLAKENAPAIIFIDEVDAIATARFDAQTGADREVQRILMELLNQMDGFDQTVNVKVIMATNRADTLDPALLRPGRLDRKIEFPLPDRRQKRLVFQVCTAKMNLSDEVDLEDYVSRPDKISAADNWALGCTLDA

SEQ ID NO: 54619 - protein, 772 aa, Zea Mays
MSVVGFDLGNESCIVAVARQRGIDVVLNEESKRETPAIVCFGDKQRFIGTAGAASSTMNPKNSISQIKRLLGRKYSDPEVQRDLASFPFRVTEGPDGFPLVHVRYLGEERTFTSTQLLAMVLSNLKGIAEGNLNAAVVDCCIGIPVYFTDLQRRAVLDAATIAGLQPLRLFHETTATALAYGIYKTDLPENDQLNVAFVDVGHASMQVSVVGYKKGQLKMLSHTYDQSLGGRDFDEALFKHFAAKFKEEYKIDVYQNARACIRLRVACEKLKKVLSANPEAPLNIECLMDEKDVRGFIKREEFEQISASVLERVKGPLEKALAEAGLTTENVHFVEVVGSGSRVPAIIKIITDFFGKEPRRTMNASECVARGCALQCAILSPTFKVREFQIGPFQTSKGEKAKLKVKVRLNIHGTVTVDSAIMLEDDVEVPVSSANEAPNDTMKMDTDDAPSDPAVASDVNMQEPKSADTAEAAHAAENGPQDTEEKSVPMETDAKVEPSKKKVKKITVPVHELVYGALAAADLQKAVEKEYEMALQDRVMEETKEKKNAVEAYVYDMRNKLYDKYSDFVTSEDKEGLIAKLQEVEDWLYEDGEDETKGVYIAKLEELKKVGDPIELRFKEWEIRSSAVSQLVYCINSFREAAQSTDQKFEHIDMSEKRKVINECSEAETWLIEKKQQQDALPKHANSVLLAADLKKKAETLDRFCKPIMTKPKPAPKPQTPPVAENQAPEPQTPEQQQSGGESTASEGAAEEPRAEQMETDKPEGATDPSA

SEQ ID NO: 54620 - protein, 592 aa, Zea Mays
MGAWVVVAAAAVPATMTRAMVAWAVAAALAAMTKATVAWVDMGRASLTSTTRAASHLHRQSRTSNACRPLTPGSTTIPALEDEDMEVVKEAYGDEKHPMKGYMGNGKATKEDGRSSTRDELPRKSKSSEASSSGSSLEHDVHVVEKSVVGEQVQHSEPQQHVAGLPPTGSDKIYIDDTEVVVEIRTQFERASQSASEVSKMLEVGKMPYYQKSSGFKVSAMMVCGIPTMEEEFLRFEEDKAMGSGNLSSTLQKLYMWEKKLLEEVKTEERMRVLYDRKREELKMLDEKGAEAHKLEATELYIRKLSTKISIAIQVVNTISEKISKLRDEELWPQTCELIQGLMRMWSVMLECHQIQLHAISQARYIDSMIDTAKFGDDHMDLIKRLELQLLDWIACFAAWVSAQKNYVKTLNKWLTNGVIYVPEETEDGAPPFSPGRLGGPPIFVICNNWAASVDRVSEKEVVEAMQAFASNVLNLWERHRSEQRQGLMANKGMDRDLRVMERDEQSMRKALEAQNKKLVLISNQGSVSLSAQALHERGPGAEAGGSLQTGLRNIFEAMENFTSASANTYRELHLRAEEEKARVAQESGSVS

SEQ ID NO: 54621 - protein, 112 aa, Zea Mays
MQNVSLTRKTRSLIFVHGDDAIEYEQKFKNNILQENPLLHAVSFYRLVSFSVGCCSDPSLCSLEQGTQHKSFSLISRAVLITCCNSVKTRFKIIVQMIVVFFIAGRTLFIYR

SEQ ID NO: 54622 - protein, 336 aa, Zea Mays
MRSLTVASRHPGAAFSTRRRPLLHPAAAGRDSTFQRCWRWEKTQDSSFGSSLRTSRLPRTVHGDILKNLLAPTAGAVSVEQAEAIADLPKGEMWSVHKFGGTCMGTSERIHNVADIVLRDPSERKLVVVSAMSKVTDMMYNLVNKAQSRDDSYIAVLDEVFDKHMTTAKDLLAGEDLARFLSQLHADISNLKAMLRAIYIAGHATESFSDFVVGHGELWSAQMLSYAIQKSGTPCSWMDTREVLVVNPSGANQVDPDYLESEKRLEKWFSRCPAETIIATGFIASTPENIPTTLKRDGSDFSAAIIGSLVKARQVTIWTDVDGVFSADPRKVHAAS

SEQ ID NO: 54623 - protein, 165 aa, Zea Mays
MDDTAALHFASQKGHVEVARELLASGASVKAKNRKGFTALHFAAQNSHLDLVKYLVKKGVDVTAKTKGGQTALHVAEDDEVRAFLKECEQSLKKGAELPSEKDDSAEKEGDSKSSGEVMKDEEDAEQGEKRKSELVGASSLSGAKKAKVSLGHLVCENDMDEEEE

SEQ ID NO: 54624 - protein, 387 aa, Zea Mays
MILNLMSETAKSYDISQPLQEINESVRLAFLNSFLDFAGYLERFGGELTENRPNKENNYVSNGYINGTRETFVNTDGDLHKKLLVVLSNIGYCKAELSEELYSKYRHIWSPVRNNEERSSDMRDLRTSFSALEEKVLDQYTFAKSNLIRSAAQSYLLDSGIYWGAAPMVKGIRDATLDLLHILVAVHAEVYSGARPLLEKTMKILVEGLVDIFLSVFHENKTKDIRLLDANGFCQLMLELEYFETVLHTYFSPEAQQAMKSLQENLLEKACESVAEAMENPGHQRRPTRGSEDTASDDRQPSVSPDDLLVLAQQCSSDLLQGELERTRLNIACFMESTLQPTAAPAGPKPAAHSSYQAQHAPVQTSSPSFRRQQTGTSSPVVSRRRR

SEQ ID NO: 54625 - protein, 98 aa, Zea Mays
MAEESVVKASAGDAVKGGKVEESGEKMVTMAKVPFHSMFKCADRTDVLLMLAGMVGALGNGMSMVVMTIIFGQMVDAFGGATPDTIVPRVSKRYHVGQ

SEQ ID NO: 54626 - protein, 232 aa, Zea Mays
MADADAGEFWGLFGGFAPLPRKTFSELNGKDSTSTSKLLCVNKGQFAPIDCEILKRELLDSTKCYLLDCGSEIYVWMGRETTLEERKRGGSAAEELLREGNRQKSHIIRLMEGFETVTFKSKFDKWPKKADAVVSDESRGKVAALLKRQGFNFKDPAKAAPVKQEPQPQIDCTGNLQVWRVNGSDKTFLSFSEQCKFYSGDCYIFQYTYPGYIGDECLIGTWFGKKSVQVTV

SEQ ID NO: 54627 - protein, 99 aa, Zea Mays
MKRLQQILGRKHKKNLHTIYILHPTLGLRTAVMAMQLFVDGEVWKKVVYVDRLVQLFRYVPREQLTIPDFVFQHDLEVNGGKGIIVDPRTKHIYQRPSG

SEQ ID NO: 54628 - protein, 401 aa, Zea Mays
MGRFEQVTPEGPETNQHDEQRSIRLHAFSDLSHVPAATFIYLLKDCYGYGTNKATSKFKILMQLVKVALHNGPQPGPFTYVVQCMYIVPLLGKTYSEGFSHMLTSSLKHLKSVESAQKDFLEAKHLAAQLVLDILDSIVPHENRILVKLLETFEIELRDMARALYDSELDDGDLMKAREHLRQQVKRCMESESNALAVTLITHFSIQCCDESFIIKLIKNNQLEIAEQCAIFMGKEMISLVVQKYLDMKMLKSANKLVKEHELTEEFPDVSYLYKESSVKKLAEKGCWDIAETRAKKDTKLLEYLVYLAMEAGYMEKVDELCKRYSIEGYVDSLVPEKVFCVSDYLDLKKLDVEEIVWVDEINGLLNATSDIEACKIIGMDCEWRPNFEKNTKSSKETSMC

SEQ ID NO: 54629 - protein, 568 aa, Zea Mays
MSITNKQPMPDKLSWVKFSSISWTHDGKGFFYGRYPAPRGGEVDAGTETNINLNHQIYYHVLGSDQSEDILCWKDPEHPKYSFGASVTEDGKYIILGIYEGCDPVNKLYYCEISSLPQGIEGFRGTQDLLPFVKLIDNFDAQYQVVANDGDEFTFLTNKSAPKNKLVRVNIKNPELWTDVLSEHEKDVLESADAVNNNQLLVNYMSDVKHILQIRDLRTGNFIHQLPLEIGSVSEISCRREDKEVFIGFTSFLSPGIIFRCNLASTIPEMKMFREISVPGFDRTSFQVKQVFVPSKDGTKIPMFIMSKKDIDLNGSHPTLLYGYGGFNISITPSFSVGRVVLCKNMGFVVCVANIRGGGEYGEEWHKAGALAMKQNCFDDFAACAEFLISNGYTSSRRLCIEGGSNGGLLVAASINQRPDLFGCALAHVGVMDMLRFHKFTIGHAWTTDYGCSDKEEEFQWLIKYSPLHNVRRPWEQSSGNNCQYPATMLLTADHDDRVVPLHSLKLLATLQHVLCTSTEDSPQTNPIIGRIDRKSGHGAGRPTQKMIDEAADRYSFMAKMLGASWTE

SEQ ID NO: 54630 - protein, 519 aa, Zea Mays
MQYGLNSMSVMTILGFAQRGQKKTQYLFPGSPKTMRKRWLVLLPSLNSLQVFKMDIKGRKKQTASHTSAHISPTQIDMESWPGLPSLNPTLDRNYSDDNIASTYLDFCAATSLQEVTRNSTEQLDGKSEVFGNDQEEKSNSFLDCDWGNIGGFDDFDRLFSHSDSIFGNEIVANDSDFLSASSNLMDTAVLSIPVPVEAHKRPVWSRRKPEERGKSKISSSTSGFSHSKVESSSTNLQTPMEPVQTPQYALFQDSKKIGEVQHANQFMFPGYGYPPAYPFPTIPLVSNIQAEGYQTKPAGTSYRTSEDYLKQSSSTEMSQDIPSRPLTMTPQEKIEKLRRRQQMQALIAIQQQQQQFGQQGPGSDTMVSQAYTPGNKNPDSLGSSIVIDENTNKLDTKTRLCIRDSLLRLVHSATERKIDGDRSTNKTNKDEDEASEDASTRKTRSPNKEAETTTNPIDRIVAHLLFHRHCSKVAKATKEIISSIPLTLEPEPKVPLGTPRVPSKDQRDEQEIVLQPSQ

SEQ ID NO: 54631 - protein, 135 aa, Zea Mays
MSPVTYIDSSAVQALKDLHQEYKARHIQIAIANPNRQVYLLLSRSGIIDLVGAGWCFVRVHDAVQVCLQHVQNSSSNALKLPVQASGVLTDSVSTPKPEQQHQKQHGLFKDLWKAQDSNADAGGEVQPLLRQNLV

SEQ ID NO: 54632 - protein, 56 aa, Zea Mays
MQKGYLSALQVWRPTRTRPSASSSSTITRNARRKRGRLGWNGIKPDHSLGEQWRPT

SEQ ID NO: 54633 - protein, 327 aa, Zea Mays
MDRKDVGILAMDIYFPPSCVQQEALEAHDGASKGKYTIGLGQDCMAFCSEVEDVISMSLTVVNSLLKKYKIDPKLIGRLEVGSETVIDKSKSIKTWLMQIFEESGNSDIEGVDSSNACYGGTAALLNCVNWVESNSWDGRYGLVVCTDSAVYAEGPARPTGGAAAIAMLIGPNAPISFESKYRASHMAHVYDFYKPDLASEYPVVDGKLSQTCYLMALDSCYRQFCNKYEKIAGKQFSICDAEYFVFHSPYNKLVQKSFARLYYNDFLRNCSSVDDDAKEKLQSFSNLTGEESYQSRDLEKASQQVAKHLHDIKVQPSTLLPKQIVV

SEQ ID NO: 54634 - protein, 544 aa, Zea Mays
MAGGVVVSSGGGKDYPGKLTMFVLFACIVAATGGLIFGYDIGISGGGAEPEQPVLQVRQPAAHHVHLLALPGGARGLLLRRHRHPRGRPQVVHVRRRRHVPGRRRAQRRRQGRGHAHPRPRPPRRRRRLRQPVRARLPLGDGAGAPPRDAQHRLPAHGHHRHPLRQPHQLRHRQDQGRLGLARQPRARGRAGGHHRRGRALPARHTQLPHRPRLHRRRQADAQARPGHRRRGGGVQRPGGRQRRVQAGGAPLAQHPAAALPPAARHGHRHPHVPAAHGHQRHHVLRPGPLQDAGLRGRRLPHVRRHHGPRQRLRHLRVHRHRRPPRPPQAVPAGRHPDARVPDRRGQPHRRQVRLLRRRGDPQGVRRHRRALHLRLRGRLRLVLGPPRLAGAQRDLPAGDPLGGAEHQRVRQHVLHLHHRAGLPPHALPLQVHPLLLLRRLGRRHDHLCRALPAGDQERAHRGDGARVEGALVLGPLHPRRGRARRRRPRDALRQRQARRHAVAMAVPRCSCCWAIIYPYSIILGALPGNLKLIINVYYNRLIR

SEQ ID NO: 54635 - protein, 157 aa, Zea Mays
MELGGYAIGAVEDCSKRLSDYISMDVLSAIQRAGAAFSWVPKEPYNEDACLLDFDVLLMEPRKLEKTLITSIMWWADAIRLANQRDLIRLAVTLSFNGKYTRLPSNWKRADDDNADILNFDGPKNVCSEDGRQHEQPGYGATWQQYLHQKSEAILST

SEQ ID NO: 54636 - protein, 65 aa, Zea Mays
MSEIHVWRLTTGRRELVVLSGAHTIGGKRVSGVPVVFDNTYFKVLLDNRPPQTSSSKCIFLTNCF

SEQ ID NO: 54637 - protein, 493 aa, Zea Mays
MAGDDGADASERLESILTAEAAASPWAAAAIELRLLTRLAAPAVVMYMINYLMSMSTQIFSGHLGNLELAAASLGNAGVQMFAYGLMLGMGSAVETLCGQAYGAHKYEMLGIYLQRSAVLLCVTGVPLAVIYAFSEPILVFLGQSPEIARAASVFVYGLIPQIFAYAINFPIQKFMQAQSIVLPSAYISTVTLVLHVVLSWVVVYKVGLGLLGASLLLSLSWWVIVAAQFAYIVMSPRCRHTWTGFTWQAFSGLWGFFKLSAASAVMLCLETWYYQVLVLIAGLLPNPELALDALSVCMTVNAWVFMIAVGFNAAASVRVSNELGAGHPKSAYFSVWVVTGVSTLISLVLAIVILCLRNYISYIFTEGEVVSNAVADLCPLLAITLVLNGIQPVLSGVAVGCGWQEFVAYVNVGCYYIVGVPLGAILGFVFKLGVKGIWSGMIGGTFMQTAILVWATLRTDWNKEVEEAQKRLNKWADSKTTEPLLVGFGDGN

SEQ ID NO: 54638 - protein, 639 aa, Zea Mays
MRTPAMLRWAAALAVLLAVAAPAAGFYLPGVAPTDFAKGGPLPVKVNKLTSIKTQLPYTYYSLPFCKPDAIVDSAENLGEVLRGDRIENSPYVFKMREPKMCQIVCKAKITEKEAKELKEKIEEEYRVNMILDNLPLVVPVNRQDKNSIAYQGGYHVGLKGVYSGTKNEKYFIHNHLSFTVKYHRDDNSELSRIVGFEVNPLSVKHQIDDKWNGVDTRLSTCDPHASKFVINSDSPQEVEADKEIIFTYDVHFEESEIKWASRWDTYLLMTDDQIHWFSIVNSLMIVLFLSGMVAMIMLRTLYRDISRYNQLETQEEAQEETGWKLVHGDVFRPPTHSDLLCVCVGTGVQFFGMLLVTMIFAVLGFLSPSNRGGLMTAMLLVWVLMGLLAGYSSSRLYKMLKGSEWKKITLQTAFLFPGVAFVIFFILNALIWGEKSSGAVPFTTMFALVLLWFGISVPLVFVGSYLGFKKPAMEPPVKTSKIPRQIPEQAWYMNPLFTILIGGVLPFGAVFIELFFILTSIWLHQFYYIFGFLFLVFVILVITCAEIAVVLCYFQLCSEDYMWWWRSYLTSGSSALYLFLYAAFYFFTKLQITKLVSGILYFGYMFLASYAFFVLTGTIGFCACFWFTRLIYSSVKID

SEQ ID NO: 54639 - protein, 723 aa, Zea Mays
MGKCTSVDLSGNQFSGELAILRSWDGIVEVIDLSSNKLVGSYPNDVSQFQNLVSLKLRNNSLSGSLPSVLGTYQKLSVLDLSQNAIEGSVLPTFFMSPTLTVLNLSGNKFSGTIPFQSTHSTESILLSSQSALRIVDLSSNSLAGPLPPDISNLQKLEFLILMMNELSGEIPSEISKLQALEYLDLSHNHLTGRIPDMPQNGLKVFNVSYNNLEGTVPKSVEKFPLSCFRPGNDMLVFPDGLPAGNDDYTGVDQGQTSHGHKAGVRVALIIGCIGAVLLVISIALAFYLVRSQELCGRNGFRGQITIRDLKGRISRPNLFRSPKDNVIPSKTSFSNDHLLRAATRSMSAQKELLAEASVEYGYTDPKEVAESTSLGVTETSSAIQAHESPPRSALPAAPHFADSRFLEEPVAFEVYSPDRLVGELIFTDSTLVFTAEDLSRAPAEVLGRSSHGTTYKAVLQSGHVLTVKWLRVGLVKHKKEFTKEIKRIGTIRHPNIVPWRAFYWGPKEQERLIISDYVSGDSLALYLYESTPRRYSRLSVSQRLRIAIDLARCLQFLHHEKGLPHGNLKPTNIFLTGPDLTPKLVDYGLHRFMTPSGAAEQILNLGALGYRAPELANAGKAAPTFKADVYAFGVVVMEMLTRRSAGDIISGQSGAVDLTDWVQMCSREGRGADCFDRDIAGLEERPGVMEELLAVSLRCILPVNERPNMKTVCDDLCSIITA

SEQ ID NO: 54640 - protein, 891 aa, Zea Mays
MTCATRSPGFLREAELRLLRCTLPSLPSSPPPPASPPPAHPLGPAAASAIAAVEAGDYEAALATAAPHFFPAFAPSRPPGSAAQFYADLGAAARAFLLVDGDGAAAGEGFDCRCAVVLSAAVAALLAFTQQNVTGPPRKFPTFPFSMSSFDERCYSNLGDTWDAWASDNLASFGSHVHGKFSLLQFIVFARLLFTSVQSLDLSDCWSVSWWLFRISMLQQNILDELSSSLFDQVQVYKNKMLDHFGELEKVSTYWDCLLSDGEGSYFVSAAFLEAGIVEYKYGRVDASRLHLNSAQEACGLHLSLTGILGFRTIYQVDAKSQMVLVAKTNKSGPDEGQVTEPTVAQNDNAALKNARSFVPVEDDEFCDILRMPRLVQDGSNSASEDATNPSAKISLSAIQQAAVLAQCLYVSRRSRVDEMSGWEMAPYIESIDSQDESYFVVRSLCDILRVRWESTRSRTKQRALLMMENLVEDISKEFPAAPQRVKMVFAVHMPTLPALRKEYGELLISCGIVGEALEIFKDLELWDNLIYCYRLLGKVADAVSLINARLSVTPNDPRLWCSLGDVTNNDDHYKKALEVSNNKSARAMRSLARSAYNRNDFHTSKILWESALSLNSLIPDGWFAYGTAAWKDKDLDKAVDAFSRAVQIDPENGEAWNNIACLHMIRGKSQAAVQAFREAVKFKRNSWEIWENYSKVALDTGNIRLTLEALKTVLNLSSNKQFSVGILDKVMTMLEEQSPDFVDTHEASDDANKDTRQSNQLLDITGDILQQIVRSGGSNAAIWGLYARWHKTKGNLIACSEALLKQVRSLQGSGLLHDQMKFAKYAQASLKLCKVYMEISSSTGSRRELLTAEMHLKSTLKQTMDFSDTEEYKALDNCLEEIKNLIAATA

SEQ ID NO: 54641 - protein, 76 aa, Zea Mays
MMIQIALLCTQASPEDRPSMSEVVRMLEGEGLAERWEEWQQVEVTRRQDYERMQQRFDWGEDSIYNQDAIELSAGR

SEQ ID NO: 54642 - protein, 146 aa, Zea Mays
MFPQSLGILGGKPGTSTYIAGVQDDRALYLDPHEVQMTVDIALDNLEADTSSYHCSVVRALALEQIDPSLAIGFYCRDKDDFDDFCSRASELAEKANGAPLFTVVQSIEPSKQMYKQDDGLGCSGSSMANDDDLDGSGEAEEWQIL

SEQ ID NO: 54643 - protein, 139 aa, Zea Mays
MADIPITNGVRKHYRDGAFVKASSFSASSGHDAMQMLKSEMQDHGFHYMPPRKPRKSDGYLRYRRRRLSGGFIFVAHADYYLLLRAFAKLAEIDIRIMHISVLKLEKRLACIEERIERSLNTLHNFSTGTVDELRSVSD

SEQ ID NO: 54644 - protein, 310 aa, Zea Mays
MAMRPRAALALSLAAGVPLVLLLLLLAPGARADDGSGGCGAAGGGEAAPGDRARARALKIAAFFSILVCGALGCCLPVLGRRVPALRPDRDVFFLIKAFAAGVILATGFIHILPDAFEKLTSDCLSGGPWQDFPFAGLGAMVGAIGTLVVDTVATGYFTRVHFKDSAAAAVGAAAVGDEEKQQQQAASAPHVDDGADGDGHGHGGHVHMHTHATHGHSHGASALVAAVGGAEGDKEHALRHRVIAQVLELGIVVHSVIIGISLGASQDPSTIKPLVVALSFHQMFEGMGLGGCIVQVIIIQSIVLRYTVH

SEQ ID NO: 54645 - protein, 146 aa, Zea Mays
MATVMQKIKDIEDEMARTQKNKATAHHLGLLKAKLAKLRRELLTPTSKGGGGAGEGFDVTKSGDARVGLVGFPSVGKSTLLNKLTGTFSEVASYEFTTLTCIPGVIMYKGAKIQLLDLPGIIEGAKDGKGRGRQNLNQWVPLKMTC

SEQ ID NO: 54646 - protein, 70 aa, Zea Mays
MYSSSCHVMSEKPNGSKAVTLLLRLSTLVLSLISAVVMATATSDCTIYGHGGAAKVTIMFKNYRPFVICS

SEQ ID NO: 54647 - protein, 619 aa, Zea Mays
MKEISSTIYDASRNKIARKFNSIYLNKGSSESAVLAAGSVIEVAEKVAAGELSSAIALVRPPGHHAEHDEAMGFCLFNNVAVAANYLLNERPDLGIKKILIVDWDVHHGNGTQKMFYDDPRVLFFSVHRFDYGSFYPSEGDASHCFIGEEAGKGYNINVPWEHGKCGDADYIAAWDHVLLPVTKVFDPDIILVSAGFDAALGDPLGGCCITPNGYALLLTKLLGFAQGRIVMALEGGYNLRSIANSVCACAKVLLGDKFTFNTPEMQPFESTWRVIQAVRNELKTCWPVLSSKLPENVSLRIKPAPSELYASDSESDSEDVDELLGTVASVSVIEATGVAISEHLSKMKLDDDSLAVKTNSSCSAAEQHPVDSVKVHNNASVVLTKKISDLSLEWRSDLSKTDVWYASFGSNMWRPRFLCYIQGGKAEGMNIPCCGSRDTSSPKGTVWKTVPHRLLFGRSSTPCWGTGGVAFLNPEINYNEKSYVCMYKITLEQFNDILFQENRLVLEDGKDGNTVYPDSPLIGSSEIKFISTNRAVHLEPIKDSWYSNVLYLGNEDEVPILTMTCPASDIERYKSGELRLAPPSETYAATLIKGLVEGKQMDADGAASYINAAAARAL

SEQ ID NO: 54648 - protein, 229 aa, Zea Mays
MEYVTCIIVYQGPHSDFAGPTCGSTACVALIRNTQLVVANAGDSRCVISRGGKAYNLSRDHKPELAAERERIMKAGGFIHMGRVNGSLNLSRAIVCKYLFIGDVELKQNKFLPPEKQIVTANPDINVVELCDDDDFVVVACDGIWDCMSSQQLVDFIHERINTESSLSAVCERVLDRCLAPSTIAGDGCDNMTMILVQFKKPVDRNKKAEAAGQSASNVDEAKSRVAEE

SEQ ID NO: 54649 - protein, 153 aa, Zea Mays
MKLVFLASSFSIVWYMKRHKIVRRTYDKDHDTFRHYVLVLPCLLLALLINEKFTFREVMWAFSIYLEAVAIFPQLVLLQRTRNIDNLTGQYVFFLGAYRVLYILNWIYRYFTEPHFVHWISWMAGIVQTLLYADFFFYYIMSWKNNVKLELPA

SEQ ID NO: 54650 - protein, 175 aa, Zea Mays
MFADASLQGSPESPKSVVLVTGEGEYNMVSLRKTIRAYLLEMGSPFLPCRARSGRFVVKDYSLKMWLKDSPFCMDLELKDAPAHPKLNSMKLIEGYFMRAGFVSAFKDIHERLGEVWPKKFSRLALLSEECRDEVIKADIQGRKEKLERMKKKGIVTARKSKTRARRGKFVRQQK

SEQ ID NO: 54651 - protein, 288 aa, Zea Mays
MSLYKSVVDWDDSAALEAFNDAKARFCAVYHGQCYDIPLPDPNMFIDIINPDEYVDPELVADLEKSRRSVPRKDNGVPDVWDSFIFSDKPVPVTGWGDTETSFTHGQQLSVNWDNQLEHSVEANHKQMSASWDYSVKQPSQRIGQQNSGNWEVYKEQQDQASNWGEQTNPCSTNWVMDGSQDAWKHGYGWGPAAIQTDPWDNCQYSYQVPDSQGTYGHWTHWRRRNNDLGRRNTRNRGDPISSKPMKSKYQTDEHSGANNGWRNCRVKNDMYYYSYEQADYTKQSLAM

SEQ ID NO: 54652 - protein, 538 aa, Zea Mays
MASSPQPPPPFAAQNPTAQGSGQGPPGSGVGALPGAFANLQISRGAAPPPGAPRGLTPQQAPPTLAARPGPPPSAARPAFPGSPPAPPFVRAPTPSTSASPPFGGQPGVMSQPPPPFGGPPGASSQPPPPFGVPPGVVSQAPSLFGGPPATASQASSPFVGHSVAASQAAPFGAPPVAGSHPPPFGGPPGAGPQPAPPLRQTFAGQPGPMAAAAAWTQPPPPSFGAPQQPPPPFGSRPAGQPLFATQSAPAAQQLPFMGPPRVNAPAFGPPSWQTQGAGSGAMQPPLRMPGIPGSMQPNTLGPPGTPTIPYSPHAGTQVSTPSKIDPNQIPRPMRESSVIIYETRQGGQATIPPAASSEFIVKDTGNCSPRLMRCTVNQIPCTGDLLTTSGMPLALMVQPFSLPHPSEEHIQLVDFGEMGPIRCSRCKAYINPFMKFVDQGRHFICNLCGFRNDTPRDYMCNLGPDGRRRDADDRPELSRGTVEFVATKEFLVRDPMPAVYFFLIDVSMNAIQTGATAAACSAISQAISDLPVEPQPC

SEQ ID NO: 54653 - protein, 311 aa, Zea Mays
MAFEIDNNLIDVHSSGSGTSLDDLSRFRAQVPPIAVPRRNPFDLPYDSEEAAIPGSAPSILHARKNPFDLPLEQSNDSVVVHAHDILNSGEPATSRRDMIFRRHESFNFGRMDVIQEKRFSRLKPYFVPETVEWNASNFERQFNDKSESKMSSVTKSDIASSVADQEDHKDQDEKDLADVGSECSDGINSIDVELDHSDIDDREIALQQFVFERAQEREAHWLPKGKGREEDYAPESAGSSTMPFHAVPDLLSWEDGDGHPWRENLILGIFQSTLILKLHQAQTQPYLVQTMQLRKVEMLIACHIQTMKCL

SEQ ID NO: 54654 - protein, 1952 aa, Zea Mays
MEALNELCDLVAAHPDLLLADKLAWLSSRCAAAPGAAAPQRASRAHLHSLLALARLLPAGGAGAGAEGDAAPPAPLLFFLASHAFLSPAFWPQSFAPAPFLARLLPLLAAAPSSPALSSALSAALLAALDVADPTSAPLARAFLSAAAAAAPLPLLPADAAPIAARLLLEFLGSEEEPIRAKGKGEDTLGEENGGAKEVVRRFEEEEVDELERKEVAFRLTVHMLGGEGGLETEQIGKVRNAAARQVRSLTDFLKIRKRDWREQGTQLRARINTKLMCCQAAVGVLVRSVSTMDTDIKSSKDMLQQTLAWFIEATKSCILSSWRKLKICEELFCTLLNGISQITVSRGGQLLPVLLIPLKPLVVSTCSQADMAGSSPGALFEAVVKLSCEIIEFGWTKDRALVDTFVMRLAAYVRERNDYEEEIASTPIQIVKLIMVEDGKGKEAVPVIRLNVIRLLAELCVCLKKWEVVDMILPLFIEHLEEGDASSPSSLRLRLLDAISRVACLGFEKSYRESIVLMTRSYLDKVKALGASENNTVPSEATTERTETLPAGFLLVASNLTSTKLRSDYRHRLLSLCSDVGLVAESKSGRSGADLMGPLLPAVADICSDFDPVSTVEPSLLKLFRNLWFYVVLFGLAPPIQNNEAPTKPVSTSLGTAESSSAIALQAVAGPYMWNSQWSVAVQRIAQGTPPLVVSSVKWLEDELELNTLHNPGSRGGNGNENSAVGQRAALSAALGGRVEVAAMNTISGVKATYLLAVAFLEILRFSCNGGILSATSTLNRSNSAFSCVFEYLLTPNLTPAVTQCLTAVAHRAFETVLSWLDDRISDIGEGADVRESVLSVHACFLIKSMSQRDEHVRDVSVKLLTQLKEKFPQVLWNSSCLDLLLISVHNELTSGPVSDPAWVATVRSLYQKIAREWLTSALSYAPCTTQGLIQENFCKPSGVQRTQHTADVVSLLSEIRICSGKNDWNGIRTANVPAVMDSAAAASGAKKEAPDFTLEVLSTAVVSATVKCNHAGEIAGMRRLFSTMGGINMGMSPPGTQSLHPHQSFDEVFVSKFVSLLQNFVVAAEKQPIDNSQFRETCSQATALLLDHMVSDSRANLEGFSQLIRLLCWCPAYISTPDAMETGIYIWTWLVSAAPSLGPLVLAELVDAWLWTIDTKRGLFASDMNYCGPDAKLRPHLIAGEPEAPPEKDPVEAIIAHRLWLGFFIDRFEVVRHDSIEQLLLLGRMLQGTMKSPAHFSHHPAATGTFFTAMLLGLKFCSCQSQSNLQKCNMGLQLLEDRVYRAALGWFSYAPEWYESPNKTYAQREAQSVSVFVHFLQNERTSGPVDSVSKLQGREGEPSMADHIHPVWGCVDNYTNAREKRKQLLLTLSQNEADRLEVWAQPIHTKDTTTFRGKISSDKWIDHVRTAFAVDPRIALSMPLRFPTNATMQSEITQLVQTRLLELRTIPEALPFFITPKAVDENSVLLQQLPHWAPCSVTQALEFLTPPYKGHPRVMAYVLRVLETYPPETVTFFMPQLVQSLRYDEGKLVEGYLLGATRRSNIFAHILIWHLQGEYVDESEKDAAALKGSAFQSLLPAVKDKIIESFTPEARDMFEREFDFFDKVTSISGVLFPLPKDERRAGIRRELEKISIPGDDLYLPTATNKLVRGIQLDSGIPLQSAAKVPIMITFNVVDRDGDPNDVKPQACIFKVGDDCRQDVLALQVIALLRDVFQAVGLNLYLFPYGVLPTGPGRGIIEVVPDTRSRNQMGETTDGGLLEIFQQDYGPVGSPSFETAREMFMISSAGYAVASLLLQPKDRHNGNLLFDSHGRLVHIDFGFILEISPGGNMGFESAHFKLSHEMTQLLDPSGTMKSDTWNQFLRLCVKGYLAARRHMNGILSTVNLMVDSGLPCFSRGDPINNLRKRFHPEMNEREAANFMVRTCADAYNKWTTAGYDLIQYLQQGIEK

SEQ ID NO: 54655 - protein, 585 aa, Zea Mays
MDLSRPASSDLSLGLHSHAHAHARVHAAAAPLRLFDDAKPERLVAGEADAERDDGDGGDQHFSLLGHSLCVKRPRRAVNGGGGGGGETSSCSSTSPALRPAKRQAAGEDSGADLETRRAAVRSWGNQSLAEADPDVHSLMEQELARQVRGIELIASENFVCRAVLDALGSHLTNKYSEGAPGARYYGGNQHIDAIERLCHERALTAFGLDPACWGVNVQPYSCTSANLAVYTGLLQPKDRIMGLEPPSGGHVSHGYYTPSGKKVSGASIFFESMSYKVNPQTGYIDYDKLEERAMDFHPKILICGGSSYPREWDFARMRLVADKCGAVLLCDMAHISGLVAAKECRSPFDYCDVVTSTTHKNLRGPRGGIIFFRKGKNLRKRAGSFSQGDENEYDFEDRINFGVFPSMQGGPHNNHIAALAITLKQVATPEYKAYIQQVKKNAQALASALLRRKCRLVTGGTDNHLILWDLRTLGLTGKIFEKVCEACHISINKTPIYGDNGSISPGGVRIGTPAMTTRGCLEEDFESIADFLIRSTQIASNVLKEHGKVQKEFLRGLMNNKDVMELRNQVEAFASQFAMPGFDV

SEQ ID NO: 54656 - protein, 340 aa, Zea Mays
MASEAESPVVIHAWSAPRSLSTSLMYSFAQRDDMEVLDEPLYANFLRATGVDRPYRQELLSKMDPDGNKVVKEVIFGPGDKKYRYCKHISKQHLPNLSSDLMKKGKHFILIRNPLDILPSFDKVVPPSFMELGIGELVSIYSELCGLGSPPPVIDADDLQQDPEAVLSGLCEDLGIPFQPQMLKWEAGPKEFDGIWAPWWYGSVHKSSGFSKPRQYPLTFPFVFYDLLEQSLPFYNMLKRQIRKIRGPQQPPLSDPPLPVPANKNILVWVGDELLPRNSAKVSVFDSVVQGGDAVWEGLRIYDGKVFKLDEHLDRLFDSAKAMAFSNVPTRDWSCHLHML

SEQ ID NO: 54657 - protein, 963 aa, Zea Mays
MSIDWNDELNDDPGTNEDTAPIDNDGSEQASESKQGATNRSEENEWDKLLRVRWEQYQIEEEACLGRGKRLRKAVSYRETFATLPNEALSEDSDEGDEPKREYTAAGLALKEKYGKLRARQKERIAQRHIIKNYADDNLEEFMTPYDSIANEPAENPLVIVEDLNSSQLSGAKRFSDSTGEMRQSSKKSKRYSEIPQDLYAKIPGNTASFKHHSKATDVFNPGTPNHLLPVLGLCAPNADQVNSYKNSICAPSIKERKRASGDIVKQLSTPADHSNVHRNEAQSASDKAIFPGASEEALRRISNMIPDSYFPFSHIPPISGKGVDPVENPGPSIASFQGNLGLPNFSLEDNAPLKHIKPIPDIFPSLSLGAHKDYIRSSVPELPDGSLLPNFMADITGTSKQKSFMSGLLPGLGLSPGQPIHSAMPDNHKKVLDNIMMRAQYASNKFLKKRSKLDYWSEDELDALWIGVRRHGRGNWDAMLRDPKLKFLNNRTSEELALRWILEEQKIIDEPMSTSTRRSNSAAFPGISDAMMSRALNESNFSKMRMEQPKLQSHLTDIQLGSSDILSTFPHVDAASYINSGEGGPSQIPWQDFKHRSSYAGDFPAGAFDKLEKPDVGPIPPFMPNPFMTDSIGSLPINRKNNSSIPHSEIRSSSRENILSGVSDGQINLLHEMQRRRRVRSGKEPIEMNLNHIDHSNLQLDNTSDLGGLKPNKLPHWLQEAVRAPSSKPPERELPATVSAIAQSVCLLLGEQEPSIPPFLIPGTPLSRPKDPRINSKKKLRKAQQSNSHVEHSKIGSGEGDCVTTPAPPSIEASPALPVDCDDGEPSLNLKSASLSSSAGSKGLDELPPTFKEANQTVDGSEAVAAKSDAPEIGCQVPGSSPLHDKGSESSGSPVKDTPDAGIRLPGSDNSVMAFSALPLVDEAPGTSSRAADTPVPCDGNESKEDVPLDNAESTRKLEPNG

SEQ ID NO: 54658 - protein, 356 aa, Zea Mays
MFVYFIQDAGDGYAFTQGDYLLTYYIAELHSSVVTVKILKSEGSWKRPKRNLKINILLGGGAMISTDGVDGEVIHLTMPSESVVSSLVATSEFEHKKRMEMIQPIPDIEEPSGQEGAELSKIPVDLKSGDWFLKIVPWIGGRIISMAHIPSDSQWLHSRIEINGYEEYSGAEYRSAGCTEEYKVIRRHLEQSGEEESICMEGDIGGGLVLQRQISILKDNPKIVQIDSSIQARSVGAGSGGFSRLVCLRVHPTFTLLHPTEVVVAFTAINGSKQEISPEAGEITFEGDLKPNGEWMLVDKCVGLSLVNRFNPREVSKCFVHWGTGDVNMELWSEERPVSNETPLRICHQYEVQQTT

SEQ ID NO: 54659 - protein, 210 aa, Zea Mays
MASASVSAPVAGAGAGGGKDEELADLVRRLMDALARYADRLPFDLDRQLTLEQLVRHKLSEGRRFTCRLLGVILEETAPEELQNHVTVKPSVVEVLLEIAKFCDVYLMERILDDESEGKVLSALSEAGLFGGGGLIKDKVLFCSTENGRTSFVRQLEPDWHIDTSPEVVHQLARFIKYQLHISPQRPERIATNVFTAPSLEQYFGGLDQR

SEQ ID NO: 54660 - protein, 168 aa, Zea Mays
MAFAPPHLLPLPPPPAAASTRAVSARNHGGRTAPELSGPTPRVVVVTSGKGGVGKTTTTANLAASLARLGLPAVAVDADAGLRNLDLLLGLENRVHLTAADVLAGDCRLDQALVRHRALHDLHLLCLSKPRSKLPLAFGSKTLTWVADALRRSTSPPAFILIDCPAAA

SEQ ID NO: 54661 - protein, 55 aa, Zea Mays
MSMEYSGDYGRFSATLKLRPGRYEIKFLVDGEWRLSPEYPTAGDGLTQNNILVVE

SEQ ID NO: 54662 - protein, 933 aa, Zea Mays
MGRLAPGTSKAPGSCRSFCALARFLPVRSDTKRRGRAKRGEVLVWNSSAMRSDARLDSVVFQLTPTRTRFDLVLIANGRKEKFASGLLKPFVAHLKAAQDQIAKGGYSITLEPSSGFDVPWFTRGTVERFVRFVSTPEVLERVRTLESEILQLEDAIAIQSNDSLGLKSVEDHGRKLTESNGGGRANYDPDSATAIVVYKPGSNPTPQIQNETAAHEENSKVQLLRVLETRKTMLRKEQAMAFARAVAAGFDIDNLGYLIAFAERFGAARLMKACSHFIELWKQKHETGQWIEVEPEAMSTRSEFPPFNASGIVFMGDNMKPNLESGSINGEANGEDGAKADQKSSQQMGSHAAYPPWAMHPPSGAVVYPPYPMQGMPFYPGVNPYYPPYPPVDDPRYHYSGRKSSRKHSSDSKDSETLDVESDHCSSDRGSSHGRKSHRKGKRSGKKKPSVVVIKNVNVTSKKHGSSESESQSSSEVESADSDNSHSKSSERKHKSSSSKKKEGRRTTFASGDEYSKDEMSNGHDAEQGNWSAFQNFLLRAEEKTRSSDADLFAGEKEPPSRRKQNVNTADPILLAERDGGIVHERNIVGFDSANGRTRAIRVMSNDELVMSGEGRNYMHSEIKEIEAGGGRYRRGTGDDYMVYGQGSQIARHSLLDPLAEAQYKNPVQQDKNRNGVADESFMIPLRSSLHDNIGAESRTTIDIDVELPSRIHKASDEKAGHQLFYEPDELVPERGSEDVSFGYDPAMDYDSHMQTTVKVEDEKTEDDLPVADNDVQKVEKEKLRNAKDGSDKRRKDALLRRLSAPRTPLNDAQKRAQNLRAYKADLQKLKKEQEEEQIKRLERLKLERQKRIAARGNGKGPGNGSPKANGTNGLSKSVPTFTGLKKEKNGTTESLSDRLKRLSEPKSIAGAEHSLNPKSTGADHSRRRSMA

SEQ ID NO: 54663 - protein, 225 aa, Zea Mays
MEFEFEQKFTKEDVKELIFQEILQYHPQLLKDYKNGSEKTSFLYPSAVDRFRRQFASLEENGERNATLDRKHVSLPRTTTVHSTPIPAKEGPAATSQIAQRIPAARPGRVVGPVLPFESASVTDQHIARRVARNPAVPPATNTSSVYCYHLKSDSSDRQEHHLEREKDRRQYRPGQHFMDAKERSSWRCSLQWHRSGRWWLQPGRCSSLWSYKFVLRAMPLGRVI

SEQ ID NO: 54664 - protein, 290 aa, Zea Mays
MDGPIIGESSVAISDFSDYMDGENFMDVPDEHHTKIDTEITDILIEWGMPATMRAIHPIYFAKCLTKAIHNNNGEKMDSPSNGLSIVGYLRPAFIEEESYLRSMFHGDNGGYSSDWKVNETDEYNRETRPVSGTNRLIDDDKSRFDFNHAETRTDSMIYKLEIMTIELFSMYGKQFKIDPQDFQDSEPDILANSASSIIERIKENSDQCAAALRSLCRRKKGLTVEEASLIGVDSLGIDVRAFSGLEVKTVRFSFNAQALSERSAEKKIRRMLFPRYQRKNVKASTEDES

SEQ ID NO: 54665 - protein, 220 aa, Zea Mays
MCSNPRISGWGGWDEGEANGRWIKEMSMFNMSRTFKSTTGLSRRFLNLIAANHSPGVKSLHRIGLGRIFNSTPAPIPNGDRLESAAGQEDYMVRPRALDIIRLPTPVMSFRSSASFESKEWKLDCFPFSDCKVFCMDQSGRGFLFDANSCGVSTVAHLHTPKQLKTSFLLCLIDGAASSPSSACGLGYFIFLCALCFSAHFRACIPGIVITLFRLCNYLK

SEQ ID NO: 54666 - protein, 112 aa, Zea Mays
MLEPLFLHSSAIFFSWLEIMRVSSIVHNHGFGDFDRHRFRSPSPMSSPNPRANLPGNGFSPWSGLQERLGFPQGTSMDWQGAPPSPSSHVVKKILRLEVPVDSYPNDLEVIL

SEQ ID NO: 54667 - protein, 412 aa, Zea Mays
MMENQLSRSKDAASEALALREQAESLRSLVAKKIEEHKKISDKYNSQVIEIKSLKALVEELEQEKQELEFIADMYVKESSESRTIADIEESETRARNQAEYLRSNLEEHSLELRVKAANEAEAACQQRLSFAEVELEELRTKVDASERDVVELKEAIRIKEAEGDAYISDIETVGQAYEDMQTQNQHLLQQLTDRDDFNIKLVSDSVKMKQACSSLLSDKLMLEKQLQQVNTSLESSKLKIARGEEQMKTCVAQAIKTSAENRHLTISLERIALELSNTDKELKWLRSSVGSSEKEYEQTQQKISELRALLEHERSERRRLEEQYEEVKNEVMELTSETEETTVRKLEDEIKECKGILKCGVCFDRPKEVVITKCFHLFCSLCIQRNLEIRHRKCPGCGTPFGQNDVREVKI

SEQ ID NO: 54668 - protein, 71 aa, Zea Mays
MMELRDQVFRVWGLLRSSNNFDPSLLQPIVQVLQEPEARVLGSRVAGGVTQRLAARLLQQLLRTPPAPGSS

SEQ ID NO: 54669 - protein, 426 aa, Zea Mays
MEIQTSGKPIDVLMEKVLSMNILSSDYFKELYRLKTYHEVIDEIYNTVKHVEPWMTGNCRGPSTAFCLLYKFFTMKLTVKQMHGLLKHPDSPHIRAIGFLYLRYVADPKVLWMWYEPYLRDDEEFSPGSNGRKTTMGVYVRDLILGQYYFDSLLPRIPLPVTRQITANLEKMKLPTKLSGATGDSSRQGSEDTARRPPSVKASLSVSFGQRAPHRASTRDSSPVRRTVTRDGHRSSYSPSRRSGSREGPDHDRSDRELDHSSRDRERARDRSNRDRYHSSRDLDRDKDARDYHRHERDSRDREYYRSRHSEERRDDRRDHESSRHRRSSSRHRSRSRSRSRSRSRSRRSRSRSTSRRSLNEQRSSPFRDANKEKAATVSSNLAKLKDLYGDITAKKEDSDAEKLHRDSCAEEVIRLGGPRWRKSPA

SEQ ID NO: 54670 - protein, 80 aa, Zea Mays
MTPLQAAVAVVQKDLRPTIAVDTHPMLAELLQRCWQKDPALRPTFAEIVDILNSIKEAVRSSVHHKRHSCRSHSGRRRGC

SEQ ID NO: 54671 - protein, 89 aa, Zea Mays
MEHVIGGKYKLGRKIGSGSFGELYLGVNIQNGEEVGIKLEPVKTKHPQLHYESKVYMLLQGGSKSIVIYMIICSNLCPRLLVAYLVTHF

SEQ ID NO: 54672 - protein, 201 aa, Zea Mays
MHQGMYARARLTINPDKVYRLAMTKLNTSAAILEVMGAPLTGTDVRAYVMSGGGPKLKDFKFKLGSKRCFLIFPIKGSERRGLVSVEFKKKKGQYDMKLLAVDIPMASGPDQRLFVVGDEQEYKVGGGLISELRDPIVKAMAAEKEFDYLDEREDEEDERREREEAEQEEAEALRREEERLRQQAEERRRREEAESLEKAS

SEQ ID NO: 54673 - protein, 99 aa, Zea Mays
MADSKATSAVTLRTRKFMTNRLLARKQFVLEVIHPGRANVSKAELKERLAKAYEVKDPNTIFVFKFRTHFGGGKSTGFGLIYDNLEAAKKFEPKYRLIR

SEQ ID NO: 54674 - protein, 76 aa, Zea Mays
MYPNEIIADFAFLPFGGGPRKCVGDQFALLESTVALALLLRKFDVELRGSPDEVEMVTGATIHTKNGLWCRLRRRT

SEQ ID NO: 54675 - protein, 310 aa, Zea Mays
MRDGELNSLCRGLDKAFQVYTQLVTAPLVDKEDLAPPIPVLTRYKKELGIKAFVKKEVQEVRTVDERKASEITQLTMPKLCVRLNSLYYGISQLSKLEDSINERWARKKSENTNIRRKSEKSKSAVPNQKNQFDGSRKEINTAIDRTKVIFWDLQQPFVENLYRNGVAQARLDTITEVLDLVLNQLCDVIVEQLRDRVVTGLLQACLDGFLRVILDGGSTRVFSPNDAALLEEDLETLKEFFVSGGDGLPRGTVENLVSRVRPVINLIKQETRVLIDDLREVTQGGKSKFGADSKTLLRVLCHRNDSEAS

SEQ ID NO: 54676 - protein, 111 aa, Zea Mays
MFFLLVPHWQSISCTELLLNERSCTRDMKRPSLRCSKRCNGTKNLYKWVLGVLPIGPAAGATTSGGAAGPLLYCIEHRLSVVSTVVTFTKTNFFSNRPRSSFPSCLPRIPL

SEQ ID NO: 54677 - protein, 921 aa, Zea Mays
MSSSAAMEAIDELVQLSESMRQAASLLADDDPSDETASRRPSTFLNAVALGNVGAGKSAVLNSLIGHPVLPTGENGATRAPIVVDLARDPGLSSKSIVLQIDSKSQQVSASALRHSLQDRLSKGASSGSGRSRSDEIYLKLRTSTAPPLKLIDLPGIDQRVMDDSTISEYAGHNDALLIVVIPAMQAADVASSRALRLAKDIDPDGTRTIGVLSKIDQAAADAKTVSCVQSILSNKGAPRAAADIEWVALIGQSVSIASAQSGSVGSDNSLETAWRAEAETLKSILTGAPQSKLGRIALVDTIAKQIRKRMKVRLPNLLTGLQGKSQIVQDELARLGEQMVQSAEGTRAVALELCREFEDKFLAHITSGEGSGWKIVASFEGKFPDRIKQLPLDRHFDLNNVKRIVLEADGYQPYLISPEKGLRSLIKGVLEMAKEPSRLCVEEVHRVLLDIVNAAANATPGLGRYPPFKREVIAIASNALDAFKSDAKKMVVALVDMERAFVPPQHFIRLVQRRMERQRREDELKNNRSSKKGQDAELSKMNRASSPQTGSDEAGGNLKSMKDKSNKQDNDTKEGPNLQVAGPGGEITAGYLLKKSAKNNEWSKRWFVLNEKSGKLGYTKKQEERHFRGVIVLEECNLEEIEEEEISKSSKDSKKANGQEKGPSLVFKITNRVSYKTVLKAHSAVILKAESMADKIEWIKKIKGVIQSRGGSVKGPTEDGPMRQSRSDGSLDTMARRPADPEEELRWMSQEVRGYVEAVLNSLAANVPKAIVLCQVEKSKEDMLNKLYNSISAQSNAKIEELLQEDHNAKRRREKYQKQSSLLSKLTRQLSIHDNRAASYGNDSSGAEGSPRSPGHSGEDWKSAFDSATNGSVDRSSSQHETRSKSADSRGRRHENGDANSGSRRTPNRLPPAPPNGGRY

SEQ ID NO: 54678 - protein, 483 aa, Zea Mays
MEDQALAPLLQPLPLGETGAIKGRARRAALEWWVESKKLWHIVGPAIFQRIALYGVNVVTQSFIGHLGDLELAAFSIAATVVGGFNFGFLLGMASALETLCGQAFGAKKHHMLGVYLQRSWIVLLIFAAALTPTYIFMEDLLLLIGQSPELSRLAGQMSVWLLPQHFAMAMLLPLTRFLQSQLKNWVTAITAAVALAIHVVATYVLVRLLDFGIVGAVASADMAWWLVVLGQYVYVVGGWCPLSWKGFTMEAFADFWEFIKLSSASGVMLCLENWYYRVLVLLTGYLDNAEIAVDALSICQTINGWEMMIPFGFLAATGVRVANELGAGSGKGARFAIVVSITTSVVIGLVFWCLILYFDDKIALLFTSSAVVLDAVHHLSVLLAFTILLNSVQPVLSGVAVGSGWQALVAYVNVGSYYLIGVPLGIILGWPLHLGVGGIWSGMIGGTAVQTLILAYLTAKCDWHEEAKLASMRMKKWADESK

SEQ ID NO: 54679 - protein, 202 aa, Zea Mays
MATRISTVFASMREFPRVHYRIAKTIDASTMTTLRDLVPTKLAASVWNCLAKYKTTIPEFPQTETCELLIVDRSIDQIAPIIHEWTYDAMCHDLLCMDGNKYVHEVPTKNGSATEKKEVLLEDHDPVWLELRHAHIADASERLHDKMTNFISKNKAAQLHQARTDGELSTRDLQKMVQALPQYSDQIDKLSLHVEDLLAWDP

SEQ ID NO: 54680 - protein, 154 aa, Zea Mays
MPLLEILELGIVSHSVIIGLSLGVSQNPCTIKPLGAALSFHQFFEGFALGGCISEFKSFSALLMAFFFAITTPAGITVGSGIASFYNPNSPRALVVEGILDSISAGILIYMALVDLIAADFLSKRMSCNLRLQVGSYIALFLGAMAMASLAIWA

SEQ ID NO: 54681 - protein, 886 aa, Zea Mays
MAAGSGGGGFLGDVNDPWLKPRLLRAVVTGRLPQPGAAAELSPTEVASILEVVRTHGLLTEDLPGRGALVNPKLAEAWRAAVDAWVERVVALVESDSTYSCWLGTCFLGVTFQECRNDRFAESHSIWFEKILSNLQQSSSFQLVIVISCTSMSDLFVRLAKFSNLKKEGSSFAGRVVEPVLRLLNQNGLVADEAIDLLRTVIKLYPSSVNRHYNKVESAIAAKIMSNVKPSEKFARTLALLPSVRVSEDSWSLMIRRILIVVNNLLNDAFIGLEEEKKGHDIMLLLVPPGTDPLPTLGDEVMPGGNVHIMKKFRVFTVPTISALTLCCSVMLTSYYPVQVNVPIHALIALMRRVLLVDGSLHNKLFPSTTSLHQELICFDLPSLHSTFLDLLNATIKGMRSQLLPHGASIIRLITEYFKIAKLPTLRTKTYSILQLLLTSMGVGTSLHLLEATVRNAVADLNDDGEINMTMINTNSSQLTNESSSKVYSKKRKQEPQMQNSTISGSEKVAISPRKRKGSSIPITSKGVAPESTGDVTLSTPHSVKIAALETLEVLLNVGGSLRMDRWRSEVDMLLINVARSACGMGGSYEQKPSTFGEPNISDFQLASLKGLLASFLSSHARPPYLANGIELFRKGKLEIGTKVAEFCSHALLALDVLVHPRALSLERTVPASSGFNYTAQKKTVFGAGTHQISPFGDQPQAMEVEDMYDDWLISNNNEPPEVPVNGSDAVVSKGVLVEDGKQLNPIAEDPKVDPPRITDAAQDAPASTKTDVKVVDAAAATAAKPNTAENPSSSNAVPSPVRTTDSDSRKHASFPEQDSPHENKSAAVHPGEASATPGVGSSHHRHEAPEARSASFTELFGSESGIESESEDLMPDIVDGDPDSD

SEQ ID NO: 54682 - protein, 338 aa, Zea Mays
MVAIENQSQALAAAWADVADCRALEVVPLKGAMTNEVYQARWLTAGPAGQKEEPRAEREVRKVLVRIYGDGVDLFFDREDEVRTFECMSRHGQGPRLLGRFPNGRVEEFIHARTLSAADLRDPEISALVASKLREFHNLDMPGPKSVLIWDRLRNWLRTAKSLCPPEEAKEFRLDSLENQITALENECSGDYQWIGFCHNDLQYGNIMIDEETNVLTIIDYEYASFNPVAYDIANHFCEMAADYHSSKPHILDYSRYPDVDEQKRFVKTYLNISGEEPDAEVVENLLQSIEKHTLASHLVWGLWGIISDHVNDIDFDYKEYARQRFEQYWHKSAILTS

SEQ ID NO: 54683 - protein, 405 aa, Zea Mays
MVGCSRGSLPTWMTAAAARVDLSGGVTPSHQGSPSPPHSSSGPAPAAGADQQLGLFERALSAAGAAFVSAIIVNPLDVAKTRLQAQAAGVLYHQPAQMAALGPDAILSEFRCSPSCTRGLLLGSEPVCPPDCFQYKGTLDVFLKVVRQEGFSRLWRGTNAGLALAVPTVGIYLPCYDIFRNGIEDFTRSNAPGLTPYAPLVAGSVARSLACIACSPIELARTRMQAYKEFRPGLKPPGMWKTLVGVLPPLAGSSQNVQNYRVLWTGVGAQLARDVPFSAICWSTLEPIRRQLLGLLGEDGNAASVLGANFAAGFVAGSLAAGATCPLDVAKTRRQIEKDTEKAMRMTTRQTLTEIWRSGGLKGLFTGVGPRVARAGPSVGIVVSFYEGAGVVSSVLCAQCTTCRQ

SEQ ID NO: 54684 - protein, 533 aa, Zea Mays
MNDTGTLLLSGGTEKVVRVWDPRTGSKNMKLRGHTDNIRALLVDSTGRYCLSGSSDSMIRLWDLGQQRCVHSYAVHTDSVWALASTPAFGHVYSGGRDQSVYLTDLSTRESLLLCTNEYPVLQLSLQDDTIWVATTDSSVYGWPAEGRTPQKVFEKGASFLAGNLSFSRARASLEGSAPVPVYKEPSFVIPGVPAIIQHEIMNNRRHVLTKDTTGSVKLWEITRGAVIEDFGKVSFEDKKKELFEMVSIPAWFTMDARLGCLSVHLDTPQCFSAEIYAVDLNVAGAQEDLKINLAQETLRGLLIHWSKRKQKSSSHSLCNGDSSIGKDVPSKDSPRSRPEVDDATQNHATHVLPSFEFSTVSPPSIITEGSSGGPWRKRITDLDVTEGDLPWWCVDCITLNRYPKENTKCGFYLHPAEGSPAPNITQGKLSAPRILRIHKVANYVVEKLVLDKPLDGGSDAFVMGLSSAQSQLSVLDSSSRLGLKPWQKTKPCIEILCNNQVLSPEMSLATVRTYIWKKPEDLILHYRVVQPR

SEQ ID NO: 54685 - protein, 393 aa, Zea Mays
MSMIILHCNAYNKGKTLVFSKVPLPDYRADLDDRHGSTQKEIKMSNQTEARVEDLLSRSKWNNNSASTSTVSTRQIFPGASSSVVEPAAPIDKEKLSSQLRELQNSRKTTASARSMQSFREKLPAFSMREGFLKAVAANQVLVISGETGCGKTTQLPQFILEEEINSLRGADCNIICTQPRRISAISVAARVSAERGEELGEAVGYQIRLESKRSAQTRLLFCTTGVLLRRLVQEPDLIGVSHLLVDEIHERGMNEDFLIIILRDLLPRRPDLRLVLMSATINAELFSMYFGDAPVMHIPGFTFPVAELFLEDVLEKTRYRINSERDNFAGSSRRKRFSSVKSDPLSDVFEDIDITKEYGNYSSSTRQSLEAWSAAELDLSLKNCFGNQHCGE

SEQ ID NO: 54686 - protein, 233 aa, Zea Mays
MLHRNYSLMRELDKSLHGVQLENEQRCQQEIEDIKHGLESGSITYDPAKLKFSEEAMEEQKHCVRIADEKVALATQTYDLVDAHIQQLDQFMRKLEEIRQGKEAAAAVTAGTAVATTATPTVNAGATTADANPKSGRSGERGRGGRKKAKVPTEQSVPVPVPLPPIDLELPVDPNEPTYCLCNQVSYGEMVACDNPNCKIEWYHYGCVGVKEQPKGKWYCPNCIGFQKKRKGK

SEQ ID NO: 54687 - protein, 343 aa, Zea Mays
MKDLGFPVTTFSSNQLLLLYKRLDKKKIADVLTMMEKEDVKPSIFTYKVLVDAKGMVGDVEAMEKVVESMVKDGIEPDLTFNATIARQYIFNGQRDKAETLLESMEGDDIQKNRAACKFLLPLYAFLGNGDAVERIWKVCEDNTRIDECLSAIDAFGKLGNVEKAEKVFEDMFVKWKNLSSKYYTALLKVYANQNLLDKGEELAKRMDEEGAKFGTPTLNALVKLYADAGEVEKAESLLHKLSLKNNVKPSYSSYMTLLDSYSKKGDVHNSEKVFNKLRQIGYTGRIRMYQFLLHSYLHAKAPAYGFKERMKADNIFPNSAVATLIAATDPFVKKKSVSDLLD

SEQ ID NO: 54688 - protein, 405 aa, Zea Mays
MVCETNETNLDIGIHAVLLPKDAGSSLQRSLSSGEVLVELYSPDRPLVDTAEVFLWLMAVGTILCASYWSAWSAREADIEQEKLLKDGREVAPNFEPGGSSGMVDINMVSAILFVVIASCFLITLYKLMSHWFVELLVVIFCIGGVEGLQTCLVALLSMSRRFKPAAESYVKVPFFGAVSYLTLAVCPFCILFAVLWGVYRRLPYAWIGQDILGITLIVTVIQIVRIPNLKVGSALLGCAFLYDIFWVFISKMLFHESVMIVVARGDKTDEDGVPMLLKIPRMFDPWGGYSIIGFGDILLPGLLVAFALRYDWAAKKTLQSGYFLWSMVAYGSGLLITYVALNLMDGHGQPALLYIVPFTIGTFLALGMKRGELRNLWTKGQPERVCTHMHPSPKDSPVAVSSLS

SEQ ID NO: 54689 - protein, 90 aa, Zea Mays
MGTPNYSLPAPSLTDVPVAPYPHTFSVTPIAPYLLPPDPRPQYTLAKDPSAYPPQAPGTTYGPVGAISKVYARHTLIRSPTSGAAGMQAS

SEQ ID NO: 54690 - protein, 132 aa, Zea Mays
MHFRASKADCVFKGDYVLSEDGQIEMALLYPGHRYTLVRMHLRLRGTTVGANNRLDVLKILTTGVNATELQNWKGSILELVEGWEEDETHDPDVPAVSHSRGLSPFVFVPFEEADTSVLNLPVEKMDYYVPG

SEQ ID NO: 54691 - protein, 2543 aa, Zea Mays
MTRVEENLGGIGAVKVRSVHNSVMELRNICNHPYLSQLHVEEIEGYLPKHYLPSILRLCGKLEMLDRLLPKLKATGHRVLLFSTMTRLLDVMEDYLVWKKYKYLRLDGHTSGHERGALIDKFNDPNSQAFIFLLSIRAGGVGVNLQAADTVIIFDTDWNPQVDLQAQARAHRIGQKKEVLVLRLETVRTVEEQVRASAEHKLGVANQSITAGFFDNNTSAEDRREYLESLLRESKKEEAAPVLDDDALNDILARSEAEIDIFESIDKQRREEEMAAWQKVVQDGSTSGLDPGVLPSRLVTDDDLKPFCHAMKLYEPSNVKTVNVNVRKKGELGGLDTQHYGRGKRAREVRSYEDQWTEEEFEKLCQADSPESSQPGGMSKDLDILNKGIKTEILVESSKEPEQTKMEASPTVGDSPPAKRRRGRPKRSDVFVSPTAGLTDAVKQDTGTTQDGSSATPASTIHSDAPATAINSAVSDVNIHSIPPADTKKQEFSTDTKVSSSVSVLEGSVPNEIGTPLQSVHNVAVSAPPHQSARGRKCQAGETPRRRGRKPKSLSSSGVDDVSLNPTFSTVSGVADTSYVPSYSQVSSQGTAVALAGIQKDFVTVKLDTLLPDSGKGAPPVNEGDKGATVTTPVAKDICAGTVTTSDNTVTLTPNTLKENIGLVQVASAPSMLVASEELMKIAHVAVADKPVEKQTASRRRRKKTSSSEDTGVSTRQRSAMKRSYYNTSVAVDDIGSAVIPNEKSGITKERDVSSIQSTSNELPNINSPLYEKSGYDSQPSTPIAVPINEDTLPSGFDTCTNSMITLATSANSAEDDKPVDLHLNAPVSVDSQNQEQHMTGKDHLAVCSRIFATQLQTDTANPAIDHKPGTAQFEPSASLPQNSGKDATALPSEVDSAAPNRASSRRRKGSTREPRTRSNSASAASERRARLTGLKQAEDIKKLEMSATPTTTVCISSVEQQGAASLSAKITNASVSEGQKNPGNYMPSAISIPVGSHVLGLGATSIEETTATMITQAPAVSKSERRKLPGGSQQGIQFESSASKTKMVSAVEPAPANVECMQGTEVNSSEQTIVSATEPAPANDEHMQEQPTNIVSSVESEPSNDEEHTKHEVFLATTGDNMLASSAGTEILRDTVEHAACQPEAVCTDGTARQSELSQLDRKAFHDASYKYTHGSTKDDGILPSEGTSVDVTGSKQDDVNIVGTQTDDVSRGSSHFPVILQSTESDRPPGQVKNLESRMEQVKTEEALVNSSGGNQTHSLGDEPSHNTSLARNSPSEHSNERCSDQVIGENFKSKENIVEVHSGINTDGPDEALNALHTQSKEASMTDIGVPTDGDRCEGKGTSVEVCADMNTDGPVATQDASSTKSDKESCMMECGVSTDGCPTVCKTHNDLQGHVSCEETFVRTGGDDTTHITNANYGSNNESEATIASPVETTQKLMEGSTVIVSENSDLNKQCHTLHTRNDPPANTLLIVESNKVTCDAEIVCASRLESSGIEAETVGIQESALTDFEGTKGTGDLGDRTNSQLHDDVHGTSCSTIALVSEKEPSEDLTTGSHSEASNLLAAVEQTQETTVENQEIIDAVVFMDACKAEPVGDFTIAKGAEQTVEMVHYVDKQSAVLDYVETQTKRTSVCGSTLNESPQAAGLEEDCSVLKHGDPTSSELLTVAPNPIGETSVIQVEPEARNSDGYCTTEAGSALSETVMGLEPNKETAVPMQENIGEANDNFNNCEAHNNSEIHAFEVSMETQSSEVKEVSSIQSGAANLSTQTTALPDVTGQTSMASTGELVSTNEHIHMQGTEINSEQQTKMVSPAESAPANDEHVQDIVILSSEQQTKMVLAAEIDALCVQETAIIDLGGARGTVDLNDIRTQVPALPGRDVLDVEAHILEQKKTSSPGDEIKGSEQAKIESIAEIETVGVKENVIADHKETGNNSGVSIHAPLLVESGQKASPGVELRGIEVDAHVLEQAKMVSALEPDSTPEVCADKLEPSGADDVGMIVVQEAASVDDHNRAQGGEAHCSEQIKMASIAQAVSSMALVGYSSSEDSMVDAAARVTDADFVDSKAAGVYRQETMPTQTTSTLPENMDSPATAATMVESKFAASSEHVAGPEPIDETSVMQVELATSTGDGCAADGHNLVSSETVVEVKLAQEIVVPSPGGSIEANNTSTISEVYKDTQSRASGEACNDGQSHGDENMKLGEAYTELQLAPSSGEEAMTCMCSELPSQEVEAPSSDPLENNEETKNEAAAQGSVNEDSAPRAENAKIDEADTEQELLPSGEATVDESSELLSQDEKVARKDAKMEESAAAAAAQRQLTTEVAHASENAKLGEDGTELQLPPPSMVDISREQLSQEVEVASSGPSGTDETAEMKRLNTEHSPGDETSKLVGTDLGLQLSPSGDAMVDISNKPPSCQDVKEAPSSDILGNDENSDTEKTPAALHGRLNTELAPSGRNTEFSEADTGKQETPVSAEAMVESSSEPRSHEAKEAPTPDLSGDDEKAKSARAAVVAELFGDATEGGSDQPLPSPREQGKEAEADGGF

SEQ ID NO: 54692 - protein, 150 aa, Zea Mays
MYSAHRYSMLHSAGHLLDICVHNVGLFHLEPGKGYHFPDGPFVEYKGIIPPDQIPVKKNELEREANRLISEGAKVLASVFPYEEAAILCGGSLPSYISKDSNPRIVKFGDNPGGPCGGTHVADISIINSLKVTNIRVKKGLTKVSYSISP

SEQ ID NO: 54693 - protein, 704 aa, Zea Mays
MYGSEVSLGNPSPSHICMLDFGDPFRKHHMVCRYRNKPQLPWSAISSSSGVFVICMLVGYIVGAAWSRYDNVKEDCRKMEELKKQAEAADVAKSQFLATVSHEIRTPMNGVLGMLDMLLDTDLTSTQRDFAQTAQVCGKALISLINEVLDRAKIEAGKLDLESVPFDLRSILDDVISLFSSKSREKGIELAVYVSERVPELLLGDPGRFRQIITNLVGNSIKFTERGHIFVQVHLADHSNLATEPKVESVANGMNGHKDEKTAVATSVSLNTLSGFEAADSRNSWENFKLLLSYEKNEMPYESVSDKVTLVVSVEDTGIGIPLDAQAKVFTPFMQADSSTSRTYGGTGIGLSISKCLVELMGGQINFVSRPHVGSTFTFTAALQRCDRSAIGDSKPVMLHPLPSSFKGLSALLVDRRPVRATVTKYHLQRLGIACDVVATIELALGVLSGRNGSSLTSTKQPCMLLIESDSWGFKIDVPLRSRLLEMKQNGPPGLPKTILLAAAESGKLKAHYAVDSVITKPLKASGLAACLFQTLGITQSSNERRDNSGSLHGLLLGKNILVVDDNKVNLRVAAGTLKKFGAKVECVESGKDALASLQVPHKFHLCLMDIQMPEMDGFEATKQIRAMEAKANEQAVACDDSETDGATRAARWHLPVLAMTADVIQATHEECTKYGMDGYVTKPFEEKQLFQALQKFLDPGMSS

SEQ ID NO: 54694 - protein, 356 aa, Zea Mays
MVMPATDILMSAQRKSRNVPPTKGIANIAKRERNKGAKQLDALMKELSVPLRTYTENFPKRRDLHPYERSLIELTFGEGYYEQVLGRVDTLRKRITSVGKQHASVCAKSTTKREAEERLTEGRKKLEEAFQHGKHAIDDLVNVAKALRSMPVVDLHIPTLCLVGSPNVGKSSLVRILSSGKPEVCSYPFTTRGILMGHIVSNQERFQVTDTPGLLTRHDDDRNNIERLTLAVLSYLPIAVLYVHDLSEDCGTSVADQYITYKHIKDRFGDRLWLDVISKCDLLGKKEPISFHDADEDVARYRRLGPEGALQVSVQTEIGVKQLKERVHELLTSQMARIKSSKAEHETHEVGTSVVY

SEQ ID NO: 54695 - protein, 291 aa, Zea Mays
MCYKAYGSGKEDSPLCDVPGFENTRMKLLRHVSFVDCPGHDILMATMLNGAAIMDGALLLIAANESCPQPQTSEHLAAVEIMRLQHIIILQNKIDLIQESAAMNQHEAIQKFIQGTIAEGAPVVPISAQLKYNIDVICEYLVKKIPIPERNFTSPPNMIVIRSFDVNKPGSEVDEIRGGVAGGSILRGVLRVNQKIEVRPGIVMKDETGNIKCTPIYSRIVSLYAEQNELQFAVPGGLIGVGTTMDPTLTRADRLVGQVLGEVGSLPDVYVELEINFFLLRRLLGVEAHQG

SEQ ID NO: 54696 - protein, 549 aa, Zea Mays
MHTTPVSKHRQHAQAGKALDHRSEGLMAAGGGGGGIADEKAPAAEAFGGHLEAAEMTEAEEEHSGVKSRLSGLLWHGGSAYDAWFSCASNQVAQLFYGLLGSWTAYLISILYLEYRTRREREKAADFRNHVIQWFEVLDGLLGRHWRNAGLAFNCTFLLFGSVIQLIGCASNIYYVNDRLDKRTWTYVFGACCATTVFIPSFHNYRVWSFLGLVMTTYTAWYMAVASLVHGQVEGVQHSGPTRIVLYFTGATNILYTFGGHAVTVEIMHAMWRPQKFKAIYLLATLYVLTLTLPSAAASYWAFGDELLTHSNALALLPRTPFRDAAVVLMLIHQFITFGFACTPLYFVWEKLIGLHDCRSLCKRAAARLPVVVPIWFLAIIFPFFGPINSAVGSLLVSFTVYIIPALAHMVTFRSPQSRENAVERPPRFAGGWTGAYVINSFVVAWVLVVGFGFGGWASITNFVQQVNTFGLFAKCYQCPPHLTAAPPAAFMPPPPPMAAAPSMPPAATAFNATGLFFPPLPAPAPAPSPMINFFLRHHHRGHHGRHGL

SEQ ID NO: 54697 - protein, 1268 aa, Zea Mays
MLFLAGLIGDLNAVSASELGELDYDTRLNTYDKVRPQLFLGLTEEHVGAILSHCVYDMSSEELILRQSASRALQSFLDFSASVMNNDVSKYSIDDKFRENNTRSICTMGCIQKILEKTYLHNMGVAMTKDVSIQKEWIILLREMVSNFNHLASLSSFRPLCKVDIEEDFFHNITHLQAGKRSKALLLFRQGIKENNFSEDITMKVFVPLFFNMFSDVKAGKGEQVRDICLDTLSAVAAKVQWEHYRTILKRCFRELNLRPDKQKIILRLICSILDAFHFMKPANDASGNSDALSEDIDSSLTFSLVTVSSDKQQYMQKVVFPQVQKLLGSDPEKVNVNINLVALKILKLLPVDYFESQLSSIIHRICNFLKNRLESIRDEARSALAASVKELGIGYLQFVVKILRAILKRGFELHVLGYTLHYLLSKNITADMYGRLDYCLEDLLAVVDSDLLGDVAEQKEVEKLASKMKETKKRMSFETLKLIAQSITFKTDLLKKIISPVSLHLQKQLTPKLKTRLEMMLHNIALGIECNSSTETSNLFIFVYCLIEDTITGSRSECKENTQSSPDQDSTVRKTFLGLGESGSQNSYILTKFALDLLRNRLKSIKLDKEDEQLVKMLDPFVDLLRKCMSSKHASVLSATFRCFALLVKLPLPSLRDNAITIKNVLMEILQRAGNSNGHLVTSCFKLLADLLRGFRISLSDNELQMLVHTPMFVDLQTNPSPVALSLLKTIVRLKLVSHEIYDIVVKIGELMVTTLTESIQQQCIQIMLQFFLNYPLSEKRLQQHIDFFLANLSYEHPSGREAVLEMLHDILTRFPQRIIDEQGQTFFLHLVVALANEQHQNVSSMILRAIQKLLGRIGGQGKSYIYEYSLSWYTGEKKSLWSASAQVIGLLVGDHTLQMGKHLKSILAVVKKIMESSIIASGAIQLGLSDEAALPLWKETYYSVAMMERLLLRFPELYFEKNMEDIWIILCKLLIHPHSMLRSISSSLVASYFATVEKRKHEQKLDAPSWLLVQPSRLFIIAVSLLKQLRSELSDTTANNLIVQNVAYSVCNLHMLIRQSTSTHQFWSSISSDRGAFLEGFELLGSRKAKNIFLLCTSTSSDVSGSSLDTNEEPTSLLVSSILKKMGRIAMQMQDTQIKNVFNCFNMISSALGPDESLTYADHLLAPLYKVSEGFAGKVVSDEVKQLAQGVQNKLRDLIGSEKFVEVYKSVRMGLKQKRDGRKQAQKIVAAVDPERNAKRKQRMAAKHREHKRRKIMAMKIGRWMR

SEQ ID NO: 54698 - protein, 461 aa, Zea Mays
MPRNLECPVQTQMAVSALDRTLSSEYPTKSKSETKVGGWKRVFVQTDVGCVLAIQLNCGDNAHTVKRKLQVALNFPTDESVLKNDLSTIRNDFPLLLTKTFMHRSSSTPCLSPSGKDLQQQKDRGCPIELLVCPSRCSRTRQLVKDVARAIKKGVDPVPIKSGLGGAYYFRNSKGENAAIVKPNDEEPFAPNNPKGFIGKSLGQPGLKRSVRIGETCFREVAAYLLDYDNSANVPPTLLVKISHPVFHMNEDINFANKNIADGSIQAVSKTASFQQFIPHDFDASDHGTSSFPVSAVHRIGILDIRIFNTDRHAGNLLVRKQTGAGKFGNHTELIPIDHGLCLPECLEDPYFEWIHWPQASVPFSEDELEYIANLDPVKDADMLRMELPMIREACLRVLILSTIFLKEATAFGMCLAEIGEMMSREFTGMEDQPSELEFVCMEARRLAAEQEDSSTELDSV

SEQ ID NO: 54699 - protein, 74 aa, Zea Mays
MYKPMCISIVVHILLMLLCNMYRSEQFFLSRLTSLCLIHRTPAVAVVETEPCRFFDSESSGYALILLLTKRSNC

SEQ ID NO: 54700 - protein, 376 aa, Zea Mays
MHEEKLYYLSESSEEDLLYHSETPIGSFEIGSGSVLLRHPNSKSLEEESKTSSIPADNKSYITSESYSDSASFVVHSGNKAAINLNLPTARPKKSPLHMEDNARRDKLHYENQHVLESVDSPLVSVDLEDVINYTNFMKYLTKEDRRQLLKFLPPVDSLTPPESLRSMFSCIQFSDAIDSYQMLLREGILDPSLCGDEEWKKVKTLALTNLTKCSWLECYKQKKGAKETGGVGGISGPEGFTKSTMKPLKRPRDTHFQSDAELDGTMRSPLRVLKSGALALQFESSSLPKSGYATEDSTCTGGAPNLFMLPLEKLPLLVPSQYAVSDQDLLLEIPLNARHPEAELLCQPSQLMSSITSSSTSMGGVAEGEGYLKQP

SEQ ID NO: 54701 - protein, 262 aa, Zea Mays
MRRDLASSFATAASSSSAADALRGWWDDVNESPQCQDAAFFSLAAAYALVSAVALIQLVRIQRRVPEFGWTTQKVFHLMNFLVNGVRALVFGFHVHVFLLRAKARSLPTDKLRPAYIAVNTIIYVVQVCIWIYLGINDNAVVELASKIFIVAVSFVALLGFSVYGGRLFVLLRRFPIESKGRQKKLYEVGTVTAICVTCFLIRCVVVALSAFDADVSLEVLDHPVLDFFYYMLAEILPSALVLFVLRKLPPKRVSAQYHPIN

SEQ ID NO: 54702 - protein, 1115 aa, Zea Mays
MELSKIQDGFLVDDVLEIIAQVQVIREKVDRPFRCLDRPYRRELIRIYMTNVEQIYRRFVEERRSKLSKLIEDKMKWSSFRAFWSAIDPNTRHHMSREKTETILKILVKQFFVEKEVTSTLVMDSLYTSLKALEYRMKSKKCKTKLADLEELPAPMVHVDMDMFVLADDVIALLERAALEPLPCQPVAPKDDKTSQSRMKDGSSGEVYKVSMEREERRLTELAQKILETFVLSHIFSGIEVAYQEAVALKRQEELIREEEEEAGLLEHQMKGKRGGGANEKDKRAKKKQTKQKKNNRKAKDKERDVKCEVKILERLHDETVIDNSDGLPAKVEVIAKVDALEEGSSDGSDMPNRGKNQCNKGLSISLAKEGDGLPSTSSVTGGSGRNSSGCCTAPKLDQDTVLLTLRDKLRKLGQRLQEKNIEGQKLLKAHFEARDTKVKVEESSDSSNSLDRPPDVPESSMHSSEDTVDLKVNGTPNKDASVVNPVLEESVSGIPVTAKNESLPSARTKEGPVSNKDNASSLKMKTMASCLKLHPADVDKDAPFPSKSPRINRAAPVPSKLPSADKATPVLPKSSLSVNKAALVRPKSPAVDKATPVCPESPAVDKVTPVRPRSPAVDKATPVRSQSPAVDKATHVCPQSPSVDKATPSIDKATPVRPKSPAIDKVTPIPPKSPPVDKASPAPPKSLSGAKDVPVPSRSLQIDRFIPAPPRLSQVDKAALPSSEQPHISPATNSEAQGATTSRKVTASSVLEVAAASRPSSAPVLPTPRSTAPVASHIQTSTLLSRSMSEAAGRRSVNDPSFSAPSYTPQTYRNAIIGKTGLATTSANLAYQSYSLGQDTAPSQPLSAYASSTAVMMPPAGRSDQSSARHGFKSGSGKLEAHDSWQQWKGDNNVDMHLWRDHTTYQQMTRGQAYDQSRRDDTYQQTCSRGTEKFSRHAGLQARQFQTETPASHVWHQQQGQVAEEFPHLDIINDLLEEDQINGSIPESFHQDYNVFGLPFSPRGNVSDMGMASVRSPARFNSTKYEYDGGFSGAYDINAVNGLRERQFPSLDSYSNGLSDVSASKPWLNGSPSPSVMSLGVNTNGYHPQVADYPSLGNGVNGVSLWRRHANGRW

SEQ ID NO: 54703 - protein, 104 aa, Zea Mays
MVVMVSVTLKKKEMKSFFMKTWITSIWKNTIHLLSSDITGGIMNPASAFAWAYARGDHTTFDHLLVYWLAPLQATLLGVWAVTFFTKPKKIKEQKVDENKIKKE

SEQ ID NO: 54704 - protein, 690 aa, Zea Mays
MFPIQHRKYRSGIENLLVLLIGGIPIAMPTVLSVTMAIGSHKLSQQGAITKRMTAIEEMAGMDVLCSDKTGTLTLNKLSVDKNLVEVFCKGVDKDHVLLLAARASRTENQDAIDAAMVGMLADPKEARAGIREIHFLPFNPVDKRTALTYIDADGNWHRVSKGAPEQILDLCHCKEDLRRKVHSIIDKYAERGLRSLAVARQEVPEKNKESPGGPWQFVGLLPLFDPPRHDSAETIRKALVLGVNVKMITGDQLAIGKETGRRLGMGTNMYPSSALLGQNKDATLEALPVDELIEKADGFAGVFPEHKYEIVKRLQEKKHIVGMTGDGVNDAPALKKADIGIAVADATDAARSASDIVLTEPGLSVIISAVLTSRCIFQRMKNYTIYAVSITIRIVLGFMLIALIWQYDFSPFMVLIIAILNDGTIMTISKDRVKPSPLPDSWKLKEIFATGIVLGSYLALMTVIFFWAMHKTDFFSDKFGVRSIRDSEHEMMSALYLQVSIVSQALIFVTRSRSWSFVERPGLLLVTAFLLAQLVATFLAVYANWGFARIKGIGWGWAGVVWLYSIVFYFPLDLLKFFIRFVLSGRAWDNLLENKTAFTTKKDYGREEREAQWATAQRTLHGLQPPEASSNTLFNDKSSYRELSEIAEQAKRRAEIARLRELNTLKGHVESVVKLKGLDIDTIQQNYTV

SEQ ID NO: 54705 - protein, 293 aa, Zea Mays
MLFLVLIEALKYPFIEPPQNHPRDLYRKGALACVTGINKANIVDGSFKLCAYLAWPKSASKVNSAAPSNAATATEKDKTHTEKILVDIDLQHKFQKGDKSKLTSQTKEAIMKKKKSSKLPNDNDTKLTSQGAAEVPQTSKSSEGKRKVGKNKHASVYQKPLKKAINNRNVDESQLTHRSAAVLQTSNTSKGKRKASNLGGSSRSKSYASDLEPHAGFISPAIRDNGSDAYNRQRTARYDIHPIDVHPYARAPPSAYSGYKSHAGYEAANTYEYAGNRAPTPPSGSYIPRRGHY

SEQ ID NO: 54706 - protein, 706 aa, Zea Mays
MALAHASAMFPPSSPSHKTWEDPSFFKWRKREAHVPLRSQDTLEAALKYWHERRNVNYHNADTAVWNDDAVRGALESAAFWSKGLPYAKSLSGYWKFLLSPSAESIPERFYYAHFDDSNWSGLPVPSNWQMHGFDRPIYTNVTYPFPLNPPFVPADNPTGCYRTVFHIPKEWKGRRILLHFEAVDSAFFAWVNGVLVGYSQDSRLPAEFEITDCCHPCDSDKENVLAVQVMRWSDGSYLEDQDHWRLSGIHRDVLLLSKPQIFITDYFFKATLDENFSLADIEVEVEIDSHKQDQEHVPTLSIEATLIDNSGLSNSIDADLSSANAVNLKPKPKRTRSPCLGFHGYVLGGKIENPKLWSSEHPNLYTLVVLLKDANGKLIDCESCQVGIRNVVMAHKQMLVNGCPVVLRGVNRHEHHPRLGKTNLEACMIKDLILMRQNNINAVRNSHYPQHPRWYELCDIFGLYVIDEANIETHGFDESNTFKHPTLEPIWANAMLDRVVSMVERDKNHACIIVWSLGNESSYGPNHASMSGWIRERDPTRLLHYEGGGSRTSSTDIVCPMYMRVWDVVKIAKDPSETRPLILCEYSHAMGNSNGNIDAYWMAIDNTFGLQGGFIWDWADQGLLKEDSDGSKFWAYGGDFGDTPNDSNFCLNGIVWPDRTIHPALHEVKYLHQPIKISSADNMLKKLWTSVGFFMEMVVSWALVH

SEQ ID NO: 54707 - protein, 856 aa, Zea Mays
MNSPNPFDKSDIVSIVPVCKHVVYSSIDGRNLLESSKMALDKGKLDDAVSYGTKALSKIIAVCGPYHRLTANAYSLLAVVLYHTGDFNQATVYQQKALDINERELGLDHPETMKSYGDLSVFYYRLQHIEMALKYVNRALYLLQFSCGLSHPNSAATYINVAMMEEGMGNVHVALRYLHEALKCNKRLLGADHIQTAASYHAIAIALSMMDAYSLSVQHEQTTLQILQEKLGQDDLRTQDAAAWLEYFESKALEQQEAARRGMPKPDSSIASKGHLSVSDLLDFISPDQERKERDMQRKCRRAKNNIRAHHGESVEEKENFQLVSGSPLEASKDSFQEEKLDVHPPAVLEENYAAHDEHKQCDVLSPEEYSDEGWQAASMRGRSANVRKKSSRRKPALMKLMVDHFEGSHTGSVYRTGLQPQTKGDKEDSVSAPSQLSFGSFLKTDKLNGDSSIAEDKTCNGSANQEQRTKLTGINRPTSIASKFISYKDVAVSPPGTVLKPILEKKEAKEKDSGRDIDLALSSEEEDKKFTEKEKEKPSEDSSKEILSIQRDLESHAEIPPDSNSDEGPSAASKASGSKLSASAPPFNPGSVLSMSQPYSTVAVYDASAILQAIPSQAMEILPSAIDTRVPRGPRSTLYYRTGHSFQRKQGYTHSQSTIVRGSYSPTTMNPHAAEFVPGKTSQQSDVADREPSPANPVANSDLDVVSQTTDEARAETPATEKAGQVEKVVSGKGKENRGKDIVRNSYKTELARQILLSFIVKSVHDSLGPSRAEPERKPSGSDEASNEQTSVLGKNASGSGRKDPDKQEKATEVTKGLKDTEGFTVVSKRRRRPQPFMNPINGLYSQPSICTSVS

SEQ ID NO: 54708 - protein, 159 aa, Zea Mays
MTYRMLAYCFRVMSSKYSPIYLQSRIDNFIDGLSALLDELNEETFEHHRSGLIADKLEKEPSLSYQTSDYWSQIADKRYMFDMSKLEAEELKTVQKADVIAWYNTYIRSSSPKRRRLAIHVYGCNSDIAEAAKLQEQSWTIIDDVESLKASSQFYSSLC

SEQ ID NO: 54709 - protein, 465 aa, Zea Mays
MLVTTVGMRTQWGKLMATLSEGGDDETPLQVKLNGVATIIGQIGLFFAVITFIVLSQGLFSKKYHEQMLLSWSGDDALELLEHFAIAVTIVVVAVPEGLPLAVTLSLAFAMKKMMNDKALVRHLAACETMGSATTICSDKTGTLTTNHMAVVKACICGNIKEVNGSQNASKLRSELPEIVIKTLLESIFNNTGGEVVINQDGKYQILGTPTETALLEFALSLGGDFKAKRDETKIVKVEPFNSTKKRMSVILELPGGGCRAHCKGASEIVLAACDKFVDETGGVHPLDKITADKLNGIIDSFAGEALRTLCLAYKDMEEGFSNADHIPLQGYTCIGIIGIKDPVRPGVKESVATCRAAGIMVRMVTGDNINTAKAIARECGILTEDGIAIEGPEFREKSLAELLELVPKIQVMARSSPLDKHTLVKHLRTTFNDVVAVTGDGTNDAPALHEADIGLAMGIAGTEV

SEQ ID NO: 54710 - protein, 265 aa, Zea Mays
MATSGKKHLNSVTLLFKLPYYTQWGQSLLIAGSEPALGSWNVKQGVSLSPVHQDSELIWCGSVSVVAGFTSEYKYYVVDDKKNVLRWEAGEKRKLVLPEGVKEGDVIEIRDWWQDASEALFFRSAFKNVIFNATEGVKKESQSVSLNKSLDPEDIVVQFVISCPRLVSGSTVIVTGSNPQLGRWQTQDGLKLSYVGDSLWKASCALRKSEFPIKYKYCQISQAGNSTLELGPNREVNVDLSSPKQSRYIVLSDGALRNHGTPHFG

SEQ ID NO: 54711 - protein, 1352 aa, Zea Mays
MWATLHKPVAHANLRLLLTVSAFSGPLHLGTASAVAAAVTTRRSSSSRGVAATAMPSSSPPPLPPAEETTASAAALAPEGGFSLTEPSFLESLMPKKEIGVDRFLAAHPEYDGRSALIAIFDSGVDPAAAGLQTTSDGKPKILDVLDCTGSGDVDTSKVVKADADGAIVGASGARLVINPSWKNPSQEWHVGCKLIYELFTDTLTSRLKKERKKKWDEENQESISDALKQLNEFEKKHPKPDDTMLKKAHEDMQSRLDYLRKQAEGYDDKGPVIDIVTWNDGDVWRVAVDTQTLEGNNDGGKLADFVPLTNYRLERKYAIFSKLDACSFVANVYNDGNLVSIVTDCSPHATHVAGIAAAFHPDEPLLNGVAPGAQLISCKIGDTRLGSMETGTGLVRALIAAVEHKCDLINMSYGEPTLLPDYGRFIDLSNEVVDKHRIIFISSAGNNGPALNTVGAPGGTSTSIIGVGAYVSPAMAAGAHCVVQPPAKGMEYTWSSRGPTADGDLGVSISAPGGAVAPVPTWTLQSRMLMNGTSMSSPSACGGVALLVSGMKAEGIPLSPYSVRKAIENTAASISNAPEEKLTTGNGLLQVDRAFEYAQQAKKLPLVSYRISINQVGKSVPKLRGIYLRGGNACCQTSEWTVQLDPKFHEGASNLEQLVPFEECLQLHSTDTSVVQIPEYILVTNNGRSFNIVVNPANISSGLHYFEVYGIDYKAPWRGPIFRVPITVIKPIALLGEPPLLSISNLRFQSGHIERRFINVPFGASWAEVTMRTSAFDTPRRFFLDTVQICPLKRPVKWEAVVTFSSPSSKNFSFPVEGGLTLELSIAQFWSSGIASHEPTCVDFEIVLHGISIDQKVSTLDGESPLLIVARSLLASEKLVPVGTLNKIRIPYRPVECNLSSLPTDRDKLPSGKQIIALTLTYKFKLEDNAEIKPHVPLLNNRIYDNKFESQFYRISDSNKRIYSSGDVYPSYVRLSKGEYTLQLYIRHENVQFLEKLKELVLFIERKLDKKDFVPLMFYSQPDGPIVGSGTFKSTVLVPGEPEAFYVGPPSSEKLPKNAPPGAVLVGSITYGTVSTFNKKDEQNHRAPVSYSISYTILPSKVDDKEKGVLVGTKSIPEQLDEEVRDTKIKFLSSVKQLTEEDKSAWSELVVSLKSEYPKYTPLLSKILQCVLQKGTDGDKISHEKEVIAAADEVVGSIDKEELAKYLSLNSDPEDEEAQKFKKKIEETRDQLADALYQKCLALAEIESLKSDESIEVSAKDIFEENYKELIKWVDVKSAKYGTSTVLREKRCGRPGTALKILNDLIQNESEPKKKLYDLKIQLIEEMGWNHVSTYEKQWMQVRFPPCLPPF

SEQ ID NO: 54712 - protein, 623 aa, Zea Mays
MILEQLLQQQLQGSNFGPTSMVDQVLLREHVLNELHQQPHHLQRQHDAAIEQLIQAKFGHGLHREHHNDMLDVLSRSNQRQMLPLEQQLLLGLQHEQQLKSQQLANALRQHSGQEEERHLSGVWPMDAAAQFIRSGTSPNQIHSRFDLLENLQRSSSFDHHEHLDRSLSLHEQLHMGGQGIRSLERTGSLPGGGPGPNPDVINALTRHHGLSQLETHGDVYPLVQMPMLPSGVHPQQLRHQDQLPGSHIGRLERHWSDANGQLQNSLMESSHINQLQIEAEKERRNVEMNLSVDNPHAWGALMNKDRNTEQDLTDMIHKKLVLQSQQSRGFPDVSVPASFRRKDHFVQPVVESPLRSVDMSFEESLSERSLYAKSGQLAQEGSSNLGTLPNSIENTGKFNLRSGSGSMLEQKHFLGIDDVQSDFLETTGGRTSANQLVGSVNELTRGKRQGSSASLAGDDPNLADEGVSKWSDSGMSKGSSHSLLKRSTNQHTTTSQSVPTDLSAIRLKKAGLASSDENKMEAGFASVAQGMEGCVPSNKETGAYGMPSATNNPDASGQSFSEALKSSRKPPLQYDASESADCGPGGKGAKKKTKKGKQIDPSLLGFKVHSNRIMMGEIVRDD

SEQ ID NO: 54713 - protein, 237 aa, Zea Mays
MGSLEVPAQASETIKVPTAHYEFGANFLDPKLMLIGRVMTDGRLNARVKCDLTDNLTLKVNAQLTQEAHYSQGMFNFDYKGSDYRAQFQIGNNAFYGANYIQSVTPNLSMGTEMFWLGHQRKSGIGFASRYNTDKMVGTLQVASTGIVALSYVQKISEKVSLASDFMYNHMSRDVTASFGYDYLLRQCRLRGKIDSNGVVAAYLEERLNMGVNFLLSAEIDHCKKNYKFGFGMTVGE

SEQ ID NO: 54714 - protein, 414 aa, Zea Mays
MDARKKIGNGRGSEITPETTGAADGSDQVECSKDISECEKLEVVCETLAETCCEISAEACKSDQPCRQGEKNQSACSDGSKCVDKPNCCLTKDTVRTTNLTSSDSFSCLSEGDRDSSMSSMTSLSAQNVESSSTSDSDEYSDRNDSSPGDPPVKNVSRSLLEMCAGNGFREYQPKGLNPPNGNQFGFMVAPLQDQMLHQQKIHAPPYSSPFVGFHNHPLAVPTNGYLPYPQPGHFYPGLMTPVGCGVAGSQCVDFPMQYSNNIHPYSGPEFGFLPAKPVHKTPVSFHAVPVPPLAPLCRSEVPVVINQERQQGSAPPKFKQAVLVPENGCSAEDNTFKQKGDDTDSTPFSLFQFNLPIAPPTLATSKEEQSGAMPSMALPPAQITRAQLCSREETNVKEYNLFSGCNGVMFQLN

SEQ ID NO: 54715 - protein, 210 aa, Zea Mays
MTLVHSNYNGYDYLVSFGGYNGRYSNEVYTLKLSLKSDSQPIVEEETVSDTISRVREPETEISQDGRIREIAMDSADSDLNNRNDEASEQLVADLKAQKEELEATINREQLQTVQLKEDIAQAETRNAELTKELQAVRGQLASEQSRCFKLEVDVAELRQKLQSMDALEKEVELLRRQKAASEQAALDAKQRQGSGGMWGWLAGSPPPSQ

SEQ ID NO: 54716 - protein, 60 aa, Zea Mays
MAFWQTRDFLFCGICGTLLTFDSVRSASCPLCGFKRDAKEIEGKEIQYTMTAEAQALPHH

SEQ ID NO: 54717 - protein, 749 aa, Zea Mays
MSSGGGGGGARGPSGPVPASARKLVQGLKEIVNRPDAEIYAALRECNMDPDEAVSRLLSQDTFQEVKSKRDRKKEVKETPEPRSRGASNSSRSSRGGVDRAGRGNSVQSGSSGTDYMASRSSILGPAVAATNAMQKPTVPSLSTNKDVVPNGSVGAQQSSSGFQHNWFGVPGQMSMADIVKMGRPQVRSSGKPMAAGDTSYAGQTPSLSSSINQNSKQSASTALPTTFDQGFPALPDPIPHTVNSSHGSAGNNHTHENDWFPQDDLPSGVQPTCIEASGDQSLFVASLDQSMLVADASYSQEISHAEENNSTAVEATLSSERHLEIVEDDNHFNDGLLQNSSAYQAQVHSYVDNEVGISNVDAESASMNFQHLSLQNEDIAATKSAEDNPAVILPDHLQAANADCAHLSFGSFESGAFSGLLSSKVPKGSLEDDEVLIPDESRSVNRIDVRNQDYYDDDALNSSENVDVETRIGNMDNIDGPSVSESDALRQGAIDVPGLQYDLPSVSSHAYSNTTQPSTMEEPQGNTQAQPLSHFSGLLQANTLPNNLLGSNLTPLREFDFSQFLQTQSATKYNPSVAPNNLPPISMQETSKQGGFPNTQSTQHVPSTSISSGLPLPQQLPVYSQPTLPLGPFTSLVGYPYLPQNYYLPSAPFQQAYSSNGPFHQSAAPAVPGAGMKYPMPQYKSSPPASTLPQPSSLSGYGGFGSANNIPGNFSQNQGAPAAPTTLGFDEALGTQFKHPNHYAALQQ

SEQ ID NO: 54718 - protein, 615 aa, Zea Mays
MASQVHVVGQGTVGRAAFSGNHQWIVRGTANGHGLSSEVAAEMNNQFRVGIQTIAIIPVLPRGVLQLGSAGLVMENINFVMFAKKLCSQLNNRSSMAASASAKNALSQHGQSRPDTATVSTRTPPNALLNASLLKVAQQSGHPVREHVVYAEPDLRFRQQASFCENQFGSNLQSVVMNSSLTSPSLASVKKQPLLMNSIGQLQFSNYVHSSADLARDVILKSLVRQDSSVCETTNMNMHRGRYMVSNDINGSGDFDFLPVGAKASRANLSTSVSSQILDHTTRTLQQKQSLVPFKVTQSSEFNKKMENPENGSFQTPSVPTSESGGQVSNSFNMDQENQLIMSNNVRQVQKINRFSDPSANVSTQRMKNRDVCESGMPIERGSSLLVEPGADNDLFDMLGSEFHQFSHNVGSDLVTWSGTESQNSDRDGPESSIYLNSSPLFSSLDNELHYSGILSLTDTDQLLDAVISNVNPSSKQCPDDSASCKTALTDVPSTSHLGSIDLKRCESSGVPSVLIKHELAQLVKQPCIFDKSENCLSQNNGMHKSQIRLWIESGQNMKCESTSASNSKGLDTPSKANRKRSRPGESAKPRPKDRQLIQDRIKELRELVPNGAKH

SEQ ID NO: 54719 - protein, 295 aa, Zea Mays
MGSVSSAISKAALEAGVQIVTNAEVSQVMVNETSGMVEGVALVDGTEVHSPVVLSNATPYKTFVDLVPSSVLPEDFLCAIKAADYSSATTKINVAVDRLPQFQCCNTNLEGGPEHMGTIHIGSESMEEIDVAYREAADGISSKRPVIEMTIPSVLDKTISPPGQHVINLFVQYTPYKLSEGSWQDSNVRKAFAERCFSLIDEYAPGFSSSVVGYDMLTPPDLEREFGLTGGNIFHGAMGLDSLFLMRPAKGWSDYRTPVKGLYLCGSGAHPGGGVMGAPGRNAAAVVLEDHVKTK

SEQ ID NO: 54720 - protein, 122 aa, Zea Mays
MRSPRSCTRSSWRRTSTFQPLCRSTRSSARLTTSRRCSISPARHHSADIRPGVMATLLYFCSPVLVLHYAWPCFTSAASCRDLPNISGYCMYSFMSCKNVLCTLSWCSGVYVSSVQVGIHLW

SEQ ID NO: 54721 - protein, 81 aa, Zea Mays
MFLVIKLGIDEELVELLGHYSPIPVTYAGGVSTMDDLERIKKAGKSRVDVTIGSALDIFGGDLPYKDVVLWHRKQSMVGQV

SEQ ID NO: 54722 - protein, 445 aa, Zea Mays
MFHNLSRLSSLPSPLKRLVGGLKGERYSRSSDISKLFTNSLTVPLPEVLEEHDLSCVELLDVKLDGIVLTKQKAEKAVGWARNHYLSSTTLPSIKGDRLIIPRESLDISIERLKEQGITAKKSSQNLKVLAKDEYERNFISAVVPPNEIGVKFDDIGALEDVKRTLDELVTLPMRRPELFSRGNLLRPCKGVLLFGPPGTGKTLLAKALATEAGANFISITGSTLTSKWFGDAEKLTKALFSFATRLAPVIIFVDEVDSLLGARGGAFEHEATRRMRNEFMAAWDGLRSKENQRILILGATNRPFDLDDAVIRRLPRRIYVDLPDAQNRMKILKILLAKEKLESDFKFDELANATEGYSGSDLKNLCVAAAYRPVHELLEEEKKGRVSNENSYLRPLCLDDFIQAKAKVSSSVSYDATSMNELRKWNEQYGEGGSRTKSPFGFGN

SEQ ID NO: 54723 - protein, 170 aa, Zea Mays
MAWVRVDLAVMLGSGDPELEDWMRSTESIFKDKFRGWVGFSVPVSHRITAGCDILLMPSRFEPCGLNQLYAMQYGTVPVVHATGGLRDTVENFNPFGENGEQGTGWAFAPLTTENMLWTLRTAISTYREHKSSWEGLMKRGMSKDFTWDHAAEQYEQIFQWAFIDRPYVM

SEQ ID NO: 54724 - protein, 206 aa, Zea Mays
MSDLIEKELSAFSNPEEVMIFFSAHGVPLTYVEDAGDPYRDQMEDCIALIMGELRSRGILNSHTLAYQSRVGPVQWLKPYTDEVLVELGQKGVKSLLAVPVSFVSEHIETLEEIDMEYKELALESGIKNWGRVPALGCTSTFISDLADAVVEALPSASALATRKPDDIDSSMDLTHYLTKMLFGSILAFVLLLSPRLVSAFRSTML

SEQ ID NO: 54725 - protein, 421 aa, Zea Mays
MAGGRAFRPSAPRRAAFAALLTLLLLAGLSFLLSSTPTSSARSSSPPSARLAAVRRHAADHAAVLAAYAAHARKLKEDSAAQSLSFSSLSSDLSALSARLASHLSSSLPEDALRPLEKEARERIKFARGLAADAKEGFDTQSKIHKLSDTVFAVGEQLSRARRAGRMSSRIAADSTPKSLHCLAMRLLEARLANPTAFADDPDPSPEFDDPALYHYAIFSDNVLAISVVVASAARAAADPSRHVFHVVTAPMYLPAFRVWFARRPPPLGVHVQLLAHSDFPFLNATNSPVVRQIDAGNRDVELLDYLRFYLPDMFPSLRRVVLLEDDVVVQKDLAALWQVDLDGKVNGAVETCFGGFRRYRKYLNFTQPIVRDRFKPNACAWAYGVNVFDLETWRRDGCTELFHQYMEMMRMASCGILHPF

SEQ ID NO: 54726 - protein, 952 aa, Zea Mays
MSQSPGGREGIYYSRQRKPERNGSVFTPIAAMYSSGHALPVANRSHGLVFGSLSKDWDDIRQRKDQLVNFLASLERASGDSAAAGKIEDSKLASPVEPTEQKEKAAIIVLDSDDEDGNGSGNSKLASETNKELGTSGLINNIAERMTFNGSQAFGTVHTYGDKNTQIVPYGQCSALVNQFPLQTSWQPSIQFERVVLQKRPEEQRMQDLVAASIAEKRAETQVFLSLPTEKKRRRSDPSLHASDDTATVPKQRKSKGATVVAAANLSLVSQQTATSPEPDMVIEEEEKHKNESDGLDDYWKDFALAVESTKLDEVDEAAIEKEDNGKMEDIDCNHDIRIHEDLGHVCRVCGMIVRRADSIIDYQWKKASRRRTNGYGGHSKDADEIDCGTVKLSEDFIVADIAIHPRHARIMKPHQLEGFNFLVKNLIGDKPGGCILAHAPGTGKTFMLISFIQSFMARYPSARPLVVLPKGILGIWKTEIKRWQVQDIPVYDFYSVKAEKRVEQLQILKSWEDKMSILFLGYKQFSTIVTDDGGSNVTAACRDRLLKVPNLLILDEGHTPRNRETNVLESLNRVETPRKVVLSGTLFQNHVEEVFNILNLVRPKFLRMESSRPTARRIMSQVEIVGRSSKGLADGAFTKAVEETLLNDENFKRKAHVIRGLRELTKDVLHYYKGDILDELPGLVDFSVFLKLTPKQKDIIYKLEAHDRFKRNAVGSALYIHPCLSELSEVNAEHRANTFRDDLVDSLVDSITVRDGVKANFFMNILSLANSAGEKVLAFSQYISPMIFFERLLVKKKGWHVGKEIFMISGDTSQEDRELATDHFNNSADAKIMFGSIKACGEGISLVGASRVVILDVHLNPSVTRQAIGRAFRPGQQKKVFVYRLVAADSDEVKVHETAFKKEVIPKLWFEWSEHCTTEDFKLGQIDIDDSGDELLDTKAIRKDIKALYRR

SEQ ID NO: 54727 - protein, 514 aa, Zea Mays
MGSGSSKATTSSTSPTAAEAGGEGKRPNGSEKARRGRSLLPLPSSSCFRGSTTPCDCDVSAVAVDVECNKGGETASLPSLTHTTKSDEDVLATPKSHPGEEITLPSSDRERDQDDGVLQNAAATNTLTAASQLTDPSGRSRPRFGVNFGLSRAVSLGSSVACSILSSGLPTSANPGEGRGDVDDSSDTVISQQGSAPTAGIDSTLDMLRDSVTAQARAARQARRNLQESEDAILRNSYRRMGSQEPFEGSVRFSRTLSVGRLRDRVLKRPPFSDGLFTPALLYDRAVWLSGNASARQDSAVMQRTNSDRSSESRSDPSTNGLYNLSSERQASNSDLLERRSVFLERRRRIRSQVRALQRLGSRFENLSGHERSCILSGQHRTGTCNCRTGSRQGNPDEETSTRASISRIVMLAEALFEVLDEIHHQSAALSSSRPAFSSIGSVPAPREIVERLPAKVYRRPLKYHSEEAAQCYICLVEYEEGDCLRILPCHHEFHLTCVDKWLKEIHRLVVLDC

SEQ ID NO: 54728 - protein, 480 aa, Zea Mays
MDPEQTFLRVHARLSGTLSQLLTPRIRLVLEYLYLAGAVALFCLLVVMHTNFVQQPGCSSEFSGIEFGEAQLVQIKIISGGLWSSRGASYIMDLQNLGRSAEKILEVNGDKFNILASKFWSTWVGPGARRSLPDLKAAGEGSVHHPLSAKESFKAAVTFLFRKWYLRAVSFWKNIKQLSENTLQLMVRSNWNDFLHIIKDLQLPSMDHLISTIVQWFERRSKAFEPTYLYGVEKGYFLLSEGAKTRHGVRTINITISARNPCFGNRWQQLLINSIVGYDTILTNSLVNSPGHGYLYNFQTKELYDLSYGHEPPEGPTRFGDYFVTKCGVLLMSLFVFFTTTMSVSFTLRETQSRMLRFTVQLQHHARHHLPTFQLIFVHVIESLVFVPIMIGILFFLFEFYDDQLLAFLVLTLVWLCELFTMISVRTSISMQFFPRFFLLYFLVFHIYFFSYTYGFSYLAFSATAAFMQHLILYFWNRFE

SEQ ID NO: 54729 - protein, 523 aa, Zea Mays
MATIGLVPSTVVASTAIRAPAPAALTRASNRQPPHARRLLDLGRRAPAMDALRVSGAAEPLLRPAAAGGHPRLRVRTRAQQGDGGAAAEGDAAFSWAPVVLPFLFPALGGLLFGYDIGATSGATISVQSPDLSGTDWFSLSSLQLGLVASGSLYGALGGSLLAYRIADFLGRRIELVTAAALYILGALVTGFAPNFVALIIGRVLYGIGIGLAMHGAPLYIAETSPSQIRGTLISLKELFIVLGILLGYLVGSLEIDNVGGWRYMFGFSAPLAAIMAIGMWTLPSSPRWLLLRAVQGKASLEDNKKKAIQALRTLRGRTASEKVLADDVDDTIVSIKAAYAGQEAEGNVWDVFEGASLKAFTIGGGLVLFQQITGQPSVLYYAASILQTAGFSAASDAAKVAILIGLFKLLMTGVAVFKVDDVGRRPLLIGGVGGIALSLFLLAAYYKILNNFPFVAVGALLLYVGAYQVSFGPISWLMVSEIFPLRTRGRGISLAVLTNFGSNALVTFAFSPLKLYSCGFVL

SEQ ID NO: 54730 - protein, 105 aa, Zea Mays
MPIWQYRAEDKNKASKGCLITALDKMADAASLPYYSAVKEVDAVVEESIKTAGVEEGKAVDEAEFKKSLTEILRAIMLRLNDSPVFVSTDVVVHEPLSGTSSSVN

SEQ ID NO: 54731 - protein, 252 aa, Zea Mays
MDHPHNAVLLVCSSHEKGCRPFMCDTSSRHSNCYDQYRKASKDSSKDSGTECSECQQQVQLSCPLCRGPVSDCIKDYDARRYMNTKVRSCTMESCEFRGAYQELRKHARVEHPAARPMEVDPERQRDWRRMEQQRDLGDLMSMLRSGFNANVEDNSGELGATEEGEEEAARTPASITMVFIMPSRGSIMQYLTERSRAIILVSRRRASSGSGDAEATAPDSEEGDDPMLPSAEASAGSQRSSEEEADGDHAQ

SEQ ID NO: 54732 - protein, 358 aa, Zea Mays
MGAMGIVVRACAPPAPAAAAAPAPSGSRDAGQAQRRSKPSRTGRVRVLGGTGRVGGSTATALSKLCPKLGILVGGRNREKGESIAAKLGGQPEFVQVDTRNAGMLEEALQVVAVRGVAKPEAAATPARRSRPIPLASVAVWSLVATGAANAAELWDPLALHGSSGLVLADLGIGDWFGGLLFSAGQQANEAVQDQLSALSFSSLAVIFGAGLVTSLSPCTLSVLPLTLGYIGAFGSGKGRSEVVGNSIAFSLGLATTLAILGVAASFAGKAYGQVGQGLPVAASGLAIIMGLNLLEVLELQLPSFFSDFDPRAAAANLPSGVQAYLAGLTFALAASPCSTPVLATLLGYVATSRLLIS

SEQ ID NO: 54733 - protein, 281 aa, Zea Mays
METVYELGGKMIEALVKEKVQSGDVIALDMASGKVTKLGRSIGRSRDYDAVGPHTKFVKCPDGELQKRKEVVHCVTLHEIDVINSRTQGFLALFTGDTGEIRAEVREQIDTKVAEWREEGKADIVPGVLFIDEVHMLDIECFSFLNRALENDMAPILVIATNRGITSIRGTNYRSPHGIPPDFLDRLLIITTHPYTEDEIRKILDIRCDEEDVEMSADAKVLLTKIGRPTAARSCDCEVFSPPFFSLCNASACLPILSVAAVLLVELVEEARSVTCGPVHS

SEQ ID NO: 54734 - protein, 263 aa, Zea Mays
MTFIDKFRYNAKRASLVQSRIKALERMEHVDAVVSDPDYKFEFPTPDDRPGPPIISFSDASFGYPGGPTLFKNLNFGIDLDSRIAMVGPNGIGKSTILKLISGDLQPTSGTVFRSPKVRMAVFNQHHVDGLDLTVNPLLYMMKCYPGVPEQKLRAHLGSFGVSGSLALQSMYTLSGGQKSRVAFAKITFKKPHIILLDEPSNHLDLDAVEALIQGLLIFQGGVLMVSHDEHLITGSVDELWVVSEGRVTPFSGTFKDYKKMLK

SEQ ID NO: 54735 - protein, 573 aa, Zea Mays
MMGALQLQSNGDGAAEGLLPDPGYVEVDPTGRYGRYNEILGKGSSKTVYRAFDEHRGMEVAWNQVQLHDFLRGPAELERLYGEIHLLKSLRHRAVMRLHASWADAAAPRLAVNFVTELFTSGTLRQYRLRHPRAGAAAVRRWCRQILDGLAYLHARGVIHRDLKCDNIFVNGSQGQVKIGDFGLATVARRRGSPHAARCVVGTPEFMAPEVYAEGYDERADVYSFGMCVLEMVTLEYPYSECVHPVHIYKKVTSGIKPAALYKVKDPAVRRFIDRCLAPASRRPSAAELLSDPFLQLEDGCGLGYGDDADYSAMYNYLHQPACLDHHHHAGSIGSTASNGVVSNGGGGGGGRWDDESEDEDDDGSMFQGIDQLFNEHEDDELHVAGVDITIKGKRMQDGRIFLRLRIADKDGTGRVRNIYFPFDADADTALSVATEMVAELDITDHEVTHIAEMIDGEVGALLPHWRPGPGMDDDDGGGAGPDTSGATDRCKNCRSSASSAGSLDDYMSAAAAARRGCRCAELHGRFEEITFQADEEQVRFQGSGCSSDDGGGQAEQCAGDGGSTVTERSDQP

SEQ ID NO: 54736 - protein, 1070 aa, Zea Mays
MAEKLRDLSQPVDVTLLDATVAAFYGTGSKEERSAADQILRDLQNNPDMWLQVVHILQNSQNLNTKFFALQILESVIKYRWNALPVDQRDGIKNYISDVIVQLSSNEVTFRQERLYVNKLNIILVQVLKHEWPARWSSFIPDLVAAAKSSETLCENCMAILKLLSEEIFDFSRGEMTQQKIKELKSSLNSEFRLIHELCLYVLSATQRPELIRATLATLHAFLSWIPVGFIFESPLLETLLKFFPMAAYRNLTLQCLTEVAALQFGDFYNVQYVKTYTFFIIQLQAILPPEKIPDVYANGSTEEQAFIQNLALFFTSFFKNHMRILETTQENIAALLMGLEYLIGISYVDDTEVFKVSLDYWNVFVLELFEAHNQMEPAVTVSMMGLQAQMVPGMVDGGTAVKQRRQLYSGPLSKLRMLMICRMAKPEEVLIVEDENGNIVRETMKDNDVLVQYKIMRETLIYLSHLDHEDTEQQMLKKLSKQLNGEDWSWNNLNTLCWAIGSISGSMVEEQENRFLVMVIRDLLNLCEITKGKDNKAVIASNIMYVVGQYPRFLRAHWKFLKTVVNKLFEFMHEMHPGVQDMACDTFLKIVQKCKRKFVTQQVGENEPFVSELLSNLATTIADLEPHQIHTFYESVGHMIQAESDNTNRDEYLKRLMSLPNQKWAEIIGQASQSIDILKNQDVIRSVLNILQTNTSVASSLGPHFFPQISLIFLDMLTVYRMYSELVSSTIAEGGPFASRTSFVKLLRSVKRETLKLIETFVDKAEDLPHIGKQFVPPMMDPVLGDYARNVPDARESEVLSLFATIINKYKGEMLEDVPRIFEAVFQCTLEMITKNFEDYPEHRLKFFSLLRAIGTHCFQALIQLSSQQLKLVIDSINWAFRHTERNIAETGLSLLLEILKKFQASGFQNQFYKTYFLTIEQEIFAVLTDTFHKPGFKLHVSVLQHLFCAVDGLTEPLWDASSVPYQYTDNAMFVRDYTIKLLGTSFPNMTVTEVTKFVDGLLSSKLDLPSFKNHIRDFLVQSKEFSVQDNKDLYAEEAAAQRERERQRMLAIPGLIAPSELQDEMVDS

SEQ ID NO: 54737 - protein, 71 aa, Zea Mays
MKVRIYHVIPCYLPIMYGLWTCVALFNLLLQISNRYVPFPCLGDNCLEKLRGRLFGIMSGETYFKLSVSSS

SEQ ID NO: 54738 - protein, 578 aa, Zea Mays
MALLQHCRKIWKTECLRNLVKELYLGLSACVRSSANYLSLREAAECAARAMMSQLTGPGVKLVLPSLLKGLEDKAWRTKQSSVQLLGAMAYCAPQQLSQCLPKIVPKLTEVLTDTHPKVQASGQTALQEVGSVIKNPEISALVPILLSALMDPNAHTKHSLDILLQTTFINSIDAPSLALLVPIVHRGLRERGVETKKKAAQIVGNMSSLVTEPKDMIPYISLLLPEVKKVLVDPIPEVRAVAARALGSLISGMGEEIFPDLVPWLLDTLKSDNSNVERSGAAQGLSEVLAALGQDYFDHILPDIIRNCSHQKASVRDGHLTLFRYLPRSLGGVFQNYLQAVLPAILDGLADENESVRDAALSAGHVFVEHYATTSLPLLLPAIEDGIFSDNWRIRQSSVELLGDLLFKVAGTSGKAILEGGSDDEGASTEAQGRAIIEVLGREKRNEVLAAIYMVRSDVSLTVRQAALHVWKTIVANTPRTLKEIMPVLMDTLISSLASSSSERRQVAGRSLGELVRKLGERVLPSIIPILSQGLKDPSASRRQGVCIGLSEVMGSAGKHQLLSFMDELIPTIRTAL

SEQ ID NO: 54739 - protein, 50 aa, Zea Mays
MSIWWSLTWCSARGLNQSMSAVRVCRAPMSIWWSPIFKNQRLQLVGLLLI

SEQ ID NO: 54740 - protein, 822 aa, Zea Mays
MRLRWRNGSRGKVGKAAHLEEAVVSLKSTTDGETVYRVSFEWDGSQGVPGAVLVRNLQHAEFFLKSLTLEGVPGRGTVVFVANSWIYPHNLYSQERVFFANDTYLPSKMPAALVPYRQDELKILRGDDNPGPYKEHDRVYRYDYYNDLGEPDKGEDHARPVLGGSQEHPYPRRCRTGRRPTETDPNSESRLFLLNLNIYVPRDERFGHLKMSDFLGYSLKAIIEAVLPTLGTFVDDTPKEFDSFEDILGLYEPGPEAPNNPLVAEVRKRIPSEFLRSILPNGSHDHPLKMPLPNIIRSDVLKKAPEFKFGWRTDEEFARETLAGVNPVLIKRLTEFPAKSTLDPSQYGDHTSKITEAHIQHNMEGLSVQNALKKNRLFILDHHDHFMPYLNKINELEGNFIYASRTLLFLKDDGTLKPLAVELSLPHPDGQQHGAVSKVYTPAHSGAEGHVWQLAKAYACVNDSAWHQLISHWLNTHAVIEPFVIATNRQLSVVHPVHKLLSPHYRDTLNINALARQTLINADGIFERTVFPAKYALGMSSDVYKSWNFNEQALPADLVKRGVAVPDQSSPYGVRLLIKDYPYAVDGLVIWWAIERWVKEYLDVYYPNDGELQRDVELQAWWKEVREEAHGDLKDRDWWPRMDAVQRLARACTTVIWVASALHAAVNFGQYPYAGYLPNRPTVSRRPMPEPGSDDYKKLEAGQKEADAVFIRTITSQFQTILGISLIEILSKHSSDEVYLGQRDEPERWTSDARALDAFRRFGSRLVEIEKRIRTMNDSPTLKNRKGPVEMPYMLLYPNTSDVTGEKGEGLTAMGIPNSISI

SEQ ID NO: 54741 - protein, 296 aa, Zea Mays
MAAVAEGSASAAAKEVEYQAGVQKLVDLLSNLNPAAKEFVPSSAPAAAASPPKKALSADAPVFDYRSTAGGNGATDDPFYVGFGNQQRKRGNGYINQGRRRTNDRLRRADREDSVRRTVYVSELDHTVTEERLADIFATCGHVVDCRICGDPHSVLRFAFIEFSDEEGARTALNLGGTIFGFYPVRVLPSKTAILPVNPKFLPRTDDEKEMVMRTVYCTNIDKMVTQLDVKKFFEELCGEVSRLRLLGDNVHSTRIAFVEFVHAEGAIMALNCSGMILGTLPVRSLGEYLLTLMAL

SEQ ID NO: 54742 - protein, 122 aa, Zea Mays
MLMAKCRTLQEENEEIGTMASEGKIHELGMKIAVLKSQNNELRNQFDVLYKHMDGVTNDVERSNELVSILQEELEAKDLELTRLKEVLAQKGATQDAPVETSDDAGNGQEADSDTLQVKAES

SEQ ID NO: 54743 - protein, 329 aa, Zea Mays
MYKAPRDKLACILNCCKVINNLLLNASIVSNETPPGADEFLPVLIYVTIKANPPQLHSNLLYIQRYRRQTRLVSEAQYFFTNILSAESFIWNIDGESLSMNELDFQRRMDSARERMLGLSADSEYQDNQANPDVQDRTSQSLGANRNSDASLSLKDHVQGSGQDMRRDSDVTVSGKQAEQVQSISELEKKGTAELLNEDDLNKKFQEYPFLFARAGDLTIADVESLLNSYKHLVLRYVALAQGMGVSPETTLTQNGQTSDLVVSEEPEILNSVVKDNENSAIINKNVDDVISLNHHSEAVDTEASEQMNQRTAVDSSDDLEALGRPENA

SEQ ID NO: 54744 - protein, 194 aa, Zea Mays
MAQRILGMGDVLSFVEKAQEVMRQEDADELQKKILSAKFNFNDFLKQTQMIAKMGSFSRLIGMIPGMNKVTPAQIREAEKNLKFMESMINVMTLEERERPELLAESRERRKRVAKDSGKTEQQVSQLVAQLFQMRAKMQKMMGAMQGKESPDMDELMGSMKAEEQSAAGTGRRRRKYGNLRQRQLDAMRGFRRR

SEQ ID NO: 54745 - protein, 349 aa, Zea Mays
MLEVLSQEKQVPIIGLVMNDRGFISRVLCPKYGGFLTFGSLKKGKESAPAQPTAADLINLYNIRQIGPDTKVFGIIGKPVGHSKSPILHNEAFRSVGFNAVYVPFLVDDLAKFLDTYSSPDFAGFSCTIPHKEAAVRCCDEVDPVARDIGAVNTIVRRPDGKLVGYNTDYVGAISAIEDGIKASESEPTDPDKSPLAGRLFVVIGAGGAGKALAYGAKEKGARVVIANRTFARAQELANLIGGPALTLADLENYHPEEGMILANTTAIGMHPNVNETPLSKQALRSYAVVFDAVYTPKETRLLREAAECGATVVSGLEMFIRQAMGQFEHFTGMPAPDSLMRDIVLTKT

SEQ ID NO: 54746 - protein, 460 aa, Zea Mays
MLSDSSHEIRQQADAALSEFLQEIKNSPINEFVKLGGEQLVPYYADILGAILPCISDEEEKIRVVARETNEELRAIKADPTEGFDIGAILSIAKRELNSEHEATRTEALHWFFTLLDQYRAEFLAYLNDIFDPLLNALSDPSDVVVLLVLEVHARIAEESHHFHHLVSYLICTFHNNHFLLEKRGALIVRRLCVLLGAEKVYREFSTILESEVDLDFASVMVQALNLILLTSTELGELRSLLKKSLVDSCGKDLFQSLYASWRHSPMATISLCLLAQAYSHASCVIQSLGEEDINVKFLVQLDKLIRLLETPVFAYLRLQLLEPGKHTWLLKTLYGLLMLLPQQSAAFKILRTRLKTVPFSENIKRTSSANPYSQILQVTEDGNRNQDTQNYSAINFPSLLQQFEHMQLQHRNHLKDQLQSRKSASALTLSQEIQRYEAAHSSSLSEINRPPSRTSKGIL

SEQ ID NO: 54747 - protein, 884 aa, Zea Mays
MDDFEGLLARDFGLRPQGKAAPMSAARSSGPSGSAWANTRSAAAPSYDELFGSAPPLPKATPSPSPSLDHIFDSFKEPASTAPPPKPKHSSMPVFDKPVYDDDIFVGVPGVKSSSARYDDVFGGSHSREAPPAFDDLLGGFGKSSQVREEVDDKRKQEAAMGPAAGTGFDYLIPGFGGRSSPRQRDTVGAKQQKISMSTSKQPASLSDPFVVLETTSSSAHPFADPLDEFGKAAKYQGKSRESTNVGSNLFEDSSTSIQAPKSEPIFTSEVDNGLKDKNESSRARDANPVQSFSKGNSSQQPSVEDFENIFSKPQSARYADVHVDIGSDKYSGNGINDQSPRSDESEDEIWLTASEIPLFTQPTSAPPPSRPPPPLAAKQKKHGSKSKRKDDEHLKQSRKNNDHQRSSSNHAGVSTVDELEDFAMGKPQSVHALNAEEFERSTAAAASAAAMKEAMDKAEAKFKHAKEVRERERDAKIRNREQREQDSVTRSYAQDREDKERKERLEQEREMKQNEEKEREQRRLEEERELERHKERERARQAVERATKEARERAAVEARAKAEREARQRSERAAVQRAQQEARERAAVEAKERAERATAEAKERAAAEGKEKAASQARDRAAAERAAVERAQQEARKRAERAAVERAAAEARERQAAAARDKTSKPDDLESFFGMGARANSAPKQRAPTVDSMFHSQTQNRGSSTSTSMKKASSTTNIADDLSAIFGGAPTSEEFQEVDGESEERRRARMERHQRTRERAAKALAEKNERDMQQQREQAERHRLAETLDFEIKRWAAGKEGNLRALLSTLQYVLWPECGWQPVSLTDLITAAAVKKVYRKATLCIHPDKVQQKGANLQQKYIAEKVFDLLKEAWNKLNSEELF

SEQ ID NO: 54748 - protein, 300 aa, Zea Mays
MCGLDRKTSLCLVYDIAKKDGPDSIAQSANNQFYFQFLTYYQHNEGQMRLRSTTISRRWVSGDNHVEELVAGFDQEAAAAVMARLVSFKMETEVDFDPVRWLDRALIRLCSKFGDYQKETPSSFSLSPRLSIFPQFIFNLRRSQFVQVFNNSPDETAYFRMMLDRENVTNTVVMIQPSLISYSFQSGPEPVLLDATAIASDKILLLDSYFTVVIFHGVTIAQWRNAGYQDQEGHEVFAQLLKAPHEEANLIIKERFPVPRLVVCDQYGSQARFLLAKLNPSVTYNSDNPSPGGDVIFTDD

SEQ ID NO: 54749 - protein, 199 aa, Zea Mays
MEIAKAENMIAHKDEIYSRPKRTWFATEREKKLLVAAAKESLGQGKSTSGIISAKQAEDLRLKEKKRREHEKDLPRKKRRRLEAQREMLEDEDEDDEEAKESDRGKKLKKGQSLVDAAYRKAKSLKAASKRGPGASKGKKEKNARQYSEKTPNRHEEMRELFQNDMSEWKQGRSSKKNNNFAHKKSKAFNSKARYKRRK

SEQ ID NO: 54750 - protein, 57 aa, Zea Mays
MIGAITRVRYFSPSDKRDQVLNDHNECIQIQSLDPYPQTGHGACWFLAMGKAPKVQC

SEQ ID NO: 54751 - protein, 56 aa, Zea Mays
MGGGGAALLLLVMWAGVASAAVYEVGGTIGWTVMGNPDYAAWASSKQIVIGDTVGH

SEQ ID NO: 54752 - protein, 131 aa, Zea Mays
MALETWASWVKERIDLRRTHVFFRTYEPSHWSGLNQKVCEVTQQPTAEANGNDRREFGDILAGVVANMSVPVTVLNVTLMGAFRSDAHIGLWSHPNTILDCSHWCLPGVPDAWNELVFSHLLTNGWRVPAS

SEQ ID NO: 54753 - protein, 196 aa, Zea Mays
MTNTALMTIARYCPRLTSFRLCIRKPRSADAVTGQPLDEGFGAIVRSCRGLRRLAMSGLLTDSVFLYIGMYAEKLEMLSVTFAGDTDDGMVYVLNGCRNLKKLVIKESPFGDAALLAGAHRYESMRSLWMSSCQITLGGCKALAATMPNINVEVIGGASFGAMDGGVSGARKVDMLYLYRTLAGPRCDTPGFVSIL

SEQ ID NO: 54754 - protein, 91 aa, Zea Mays
MYQERANDARNEVDNLRHIVMVKNARIEEDYGTHIADLDINELQERRKRRIEELQVIERTHHEFLSMKTRMVASIGELLSKMEALKQNRST

SEQ ID NO: 54755 - protein, 882 aa, Zea Mays
MHIGVLAAAAHAAANNSPFTIFYNPRASPTEFVIPFAKFQKALYSNQISLGMRFRMMFETEELGMRRYMGTITGITDLDPVRWKNSQWRNLQVGWDESAAGERRNRVSMWEIEPIAAPFFICPQPFFGVKRPRQIDDESSEMENLFKRAMPWLGEEICIKDAQTHNTTMPGLSLVQWMNMNRPQSSTLNTGIQSEYLRSLSNPAMQNLGAAELARQLYVQNHLLQQNSVQLNASKLPQQVQPINELAKGSLSCNQLDVIINQQELKQEVGNQQRQQQPVNQAIPLSQAQTNLVQAQVIIQNQMQQQQQQQQQSPTRCQKGTSVQQLLLSQQQQDQNFQLQQQQQLLLQQLQQQNQQQQQQQQNQQQLNKLPAQLVNLAGQQAQLSDQELQLQLLQKLQQQSLVSQPTVTLSPLQVIQEQQKLLLDMQQLSSSHSLAQQRILPQQDSDVSLQASQAPPPMKQEQQKPSQKQFVLADVSDVVYPQISSTNVLSKAGTQLMTPGATQSVLTEEIPSCSTSPSTATGNHLAYPIIGRNEHCKVTIEKVPQSSSLMSIPTAGEAVTTPIMAKELSKLNHNLKENVTTSKSPIVGTGHENLLNIVPSTDNLETASSATSLWPTQTDGLLHQGFPTNFNQQQMFKDALPDVEIQEVDPTNNAFFGINSDGPLGFPMETEGLLVSAINPVKCQPNLSTDVEINYRIQKDAQQEISTSMVSQSFGQSDIAFNSIDSAINDGVMLNRNSCPPAPPQRMRTFTKVYKRGAVGRSIDIGRFSGYEELKHAVARMFGIEGQLEDRQRIGWKLVYTDHEDDVLLLGDDPWEEFVNCVKCIRILSPQEVQQMSLDGDLGNNVLSNQACSSSDGGNAWKPRRDQNPGNPSIGFYDQFE

SEQ ID NO: 54756 - protein, 232 aa, Zea Mays
MASHEGKRYKCFLPVEETKTMKSMLPQNATNIIIESERRIKPKEPDELLEVLKDQCFYRHEGWWSYEFCYYGKIRQVHVEDGKVIQEFVLGEFDDDATAAYHENSTSELADDDHHVKDISKRYHVHLYTNGTVCDLTDIPRETEVRFVCSEPTVLISSVKEISSCKYVVTIQSPMLCKNPLFQQEKRTLPIHCNELPAKAESGAEDGLLPKEAQISIIPDQDELHGFPAYAT

SEQ ID NO: 54757 - protein, 241 aa, Zea Mays
MEDDNEVTGESPVADEWDMLSLTSSIYASPLFRRGFDPINLPGYGNVINIQEGTQTGLVMSDGFVFPPSEHENLPIEPEHEDLPIEPGHDESNTNSVEKESSCAGNNDDDWCHVSPEEIDDVSNENLADNSDLPTASEATVPDSQPTEINAKREKDHRTCKADHTCERWWKKKTTYLFHHIKGVTTLCSVVAAGAVVGFVVMGQRWQQDHWHLHQFKFSVSGELIRDGHPRRIWGGVSLHL

SEQ ID NO: 54758 - protein, 111 aa, Zea Mays
MGWHFAMVPQPKRLLSTAYRMSVVSCKHRCRTRTACCKYARRCKRTGRICSVATFAGGDGKFPAGFLELCRVRLPEFPSWKVPYYSNSSCFCDAFNSRSITFWDNYDYILR

SEQ ID NO: 54759 - protein, 657 aa, Zea Mays
MTDADFFKSKVKKNWSDSESDDEGSAHQSNTTTDDEDSSDESQDSDNQLADTKGDPDKRNIVDKDTLVENTDLQEPEDLDNKESEDLDGRPRGTEIHEDQERADENGAPITDEKKLALETGRLYICNLPYATSEDDLVELCRQYGDVEQAHIVVNKATKISTGRGYVLFSLPDSAVRALDELDNSSFQGRVLRVKAAKPLNKLESFHETAVEKVSLKQKRLEQKKASEISGDTRAWNSFYMRQDTVVENIARKNGISKSELLDREADDLAVRIALGETHVIAETKKFLSRSGVNVAALEEHASKRNEKFKRSNYVILVKNLPFNSTEEELATLFQKHGSLDKIILPPTRVFALVVFVEATEAQYAFKKLLYTRYKDTPLYLEWAPENILSPTSAPVDEEVKNEVGERILTKANIDQTVEGVSAEEIDPDRVESRSVFVKNLNFKTTDESLKQHFSTKLKSGSLKSATVKKHVKKGKNVSMGFGFVEFDSVETATGVCKDLQGTVLDGHALILQLCHVKKDGQAAKKNGKDKSSTKLLVRNVAFEATEKDLRQLFSPFGQIKSLRLPMKFGSHRGFAFVEYVTKQEAQNALQALASTHLYGRHLVIERAKEGETLEELRERTAAQFVDESSGFQSLSSKRKRSILVDEGSVKVSRIAE

SEQ ID NO: 54760 - protein, 357 aa, Zea Mays
MMELAAVNKSNPVRPNLVKPKETLCEAKLSLSNSPDSVLNQSSLLISSSSPDIGETSDQVQVDSCQYLISSHTGDCRVSCPDNSSLDTSGKAHDEERLDQALITKHDSGMMPSTSNQTSLDATVGTESSAEYMKQDVSHCDDFNIRVNDQSLNQALRNQHGDAVPLPDMVSLDAKVDKESSWCLEPLIANFDCCIDSVNVDSLCTDQRLADVASGPTADVPSVLLAKENSDPLSAKLENIDVARIKGLLMKRKSRREIQNQAIASDGLSEEAWIERELESGIVTKQEANCAAISDELSDEAWIERELESGIVTGPTNEQAITFDGLSENDWIERELESGIIIEPAPAIKKRKLESSC

SEQ ID NO: 54761 - protein, 107 aa, Zea Mays
MGIPVTIHCGEVANRKEIQAVLDFCPQRLGHVCCLNDVEWKKLKSLMIPLTSTMRSTLCPCARMIPACFRQASQMSITSLQQLSASASSSCSSWPRMQCSLFLLMMW

SEQ ID NO: 54762 - protein, 153 aa, Zea Mays
MNKNPKQKEPAPGLVFFHIPLPEFSSFTASNFTGVKQEGISSASINSGFFASMVEAGDVRAAFVGHDHINDFCGKLSGIQLCYAGGFGYHAYGKAGWSRRARVLSVQLEKTDSGEWRGVKSIKTWKRLDDKHLSTIDSEVLWNRGSNDRNGAP

SEQ ID NO: 54763 - protein, 225 aa, Zea Mays
MAGAGDKVDYVFKVVLIGDSAVGKSQILARFARNEFSLDSKATIGVEFQTRTLVIDHRSVKAQIWDTAGQERYRAVTSAYYRGALGALLVYDITRRQSFDHIPRWLDELRAHADKNIVIMLVGNKSDLEEQRAVSTEDAKEFAEKENLFFLETSALQATNVESAFQTVLTEIFKIHSKKNKGPCPRSGAGNPKEQVLQFHVMLLRLVLGGLKIYSRNIVLVLNPC

SEQ ID NO: 54764 - protein, 622 aa, Zea Mays
MSPALTHVEQSRNTLFFATCAKEVTNTAKVNMVISDKQLVKHLQTELARLESELRTPDRGSSSDILIMEKDRKIRQMEIEIEELRKQRDNAQSELEELRKKKVDHQPGWNPFDSPQKARKCLTFSGSLEPSNKNKMMMSSIRQSSTAPFMLKHEIRKLEQLQQQLEVEANRAIEVLHKEVECHKHGNQDAAETIAKLQAEIREMQTVRSENRDMEMITDEGNGSDLKDEISRLHMQDNDIAKLEAKLENVQRSIDRLVMSLPNVAMPCNETTPKSNRSKKKKRLLLPLGVSNNINRANLLRAPCSPHSSSRPSESEVENRAPEGDTMSVEGSEKATPTKSEDGDMSSRDETPRYRRSSSVNMKKMQRMFQNAAEENVRSIRAYVTELKERVAKLQYQKQLLVCQVLELESNEGKPNGEDNSGPLQDGPDSWDRLFKEQMQCIIHLWDQCQVSIIHRTQFYLLFRGDKADQIYIEVEVRRLVWLQQHFAEVGDASPGAVEDPAVSLVSSMKALRNEREFLARRMGSRLTDEERERLFIKWQVPLDAKQRKLQLVNKLWTDPNDQAHIDESAGLVARLVGFCEGGNISKEMFELNFAVPTSRRPWLVGWQPISNMIREKTQQLW

SEQ ID NO: 54765 - protein, 205 aa, Zea Mays
MDAIEKAGYTGMIKIGMDVAASEFLTKDGNYDLNFKNQPNDGVHVLSAQHLGDLYRDFVKDFPIVSIEDPFDQDDWSSWASLQSSVGIQIVGDDLLVTNPKRIADAIDRKACNALLLKVNQIGTVTESIQAALDSKAAGWGVMVSHRSGETEDNFIADLAVGLASGQIKTGAPCRSERLAKYNQLLRIEEGLGNVRYAGEAFRSP

SEQ ID NO: 54766 - protein, 181 aa, Zea Mays
MPQKKNPDPMELVRGKSARVVGDLMTVLTLCKGLPQAYNRDLQEDKEPLFDSVKAVLGMLEVCTEFAQNISFNSKRIQSSLPAGYLDATTLADYLVKKGVPFRTSHEIVGRSVALCVSKNCQLAELELADLKSVHPVFEDDVYEYLGVENAVNKFISYGSTGSEQVKKQLEDWRIQLGVSS

SEQ ID NO: 54767 - protein, 80 aa, Zea Mays
MEAEKEKNKALMNAQLREQQNGASTSSPSLSPPIVPDSMPTLNIGPCQHRGAAESESEPSPAPAQANRGNLPPWMLRTVK

SEQ ID NO: 54768 - protein, 165 aa, Zea Mays
MEKGKGLARRWAVELPDASSSSPAVPDPPGFTRSAPDADDAAGARQRKDSEAAWKAQKAWEVAQAPFKNLMMMGFMMWMAGSTVHLFSIGITFSALWQPLNALRSVGKVFEPFKDPRVDTIAPKLLFIALNLAAMGLGIWKLNTLGLLPTNPSDWVSSLAPARMK

SEQ ID NO: 54769 - protein, 400 aa, Zea Mays
MICSHLVNISTLLGAILSWGILWPLISKQKGEWYPANIPESSMKSLYGYKAFLCIALIMGDGTYHFFKVFGVTVKSLHQRLSRKRATNRVANGGDEMAALDDLQRDEIFSDGSFPAWAAYAGYAALTVVSAVIIPHMFRQVKWYYVIVAYVLAPLLGFANSYGTGLTDINMAYNYGKIALFIFAAWAGRDNGVIAGLAGGTLVKQLVMASADLMHDFKTGHLTMTSPRSLLVAQFIGTAMGCVVAPLTFLLFYNAFDIGNPTGYWKAPYGLIYRNMAILGVEGFSVLPRHCLALSAGFFAFAFVFSVARDVLPRKYARFVPLPMAMAVPFLVGGSFAIDMCVGSLAVFVWEKVNRKEAVFMVPAVASGLICGDGIWTFPSSILALAKIKPPICMKFTPGS

SEQ ID NO: 54770 - protein, 103 aa, Zea Mays
MKNWHIELVSPPTPGAEVATFDIVGPVCESADFLGKDRELPTPDEGAGLVVHDAGAYCMSMASTYNLKLRPPEYWVEEDGSIVKIRHEEKLDDYMKFFDGLPA

SEQ ID NO: 54771 - protein, 76 aa, Zea Mays
MSFASLVTCEGAINALSREGCGHFEVFDQSDEGFEHEIFQVEDLVLKRSRGRSSTGCGTLTAGRRSGRGPTGRWIK

SEQ ID NO: 54772 - protein, 72 aa, Zea Mays
MSCLNHDSCKKVIWSIHIWSRAWTMLYFIKYGVKLKRNLRQRMGRIQSQGQQKKIRQSPSAPQLQSLCTNGS

SEQ ID NO: 54773 - protein, 430 aa, Zea Mays
MLLGFISLLLTVFQGMIRRTCIPERWTFHMLPCEKPDEKAGEAATMEHFVGTLGRIGRRLLQEGTAGAEQCQKKGKVPLLSLEAIHQLHIFIFVLAITHVIFSVTTMLLGGAQIHQWKQWENGIKKDAPGNGPKVTNVHHHEFIKKRFKGIGKDSIILSWLHSFGKQFYRSVSKSDYTTMRLGFIMTHCPGNPKFDFHRYMVRVLEADFKKVVGISWYLWVFVVIFLLLNVNGWHTYFWIAFLPLILLLAIGTKLEHVIAQLAHDVAEKHTAVEGDVIVKPSDEHFWFGKPRVILYLIHFILFQNAFEIAFFFWILSTYGFDSCIMGQVRFIVPRLVIGVVIQLLCSYSTLPLYAIVTQMGSCYKKEIFNEHVQQGVLGWAQKVKMKKGLKGAASASKDESITNADSAGPSVKIEMAKAGEDVEIVGNTG

SEQ ID NO: 54774 - protein, 189 aa, Zea Mays
MAAPLFLLLLLLAMFTGSADAAFCVCKTGVPDQAMQAAIDYACAKGADCASASKGAPCYGNGNKVAVCSYICNSYYQSRSATGATCDFNGVATLTGTDPSSGTCKFASGPSSAGTGGGMGAGAGTGGGMGAGVATPGSALSPPFGGTGAYGPSGAGSTDYNDAVAPRAAGLHVVAALALAVAVAAPLHR

SEQ ID NO: 54775 - protein, 79 aa, Zea Mays
MEGKEEGRIFVGGLSWQTDERKLQDAFGRFGKVVDVQIAVGSPVGLKEGLNCFTLNHIDSTGCPLFFCCCGRRVVAREW

SEQ ID NO: 54776 - protein, 301 aa, Zea Mays
MDRNDYYGGDSTSLNLNQLWKRFRGEDKPPAHLGASRDYNVDMVPKFMMANGTLVRTLIHTDVTKYLSFKAVDGSYVFSKGKIYKVPATDMEALKSPLMGLFEKRRARNFFIYVQDYNEADPRTHQGLDLTRVTTRELIAKYGLSDDTVDFVGHALALHRDDRYLDEPALDTVKRMKLYADSLARFQGGSPYIYPLYGLGELPQGFARLSAVYGGTYMLNKPDCKVEFDMEGKVCGVTSEGETAKCKKVVCDPSYLQNKVRKIGRVVRAIAIMSHPIPNTNESHSVQIILPQKQLGRRSDI

SEQ ID NO: 54777 - protein, 148 aa, Zea Mays
MQSGGLSDEQIKVRLEIKQLLKEADQLSTPSTFAQAAKLKRLAAAKEKELAKMQEHDLKGKQSLYDKYTKFLLVTKVIIYAVLVLCFWSTPVTAVPQHLLQPFGKMFSWRGVDTATGNVVVGILPWLFLTSRVSKMLCQKLGFVLVRP

SEQ ID NO: 54778 - protein, 176 aa, Zea Mays
MITKALLDVYTIKREIGTLDGIKLGLVGDLANGRTVRSLAYLIAKYQNIKIYFVSPDVVKMKDDIKNYLNSKGVEWEESSDLLEVASKCDVIYQTRIQKERFGERIDLYEAARGKYIVDKKVLDVLPKHAVIMHPLPRLDEITVEVDSDQRAAYFRQAKNGLYIRMALLKLLLVGH

SEQ ID NO: 54779 - protein, 468 aa, Zea Mays
MVETVTECLDKIFSSRYGASLLPNYGAFIQAGLLTDSKQIRKLACKAVLHLLDKAEDGGAAVETVVQHNLYPLLIKCLIEGDEEISAIILDTVKRLAQIPKGAEVIFPPDGQGSVQLGKVAAQSSSLARIRILSLIAKLFTVSSYTATAIRDSNLLSIFEEEIKDRRDMLKTLSALEVLYELVEHPHSNIFLLKTNLLQLIIDIINDSSADSVIRSRAALVSGRLLSSADAFTAIDKSCVTNLLIAIGRILKMEESKNTDEIESALETLGLIGTTSQGAHFLLTSSNVARHVVESSFDRQGRGRQLAALHAFGNICGVGRQEDQMKLDSEAEENLKRLVYTTAANSPKLTPSALLLSVLQQDPDVRIAGYRVITGLVIREWCLREVCLNSEIIRFVTDPTMETTKLGMETRYGCCVAINKALSSSHLLHEASLSELVGKLNDAVKRGPYLSDRKRVEARPVVDTAERF

SEQ ID NO: 54780 - protein, 686 aa, Zea Mays
MAAVAPPPAPAPAPVPAPAPATVPVADQTTDLLQKLSLDSQPKAADATQPAAATAKKGAAASQPLSVAIPPEPSITPVIQDFTDPNLFYLPAYYYGGYDSSMSEWDDYPRYLNSDGVEIAPAVYGDIYGYGYAPYGAYSPATSPVPTVDGQMFGAQHYQYPTAYFQPPTPVPSTTQSDLQSSKNPEKPAAKADPAKTTNGVPNGTAHSNSGTVPLASSQQNSSLTPDGTYRAPLLGGVPSAGYLDTTYGYDSTGAHFAWYDGSAYANGQQRATTTNHFPSSTFGNGSPARYQNKSTTTPQMGMQNRRPTTTSPAPTYPNRMYPSSRPYTQYGNSIKTGLPYGSNGYDSRIYGRWGLGMDNRYRPRGRNGYYGYGNESQDGTIELNRGPRSGRFKNQKLYGHTVTIAVKGQSLPSGESKDDSAVPDRAQFNRDDFPVQYDAAKFFVIKSYSEDDIHKSVKYNVWASTTNGNKKLDAAYQEAQSKGSACPIFLFFSVNTSGQFVGVAEMTGAVDFEKTLGYWQQDKWNGSFSVKWHIVKDVPNNILKHIILENNENKPVTNSRDTQEIHLEQGLQMLKIFKEHVSKTSILDDFAFYESRQKLMQDKRSKQQQVWDSRTPISVTGSEQQQEAANGKPNPSVPNGVPAEVKAAKASAENGTATPAISYAAKVAQAATEKPVLANGVAKTG

SEQ ID NO: 54781 - protein, 205 aa, Zea Mays
MAMGATVRAAAADAVVTFLWVLCASALGASTAAVTSYLGVQEGAGHYALLVTTSLLSVLLFTFDLLCGALGGASFNPTDFAASYAAGLDSPSLFSVALRFPAQAAGAVGGALAISELMPAQYKHTLAGPSLKVDPHTGALAEGVLTFVITLTVLWVIVKGPRNVILKTLLLSTSIVSVILAGAEYTGPSMNPANVFCLGVLHELS

SEQ ID NO: 54782 - protein, 633 aa, Zea Mays
MLAAPAALHLLLPAPPLPPPHYHHHHVAFPAPPLHASLPCSRRPRRRPPRHGVARASAAMAEEASSSGPTKFSVRIPVGDREILVETGHIGRQASASVMVTDGETILYCSVCLSDTPNDPSDFFPLSVHYQERLSAAGRTSGGFFKREGKTKDHEVLVCRLIDRPLRPTMPKGFYFETQILSWVFSYDGIHSPDCLAITAAGIAVALSEIPNKQTIAGVRIGLINNQFIVNPTTEQMENSELDLMMAGTDSAILMIEGYCDFLTEEKLLEAVEAGQVAIREICKAIDVLVQSCGKKKMVDAISLPPPELYRHVEDISGDELMKALQIKGKIPRRKALSALEEKVISILSEQGYVSKDGLSGGTESLADIVEDEDEDEIVDDGEVDEGDVHIKPVSRKPLQLFAEVDVKLVFKEISSKYLRKRIVERGKRSDGRSPWELRPINSQCGLLPRAHGSALFTRGETQSLAVVTLGGYQMAQRIDNLVDTEDSKSFYLQYSFPPSCVGEVGRIGAPSRREIGHGMLAERALEPILPLEEDFPYTIRVESTITESNGSSSMASVCGGCLALQDAGVPIKFPVAGIAMGLVLDTQEFGGDGSPLILSDITGAEDASGDMDLKIAGNESGISAFQMDIKLG

SEQ ID NO: 54783 - protein, 187 aa, Zea Mays
MDLQRGLNAVHHVVKDRLDKRMANWEKFCLRHCFDVPEGFVADENDSSCAKESHKNGTSDSDLDLELDSLRRKLESANKESENLEREMSSLERQSMHKRKLDSSISEIQKLFEDKLMQGFEDLVKAIPALRQKIIDMNKKRTEIRCLVDQQVWNTSSVRGNKRQTLDKGFTACGVDTREVVSIFENM

SEQ ID NO: 54784 - protein, 225 aa, Zea Mays
MLMIIVDDAGGFLPALNHSPWDGVTVADFIMPFFLFIVGVSLTLAYKRVPDRVEATRKAVLRALKLFCLGLVLQGGFFHGVHSLTFGVDLTKIRLMGILQRIAIAYLLAAVCEIWLKGDDDVDSGYGLLRRYRYQLFVGLVLSIAYSILLYGMYVPDWEYQIAGPGSSSTEKSFSVKCGVRGDTGPACNAVGMVDRTVLGIDHLYRRPVYARTKYRLSREWASPT

SEQ ID NO: 54785 - protein, 116 aa, Zea Mays
MNLFGVLKYKKMGEDFVCNSGIPFTIIRAGRLTDGPYTSYDLNTLLKATAGERRAVVIGKGDKLVGEVSRLVVAEACIQALDIESTEGQIYEINSGEGPGTDPEKWEELFRSARSD

SEQ ID NO: 54786 - protein, 1146 aa, Zea Mays
MPRDQMVTNGFGAKRDNAGAKKSPQQIQRLEKFYSDVQYPKPEEMGEYATCVGLTYSQVRIWFKERRRKERRMEMGAIGSQMERQFSARSSGPRCSSSSSFCNQAPIYDISRSESDTWGMSTAGEESKILSQVLFPKDYILSKIFRKDGPPLGSEFDPLPQSAHGCIRDTTCHHSSENQRTVKKRKIIESTNQRSDVYENTAPVRKHGIGKGLMTVWHAMYSHNVKCQSGRNFIDETGCLRSLRPFDDFDGLEDRDNGRKTQNQGMTRKKIVKRSKVLVNRKKVPCKRVTGPKVHPPMACHLSVDESESLELQTELVTLVDDEELELSELQTGPNPLRCSAHLSSSGRHDCPLCKDLLAKFPPQSLKMKKLFSTKPWESSPEMVKKLFQIIRYVYTHFGSIDVHPFIFDEFVQAFHDKDSSLLGEVHVGLLKLLLLKAEIGSDGVFVPRSSKDCRFLSFLNFVREQEFDANVWIRSLNALTWVEILRQVLVASGFGPKQHLLNQEFFNKEKNQMAKYGLRPRTLKGELFALLSKAGSCGLKVSVLAKSSEIIDLNVSSPLELEQLISLALSSDITLFEKIAPSAYRLRVDPQIKGEEDSMSDSDDSGSVDEDEDASRSDDGSDGSQKLKFLENESRLARRKEKNAHGSPNKCSEIDESYSGEKWLLALMEGEYSDLSIDEKLDCLVALIDVVSGAGSVPRLEEPQRVLHNVPRVHPPQSGGKIKKSTKNLCQYSDESLNGSGSLDCCHQGQSGRRKNQDYTTDPGRNDLPIAAHGPQVVLLGSDRRYNSYWLFLGPCREDDPGHRRVYFESSEDGHWEVIDSPQELLSLLSILDSRGTREAHLLTSMEKRQACLFEAMKKHVEGGKAARLPASSDSYCSQTSSGDGTSPKTSSVDGASSVSDIENTSVPTSLKDSNLDSSSAVVIESGRGGDEKISMWERLQAFDKWIWTSFYSILTAVKSGKKSFKESLLRCGSCHDLYWRDEKHCRICHSTFEVGFDLEEKYAVHVATCREPELSHEVPNHKFLPSQLQALKAAIHAIEASMPEAAFTGSWMKSAHKLWVKRLRRTSSLPELLQVLVDFVGAMDVDWLYKSSSARLRTNLDDIIVDFQTMPQTTSAVALWVVQLDALIAPYLDNAMARQLVNAR

SEQ ID NO: 54787 - protein, 266 aa, Zea Mays
MAAKGLREVGRRRAAEVGRRCLSGGSAGPPAPAAKRKEGGKAVNLFTAVNQALHIALDTDPRAYVFGEDVGFGGVFRCTTGLADRFGKSRVFNTPLCEQGIAGFAIGLAAMGNRAIAEIQFADYIFPAFDQIVNEAAKFRYRSGNEFNCGGLTIRTPYGAVGHGGHYHSQSPEAFFCHVPGLKVVIPRSPREAKGLLLASIRDPNPVVFFEPKWLYRLAVEEVPEEDYMLPLSEAEVIREGSDITLVGWGAQLAVLKEACEDAAKL

SEQ ID NO: 54788 - protein, 1000 aa, Zea Mays
MAIPEDLEGTSGDGGVTNRGSRGRRKGAAKGRGRGRPRSADRSFPPPAMAGVAVGDRVLRERRHTTNVFCERDTDVDDESIYFQDDVETVRSKDSRSGDVLQTAKKRKKGGAGKVSVTKRSKREGEEQKKASPSKDKDCAETNGKRKMLTGDNALMCHQCQRNDKGRVVWCNSCRNKRFCVPCIERWYPNLSEDEFAAKCPYCRKNCNCKGCLRMRGVEEPPKKEISEENQISYACNVVRLLLPWLRKLRQEQMEEKKLEAKIKGVLVNEMKLEQAEYNLDERVYCNNCKTSIVDFHRSCKYCFYDLCLDCCVEIRRGEIPGGEEIMRVKPEDRGRAYLFGTTNSKDGSKRFSMRRHSSSLENEPSNVVGSSEGANNSLELWKAESDGSIPCPPKELGGCGGSILDLKCFFPEKMLSNLEERADRIMRSEVFAKAVAKRSDQCPCYDHSGNIRTQDVRETANTKGSSDNHLYCPVATAIKEDDLAHFQMHWTKGEPVIVSDVLHLTSGLSWEPLVMWRALREKKTNGDVEDEHFAVRALDCLDWCEVEINIHMFFVGYMKGRTHHMTHWPEMLKLKDWPPSSSFDQRLPRHGAEFISALPFPEYTDPRYGPLNLTVKLPDGALKPDLGPKTYIAYGFYQELGRGDSVTKLHCDMSDAVNILTHTAQVPYARYQLEKIEETRKKMKEQDLQELYGVSELNLSSPFTDSRNISADEMSKTSCLDVNDVPPVNNESEVQSGAGQCSDYIDKDRSYAGMHNGERTGGALWDIFRREDSDKIQDYLRKHATEFRHIFCNPVKQVIHPIHDQTFYLTEEHKRKLKEEYGVEPWTFEQKLGEAVFIPAGCPHQVRNLKSCIKVAMDFVSPESVNECMKLTGEFRRLPPDHRAKEDKLEIKKIALHALNQVVNFLDPSSEWSKSWFAQLKNKKKAGAEEQEKPKRKRGRPCRKSNDEAAGDRHRKKGGRQRGRKRGYGKSKDGAGAVDVKPPKRQRNLLKGSGNRVGG

SEQ ID NO: 54789 - protein, 782 aa, Zea Mays
MMEVERPMWELKEEEEEPPQLLMEAEEDDYEEEEDTSALLYTRERESMRKKMTTTMADLDLEMESSDSDSNAAASAAVEEEAAAAAQQSIFLDPTQASDHATGLGAENQVEKQDNVSAQQTNHSSSNGNLENGSHSNGVHEISSSSETVTTIADGLKLITTIREGRQHILPSWSGSLDHVSGGSTSTSQVHEIEVEKEVSKGDVKVEEYDLEKILDEQETHDLYCPNCKSCITRRVILKKRKRTVRQETGKEPPKRPQLVEPPANAPSQTINQDSPEVFRCLSCFTFFIPTGCGFNIFRIFERRDVDQQVQSQHSSASVENCGSWLLSCFRTIDSPKPLHNADSLEEPLVSDSQRTDNITSVEENTPLHSDNTIGKAEQSNKPSPTGSQTTAATYEVKESFSQFHASSKDVTGSTQKEAGHVVTVQRNGARQEQIPLSRPAVDTKTDTSHLGHKEEFTQTEAGHVVTVQRNGARQEQIPLSQPSGDTANDSMHLGHKQDILEDIMAPSDNSTFFSPSFVKPVLTIPIKVLPGEDNQTVEKPTSVIRQPAEPEAPPHRVLAVPEAEALVPAPSAERDEWDILKAVVYGGLVESITSLSVVSAAAASGAKTLDIFILGIANLIGGLPVLYHNIADLRNTGDIAESSEQVGHYWLELGRRSKYQLHMVIAILSYILFGLLPPVIYGLSFRTSDNRENKVLVVAAASLLCIALLAIGKAHVKRHRTYLTTLLYYLSIGFSSSGLSYVAGVLLAKVLAHFGIIDQGGASAPAPPGLSFPEAAAWASY

SEQ ID NO: 54790 - protein, 144 aa, Zea Mays
MWGTPGYITAPPPYNPYAAYPVPPVAMTSPAPVTGPTAYAPVQNTKDNPPCNTLFIGNLGDTVVEEELRSLFSVQPGFKQMKVLRQDRNTVCFIEFEDVNAATSVHQTLQGAVIPSSGRGGMRIHFQRIPLGEGRIQLLALRAF

SEQ ID NO: 54791 - protein, 452 aa, Zea Mays
MFGGQDETSDDLETVIDKEDNVFVMSNRKTKYPTLQLDLRLIKDLVIIIVSATGGGIMFSFMGQPVIVGYLLAGSLVGPGGLNFINEMVQVETFAQFGVVFLLFALGLEFSLTKLKVVGPVAVLGGLLQIVLFMFLCGLTAALCGAKSSEGVFVGAFLSMSSTAVVSKFLVEKGSTNTLHGQVTIGTLILQDCAVGLLFALLPVLGGASGIFGGVMSMAKLLLVLSVFVAVTYMMTWSIVPRFLKLMIQLSSQTNELYQLASVAFCLLLAWCSDYCGLSLELGSFLAGVMISTTDFAHHTMEQVEAIRNLFAALFLASIGMLIHVKFLWNHVDILLAAVILVIIVKSIVVAIVVKAFGYSMRTAFVVGLSLAQIGEFAFVLLSRASHLHLVGGKMYLLLLGTTALSLVTTPLIFKLIPVVMHLGILMRWFPSENSMQSEEKAVMLEAHNRSL

SEQ ID NO: 54792 - protein, 183 aa, Zea Mays
MTGVQKELGEAYQVLSDPGKKEAYDNYGKEGIPQDNMVDPAAVFGMLFGSDYFEDYVGQLALASIASVEVEENSNSQEARAKVQEKIKELQREREQKLTQSLKDRLQSYVDGRNDEFVSYASAEARRLSEAAFGEAMLHTIGYIYVRQAARELGKSRIYMGVPFIAEWVRDKGHHIKSQVLFL

SEQ ID NO: 54793 - protein, 68 aa, Zea Mays
MDDVYNFMRSQKRRRLLSSDVTQDFDAMRKQLVSDSAAIFRSKVPESLMENLIKRLRSYFEGKHSPHE

SEQ ID NO: 54794 - protein, 170 aa, Zea Mays
MNEKDWLALVAVHSDAWLLAVAFYFAARFGFDKEARRRLFNMINNLPTIFEVATGVAKKQNKEKEPNNTSKSNKPSSKMTTRPESHLKATKVAPPKDEDDESGEEYEEEEERDNTLCGSCGTNDGKDEFWICCDSCERWYHGKCVKITPARAEHIKHYKCPDCSNKRARA

SEQ ID NO: 54795 - protein, 285 aa, Zea Mays
MNWVKQEHFTASASLHGGALVANYPWDGTRDTSKHYYGCPDDKTFQHMASVYSRSHYNMSLSKEFEGGITNGAFWYPIYGGMQDWNYIHGGCFELTLEISDTKWPKADELPIIWEHNRMSMLNLLASLIKSGVHGRIFAADTGRPVPGSVMIKGIDSKVSASSTFGDYHRIVAPGETYEVVASMRGFRQKSTRIRLEQEAVSLDFILDPDGADGQTKLLPRSNDRGCRCDNDNAAKPFHVHEAHLWLYLLIVSVLLALYVVFKRKTVPRLLAYRHSSSLRRPVAV

SEQ ID NO: 54796 - protein, 447 aa, Zea Mays
MSLFDYNVQERVDDFVAAAIAQANVTRTNHIMWTMGDDFNYQYAESWFRNMDKLIQYVNKDGRVHALYSTPSIYTDAKHASNESWPVKYDDYFPYADSTNAYWTGYFTSRPTFKRYIRVYSGYYLAARQIEFLMGRSSLGLFTSSLEDAMGIAQHHDAISGTAKQHTTDDYSKRIAIGASKVEKGVNAALTCLTNSNKTCVSSVPKFSQCPLLNISYCPSTEEAISATKHLVVVVYNPLGWKRSDFIRVPVNDEDLVVKSSDGNTVVSQIVVVDNVTNNLRKLYVKAYLGVTANKAPKYWLTFQASVPPMGWNSYFILKSTGSGYNNTEHVPVVVPPSNNTIEAGQGHLKMSFSSASGQLERIFNSASGGDLPIQQSFLWYRSSKGDALDPQASGAYIFRPDGNTPTIASSSVTLKVIRGPLFDEVHQQFSSWIYQFWSLGPSFFLI

SEQ ID NO: 54797 - protein, 661 aa, Zea Mays
MPSSVLSSDSMHIGLLAAAAHAAATNSRFTIFYNPRASPSEFVIPLAKYVKAVYHTRVSVGMRFRMLFETEESSVRRYMGTITGISDLDSERWPNSHWRSVKVGWDESTAGDKQPRVSLWEIEPLTTFPMYPTAFPLRLKRPWASGLPMFNGGRSDEFARYSSLMWLRDGNRGAQSLNFQGLGASPWLQPRIDNPLLSLKPDTYQQMAAAALEEIRAGDHLKQASSLLPVQQTQTLNGGLDHLYGNPVLQQMQFQSQQSTLQAVQQGYGQNANDSGYVQNQLQQLQLQKQQEPPPPQQQQQTQVLQRQAHQEMQQHLSASCHDIANVASGVSMSGSACQSQSSLLSGSSFYQQNIFDGNGGPDLHLHNSFHNFSSQESSNLLNLPRSGQLMASEGWPSKRLAVESLAGHEIQPLQHKLEKVSHQSTVSHCSGTLPPLSARDGSSAQACGTNVQSHLLPSSFAIHDGLSTIRSGGVGSGTDAITIASLRYSDANLLPENSIATSSCLGESGTFNSLDDVCGVNPSQGGTFVKVYKSGSLGRSLDITRFGSYYELRVELERLFGLEGQLEDPARSGWQLVFVDRENDVLLLGDDPWQEFVNSVGCIKILSPQDLQQMARGGGGDLLSAPGARMLQGSVCDDYSAGHDVQNLTGSIAPVVPLDY

SEQ ID NO: 54798 - protein, 56 aa, Zea Mays
MVIAGAPPPHHCASQLCSTPDTRSRSAARTSWVCASRIRSVGRSRNRRLLVGVRFP

SEQ ID NO: 54799 - protein, 169 aa, Zea Mays
MDKASIIKDAIEYIEQLQAEERRALQALEAGEGARCGGHGHGEEARVVLQQPAAAPAPVEVLELRVSEVGDRVLVVNVTCSKGRDAMARVCRAVEELRLRVITASVTSVAGCLMHTIFVEVRRRQASTSSSIYVRIVHCLRSKHRVLCFFLSSFRMLRNLGDVGFDRIV

SEQ ID NO: 54800 - protein, 360 aa, Zea Mays
MGSSSQHDSISASGSSERADGSRSSISMWTKITSTDSWRWCLGLIYIVAVASIWIAASYIVQSVVDAGVSPFLITYICNSLFVVYIPIVEAARYFEDSIGDLWTKLKFKDAESLQQASDMESVNLLQSGGHEINVASDQSQTRLSGDASVPDTCFPAQAELTVVDCSKGLDAKGRWTRARVAQVSMLISPFWFLAQLTFNLSLRYTTVTSNTILSSTSSLFTFLVALVFLGETFTWLKLISVLLCMGGTIIVSLADSSSSVNAIATNPPLGDFLSIVSAGLYAVYITLIRKKLPDEKEGQGQVSMAQFLGFLGLFNMLFFFPVALVLNFAKLEPFHRLTWEQAGLVVGKGRFALHSWKFY

SEQ ID NO: 54801 - protein, 1083 aa, Zea Mays
MDLSRLASVAGPSRAAPRAGLQIGAAGNGFRVCSLRHRGAGNGRLTSAAALLRGSSGLFYLAPARGGPPRLRARGRPRCQGSDSLAYVDGPLEAAKGSGEVYDDDATSSGPDDDDNDKGPADVDGLREMLQRCRNELEVARLNSTMFEEKAQRISESAIALKDRAEGAQRDVSAAVATVQEVIVKEADAKEAVQKATMALSMAEARLQLASEALDAKRGSVGPMEVSIEGVEEEALVSAQEEIKDCRAALLRCEEELERIQEQKMNLQKEVDRLTELAEKAQLDASKAEEDVTNIMVLAEQAVALEMKATQRVNDAEAVLLKAEKVISSVDTVVELTSLAEEQKSAEEDSVSEGYEYSSNGTDDVPVRDEVSSIERLMVGDLTVEGIEQLEPSREIYDEASSDKMSVEPQKEAEPDSDKLKQGKKQEMERKEFTKEPLSAQKSLKKRSSRFFPASFFSSKADGEFTPTSVFRGLMKSVQKQAPKLVVGILLLGAGAFFLNRAEKSQLFQQQEIATSIGKVTSTTKPIVREIRQIPQRVKKLIELLPHQEVNEEEASLFDILYLLLASVIFVPLFQKIPGGSPVLGYLAAGVLIGPYGLSIIRNVHGTKAIAEFGVVFLLFNIGLELSVERLSSMKKYVFGLGSAQVLATTAAVGVIAHRFAVLPGPAAIVVGSGLALSSTAVVLQVLQERGESTSRHGRATFSVLLFQDLAVVVLLILIPLISPNSSKGGVGFQAIAEAMGMAAVKAVAAITAIIAGGRLLLRPIYKQIAENQNAEIFSANTLLVIFGTSLLTARAGLSMALGAFLAGLLLAETEFSLQVESDIAPYRGLLLGLFFMTVGMSIDPKLLLSNFPMISMILGLLIIGKTLLVTFVGRVFGVSTIAAIRVGLLLAPGGEFAFVAFGEAVNQGLLSPQLSSLLFLVVGISMALTPWLAAGGQFLASKFEQHDVRSLLPVESETDDLHDHIIILGFGRVGQIVAQLLSERLIPFVALDVRSDRVAVGRALDLPVYFGDAGSREVLHKVGAERACAAAITLDTPGANYRAVWALNKYFPNVKTFVRAHDVDHGVNLEKAGATAYLQHIF

SEQ ID NO: 54802 - protein, 123 aa, Zea Mays
MEEHTSVHFRVYYRSQEKHMVLMCADLRKSSLRPELYTPAYGGFFELDLEKEKTVVSLRTLIDRSAVESFGGGGRVCIMARVYPAALVDDGGTRMYAFNNGTSTVRVPRLEAWSMRRAQVNKG

SEQ ID NO: 54803 - protein, 53 aa, Zea Mays
MAKEPSRLCVEEGPNLQVAGPGGEITAGYLLKKSAKNNEWSKRWFVLNEKSGK

SEQ ID NO: 54804 - protein, 365 aa, Zea Mays
MDCLVAGANFLLKAIRHEAFTHMDGQKQYVQIDQNDLFPFLLVNVGSGVSIIKVDGHGKFQRVSGTNVGGGTYWGLGRLMTKCKSFDELLELSQRGDNSTMDMLVGDIYGGLDYSKIGLSASTIASSFGKIISENKELSDYRPEDISLSLLRMISYNIGQISYLNALRYGLKRIFFGGFFIRGHAYTMDTISFAVHFWSKGEAQAMFLRHEGFLGALGAFMSYEKHGLDDLRVHHLVERFPMGAPYVGGKIHGPPLGDLNEKISWMEKFVQKGTQIIAPVPMGVPATTGMGGFERPTAKGDILRSDASAALNVGVLHLVPTLDVFPLLEDPKTYEPNTIDLDQDEFKYWFKILSDHSPDLVDKLL

SEQ ID NO: 54805 - protein, 544 aa, Zea Mays
MGEPKMCQIICKAKIDDKQAKELKEKIEDEYRVNMILDNLPLVVPLARQDRGATVYQAGYHVGVKGQYAGNNDKKSFIHNHLAFLVKYHKDETTDLSRIVGFEVKPFSINHQFEGPWNDKNTRLITCDPHASKLLVNSDTPQEVEAGKEIIFTYDVGFEESDIKWASRWDTYLLMIDDQIHWFSIVNSLMIVLFLSGMVAMIMLRTLYRDISRYNQLETEEETQEETGWKLVHGDVFRPPANSDLLCVCVGTGVQFFGMLLVTMIFAVLGFLSPSNRGGLMTAMLLTWVLMGLFAGYASSRLYKMLKGSEWKSITLRTAFLFPGIAFGIFFVLNALIWGEKSSGAVPFTTMFALVLLWFGISVPLVFVGSYLGFKQPAIEAPVKTNKIPRQVPEQAWYMNPAFTILIGGILPFGAVFIELFFILTSIWLHQFYYIFGFLFLVFIILIVTCAEITIVLCYFQLCSEDYLWWWRSFLTSGSSAIYLFLYAGFYFFTKLQITKVVSGMLYFGYMLLASFAFCVLTGTIGFYACFCFTRLIYSSVKID

SEQ ID NO: 54806 - protein, 61 aa, Zea Mays
MPPPKSRWKGVENHPCKWSMAAASLGVVGAPRHRNSSSESEFARDPRRIASRELQTAFPPR

SEQ ID NO: 54807 - protein, 603 aa, Zea Mays
MSQPAATVAAAAQPQGRGPAGRQGGLGQSIAGIVRMAVFWYFASKFFGPKRPPADPGMLMSNLFQKGEPMDMWMYLSENEKFNDFANEDALIWHEANIPYAVWGPTSTRTRSLTYYPSEALKHNGSLYAHVYFAPFGVILWTLQIQNMSRNLRLGGPIVSVVAFLPKSKAGKKKSLLGDSEEPEEKAPRNKENKESEDKDEGPTEYISYWKPNVTINLVEDFTRYPNNNVPPIVAPYLNVDPVTGDYYPTVFFNEFWLLKDKLIALNETVEELPLNLEVGPISMTKWQLFLQIEQSFQVHRSYGSMLEGEADELKRVFLEGNPYLLGLTMVVSLLHSLFDFLAFKNDIQFWNKNKSMEGLSAKSVVLNFVCQLVVFLYLLDNDTSWMILASSGVGVCIEFWKIGKAMHIEVDRSGKIPMLRFRDRESYAQNKTKEYDAIAMKYLTYVLFLLVVGFSIYSLKYEKHKSWYSWILSSMTSCVYMFGFIMMCPQLFINYKLKSVAHMPWRQMTYKFLNTIIDDLFAFVIKMPMLHRLSVFRDDVIFLIYLYQRWKYPVDKKRVNEFGFGGEDEPAAQEAVEGSDSAAAPQLTEAGSETSTEDKKTK

SEQ ID NO: 54808 - protein, 148 aa, Zea Mays
MMKFACFETIVEMVYKHAVPKPKDQCSKPLQLAVSFAGGYIAGVFCAAISHPADNLVSFLNNANGATVADAVRTLGIWGLFTRGLPLRIIMVGTLTGAQWAAYDAFKVFVGLPTSGGVVRSCAAVPPIRAKRVHREDVLNQRRVDVPH

SEQ ID NO: 54809 - protein, 125 aa, Zea Mays
MHQRKAEMARNSDAFIALPGGYGTLDELLEVIAWAQLGIHSKPVGLLNVDGYYDFLLAFIDKAVDDGFIKPSQRHIFVSAPDARELVQKLEGYEAVQDEDPATPKLRWEIEQVGYNASLLAEIAR

SEQ ID NO: 54810 - protein, 170 aa, Zea Mays
MSIFGTVNPIVEGVCVRGDAADKQYQVKNCRWRPTFALETDGPSNTDGQDFDEDSGFLGRTRLGRLIQAAARELLDKLNSARTNSPTKIFLVLLGFYTANALATILGQTGDWDVLVAGVVVAAIEGIGMLMYRKPIARPPGRFQSLISMVNYWKAGVCLGLFVDAFKLGS

SEQ ID NO: 54811 - protein, 598 aa, Zea Mays
MDVFGSSSNVVPLVDCPNGFSVPYEVLFRLNSLVHMGKLVARHVNADLFKVLEDLSIDTLRRIFEKMSKLKSTCYEPLQFIRHEAHSMNMRKKALSNKRESGKLMRCYRIHITPSKIYCLGPEEEVSNYVVKYHSEYASDFARVTFVDEDWSKLSPNALSARTEQGFFSKPLKTGLYHRILSILKEGFCIGPKKYEFLAFSASQLRGNSVWMFASNSSLTAENIRRWMGHFEDIRSVSKCAARMGQLFSSSRQTFEVSSYDVEVIPDIEVTTDGTKYIFSDGIGKISTRFARQVAKLIGLDPAHPPSAFQIRYGGYKGVITIDPTSFFNLSLRPSMKKFESKSTMLNITNWSKSQPCYVNREIISLLSTLGIKDEVFESMQQDDMHESDGMLTNKEAALSVLGKIGGGDTKTAADMLLQGYEPSSEPYLLMILKAHRANRLTDIRTRCKIHVQKGRVLIGCLDETCKLEYGQVYIRITKNHKEQKYSEQPFFCNDDGKTAVIVGKVAITKNPCLHPGDVRVLEAVYDPGLDARGLIDCVVFPQRGERPHPNECSGGDLDGDLFFITWDDKLIPEKVDAPMDYTATRPRIMDHAVTLED

SEQ ID NO: 54812 - protein, 485 aa, Zea Mays
MIRAGLTTPVMTVLLVSFLLEYLPKIYHAARLLRRMQRQSGYIFGTIWWGIALNLMAYFVAAHAVGACWYLLGVQRASKCLKEQCLQAAGCARGSAVACAAPLYYGGSPSPGVGGGDRLAWAGNAQARGTCLASGDNYQYGAYTWTVMLVANPSRVERMLLPIFWGLMTLSTFGNLESTTEWLEIVFNIITITGGLVLVTMLIGNIKVFLNATTSKKQAMHTRLRGVEWWMKRKKLPRSFRGRVRQFERQRWAATRGVDECQIVRDLPEGLRRDIKYHLCLDLVRQVPFFQHMDDLVLENICDRVKSLIFPKGETIVREGDVVQRMLFIVRGHLQCSQVLRNGATSSCTLGPGNFSGDELLSWCLRRPFLERLPTSSATLVTLESTEVFGLDAADVKYVTQHFRYTFTNDKVRRSARYYSPGWRTWAAVAVQLAWRRYKHRKTLSSLSFIRPRRPLSRCSSLGEEKLRLYTAILTSPKPNQDDDF

SEQ ID NO: 54813 - protein, 239 aa, Zea Mays
MKVRVPNLLSGLQGKSQMVQDELARLGESMVQSPEGTRAVALELCREFEDKFLAHITSGEGSGWKIVASFEGKFPDRIKQLPLDRHFDLNNVKRIVLEADGYQPYLISPEKGLKSLIKLVLEMAKEPSRLCVEEVHRVLLDIVNASANATPGLGRYPPFKREVVAIASNALDTFKNDAKKMVVALVDMERAFVPPQHFIRLVQRRMERQRREDELRNRSSKKTQEAEQSTSKRLQYILA

SEQ ID NO: 54814 - protein, 155 aa, Zea Mays
MAVPRGCLGLPLVAVLLASLCRGQAAVRELKVGYYAETCPEAEDIVRETMARARAREARSVASVMRLQFHDCFVNGCDGSVLMDATPTMPGEKDALSNINSLRSFEVVDEIKDALEERCPGVVSCADIVIMAARDAVVLAGSRSFCLPLTMAPYH

SEQ ID NO: 54815 - protein, 339 aa, Zea Mays
MDKSALSTSQADSSSGVPGITVDKSVEFSYEELFNATEGFSMSNKIGQGGFGAVYYAELRGEKAAIKKMDMQASHEFLAELKVLTHVHHLNLVRLIGFCTESSLFLVYEFIENGNLSQHLRGTGYEPLSWAARVQIALDSARGLEYIHEHTVPVYIHRDIKSANILIDKNYRAKVADFGLTKLTEVGNTSLPTRGIVGTFGYMPPEYARYGDVSPKVDVYAFGVVLYELISAKDAIVRSTESSSDSKGLVYLFEEALNTPDPKEGLQRLIDPALGEDYPIDSILKMTVLARACTQEDPKARPTMRSIVVALMTLSSTSEFWDMNAIQENQGVVNLMSGR

SEQ ID NO: 54816 - protein, 419 aa, Zea Mays
MALAPSPPALPPNPALPLPWWGRAGRGALLGARARVRAVRAALRPPSQWSVGSWRGRPAQQQPEYPDKADLEDVLRTVGTFPPIVFAGEARTLEERLAEAAVGRAFLLQGGDCAESFKEFNANNIRDTFRVLLQMSVVLMFGGQMPVVKVGRMAGQFAKPRSDGFEERNGLKLPSYRGDNINGDAFNGESRLPDPHRMIRAYSQSAATLNLLRAFATGGYAAMQRVAQWNLDFTENSEQGDRYMELAHRVDEALGFMSAAGLPLDHPIMTTAEFWTSHECLLLPYEQALTREDSTTGLYYDCSAHFLWVGERTRQLDGAHVEFLRGIANPLGIKVSDKMDPAELVRLIDILNPENRAGRITIITRMGPENMRVKLPHLIRAVRGAGQIVTWVTDPMHGNTMKAPCGLKTRSFDRILNFD

SEQ ID NO: 54817 - protein, 64 aa, Zea Mays
MYTQNSRVLLCLTSIGRQLLISKSVVSLRFHELLSDRIPYIAEAIFEATCCAYMLGIFPISSLR

SEQ ID NO: 54818 - protein, 176 aa, Zea Mays
MREHGGGGAAAQGDGHPVRAALRGGGRHQRGPDLLPRPGRLHDRGLQLRQPPRRPARRRRRPARACRPRRLQAGRGGGRRQAAAAAKQRRRRAFFRRPGGGRAARAVGGAGAHRPRRRGVDVAHFVRVILHAKWRGRSVSCRPAGCRHRDGDRAHCMSASSRDEAGTMRRVTAKSV

SEQ ID NO: 54819 - protein, 657 aa, Zea Mays
MLNGSNKDVDSCSEDILLKVEEILLSCKEIKPADRDYKRTTRPELCSKWLALLTMEKACLSAVALEDTSDMVLELGGNFKETLRQLGGLDDIFNVMVNCHSELEKLVKDASTTVVEGKEGAPLQSTTLLLKCLKILENATFLSDNNKTHLLSMSRKLSPKCRSLSFVGVILNIVELLSALSLLQKPSTVSRKADPKNTKVCNGACSADSRGLSLLNHHCKCNNSKKKSILLNRRCQYCSSTKSEASHVTLSSSSDVSQSERILNCSSFSSNGTSSGSFGVKHINGASLKLNVRMDRSKAYPVRGSTGWISMKAQTSDWNSREMAKKRRLSENVRTDLSNGGDDPFAFDDIDQEPSNWDLFGPKRKSPQKRAKRTNGEVLDDCGTALMGSPKLCQPEDIYQSVATSGSKVVDESNLLEDCLLASVKVLMNLANDNPSGCEQIASCGGLNNMASLIIKHFPSFDFSMNSNNQMNESVSSGDPLSSQNSKSPQIKTKQLRDYELDFLVAILGLLVNLVEKDSLNRVRLANARVSVNLSQNPDSKEVQRDVIPLLCSIFLASQGTGETAEAISPDDEESLLQGEREAEMMIVEAYAALVLAFLSTESMKVRGAISSCLPDNNLKVLVPVLEKFVSFHLQLNMMTRETHSAVTEVIERCRLS

SEQ ID NO: 54820 - protein, 155 aa, Zea Mays
MQMAATTTESQAAVPPQHPHAHPHAPPQHAHPHHHMPQPRWVVIPYPPPPPMVAAPPPPPQFAKHFAAGPPPPPQAGAGRRTPTPPSSGSGGNGCEENKTIWVGDLQYWMDENYLHNCFGPSGEVVTIKVIRNRQTGQSEGESSSEFYWSCDAKH

SEQ ID NO: 54821 - protein, 230 aa, Zea Mays
MNLANDNPSGCEQIASCGGINTMASLIIKHFPSFDFSMDSNNQMKERVSSGDLSSSQNSKSLQIKTKQLRAYELDFLVAILGLLVNLVEKDNLNRVRLANARVSVNLSQSPDTEEVQRDVIPLLCSIFLASQSTGETAEAISPDDEESLLQGEREAEMMIVEAYAALVLAFLSTESMKVRGAISSCLPDNNLKVLVPVLEKFVSFHLQLNMMTRETHSAVTEVIERCRQS

SEQ ID NO: 54822 - protein, 125 aa, Zea Mays
METTIPFRERLKILGRVANLEDLPLSAAERKLMHAYNEKPVLSRPQHEFYLGDNYFEIDIDMHRFSYISRKGFATFLDRLKACVLDVGLTIQGNKAEELPEQILCCVRLNGIDYTKYQPLLTHAA

SEQ ID NO: 54823 - protein, 253 aa, Zea Mays
MDNFKMDTKIEDHTNFITDIRFRTNSTQLATSSSDGTVRLWNAADESGALQTFHGHRSHVTSVDFHPRLTEVLCSCDDNGEILFWTVGQTTSTHVLRVKQGGTGRVRFEPRSGQLLAVAAGSMVNIFDVEKQSSLPCPPKGHNSEVNFVSWDENGEYLASVSQDTVKVWSVSSGVCIHELRSNGNQYQSCTFHPRYPKVLIVGGYQTLELWSLSDNQRIPIQAHEGLIAALAHSPFTGMIASASHDRCVKLWK

SEQ ID NO: 54824 - protein, 203 aa, Zea Mays
MDGDREGAAAVHHHARSPEDVFRDFRARRAGIVKALTTDVEKFYQQCDPVHSDAWLLSVAFYFGARFGFDKDARRRLFTMINNLPTVYEVVTGVAKKQSKAPNGSSKSSKSNSKPSKQINSNSKPVKPAHPNEEEDSGREDAEEDQAYLCGSCGESYANGEFWICCDICEKWFHGKCVRITPAKAEHIKQYKCPSCSTKRSRE

SEQ ID NO: 54825 - protein, 174 aa, Zea Mays
MAGKMKELDGASPAKIFIGGLSKDTSMSTFKEHFGKYGDIIDAVIMKDRYTQKPRGFGFITFADPTVVDRVIEDEHVINGKPVEIKRTIPKGAAPLKDFKTKKIFVGGLPSALKEDEFKEFFSKFGKVVEHEIIRDHATNRSRGFGFIVFDAEKAVDDLLHKKGNMIDLNGSQV

SEQ ID NO: 54826 - protein, 980 aa, Zea Mays
MGAKVEGESYMPGYYATGDLNVEASGRWSPYYEEMTSNGQLCNGFATKPTSGYSEFDKEILKHQILEHEAVFRQQVYELHRVYKIQKDMMKQHQRKEVYSYPTLAGASHTNSPSQVPPNGAKMMWQMPVPPVSTTYRKAIGEHNDTNQSCMKFLREGSVQSSPNGFLSSDAAPRTRQGTFDLQLPADHYIDDDDTSDNKPIDFLGLASDAKPQNDAELTLVSAERLGKFSDNSSSSGLRTTNNLGSRQVTNLNESNTGFFMGRANGSVSRGLPHTLENSWHQPILRSSTTTFNFSKEYSKEKHTNEGTSSNFFDTSAKLTHDDKPTINKGKQVSSITFLAPRYNDADPPKYFKAADGRPASYNQFLYQGQNSSAGWIARSPLEPSVINNFARVDRPHHSNLGTFTVPISIPQIDNPSIVSPMGSCTADPRSSIVNNPALIPRFNGSSTVNSYASLSAVTQSIGTSIPKLKNVDNLDKRYPGFPLDSFSVSHSRHQVAISSNLEQKNSQKFEDSDQQSHGKGMKNFNLNETLSDCQEDGLVEQDGRCAASFQHGKDGGSVFGISWLKNKAVSADPTALEKAGKIFGHSFGTTMELKNAKDQNEPAVTIRNLSDSASTSLGCGIKKDGPSEDIATGTLLVCNKAQEDATCLPLSCQKHVPKDGQDADGVIKISGASIRNFIDLNDAVPNDDNSEESVVSHECQAEPSRNNHPKRAFVIDLEVPACEEDAAWDFDQECAQPKPDAHQEVDGRSDTSALAAAENIVALSRIIPTALEASDDMLQWFADLAVLNIKDLAEQAELQACTNDSSNDESDSFESLTLKLEETKIDEYWSRPLEPEITTDEQLISTAHLLTKPRRGQQRRRRQKRDFQKDILPGLSSLSRPEIIEDVQLLEGLVQASGGSWESSLTRRGRYGGRTRGRKPRKTVVTVIVEEEVEVSPPPKPVGTGDLEADGRGMVGWGRTTRRCRRARCPSGNNLAAAS

SEQ ID NO: 54827 - protein, 122 aa, Zea Mays
MQRANLIQSSPQNKSKGYFCCLSLLVHLNLFQIITLEKGATMKNEGSHAILKKGGLLKQRVGHDLMRKGALRLDMFLLRIHTGHHAMLQFLLTLSMAILWLVITTDIINQHLHLSLGSFLLF

SEQ ID NO: 54828 - protein, 361 aa, Zea Mays
MSFTIAAFDLHRSCKRDKQPLPWEMRLRVAYFIAQALDHCNAENRKIYHDLNAYRVLFDEEGDPRLSSFGLMKNSRDGKSYSTNLAYTPPEFLRTGRVIPESVIYSYGTVLLDLLSGKHIPPSHALDLIRGKNILLLMDSSLEGQYANEDASKLVDLASKCLQFESRDRPNIKYLLSSVGPLQNQKEVASHVFMGITKATSVLPTICSPLRKACTGMDLSAVHDILLKTGYKDDEGAENELSFQEWTQQVQEMLNTKKFGDIAFRDKDFKTAIDYYSKLVAMMSTPSATVFVRRSFSYLMNGQAELALRDAMQAQVCMPEWPTAFYLQALALSKLGMETDAQDMLNDGATFEAKKQNGWRS

SEQ ID NO: 54829 - protein, 97 aa, Zea Mays
MRTINSVTIALACLIWSNVPSSSMFLWLGSASLSRMANLAPVTRDICFVLVPPFPMMAPARDASTLILAVAEAPNVEGGTMSGKGIGGGGGGGQNPS

SEQ ID NO: 54830 - protein, 342 aa, Zea Mays
MNSHAAGTSNGGPGDAAAARRNTRMPKYSKFTQQELPACKPILTPKWVVSVFFIVGVIFVPIGVVSLLAARDVVEIIDRYDEACVPGNMTENKLAYIQNETLSKECIRNLTVTKDMKQPIFVYYELGNFYQNHRRYVKSRNDAQLRDASKANQTSACEPEKTTANGQPIVPCGLIAWSLFNDTYNFTRGNENLTVDKKDISWKSDREHKFGKDVYPSNFQNGALKGGATLDPKIPLSEQEDLIVWMRTAALPTFRKLYGRIYIDLKENDTITVTLNNNYNTYSFGGKKKLVLSTATWLGGKNDFLGFAYLIVGGLCIFLAFAFTLLYFVKPSRTVNVMLAVK

SEQ ID NO: 54831 - protein, 219 aa, Zea Mays
METEIDQKRTSRPTSSQSSRTESAQPSRPGSPGSQISATGSEAAPTARPKVNPFGEAKPREVILQEKGKDWRKIDQELEHRQIDRPKTNEENVLKEEINLLKVELDESEGKISDEDAKAMSEKITQMEEQLELLRTAMDDKIRFLQRPGSGAGRVIASPPTNFVDEPQIKESMERPRAHSSTEQYTKPTEERWGFQGSRDRGSFGGNRISERSSAGQRW

SEQ ID NO: 54832 - protein, 398 aa, Zea Mays
MKCLMRVLGIANIAGQIVHEITARLVGILMEVCNNPKNPDFNHYLFEALAAVIGRTGEQDPALLPAFEASLFPVLQRILVEDISEFWPYAFQIFAQLVNLSRPPLSQNYMQLFGVLLSNATWDRPPCVPALVRLLRAFLRKIPNELNQEGRLPNILAISRSLLSRSSTEDSAFYMLNTIVENVGFDILNPYITEIWSALFTRLQTRQAVKYVNSLVVFMSLVLVKYGSSVLVSSVDSIQPNLFTQILQRFWIPNLKLIKGALEVKLTAVASTKLLCESAVLLDAAAAQLWGKLLDSIVTLLSRTNQDGTQEQNDGTDAVDIQKTSSYSVSFVRLQYAGKSEDDLLKEVNDPKQFVVTSLATLSAQFPGRFGLVIEQHVDPANKSVLLQLCAAYSANIV

SEQ ID NO: 54833 - protein, 374 aa, Zea Mays
MLNGNIISNANAGDFFNNSSPSDGFLELKDFADAADLDFPLGNGSTIWPSDGWAWKTPDSAEAVNGANDEIPPLPDDQIFQPDELEQLLQSIQEDSHLGSTIIDPMHSSMTNSVLPEDDYLMFYDAPFDSTMCDGYGQNGILGSAAANLSGIGMMEDGMAYFDAMDDNSFNDTLGSIQQSAGSSSHAFNGPVLTQEVNNTMCTYSPTQKVLEPNFLVGAPSSARLPEAGSQLNCVVLPDGQAKSSTIGKGFVKILDSISAPPAFAGEFPAIHRKSLAHISGGRPNTLHVSAEVIRVGSLAVPSGADKWALHKDQDMELVFSADFEPDTRLHCAAIAITAMLRGEFRPFLSFGNNAQSEVWGGECNLRYVQGRLG

SEQ ID NO: 54834 - protein, 137 aa, Zea Mays
MVEKSLDIHGDEILYVGDHIYTDVSQSKVHLRWRTALICRELEDEFNALVKSHDQKEKLVTLIQQKEIVGDLFNQLRLALQRRSNSRPAQTLAATCMDDQELTESMQKLLIVMQRLDEKIGPMLEADGELFNKRKVS

SEQ ID NO: 54835 - protein, 299 aa, Zea Mays
MFPDASEVQELVRTKGLFSFYEDGHQECCRVRKVRPLRRALRGLRAWITGQRKDQSPGTRASIPLVQVDPSFEGLDGGAGSLVKWNPVANVDGKDIWTFLRTMDVPVNALHAQGYVSIGCEPCTRPVLPGQHEREGRWWWEDAKAKECGLHKGNIDKDGQAAAAAAAPRTANGNGSAGAPDIFESPAVVSLTRAGVENLLRLESRAEPWLVVLYAPWCPFCQAMEASYVELAERLAGSGGVKVARFRADGEQKPFAQAELQLQSFPTVLLFPSRTARPIKYPSEKRDVDSLLAFVNSLR

SEQ ID NO: 54836 - protein, 466 aa, Zea Mays
MEEERDHEVVRDVFGDSDEDEPAPYRSRHEIDEESHRSPMEDEDQYEKDMQPDDTVADEDMRYESDENRELKPKEKPVGPPLDLVVPFKQPPARPDKMNVIKVSNIMGIDPKPFDPKTYVEEDVFVTDESGTKKRIRLEDNIVRWRTIRNADGTTSCESNARFVKWKDGSMQLLIGNEVLDISVHEAHHDQSHLFLRHGKGILQSQGRLLHKMQFMPSSLFSKSHRLLTALVDSQNKKTVKMQKWFETKDPEKAKMEKERIQGQNIRAHSILQRKREKVNRKYTQPARPRRQLSPGFLEDALDEDEEPDYGSRRMPGRRRFEDELEAEALAERRIINAKKSNMSRNVPRKPPYPPARLPRRQADEYSESEREESEYETDGEDIEHSPPRGREDELDEEEEYEEEVEEEAPLSDEEMEAPKRKRESGGGGGHMREELASEDDESPPRKQPTVQHRRKAVVFDDSDED

SEQ ID NO: 54837 - protein, 251 aa, Zea Mays
MKVETVDDYDEYCHYVAGLVGYGLSRLFYAAGTEDLAPDSLSNSMGLFLQKTNIIRDYLEDINEIPKSRMFWPREIWSKYADKLEDFKYEENTEKAVQCLNDIVTNALIHAEECLQYMSALKNHAIFHFCAIPQIMAIGTCALCYNNVHVFRGVVKMRRGLTARIIDETNSMSDVYTAFYEFSSLIESKIDDNDPNAALTRRHVNSIKQTCKSSGLVKRRGYHLDTSPYRPMLIMIVLLLVAILFGALYTK

SEQ ID NO: 54838 - protein, 739 aa, Zea Mays
MGEEFHLQEKKHWKPCPSEYHANNPEMSKLLHKAIREKRDNAYTVYQQHLASRPVNVLRDLLELKSDRAPIPIGKVESATSIVERFCTGGMSLGAISRETHEAIAIAMNRIGGKSNSGEGGEDPIRWNPLTDVVDGYSPTLPHLKGLQNGDTATSAIKQVASGRFGVTPTFLVNADQIEIKIAQGAKPGEGGQLPGKKVSAYIARLRNSKPGVPLISPPPHHDIYSIEDLAQLIYDLHQINPKAKVSVKLVSEAGIGTVASGVSKANADIIQISGHDGGTGASPISSIKHAGGPWELGLTETNQTLIQNGLRERVVLRVDGGFRSGQDVLIAAAMGADEYGFGSVAMIATGCVMARICHTNNCPVGVASQREELRARFPGVPGDLVNYFLFVAEEVRAALAQLGYEKLDDIIGRTDLLKPKHISLVKTQHIDLGYLLSNAGLPEWSSSQIRSQDVHTNGPVLDETILADPEIADAIENEKEVSKAFQIYNVDRAVCGRVAGVIAKKYGDTGFAGQLNITFNGSAGQSFGCFLTPGMNIRLVGEANDYVGKGMAGGELVVVPVDKTGFVPEDATIVGNTCLYGATGGQVFVRGKAGERFAVRNSLCQAVVEGTGDHCCEYMTGGCVVVLGKAGRNVAAGMTGGLAYILDEDDTLVPKVNKEIVKMQRVNAPAGQMQLKGLIEAYVDKTGSEKGIAILREWEAYLPLFWQLVPPSEEDSPEACAEFERVLAKQATTQLSAK

SEQ ID NO: 54839 - protein, 275 aa, Zea Mays
MYIAKCGTDGNFSEGEMVPFGPIALSPSSGVLNYGQGLFEGLKAYKKTDGSILLFRPEENAERMRTGAERMCMPAPSVEQFIDAVKQTVLANKRWEGLAPINLIVEDKFHRATPGGTGGVKTIGNYASVLMAQKIAKEKGYSDVLYLDAVHKKYLEEVSSCNVFVVKDNVISTPAIKGTILPGITRKSIIDVALSKGFQVEERLVSVDELLDADEVFCTGTAVVVSPVGSITYQGKRVEYGHQGVGVVSQQLYTSLTSLQMGQTEDWMGWTVQLN

SEQ ID NO: 54840 - protein, 89 aa, Zea Mays
MYTARKKIQKEKGLEPSEFEDSVAQELKSDLKDLYINNAIQMDVTGSRKAVVIHVPYRLRKAFRKIHVRLVRELEKKFSGKVYMLIVAT

SEQ ID NO: 54841 - protein, 1299 aa, Zea Mays
MASSAAPPASPSSRSHGNAAGAGSSATAMMLPGPPGRGNGGCIDLSPAGLLAHGAGSSVVVSDPRSMQLLCVLPMPSSSLASFVTAVRWAPPDTPSLDDDDDDRRPLRLAAGDRHGRIAVWDARARAVLHWLNLDEARGVAPGSGGGVQDLCWVHHGSGWHLASIHGPSLLCIWETSNSPRVLWMFDAAPEYLSCLRRDPFDARHLCAIGLRGFLLSAIPRQDSDISLQEHRVNCGAGDVADLQRLEKEISAPVPAPALAAFPLFSSRICFSPLWRQILFVTFPRELIVFDLSYSTALSVTPLPRGFGKFSDVMADPDIDMLYCTHLDGKLSIWRRKEGEQVHLLCAVEELMPSIGTVVPSPAVLAATIWQSESIFRSIEKQCQDLAQPHSFMIDTNSDQNACQGTMTYLTSISEDGKIWSWLLKFDKSALPSKANLGRPSHNNAATANTCSNRPDFIIKINLVGQLHLLSSTVTTLAVPSPSLLATVARGGNNPAPAVPLVALGTQNGTIEVVDVVANAVSASFSVHSSTVRGLRWLGNSRLVSFTYNQVNDKTGGYNNKLVITCLRSGLNRSFRVLQKPERAPIRALRASSSGRYLLILFRDAPVEVWAMTKNPMMLRSLALPFTVLEWTLPAAPRPGQNASSKQSSTSKERSAEASGAESSDETCESFAFALVNGALGVFEVHGRRIRDFRPKWPSSSFASSDGLVTAMAYRLPHVVMGDRSGNIRWWDVTSGLSSSFSTHREGIRRIKFSPVVHGDRSRGRIAVLFYDNTFSIFDLDSPDPLANALLQPQSPGTLVLELDWLSTRTRKDEPLMLCIAGADSSFRLIEVNIDAKGSSISKPVATKERFRPMPFCLPVLFPTAHALALRMILQLGVKPSWFECNSSDKLTGDSFKVAPTFGDLRSYMIETTLPPIGDAVVAELLLKVLEPYRKEGCILDDGRASLYSAIVNKGACARFAFAAAIFGDFQEALFWLQLPQALRHFLGKSTSRSREKISQSSLHPDSEQSSRFNRIASRERSASEKFTKNAANYGQLSSMAFNQEQLWFNASERIPWHDKLDGEDALQKHVHELVSLGNLEAAVSLLLSTPPEGSNFYPNALRAVVLSSAVSQSLHELAVKVVAANMVRTDKSLSGTHLLCAVGRYQEACSQLQDAGCWNDAATLAASHLHGSDYARVLQRWADYVLRGEHNMWRALILYVAAGALPEALDTLRKSQRPDTAAMFLLACHETYSQALSESEPEDDTSVLALTPTPEQTEKLRFPSKNVADEDLIAVSEVFGQYQQKLVHLCMDAEPTSD

SEQ ID NO: 54842 - protein, 384 aa, Zea Mays
MELKAQITALIDKSKELSKAEEESGETGPMVNEEDIQHIVSSWTGIPVEKVSSDESDKLLKMEETLHKRVIGQDEAVVAISRSIRRARVGLKNPNRPIASFIFAGPTGVGKSELAKALAAYYFGSEEAMIRLDMSEFMERHTVSKLIGSPPGYVGYTEGGQLTEAVRRRPYTVVLFDEIEKAHPDVFNMMLQILEDGRLTDSKGRTVDFKNTLLIMTSNVGSSVIEKGGRKIGFDLDSDEKDSSYSRIKSLVIEEMKQYFRPEFLNRLDEMIVFRQLTKLEVKEIADIMLQEVFDRLKAKDINLQVTEKFKERVVDEGYNPSYGARPLRRAIMRLLEDSLAEKMLAGEVKEGDSAIVDVDSEGKVVVLNGQGGIPELSTPAITV

SEQ ID NO: 54843 - protein, 197 aa, Zea Mays
MNPNKFRACEFLIRFHEQQRGDKIIVFADNLFALTTYAMKLRKPMIFGATSHAERTRILYQFKNSPEVNTIFLSKVGDNSIDIPEANVIIQISSHAGSRRQEAQRLGRILRAKGKHQDRMAGGKEEYNAFFYSLVSTDTQEMYYSTKRQQFLIDQGYSFKVITSLPPAEEGPNLSYYTLDEQLELLSMVGHFCTHWS

SEQ ID NO: 54844 - protein, 476 aa, Zea Mays
MSSEPPPAPSAAAAEGLAADLSAATLSKKQQKKDARKAEKAEKAAQRQQQQQPADAEDPFAANYGDVPVEEIQSKAISGRLWSQIGDLDDSSAGRSVLIRGSLQAIRPVSKKMAFVVLRQSMSTVQCVLVASADAGVSTQMVRFATALSKESIVDVEGVVSLPKEPLKATTQQVEIQVRKIYCINRAIPTLPINLEDAARSEADFEKAELAGEKLVRVGQDTRLNYRAIDLRTPSNQAIFRIQCQVENKFREFLLSKDFVGIHTPKLISGSSEGGAAVFKLLYNGQPACLAQSPQLHKQMALCGGFERVFEVGPVFRAENSNTHRHLCEFVGLDAEMEIKEHYFEVCDIIDGLFVSIFKHLTENCNKELETINRQYPFEPLKYLDKTLKLTYEEGVQMLKEAGTEIEPMGDLNTEAEKKLGRLVREKYDTDFFIMYRYPLAVRPFYTMPCYDNPAYSNSFDVFIRGRICSFITVTG

SEQ ID NO: 54845 - protein, 268 aa, Zea Mays
MADKAASPEKKSWADVEEEEEAKAKATAAAEAAAAAAAASSSSSITEPAVEEQAKQIEALSLAPSVDDAAGEEGPPLLDDSDDSQIQAVISGGTVYESATTFEDLKLSPELLKGLHDEMGFSRPSKIQAITLPMILTPPYKDLVAQAHNGSGKTTCFVLGMLSRVDPQRKIPQAICICPTRELAQQNKAVLMRMGKFTGITCACAIPPAQKDYMPISKMAPITDQIVIGTSDHMLAEDGFRSDSERMMRDIQRSAGGCQGEGFCYKGH

SEQ ID NO: 54846 - protein, 53 aa, Zea Mays
MTLEGLCHAKSSASRLVGFRLRNLSQNSGRPCRRSSSHWSVLCSERAWGRRQR

SEQ ID NO: 54847 - protein, 653 aa, Zea Mays
MASGSRGTGTCAAAQADKGHTLEISVVSNEARAMHNVGLAGLTFWSPNINIFRDPRWGRGQETPGEDPLLTSKYAVGYVTGLQGAVSGAGALKVAACCKHYTAYDVDNWKGVERYTFDAVVSQQDLDDTFQPPFKSCVVDGNVASVMCSYNQVNGKPTCADKDLLSGVIRGDWKLNGYISSDCDSVDVLYNNQHYTKTPEDAAAISIKAGLDLNCGTFLAQHTVAAVQAGKLSESDVDRAVTNNLVTLMRLGFFDGDPRELPFGNLGPSDVCTPSNQELAREAARQGIVLLKNTGKLPLSATSIKSMAVIGPNANASFTMIGNYEGTPCKYTTPLQGLGANVATVYQPGCTNVGCSGNSLQLDAATKAAASADVTVLVVGADQSIERESLDRTSLLLPGQQPQLVSAVANASSGPCILVVMSGGPFDISFAKSSDKIAAILWVGYPGEAGGAAIADVLFGYHNPSGRLPVTWYPESFTKVPMTDMRMRPDPSTGYPGRTYRFYTGDTVYAFGDGLSYTSFAHHLVSAPKQLALQLAEGHACLTEQCPSVEAEGAHCEGLAFDVHLRVRNAGERSGGHTVFLFSSPPAVHNAPAKHLLGFEKVSLEPGQAGVVAFKVDVCKDLSVVDELGNRKVALGSHTLHVGDLKHTLNLGV

SEQ ID NO: 54848 - protein, 362 aa, Zea Mays
MVGTSTELFDFIAAELEKFVRTEGEDFHLPDSKQRELGFTFSFPVHQTSISSGTLIKWTKGFCINGTVGEDVVAELSRAMERQGLDMKVAALVNDTVGTLAGGRYADNDVVAAVILGTGTNAAYVEHANVIPKWTGLLPRSGNMVINMEWGNFRSDKLPRSEYDKSLDFESLNPGEQIYEKMISGMYLGEIVRRILLKLAHDASLFGDVVPPKLEQLFILRTPDMSAMHHDTSHDLKHLGAKLKDILGVPDTSLEARYITLHVCDLVAERGARLAAAGIYGILKKLGKDKLLGDFSQQRTVVAIDGGLYEHYKKFSACLEATLTDLLGEEVASSVVVKLANDGSGIGAALLAASHSQYAEAA

SEQ ID NO: 54849 - protein, 204 aa, Zea Mays
MMMQNLSNKGFRAFSFTIPSVRELLQIFEIAAPVFVTMTSKVAFYALLTYSATSMGAITLAAHQVMINVLCMCTVWGEPLSQTAQSFMPELVYGANRNLTKARMLLKSLVIIGAITGLTLGVVGTLVPWLFPSVFTNDQRVIQQMHRVLAPYFSVLLVTPSIHSLEGTLLAGRDLRYLSQSMGVCFSIGTLLLMFYCLRPSLFE

SEQ ID NO: 54850 - protein, 385 aa, Zea Mays
MYKSTTLTEPVIIEFPELAGHSRRDYWLAIISEVLYAHRFVRKFDISGIDKEETILKAVLGIMRLQAIEELHFEVPNRYESLLLFSQCDKLPGGDVILETLASSIASRTSDRTNQPGTSRGMHAVLSNLGMVSPVNSGERLFVGEIVVGEISALQKAVTDSMNNYKKVELAQASVDGVKVDGLDTNLAVMKELLSPVSELWRVLLLLTSWDEPMKSMLFCFLFSYIIIRGWVIYFIVTVLLFSATFMFLTRLTNQGKQMSEVKVVSPPPLNTMEQLLAVQNAISKIEELVQDANIVLLKIRALLLAFPSQATDRAILALVLMALSLAIVPTKVLLLLVFLEVSTNNSPLRRASTERCTRRLREWWFSIPAAPVVVEKEKEDKKTR

SEQ ID NO: 54851 - protein, 321 aa, Zea Mays
MAASPVAIGTAVFQRGPLRVEARHVDYSQVPSVPKPLMVVAPTDAGVYPVAVFLHGCNTVNSWYESLLSHVASHGFIAVAPQDIDATRQVTAWLADKQQGLAHVLANILQLHGVRPDLSRLALAGHSRGGDTAFAVALGLGPAASDDDDNNADAGTSPAALPLKFSALIGVDPVAGLSKQAQVEPKVLTFRPRSLDPGMPALVVGTGLGPKHVGGPPCAPAGVNHAEFYDECAPPRYHVVLRDYGHMDMLDDDGVPYVINNCMCMRNTKDTKDLARRAIGGAVVAFLRATLEDDDEDLKVVLENRPGLSPAVLDPVGHDLA

SEQ ID NO: 54852 - protein, 724 aa, Zea Mays
MELAGDVLHGGTPDLAMDTPDPGMGSPELASGDPQRRPGRHERSNPWGSQPRREERRAPPPSLHRRELPGRVLERRRGGVSDAGPVLDMMAVMLENIASTPVVARSTAAAVYRTAQIIASVPNLQYQNKVFPEALFHQLLLTMIHPDHEARVAAHRIFAIVLVPSSVSPSIQASPSSRPKKHDMQRTLSRAVSVFSSSAAIFDKMKKDKNSENSQGESKDNSMHSVGEGTGQSKSQNLHVSQSRRSMKAPNFSMKRGPSMAMRAPSVAIRAPSISLRGPSMSLRASSMSVKEDQSSSNKSDEETESVLVKLSARQITLLLSSIWAQSTSPENTPVNYEAIAHTYSLLLLFSGSKASTFEALTQSFQVAFSLRSYSLTEADSLQPSRRRSLFTLSTAMIIFSSRAYNVLPLIPICKQMINDRAADPFLHLVDESRLTAVKDSSNDPSKIYGSPEDNNNALKSLSEIELSESQSRECIVSTIMNNIANMLDAELHNVRSQLLSDFTPDDMCPTSTQFFEVHADNPSSGSYETGHHQEGLLIDLGNDHDAFGEASESAEASASSIPASDLLSIDQLLETVGAEPAPQAGVVSADIGFKDMTSHCEALTIGKQQKMSAFMSFQQSVQAAGLPSSQPNQMELDLSQDPQLPQTGAHSTNPFTDDSLQGYPQYTKGPNGDNAQPGQDFQQQSLKLPAASPYDNFLRAAGYSHELSIPQEIKEEVCPCMRS

SEQ ID NO: 54853 - protein, 394 aa, Zea Mays
MPIVLENVRSVLKHGGRVLFRDYAFGDLAQERLMSKGQQISENFYVRGDGTRAYYFSNEYLVDLFSKCGLTLEEICVHNKQVENRSLELVMNRNWIQATFTLNSASPQGPNGQHDLLAYEGEDDKVVTDTSKKKSSGEEIDLSEDFCNMFGTSHSLDEVQIIGVKAKGHDFKIRMLRKEYQHTCRSTGLMLWESAQFMCCLLAENPSIVASKRVLELGCGSAGICSMVAASFTPFVLATDGDEESLDLLRQNISSNMEPNLLSRIMVRKLFWGNEDDMKAVRELHGNGVGFDCIIGTDVTYNPDAILPLFKTARGVISEKANEDSVPALILCYIQRRVDEDSILSNATSQGFRLVDKWINGVHESNGTISSWFSGNDVCSAFRHTVLSVLYFEL

SEQ ID NO: 54854 - protein, 82 aa, Zea Mays
MNWSTPLWSVSATPNLRRKLHGRTPHKGHYGALSALVMSSHLQMFLTCAAISPSASQIYPCRSINVGRRVQLVAVAQWLSMH

SEQ ID NO: 54855 - protein, 236 aa, Zea Mays
MFLAHNHMPYQLSLSFQVHVPPVCMLDGVHSQHFFGTGVIIYHSEHLGLVAVDRNTVAVSISDIMLSFAAYPIEIPGEVVFLHPVHNFVLVAYDPSALGAGASVVRAAKLLSEPALRRGDSVYLVGLSRSLQATSRKSIITNPCTAVNIGSADCPRYRAINMEVIELDTDFGSTFSGILTDEQGRVQALWASFSTQLKYGCSSSEDHQFVRGQCHLSDFWRWNFIQLCYPRQEVTD

SEQ ID NO: 54856 - protein, 461 aa, Zea Mays
MEIARILADEGKKRVIIVDTSNEIGGDGDVPHSGIGRARRMQVPKVTMQHNVMIEAVENHMPEVIVIDEIGTELEAMAATTIAQRGVQLVGTAHGVTIESIIKNPCLQMLVGGIESVTLGDEEAKKRKVQKTILERKGPPTFLCAVEMISKTECRVHHRLDATVDAILAGKPPKFEARKMHNKSTEFEMPLVIPDREYEIESLPLYQEVMVTRSLSSDDNFGDNFVYTRKAKGNKPVHGKSLVQVYTYQISEADILQVATMMGFDDELDVTDDIGAADVILASSSEMKQNPWIHNVAKYHKLPIFVVKTNTMAQIVKAIRMIVGRDNTSSSKQPEVMEGEIEIEDDAPKRKPSLEEIDALEEARLAIEYIVIPGGEPVELLPRCSEIVARQLELVESYQLLAETFGSDSNSRLQILPMKITKRGSSKDNGASKPTKQTGSDLIVSENGGGSSFSRLPFLPK

SEQ ID NO: 54857 - protein, 233 aa, Zea Mays
MRIRPWYLDQHAQYYRQTILLSSYLTPEINALFNGLCLNYEGKIKMVTEYAGVLPKIQLEVRQVYERFDASSIAEADGARFDYFCNKVYPKIQDLDEGGLLLFVSSYFEYIRISNFLKSKEASFCRIGEATSQQDISRARLWFFEGKKKILLYSERSHFYHRYKIRGTKHLLVYSLPGRKEFYPELVNMLGESENRKCNVLFSRLDLLKLERIVGKSSARRLISSEKGMFVFC

SEQ ID NO: 54858 - protein, 1176 aa, Zea Mays
MISCTVSFNLTPDSRLLGELHIALLKSIIKDIEDVARTPSVALGVNQSSSANPGGGHPQIVEGAYAWGINILNWQHHLNFLTWPEILRQFGLCAGFGPQLKKSNAEIVHHRDNNEVHNGVDVISILRNGSAAVKAAALMKERGYTNRRSRHRLTPGTVKFAAFYVLSLEGSRGLTILEVAEKIQKSGLRDLTTSKTPEASVSAALSRDTKLFERTAPSTYCVKTPYRKDPDDSEAVLSAAREKIRVFQNTLSECEEVEKDVDEAERDEDSECDDATDDADGDDVNIEGKDAKSPLVGAQYDTQITVVGDVKKESNSVMNISVPPSIQIKSSASVPLHTLDSKASSSTDPQVGDDDKDTEIDESNQGESWVQGLAEGDYCDLSVDERLNAFVALIGVATEGNSIRAILETLQERLEAASALKKQMWAEAQLDKRRSRDDFTSKVQYDSCVGIKVDTDQKNNAAESTLVPVDNPIRNNNGNSSLTNNDLLVDKQNQLITGDVFQQWNGVSQELSHKAEQLYVYRSLPLGQDRRRNRYWQFSASSSSYDPGSGRVFFESRDGYWRVIDSSEAFEALVSSLDTRGIRESHLHSMLQSIEPTFREAVERKKCVSLEHTTGWTDNGSNESPNCNNEFGSPCSTLSGVASDNLMAYSDTFKIEIGHNEAEKSSISKRASVFLKWMWRECYCHQSTYTMKYGKKRCPELIQSCDHCYQIYLAEEQHCSSCHKSFKPIHNFLEHLSQCEDNQRTNPSWKTQIVGLSVPVGLRLLRLLLATIEASVPAEALLPFWTDLYRKSWGVKLYSASSAEEVLQMLSVLESAIKRDYLSSNFETTTELLNSNTQDATQNSVGGSGSATILPWVPDTTAAVALRLLDLDTSISYKLHSKLVSNKEQEAGDFMKLPLRYPSINKNKQEIEQFIPIGFDQQDGTLLTNSNGRRGRGRGGRGGRGSRGGSRGGSSRGGGGRVPRGIGSSSRIQFRDDNSVPYGRAPRKNVRGGRTRGRGRGRGLRTVRPRQPSEFSATSIPKLNLLGSFSMLSKANHTGNMHSPESLGAEEWVLERREYVKDDDDNLVSRYDESEEENGEPMNEEYDEQISGYPRDNSEFSPIQMMGDVSHDEDAEGDEGEEDGEDYETEDPAGDEDDDVEMDWDDDIRDNDDGNGAANADEDEGGTSSYSSEYSE

SEQ ID NO: 54859 - protein, 3756 aa, Zea Mays
MASSQHVEMEAAKLLHKLIQESKDEPAKLATKLYVICQHMKLSGKEQSLPYQVISRAMETVVNQHGIDMDALRSSRIPFAGGPQAGDSSGVMSKDKEVIGNQSPMVGSDASQSSGQAGLWQLPSGSTDMIRHGASISGRVPTGPNRGDFSAADIHQGSMSQKSGRSSGIESPASLQMEDTRSMNSHDSLKSDEKTSKKTSSKRKRMDSKGAGDLRSEDNSKSDVISTGQNTRKGKQVGKAGRQGQPSMGIEHEQQPHKLQGGTGQVPPIHGGAPFLRTRSEGPSGRTMDKTKPSNPFSMGQIPNFPEGLASTGAPIELQKSIQGGASLFNPGFGWNQNPQVQTLKNSQGSIHNLVRSGVTVEGKVNVGAQGAFNSASAPQMEFPTVPPYNPSSFGASSQFLDKGKELVSSIISTEPHSSKVASQPGISHGSPMQERQGMIRVPQRGEASFQERRPSSLPSRSTGPSPMSHISSNTPFKEQQLKQLRAQCLVFLAFRNNLQPRKVHLEIALGRGPPAESDSAGQRGSEGRVSDALGKENGSSRENSGVFCRQTDISRLPATSAGSIAEDDSLSKDPENATKKIKLAEQEKSLMEVENVQQASVMQGTSSEMRSQETASQNPYRPQQSYYQGDTRRIASDIHRTDAEILNQNLSWGGQGSTALGGTRQLLNQETKESLAPSKSHHMPVDGYNSNIQGIDRTPEIAGAGNDVENCSHVADIVPEQAADEGDEDLSEHEDLLSSPKHTMTEKWILDYQKRIYNEKQKRTLEQHKVHSRMSATYEELKESVNSSEDLSAKTKSVIELKKLQLLPLQRRVRSEFLLDFFKPNTSDLERIKSLKKHRHGRRVKQLEKIEQKMKEERQKRIRERQKEFFADIEAYREKLEDNFKVKRERLKGFNRYIKEFHKRKERIHREKLDRIQREKINLLKNNDVEGYLRMVKDAKSDRVKQLLRETEKYLQKLGNKLQSAKSTDGRSSFVTDKSDTANDIEDESYQPQHYLESNEKYYQLAHSVKETVNDQPSYLQGGKLREYQMNGLRWLVSLYNNNLNGILADEMGLGKTVQVISLICYLMETKNDRGPFLVVVPSSVLPGWESELSFWAPSINKIAYAGPPEERRRMFKEMIVHQKFNVLLTTYEYLMNKHDRPKLSKIQWHYIIIDEGHRIKNASCKLNADLKLYRSSHRILLTGTPLQVENELPEKIERLVRCEASAYQKLLMTRVEENLGGIGAVKVRSVHNSVMELRNICNHPYLSQLHVEEIEGYLPKHYLPSILRLCGKLEMLDRLLPKLKATGHRVLLFSTMTRLLDVMEDYLVWKKYKYLRLDGHTSGHERGALIDKFNDPNSQAFIFLLSIRAGGVGVNLQAADTVIIFDTDWNPQVDLQAQARAHRIGQKKEVLVLRLETVRTVEEQVRASAEHKLGVANQSITAGFFDNNTSAEDRREYLESLLRESKKEEAAPVLDDDALNDILARSEAEIDIFESIDKQRREEEMAAWQKVVQDGSTSGLDPGVLPSRLVTDDDLKPFCHAMKLYEPSNVKTVNVNVRKKGELGGLDTQHYGRGKRAREVRSYEDQWTEEEFEKLCQADSPESSQPGGMSKDLDILNKGIKTEILVESSKEPEQTKMEASPTVGDSPPAKRRRGRPKRSDVFVSPTAGLTDAVKQDTGTTQDGSSATPASTIHSDAPATAINSAVSDVNIHSIPPADTKKQEFSTDTKVSSSVSVLEGSVPNEIGTPLQSVHNVAVSAPPHQSARGRKCQAGETPRRRGRKPKSLSSSGVDDVSLNPTFSTVSGVADTSYVPSYSQVSSQGTAVALAGIQKDFVTVKLDTLLPDSGKGAPPVNEGDKGATVTTPVAKDICAGTVTTSDNTVTLTPNTLKENIGLVQVASAPSMLVASEELMKIAHVAVADKPVEKQTASRRRRKKTSSSEDTGVSTRQRSAMKRSYYNTSVAVDDIGSAVIPNEKSGITKERDVSSIQSTSNELPNINSPLYEKSGYDSQPSTPIAVPINEDTLPSGFDTCTNSMITLATSANSAEDDKPVDLHLNAPVSVDSQNQEQHMTGKDHLAVCSRIFATQLQTDTANPAIDHKPGTAQFEPSASLPQNSGKDATALPSEVDSAAPNRASSRRRKGSTREPRTRSNSASAASERRARLTGLKQAEDIKKLEMSATPTTTVCISSVEQQGAASLSAKITNASVSEGQKNPGNYMPSAISIPVGSHVLGLGATSIEETTATMITQAPAVSKSERRKLPGGSQQGIQFESSASKTKMVSAVEPAPANVECMQGTEVNSSEQTIVSATEPAPANDEHMQEQPTNIVSSVESEPSNDEEHTKHEVFLATTGDNMLASSAGTEILRDTVEHAACQPEAVCTDGTARQSELSQLDRKAFHDASYKYTHGSTKDDGILPSEGTSVDVTGSKQDDVNIVGTQTDDVSRGSSHFPVILQSTESDRPPGQVKNLESRMEQVKTEEALVNSSGGNQTHSLGDEPSHNTSLARNSPSEHSNERCSDQVIGENFKSKENIVEVHSGINTDGPDEALNALHTQSKEASMTDIGVPTDGDRCEGKGTSVEVCADMNTDGPVATQDASSTKSDKESCMMECGVSTDGCPTVCKTHNDLQGHVSCEETFVRTGGDDTTHITNANYGSNNESEATIASPVETTQKLMEGSTVIVSENSDLNKQCHTLHTRNDPPANTLLIVESNKVTCDAEIVCASRLESSGIEAETVGIQESALTDFEGTKGTGDLGDRTNSQLHDDVHGTSCSTIALVSEKEPSEDLTTGSHSEASNLLAAVEQTQETTVENQEIIDAVVFMDACKAEPVGDFTIAKGAEQTVEMVHYVDKQSAVLDYVETQTKRTSVCGSTLNESPQAAGLEEDCSVLKHGDPTSSELLTVAPNPIGETSVIQVEPEARNSDGYCTTEAGSALSETVMGLEPNKETAVPMQENIGEANDNFNNCEAHNNSEIHAFEVSMETQSSEVKEVSSIQSGAANLSTQTTALPDVTGQTSMASTGELVSTNEHIHMQGTEINSEQQTKMVSPAESAPANDEHVQDIVILSSEQQTKMVLAAEIDALCVQETAIIDLGGARGTVDLNDIRTQVPALPGRDVLDVEAHILEQKKTSSPGDEIKGSEQAKIESIAEIETVGVKENVIADHKETGNNSGVSIHAPLLVESGQKASPGVELRGIEVDAHVLEQAKMVSALEPDSTPEVCADKLEPSGADDVGMIVVQEAASVDDHNRAQGGEAHCSEQIKMASIAQAVSSMALVGYSSSEDSMVDAAARVTDADFVDSKAAGVYRQETMPTQTTSTLPENMDSPATAATMVESKFAASSEHVAGPEPIDETSVMQVELATSTGDGCAADGHNLVSSETVVEVKLAQEIVVPSPGGSIEANNTSTISEVYKDTQSRASGEACNDGQSHGDENMKLGEAYTELQLAPSSGEEAMTCMCSELPSQEVEAPSSDPLENNEETKNEAAAQGSVNEDSAPRAENAKIDEADTEQELLPSGEATVDESSELLSQDEKVARKDAKMEESAAAAAAQRQLTTEVAHASENAKLGEDGTELQLPPPSMVDISREQLSQEVEVASSGPSGTDETAEMKRLNTEHSPGDETSKLVGTDLGLQLSPSGDAMVDISNKPPSCQDVKEAPSSDILGNDENSDTEKTPAALHGRLNTELAPSGRNTEFSEADTGKQETPVSAEAMVESSSEPRSHEAKEAPTPDLSGDDEKAKSARAAVVAELFGDATEGGSDQPLPSPREQGKEAEADGGF

SEQ ID NO: 54860 - protein, 392 aa, Zea Mays
MIAEAIDKVGPDGVLSIESSSSFETTVEVEEGMEIDRGYISPQFVTNLEKSIVEFENAKVLITDQKITSIKEILPILEKTTQLRAPLFIIAEDITGEALATLVVNKLRGILNVAAIKAPSFGERRKAVLQDIAIVTGAEFLAKDLGLLVENATEEQLGTARKVTIHQTTTTLIADAASKDEIQARIAQLKKELAETDSVYDTEKLAERIAKLAGGVAVIKVGAATETELEDRQLRIEDAKNATFAAIEEGIVPGGGAAYVHLSTVVPKIKEAIEDPDERLALILFKIRWYELYLPEALVAPASLIAHNAGVEGEVVVEKIKESDWEVGYNAMTDKYENLMEAGVIDPAKVTRCALQNAASVAGMVLTTQAIVVEKPKPKPQVAEPPEGALTV

SEQ ID NO: 54861 - protein, 423 aa, Zea Mays
MGATGTGVKEVDPDDEYDDGIDTQDEMEDAHLHSSDGGRKLGGGSHEGAEKKDEVATERHTEAGGGIAGSHDISSPDKKKVSGTGDKKHGPKKKPKRKKSGSICQMKFLNSTAQLVEPVRNEKFASFKLEYVEVEERPIGSEFWEPRFAGHQSLQEREESYKAHDQQLTCAFVKGPNGTSTGFDISDDDRKYMSKCHIAVSSCIFGNSDRLRTPFGKTITSLSKKTVCFAMFLDEVTLHTLESEGQKMDSMGFIGIWKIILIKNMPYNDMRRVGKIPKFLAHRLFPSSRFSIWLDSKLRLQTDPILILEYFLWRHGYEYAISNHYDRHCVWEEVAQNKKLNKFNHTIIDQQFEFYQADGLTRFNPSDPNKLLPSCMLCYLLVLIYYMSSVDLTIYVFCRCPRRLFYRERTHTNVQLILLPVVQ

SEQ ID NO: 54862 - protein, 167 aa, Zea Mays
MATAPYASSLFLASSPISTAPRIRAGPCPPSAQPSLRLRPRPSPAAAAAVQAEHQPALTAAPKPPALPFRVGHGFDLHRLEPDLPLIIGGINIPHDRGCEAHSDGDVLLHCVVDAILGALGLPDIGQIFPDSDPRWKGADSSVFMREAKTIASILALKCLKSQYATL

SEQ ID NO: 54863 - protein, 820 aa, Zea Mays
MVRGGLSQHDGCTPTGSGLRLHRAREVRDLTQPPIELMDAEAGVAGADQLPRRQYYMNLLLLAYQSFGVVYGDLSTSPLYVYKSTFSGKLNQYQDEETVFGVLSLIFWTFTLIPLLKYVTIVLSADDNGEGGPFALYSLLCRHTKLSLLPNQQAADEELSSYYRNGFAPSNGSSPWLRRFLEKHKKMRVVLLLIVLCGASMVIGDGVLTPAISVLSSMSGLQVRATGLKHSSVVLLSCIVLVGLFALQHRGTQKVAFVFAPIVIIWLLSIGGIGLYNILHWNPNIYQALSPYYMVKFFRKTGKDGWIALGGILLSMTGSEAMFADLGHFTSASVRVAFITVIYPCLILQYMGHAAFLSKNTFHMPTGFYDTIPEPVFWPVFVVATLAAVVGSQAVISATFSIVKQCHALGCFPRVKVVHTSRWIYGQIYIPEINWILMVLCVAVTIAFRDTTLIGNAYGIACMTVMFVTTFLMALIIIFVWQRNIIFALVFLVFFGSIEAVYLSSSLMKVTQGGWVPLVLAFIFMSVMYIWHYGLRRKYQFDLQNKVSMRSILSLGPSLGIVRVPGIGLIYTELVTGVPSIFSHFVTNLPAFHEVLVFLCVKSVPVPYVSPDERYLVGRIGPKEYRMYRCIVRYGYKDVQRDDDNFENMLVMNIAKFIMMEAEDASSSASYDVSNEGRMAVITTTDASGSPLAMRDFDGLADSMTMRSSKSETLRSLQSSYEQESPSVSRRRRVRFEVPEEDGMGRQVKEELMALVEAKHAGVAYIMGHSYIKARRSSSFLKKFAIDVGYSFLRKNCRGPSVTLHIPHISLIEVGMIYYV

SEQ ID NO: 54864 - protein, 652 aa, Zea Mays
MMDVKLRSSESMSNLTKLRRNASTSSDMSSMASQGPSTSTAPLRRSSSWTFDEKILVQALYKVLLSVSKKYPVVLYIRDVEKFLHKSPKMYLLFEKLLNKLEGPVLILGSRIVDMNSDEESDDRLTVLFPYNIEIKPPENENHLVSWNSQLEEDMKMIQFQDNRNHIMEVLAENDLECDDLGSICLSDTMCLSKYIEEIVVSAVSYHLMNNKDPEYRNGKLVLSTKSLSHALEIFQGNKISDKDSMKLEATDDALKAAEKATAPTTAKSETKSATSLPPARAPAAAAAAPASAPAPRIESKTELEKKDNPPPVAKAPEVTPDNEFEKRIRPEVIPANEIGVSFDDIGALDDIKESLQELVMLPLRRPDLFKGGLLKPCRGILLFGPPGTGKTMLAKAIANEAQASFINVSMSTITSKWFGEDEKNVRALFTLAAKVSPTIIFVDEVDSMLGQRNRAGEHEAMRKIKNEFMTHWDGLLSRPDQRILVLAATNRPFDLDEAIIRRFERRIMVGLPSMGSRELIMRRLLSKEKVDEGLDFKELATMTEGYSGSDLKNLCTTAAYRPVRELIQKERKKELEKLKCEKGETPSDPPKKEKEETIILRPLNMTDLKEAKNQVAASFAAEGAIMSELRQWNELYGEGGSRKKQQLTYFL

SEQ ID NO: 54865 - protein, 63 aa, Zea Mays
MDGVSNRTFFPKVHGYMTDENGHEPHHSLQVKIDKTNFIDLVIETKATKDFISIQTLENQMNK

SEQ ID NO: 54866 - protein, 592 aa, Zea Mays
MKPRRTQTDLKFVSSSPHEAFRWVNSFADQQCYVNLLPHPMASSKKHSSELIQFDAMFDPYVKCRSPPKILVILNPRSGHGRSSKVFHGKVEPIFKLAGFKMEVVKTTHAGHAKSLVSTIDFSTCPDGIVCVGGDGIVNEVLNGLLCRDDQNMSASVPIGIIPAGSDNSLIWTVLGVKDPISAALSIVRGGLTPIDVFSVEWIQSGTMHYGTTVSYFGFVSDVLELSEKYQKHFGPLRYFVAGFLKFLCLPKYSFELEYLPVSDVNGAEHKILVGQEKVDASDLYDDVIRRSRAECLPRASSLSSIDSIMSTGIMSGAELEVCSPRANNEPSEVVRGLDPKSKRLSLGRASTFKEPEEVLHPHSHGTSTPSWRRSKSKSRTEKAKPGLSATHDAKSSKVNADKEDTSSTISDPGPVAVWDSGPKWDDEPKWDNQPNWEPETSIELHSPREDIELGLTKELVPSLDERWTVRKGRYLGVLVCNHSCKTVQSLSSQVVAPKAEYDDNCLDLLLVGGSGRLRLLRFLVLLQFGKHISLPNVEYVKVKSVRLKAGPNTHDGCGIDGELLHVKGQVRCSLLPQQCQLMGRPVKNPVQ

SEQ ID NO: 54867 - protein, 639 aa, Zea Mays
MSVAKRVSEEMETDLGDKVGYAIRFEDVTGPNTIIKYMTDGVLLRETLKDADLDKYRVVVMDEAHERSLNTDVLFGILKKVVARRRDFKLIVTSATLNADKFSKFFGGVPVFHIPGRTFPVNIMFSKTPCEDYVEAAVKQAMTIHITSGLGDILIFMTGQEEIEATCYALAERMEQLISSSTKTIPKLEILPIYSQLPADLQAKIFQKAEEGARKCIVATNIAETSLTVDGIFYVIDTGYGKMKVYNPRMGMDALQVFPVSRAAADQRAGRAGRTGPGTCYRLFTESAYQNEMLPNPVPEIQRTNLGNVVLLLKSLRVENLLDFDFMDPPPQENILNSMYQLWVLGALNNVGGLTEIGWKMVEFPLDPTLAKMLLMGEQLECLDEVLTIVSMLSVPSVFFRPKDRAEESDAAREKFFVPESDHLTLLNVYLQWKSNQYRGDWCNDHFLHVKGLRKAREVRSQLLDILKTLKIPLTSCHMEWDVVRKAICSAYFHNSARLKGIGEYVNCRNGMPCHLHPSSALYGLGYTPDYVVYHELVLTTKEYMQCVTAVDPQWLAEMGPMFFSVKETDTSLLDHKKRQKEEKTAMEEEMEKLRRQQAEAARMEKEKEREKRAKQQQQVAMPGLKKGATYLRPKRMGL

SEQ ID NO: 54868 - protein, 485 aa, Zea Mays
MVPDHPYDANGVWSGSATRLPDGRIVMLYTGSTAESSAQVQNLAEPADASDPLLREWVKSDANPVLVPPPGIGPTDFRDPTTAWRTPGNDTPAWRVAIGSKDRDHAGLALVYRTEDFVRYDPAPALMHAVPGTGMWECVDFYPVAAGSGAAADSGDGLETSAAPGPGVKHVLKASLDDDKHDYYAIGTYDPATDTWTPDSAEDDVGIGLRYDYGKYYASKTFYDPVLRRRVLWGWVGETDSERADILKGWASVQSIPRTVLLDTKTGSNLLQWPVVEVENLRMSGKSFDGVALDRGSVVPLDVGKATQLDIEAVFEVDASDAAAVTEADVTFNCSTSAGAAGRGLLGPFGLLVLADDDLSEQTAVYFYLLKGTDGSLQTFFCQDELRASKANDLVKRVYGSLVPVLDGENLSVRILVDHSIVESFAQGGRTCITSRVYPTRAIYDSARVFLFNNATHAHVKAKSVKIWQLNSAYIRPYPATTTSL

SEQ ID NO: 54869 - protein, 81 aa, Zea Mays
MCIPDLVEPLAAQSDTRKTRLRIVVHEGRNHEVRELVQNAGLQVYALKRVRIGRFRLPADLGIGKFVELKQADIKALDGNN

SEQ ID NO: 54870 - protein, 741 aa, Zea Mays
MSVDEKRELVRDLSKSPESAPDRLQSWTRREIVEILCSDLGRERKYTGLSKQRMLDYLFRLVSGKSSGPVEHVQEKEKGREKGKEREKESIPEPNTTNHHQSPAKRPRKSDNPSRLPIITNNSAASDVTGPTNNSRFCQNVACRAILRDNFCRRCSCCICFSYDDNKDPSLWLSCSSDQHLQKDTCGFSCHLECALKDERTGILQSGQCKKLDGGYYCTRCWKQNDLLGSWKKQLVIAKDARRLDVLCHRIYLSHKILVSTEKYLVLHEIVDTALKKLEAEVGPISGAPNMSRGIVSRLTVGAEVQKLCAQAIDAMESLFSGVSPAGSRIPRPCMVPPNFVKFEAITQTSVMVFLDLVHYPMLAQEATSFNIWHRMAVTEAYLTNPTGIILPPSKKLPVTGLAPATSYIFKIIAFKNSIELGSWEIRTKTSYQKDDPRGSMPGGTRLGHNSESLKANSDGQSDPSSEGVDSNNNTAVYADLNKSPESDFEYCENPEILDSDKASRRLSEHIDDLQNIQMAADRVTEVTELEESPGLSASALDEEPNACVQAVLLREPNPLGHNQRTVVPRSQHASNVLGGNELVIVGPRYAGSVPPIATRGLENSKESGGRGFKPKPCNNIFQNGSSKPEREPGNSSNKRTAGKTEDLGHKDSSSEVSYEYCVRVVRWLECEGYIETNFRVKFLTWFSLRATPQERKIVGVYVDTLIEDPVSLSGQLVDSFSEAVYSKKRTPSGFCMDLWH

SEQ ID NO: 54871 - protein, 447 aa, Zea Mays
MVEAGEKIKFPGGGTHFHHGADKYISNIANMLNFKDNNINNDGMLRTVLDVGCGVASFGGYLLSSNVIAMSLAPNDVHQNQIQFALERGIPAYLGVLGTKRLPYPSRSFELAHCSRCRIDWLQRDGILLLELDRLLRPGGYFAYSSPEAYAQDEEDLRIWKEMSALVERMCWKIAEKRNQTVIWVKPLDNDCYKRRAHGTKPPLCKSGNDPDSVWGVPMEACITPYPEQMHRDGGTGLAPWPARLTAPPPRLADLYITADTFEKDTEMWQQRVENYWSLLGPKVKPDTIRNIMDMKANFGSFAAALKEKDVWVMNVVPHDGPSTLKIIYDRGLIGSNHDWCEAFSTYPRTYDLLHAWAVFSDLDKRGCSAEDLLLEMDRILRPTGFAIVRDKGTVIEFIKKYLHALHWEALTVVDAEPSPESEESEMILIIRKKLWLPKAGPQDSGT

SEQ ID NO: 54872 - protein, 508 aa, Zea Mays
MRSVVRSLRQLRRFIQHYAEGNSQATRLFGLQNALIMCGSTPRSLSMLRRNGEISRFASPGMELMRSMFSNVAAGSIKDIGRGGPMVEYERRIASGDLVDGDSFQVDTIQQLQGLYEELIENGEDCQLDRYKSSEKSGRRWLWSRLITQPSSFAPVKGLYLYGGVGTGKTMLMDLFYEQLPSNWRKKRIHFHDFMLNVHSRLQMHKGVSDPLDVVAAEISDEAIILCLDEFMVTDVADAMILNRLFRQLFSKGIILVSTSNRAPDKLYEGGLQRDLFLPFIDTLKERCIVHPIGSAVDYRQLGSAEQGFYFVGKHYSTLLKQKLQSLIGDEEPSPQTVEVIMGRKLQVSLGANGCAYFPFEDLCDRPLGAADYFGLFKKFHTLALDGVPKFGSSNRTAAYRFVTLIDVMYENKARLLCTAEAGPVELFENIMTLAEAQKVSPRSSRSQKSDDPDLCVDNELGFAKDRTISRLTEINSREYLEDFEMRLGQQQLLPLQALDNGGDVVLA

SEQ ID NO: 54873 - protein, 134 aa, Zea Mays
MELHLVHESSANKAAVIGMLYEIGAEDPFLQALEPSIHRIADRQDREEAIGVVDPRRARGRASVYYRYVGSLTTPPCTEGVIWTVVKRVRTVSRHQLELLREAVHDGMEKNARPVQDVNDRDISIFRPKPHKHY

SEQ ID NO: 54874 - protein, 828 aa, Zea Mays
MAVEKSSSGTSTPSTTSTMDRFQKIVLSWDYLRLIAESKGGKQAKVLQHVKNTYVSVAEYLGVFEPLLFEEVKAQIIQGRSNDEEESGMDWRRGAVGSCTESEGFHKLSVAVEDNFQDNVSENDLLLISKEKFEEGSTPNAYAFALVEQRGGGIHISLRTFVAGEIQNLNVAKPVKSTRLQHFASIIASQNSLLWILKVCSLSTIMREFTAMHSVASLPFKDLILSATEAHKDGDDQSRAWNVPEPLMDYLKVNLNDSQLEAVNAGLSRRSFVLIQGPPGTGKTQTILGLLSAVLHSAPARMQIKGGFDVLKHGPELDIDGKRAHWIKASPWLLGANPRDLIMPVDGDDGFYPTGNELKPEIVSSNRKYRAHVLVCAPSNSALDEIVLRVLKTGIRDENNNTYNPKIVRIGVKALHSVKAVSMDYLIQQKLSGVDRTLDGGRRGAGEYDRIRASILDEAAIVFSTLSFSGSSIFSRMTRAFDVVIIDEAAQAVEPATLIPLIHGCRQIFLVGDPVQLPATVISQTAQKLGYGTSLFKRFQAAGFPVQMLKIQYRMHPEISTFPSKEFYEGVLQDGEGLSRKRPWHSYSCFGPFCFFDVDGIESQPSGSGSWVNQDEVEFITLLYHQLALRYPELKSSPEVGVISPYRHQVKLLKDSFRSTFGDQSRELIDVSTVDGFQGREKEIVIFSCVRCNKEQKIGFVSDFRRMNVAITRAKSAVLKGRPGVVVVGSASTLKQDKHWNNLVESAKERNCLFKVPKPLTAFFAEDNLKTMKVERRPPPELNARVLEEINQEVVRQELMNVDDAADHADAGDDDDADMDADDGGGDD

SEQ ID NO: 54875 - protein, 285 aa, Zea Mays
MRGHYFKVEYVKHLPFVAGAMIDSHTTAEYWNSRTSDRLKIQMPQTYVVHLGNSKELMEVAEDNVARRVLREHIRESLGVRSEDLLFAIINSVSRGKGQDLFLQAFYQALQLIQHEKLKVPRIHAVVVGSDVNAQTKFETQLRDFVVKNTIHDRVHFVNKTLAVAPYLAAIDVLVQNSQGRGECFGRITIEAMAFKLPVLGTAAGGTTEIVLDGSTGLLHPAGKEGVAPLAKNIVRLASHAEQRVSMGEKGYGRVKEMFMEHHMAERIAAVLKDVLRKSQEHSRS

SEQ ID NO: 54876 - protein, 60 aa, Zea Mays
MPIVKLPWCALHCDLYGIGKEKFIGFALCMFYGLHSSHLLISFFFCCYVVVCDGSRGSIV

SEQ ID NO: 54877 - protein, 76 aa, Zea Mays
MATSGRTSRASLSLAEHAVYVVLDLKLLDMSVLDLWILNFWRNTNLPRSRTHLSEKKKQYETIRSHCVPYPDQQQL

SEQ ID NO: 54878 - protein, 344 aa, Zea Mays
MGKHIECTPGTPCPPCKEVVLVSCFGQHLGQERTMPCCKWRPFPCENLCGNPLLCGNHYCTKSCHVLEVPLNHPEGDRTTSISKVNALAMPCEQCNLPCQRVREPPCSHPCPLPCHLNDCPSCKVLVKRPCHCGAMVHAFECVFYNNLNAKDQIKIRSCGGPCHRKLPNCPHLCSEVCHPGVCPSVDQCMKKVNTRCACSTLKQEWRCQDVLKEYRKSGRDPKEVPKSQFGVGLLACGEDCKKKLKAPDSELHLRKSQENKIPAVEVVNAPKRRKRRDRGQEVKISKFQEVKTFVLRALLIILLSIIVAAGLYLLWKGIFWLSDWMNEMEEQRASQRYPRGAML

SEQ ID NO: 54879 - protein, 832 aa, Zea Mays
MAAAACAGGCAEAGRGCGGKDALFVELWKACAGPLSCVPPLGEKVYYLPQGHIEQVEASTNQLAEQQGTPLYNLPWKIPCKLMNIELKVEPDTDEVYAQLTLLPDKKQDENTSTTVEEEEVVVPPALPATNEGPHIHSFCKTLTASDTSTHGGFSVLRRHADECLPPLDMSQHPPNQELVAKDLHGAEWRFRHIFRGQPRRHLLQSGWSVFVSAKRLVAGDAFIFLRGENGELRVGVRRALRHQTTIPSSVISSHNMHLGVLATAWHAVNTDSMFTVYYKPRTSPAEFVVSRDRYYESLKRNYSIGMRFKMRFEGEEAAEQRFTGTIVGIGASDPSGWADSKWRSLKVRWDEPSSISRPERVSPWQIEPSVSPCHVNPLPVRFKRSRSSVNALPSDVSTVTREVTSKVMADSQQNSLTRALHNQGRTQLTVRYHDNSDVKTTQDLTVWSSGTEQQRNNIAAQTKLCLEGWTPTRSPEGYNQIFSAFKPLKDIHNPLGPFPSQISGTHSNSWDTADARYPVQQANYSMLPGTWSLRPHNSGFRMNQQNYLVMPEGANFTGKSAFTSLQDHGTDKCSTGCFGHIESSSHTDHASSSLIRPQPLVLGNGVQKSKGTSFKLFGIPLGSPEKSEPLVSPPSVAYDGKLQTSPSEKGNQLDVVEVDNCSHPSKTVKPLDGPQSDSITENNQPSPEATLNIQNKVQSSSTRSCKKVHKQGSALGRSIDLTKFACYDELIAELDQMFDFDGELKSPCKSWLVVYTDNEGDIMLVGDDPWNEFCDMVHKIFIYTREEVERMNPGALNSRSEDSLSDSLGRGVASRDPRGGGSTSALDSENC

SEQ ID NO: 54880 - protein, 79 aa, Zea Mays
MDLSYMQKEVTDIAIGRLMITVVRCKGDSGNDTRTPLVIARSIWLAGKNAHHVQSMHRCPVVTEDISCSAGTRWEFCMR

SEQ ID NO: 54881 - protein, 739 aa, Zea Mays
MVEYLKGKVLRGVSAAKYHTIVLGADGEVFTWGHRLVTPRRVVVARCLKKGGNTNLKFHRMERLQVISVAAGTTHNTALTADGALFYWVSSDPDLKCQQIFSMCGRNIVNISAGKYWTAVATSTGDVFMWDAKKRKDETPIFTRVHGVKRATFVCVGETHMLVLSSIYHPEYPPKPKSQGLKSMLEWNGGTEELGEDILFDDVQPNSGLSGSSGEMSKGVPSLKSLCEKVAVEYLLEPKNSIQLLEIADSLEAKELKKHCEDLAIRNLDYIFTVGASSIMNASSEILVNLEKLLDEKSSEPWSQHRLPTMTATYPAVIDSDVEEDEAREFPKTRKCGKSASRPSAMSSDDSFLQKDCTAEQAVSKQIRALRKKLQQIEILEAKQLAGHQLDSQQVAKLESRAALEGELAELGIPSEIYSTSSACPAEGRTNRKPEVSKKQKRKNKQSTQTPSVKNEPGQQIPITELQVLQVNVSAEKQEAYAADPIKPMEAAAFSNTKDTASPPEKKPSQPTPSKKKNRKGGLSLFLSGALDDTPKPSLPAPAVPATPKPEGPAWGGVKITKGPASLRDIQTEQSRTNEPASAKAKDRHENSPDSAGRATRLSSFIPDARSSPVAVVAPARAAAAPSSEGDRSTPPWSSSATSPNVSQPSLRDIQQMQQRHHGGVSHSPKTQTSGFCIPPHGGAPEAAGGGGVKDNVPNRWFRPETDAPSSIRSIQIEEQAMKDFRRFYSSVRIVKPQV

SEQ ID NO: 54882 - protein, 179 aa, Zea Mays
MGMSTESGMFRGAGVGAVSGAVFSIEAVESCIEIWRSSHSGKYSILFVLDIISSLFSGRIVWEKVSPALQRAVQSQMSLMSTPFIDNSDLFETGSTGGMSRDLIDRIPKTRFSAASNCDQETDSSCCPVCLQDFGARQFVRALPQCQHIFHVRCIDSWLLRHASCPLCRAGVHIDHIHM

SEQ ID NO: 54883 - protein, 100 aa, Zea Mays
MNAIDLILKKLSLDVHYPANLSSPFPYAGLTFPSYPGVPVGYMIPQVPYNNAVNYGPNNGYGGRYQNNKVGGSLWVALLVISHLWTCSAGATCMHSVHLC

SEQ ID NO: 54884 - protein, 616 aa, Zea Mays
MISARTAAASPASLWKRGGQSEGGGSCDGCRTYRNTLRRAAAAKVRALPSRAVEAVKMGSAAEVEQEEAEVAAAADGVVVEDHYGEDSATEELPIMPWAFSVASGYTLLRDPHHNKGLAFTEKERDAHHLRGLLPPAVVPQELQIKKIMHNLRQYQVPLQRYMAMMDLQERNERLFYKLLIDNVEELLPVVYTPTVGEACQKYGSIFRQPQGLYVSLRDKGKVLEVLRNWPHRNIQVICVTDGERILGLGDLGSQGMGIPVGKLALYTALGGVRPSACLPITIDVGTNNEKLLNDEFYIGLRQKRATGEEYHELMEEFMAAVKQIYGEKVLIQGTASVVLAGLLAALKVVGRTLAEHTYLFLGAGEAGTGIAELIALEISKQTSAPIEECRKKIWLVDSKGLIVDSRKNSVQSFKKPWAHEHEPLTTLYDAVQSIKPTVLIGTSGVGRTFTKEVVEAMASFNERPIIFSLSNPTSHSECTAEEAYNWTQGRVIFASGSPFDPVEYDGKVFVPGQSNNAYIFPGFGLGLVISGAIRVHEDMLLAASEALAAQATQENFDKGSIFPPFTNIRKISARIAAAVAAKAYELGLATRLPPPRDLVKYAQSCMYTPVYRNYR

SEQ ID NO: 54885 - protein, 174 aa, Zea Mays
MKNAGNRLISALSLARYRHLKVLNLEFAQDIEDRYFVHLKEMSGISLENLEFLNLNACQKISDKGIEAVTSLCPNLQRLAIYWIVGLTDSSIGHITKNCKHLVHLNLSGCKNIKDKGMQLIANNYQGLKRLNITRCVKLTDDGLNQVLLKCSSLESLNLYALSSFTDSVYREIG

SEQ ID NO: 54886 - protein, 439 aa, Zea Mays
MEEVIRFFEMHHKGKYKVYNLCSERLYDASLFEGKVACFPFDDHNCPPIQLVISFCHSAYSWLKEDIENVVVVHCKAGKARTGLMISSLLLFLKFFPTAEESIEYYNQKRCVDGKGLILPSQIRYVKYFERILTYFNGENQPPRRCMLRGFRLHRCPYWIRPSITVSNHNGVLFSTKKHPRTKELMPEDFWFSAPKKGIMVFALPGEPGLAEVAGDFKIQFHDRQGDFYCWLNTTMMENRVTLNPTDLDDFDKRKLPSPGFQIEVVLVDYDGSQPAKPKPGAGPAADKSHADSSASTVAKENSAAPEESNKGTGSNNDRDEVFSDSDGEDGSSNGRKEKTAGGGQSSVNAAKPSQTGNMEEAAASAAASRLDKVAISSEQGTTKAPDGTSLKTEVSSKASSTTAPPPPAADSSSMSEFKAIAADASVFSFGDEDDYESE

SEQ ID NO: 54887 - protein, 164 aa, Zea Mays
MNEIAWNKAGDLFFITTGLGHVEVVKDLEFLKPCKLNAHTAGCYCIAMDPLDRYFAVGSADSLVSLWNVKELLCIRTFTKLEWPVRTVSFSHTGEFIAYASEDPFIDIANVETGRSIHQIPCKAAMNSVEWNPKYNLLAYAGDDKNKYMTDEGVFRVFGFETHN

SEQ ID NO: 54888 - protein, 63 aa, Zea Mays
MFVLQSPLDTHTTLLLLAHCICARFFFISPSLSLLACSTLLFCCMMFMRIIRFAVRLIRIFYG

SEQ ID NO: 54889 - protein, 475 aa, Zea Mays
MQFALALDTNSGPHQIRSCEGDGIDRLEKLSIGGRKQEKALRNRCFGGRVAATTQCILTSDACPETLVPVGGCYRLIDIPMSNCFNSGINKIFVMSQFNSTSLNRHIHRTYLEGGINFADGSVQVLAATQMPEEPAGWFQGTADSIRKFIWVLEDYYSHKSIDNIVILSGDQLYRMNYMELVQKHVEDDADITISCAPVDESRASKNGLVKIDHTGRVLQFFEKPKGADLNSMRVETNFLSYAIDDAQKYPYLASMGIYVFKKDALLDLLKSKYIQLHDFGSEILPRAVLDHSVQACIFTGYWEDVGTIKSFFDANLALTEQPSKFDFYDPKTPFFTAPRCLPPTQLDKCKMKDAFISDGCLLRECNIEHSVIGVCSRVSSGCELKDSVMMGADTYETEEEASKLLLAGKVPVGIGRNTKIRNCIIDMNARIGKNVVITNSKGIQEADHPEEGYYIRSGIVVILKNATINDGSVI

SEQ ID NO: 54890 - protein, 53 aa, Zea Mays
MKKIQSVVPRRPIASKNSAPDSERNNRLCFPFRRCPQTIKANTHNGVKRSLLT

SEQ ID NO: 54891 - protein, 672 aa, Zea Mays
MEQRLGATYQWWSWSHSKSCESVERKGREWLDEAGLASGLQLVLDMLVTVGEPELGSSRGPVSWGVAGFCGVTVAEKRPMMQSRDVDKYLNKADNINHVLMNSGDISKIGGHCLHGTHGLGTRLDSDAQSSSPGENMNNKIRRPIEICTFDAQGRCKKGKSCISLHEREGFGSAKTGLLAPAGSGNHRGSEGGSQVQHISDLKVHQFKDSEGLSKDEMCRNLIYAFGKDNQMSVHLAGKHSSPIPGVSQRMPVSIGHSLAQNPLVHEKNNKRFMGHHIDVAAENYLDAGGTYPRLDGGIFQFDIDKESSVSDSHVSRTYLSDYPYKSFGLSISSDPLQLSEKLSAYGGVTNTIPNIHQKEHHSCHASYSSHSLTGSRNPCFATSEHTFGSPSLLATSHLGIQSHHLFTSDIEKADLHRCLDVGKGYGTSSSGPALLVSSKPEPSMTPVGPHSPIKNEVWETSVPFVPSFSFPDSTTASESQYDPFVDYVEPPKVGNTNNLKPSTISCNITSQHTDQYAVTDKSLNCNDKLTRNITAKGSNEPAYFIAPDRGCSSSLDDTIKVKACDRKKDAVDYNEKTRDFRFHLAEHIKELVKPIWKKGNLSKDAHKLVVRKSVEKVVDSIEPNQVPTTEELITKYIATCGPKIEKLVKAYVDRHSTCHPTIKYSSSEMGA

SEQ ID NO: 54892 - protein, 299 aa, Zea Mays
MVDGGNFYEAQQMYKSTSARYIAAQKYSEALDILQSGALVQLKHGQVTCGGELAVLFVDTLITGELPYSEQIFDRIRKMYEAFPRVTVPHFLGDDYDDEGHQLSEAISAAKVRAESCSSFMKAAIRWSAEFGTSRNGSSELHVMLAEYIYSESPETDMTKVSSHFVRGNDPKKFASMLVNFMGKCYPGEDDTAIARGVLMYLSQGNLRDANLLMDEMNEQLKSANSEFPKTDLIQFIKYLLPTLERDAYPLFRTLRQKYKTSTDRDAVFQELLDEIAAKFYNIQRQNPLEGLFSEMFKI

SEQ ID NO: 54893 - protein, 346 aa, Zea Mays
MDKIEKIIREPIVSKYGSDDGLPELREALLEKLSRENKLTKSSVMVTAGANQAFVNLVLTLCDAGDSVVMFAPYYFNAYMSFQMTGVTDILVGGCDPKTLHPDVDWLEKVLKENEPIPKLVTVVNPGNPSGAFIPRPMLERISDLCKNAGAWLVVDNTYEYFMYDGMEHYCLEDAHIVNLFSFSKAYGMMGWRVGYIAFPNEADGFHDQLLKVQDNIPICASIIGQRLALYSLEAGPEWIKERVKDLVKNRALLVEALSPLGEDNVKGGEGAIYLWAKLPDSCSDDFEAVRWLANKHGVAVIPGSASGGPGYIRVSFGGLKEEDTRLAAERLRRGLQELVTDGMVQ

SEQ ID NO: 54894 - protein, 484 aa, Zea Mays
MMDFVFSESEGGIYDNRNGMDYHIPVSDSVAREPPMHIVHIAVEMAPIAKVGGLGDVVTSLSRAVQDLGHKVEVILPKYDCLNLNSVKDLRYQQSFTWGGTEIKVWFGKVEDLPVYFLEPQNGMFWVGCVYGKNDESRFGFFCHSALEFLLQKGSSPDIIHCHDWSSAPVAWLYKEHYALNGIGNGRIVFTIHNLEFGAHHIGKAMAHCDKATTVSDTYSKEVAGHGAIAPHYYKFHGIRNGIDPDIWDPYTDKFIPVHYTSENVVEGKSAAKKALQQMLGLQQTDTPVVGIITRLTVQKGIHLIKHAMHRALERNGQVVLLGSAPDPRIQSDFTNLASKLHGEYHGRVKLCLTYDEPLSHLIYAGADFILVPSIFEPCGLTQLIAMRYGSIPVVRKTGGLYDTVFDVDNDKDRAQAQGLEPNGFSFEGADSSGVDYALDRAITTFYDARDWFNSLCKRVMEQDWSWNRPALDYMELYHSARKS

SEQ ID NO: 54895 - protein, 1235 aa, Zea Mays
MMTQTLQGKVMAYTPSSFPVQQQILPEDLEMLQLDNMDQGTSPVRAVIIKRIETCLRNREEFCNLCPDSLLKASEIIDNLLYKIDPQPQYMDLDTIEARVNDLLRSFLYGNQRDPWISSAVPSTKDLRQLPGIQMTDSSVYHNRVVPGFTNLPARPGGIPSHAVFTAQRYVPLNHNMTAASFALVERPESFMSTVVAPSVSGLPNCISGPGGIDSSGLQNGYSKDHFPGDAYHVDSPQLSMSGSPSPLSALCDPITSSGAMIRSSMDFIPKASGQKLFTGKGQMFQQYREYEKELDGAWSHPTEKPVHSNRTTQSDEIYLKGECGPDTLTEMKENYGRISDSRDPCDPEREIVERSEQTSNITVSKATSPISDESSGRRPAKRLKADAPRLVNVNQVESPQEQKPVVNENHVSGGETVQSEITELPAKPPCSSLGDINAESNNMLEQGSEDVPNMDIVKEEELSRAKGDIEMKDAKTVALDHTPKGVNLSSRRKRGASILYGLTAEELRDHMSSLINRHTCQSKVTSQEFPSIDGLPDQNTCSLCGMEKLLFEPPPRFCALCFKIINSAGCYYVEVENGTEKSSICSKCHHLSSLRAKYQKKFNYAETDAEAEWWVQCDKCKAWQHEICALFNRKCEGAKAEYTCAKCFLKEKDSGDIQALESSTVLGAQELQRTKLSDHIEQRLSERLEQDRQQRASASGKVAEEVPGVKGLTVRVVSSAERLLQVQPRFRGFFKQGKYPGEFPYKSKAILLFQKIEGVDVCLFAMYVQEYGSDCPPPNQRHVYLAYIDSVKYFRPEIKSATGEALRTFVYHEILIGYLDYCKKRGFVSCSIWACPSTKRDDYVLYCHPTVQKMPKSDKLRSWYQNLIKKAIKEGVVVERNTLSDFFLQPTNECKANISAACLPYCENDFWPGEAERLLEKKDDNASQKEETQVGRLLRVAKRDDRKGNLDDILLVHKLGERMRTMKEDFIMLCLQQFCKHCHHPILSGKSWVCTSCKNFHLCDKCHAEEQNTAQKDRHPATTKQKHAFERMEVQPLPETDDGDPTMESKYFDSRIDFLKHCQDNQFQFDTIRRAKHSTMMILYYLHNSTCSACHRAVDQCLVWRCLECLGCTFCGQCYKQNGQGLHIHELRQIDTRETSQKHTLQDYIDGLVHASRCYDPRNCTHPLCLTLKKLFAHGARCHVRACNSGGCKKCLFMWKLLFRHSKDCNDGDCAVPRCRDVKAFIAEKMKLKI

SEQ ID NO: 54896 - protein, 231 aa, Zea Mays
MFQVKKKQFFRNFITITLFGAVGTLISFTVISLGALGLISRLNIGALELGDYLALGAIFSATDSVCTLQVLSQDETPFLYSLVFGEGVVNDATSVVLFNAIQNFDPGNISSAKLLNFIGSFLYLFGSSTILGVASGLLSAYTIKKLYFGRHSTDREVSIMMLMAYLSYMLAELLDLSGILTVFFCGIVNVTLYLAQCNRKVRGSQPSMPLQHCRLSPRLFCFFMLVWMHWI

SEQ ID NO: 54897 - protein, 508 aa, Zea Mays
MSPKGVQEEASFMGKGKGGEQQLGYQPNVYVSQPHTPFSGGYSNHLDQWEGYPYAVSAEGLDAAYPVTYGAYSPLSAIGDSHTYFSLLCPLSRPCYQPPASPNMRYSSPGTGISQFYPMHQYYSPDEVHYSVTPSFYQPFGSFNGVPMQPSSFPGFFGQGNIPLTSRMESMSNSGSHKAFQQGGKFGGSTQSWSTASCKFGTFKDEKCSPDFLNEQCRGPRATKTRKEVGSSSTEDKNKNVLPIADSDKYNHPGFVTEYKDARFYVIKSYTEDHIHKSIKYNVWASTPRGNRKLNAGYHEAKAKEDHCPIFLFFSVNSSGHFCGVAEMIGPVNFDKSVDYWQNERWNGQFPVKWHIVKDVPNNIVRHIILENNENKRVTNSRDTQEVKLKQGLQMLAIFKNHEAQTNILEDFDFYEQREKAMLDDRQQQKPECSDTGKQVQASAPVDIVTGMSDAFAQAVQLEKTNDKENKPRIEDADAADNAPAAPVKIEEDMLKTAEVGGLLKESG

SEQ ID NO: 54898 - protein, 411 aa, Zea Mays
MGSLGGSAGAGDGGKVGLPALDVTLAFPQATPASLFPPAVSDYYQFDDLLTDEEKALRKKVRGIMEKEIAPIMTEYWEKAEFPFHAIPSLASLGLAGGTIKGYGCPGLSLTASAISIAEVARVDASCSTFILVHSSLAMSTIALCGSEAQKQKYLPSLTQFKTIGCWALTEPDYGSDASSLRTAATKVPGGWHLDGQKRWIGNSTFADVLIILARNADTNQLNGFIVKKGAPGLKATKIENKIGLRMVQNGDIILNKVFVPEEDRLTGINSFQDINKVLAMSRIMVAWQPIGISMGVYDICHRYLKERKQFGAPLAAFQLNQEKLVRMLGNIQAMLLVGWRLCKLYESGKMTPGRSSLGKAWTSKKAREVVSLGRELLGGNGILVDFLVAKAFCDVEPIFSYEGTYDINSL

SEQ ID NO: 54899 - protein, 531 aa, Zea Mays
MMGPLLGLDPWRSGPGCQRPSIYRIGWQLLQGASWINYPCLSASTDSIQRAGFASPTPIQAQSWPIAMQNQDVVAIAKTGSGKTLGYLLPGFMHIKRLQNSTRNGPTVLVLAPTRELATQILDEAVKFGRSSRISCTCLYGGAPKGPQLRDLDRGVDVVVATPGRLNDILEMRKVTIGSVDSLVANSSITQHVEIITPSEKQRRLEQILRSQDSGSKILIFCTTKRMCDQLARTLTRQFGASAIHGDKSQSEREKVLNQFRSGRSPILVATDVAARGLDIKDIRVVINYDFPTGVEDYVHRIGRTGRAGATGVAYTFFCDQDSKYAADLIKILEGANQRVPRDLEDMASRGGGRGRKRNHWASRPDRGGSRSELDSRYSSRDGLASSGKSESGRGSRGRDDNGSRGRYDPGETDGRSRRSTRGRSRSRSKSDSRSRSPSPKKSRRHEGRRSRTKSRSRSRSRRNHGASHSKSRSPVASRRYEKTASGSARPNSGHAEHKSPPRSHSRDDHVNHSDHKDDPRANAAVQNGNN

SEQ ID NO: 54900 - protein, 336 aa, Zea Mays
MAGWRRCWCLEWNAPKPMHPSLLNEALRWTATDGQKKDLWSPLPYQGWKPCLTPSVSHKLPLEPSGYIQVFLDGGLNQQRMGICDAIAVAKILNATLVIPHLEVNPVWKDSSSFEEIFDVDHFINSLKDEVSIIKVLPKEFSWSTREYYGTGIRATRIKTAPLHASANWYLENVSPILQSYGIVAIAPFSHRLAFDDLPVDLQRLRCKVNFQALVFRSHIISLGETLVKRLRSPVRVHSSKSIHQVVGDTNQAEKYAVLHLRFDKDMAAHSACDFGGGRAEQLALAKYRQVIWQGRVLNSQLTDEELRNTGRCPLTPEEIGLLLGKSGSFKSISTR

SEQ ID NO: 54901 - protein, 192 aa, Zea Mays
MDAYKQAAINLFLGYFQPQVGKPALWEPESGDEHVLDDETCKLMKRARSDGSILNKSKLSISSNGPNGILKLAFTGSKNEGQRPNRSSDTACDNGMSKSRYTPTLSHIKHISCELDYYNGSGDSNFLDLDWLTASDNERSKAISTPDVNISTDSGVRDVISGTTDDQASGIHAQGFSKDFVQWLNQGEAFWY

SEQ ID NO: 54902 - protein, 201 aa, Zea Mays
MIPNICLFRILANRQSAARSKERKMRYIAELERKVQTLQLEATTLSAQLAMLQRDTTGMTSENSDLKIRVQTMEQQVQLQDALNDRLRDEIQQLKVATGQVNASIGKTGNSGMSSFGGNPQSYQRSHIQSLLAAQHLQRLRIHSQHQQQQTHFQQQQQPQPQLLLQEAHPFPVDLKMRGFSLSSHAQNAGASDSHAAKSEP

SEQ ID NO: 54903 - protein, 559 aa, Zea Mays
MSTSLRRIKMLMHAGGKFGGSKSGYSVSGGLHGVGLSVVNALSETLEVTVWRDGKEHRQSYSRGKPTTRLTSSTLTGETSSRQGTRIRFWPDKDIFTTTIDFDFNTISSRIRELAFLNPELTIILTKEEGHTVQRNEYCYAGGLVEYVKWLNTDKKPLHDPIAFRKELDGITVDVSLQWSSDSYSDTVLGYANSIRTIDGGTHIDGLKASLTRTINNLAKKSKTIKDKDITLSGEHVREGMTCIISVKVPSPEFEGQTKTRLGNPEVRRIVEQSVQENLTEYLELHPDVLDSILSKSLNALKAALAAKRARELVRTKSVLKSSSLPGKLADCASANPEESEIFIVEGDSAGGSAKQGRDRRFQAILPLRGKILNIERRDEAAMYKNEEIQNLILALGLGVKGEDFKKEALRYHKIVILTDADVDGAHIRTLLLTFFFRYQRALFDEGCIYVGVPPLYKVERGKLAHYCYDDADLKEIVNTFPANASYHIQRFKGLGEMMPAQLWETTMDPERRLLKQLRVEDAAEANVVFSSLMGTRVEYRKELIQKAASMINIDQLDI

SEQ ID NO: 54904 - protein, 56 aa, Zea Mays
MCLLDFTNLSEALTFVLLAVKLSVLHSCSDRIRGLVHTPFTVVSFELLVSLLNLYF

SEQ ID NO: 54905 - protein, 529 aa, Zea Mays
MLSQRHNRYEELPDTWYKPYADKFRIWHSKLHSGDKEIPKRTPEGMSDYLKICSVHKRKRAVFMDDPSISAPILENGPSLHSKNAGEFSNSTDELIPEIRFPSDCVPESAIPKTSGISRANKIEVHGVLDNLPAPSSRNTAMLERFGMVPEYYKTGNKYRGKDGSRVEGKSLSQEQALLMTKQLVARYLANSGFESGTVVSIDVLSEIIIKHICKLGRNLKLLTDSYRKQFSSIELLKMFLQTVGYSNIGSLMEITKMGNRVANYPIHQDAQVLQTQNAISIHAQQLPRQFPPQMLQNLTPQQQQQLQNLTPQQQQLLQQQQWLRRNQLCSPRGPLTMADKNQPMVNVKVENTMDSQIDVPYGSFTRQQQFNIRQQQQLLHQQQQQLQQQQLQQQQQQLQQQQHQQQLNQQQQQLQQQQQQLQQQQQQFTQQQQLQQQQQQLQQINQQQHLQQQQQQQLNQQQLQQQQQQMTMSGNQNAQLAQQFKQVSSMSAYGMRMPPVKVEAFHELVSGDSSLKHDNDPNKLTSPK

SEQ ID NO: 54906 - protein, 2753 aa, Zea Mays
MAPINSGNMEQHSQRLLEPDLPVQVRLQLAMEVRDSLEMTHTPDYLNFLRCYFRAFSAILTAYTKPQATENAEHKLRNVVIEILNRLPHSEVLRPFVQDLLKLSLRVLTQDNEDNALLAIRIVFDLLRNFRPTVEAEVQPFLDFVVNIYHKFPTTVSYFFDNPNTSASMAASMPMQHLDPTADASVMMQVPGGGQLNPSARSFKIVTESPLVVMFLFQLYAKLVQTNIPHLLPLMVAAISIKGPDKVPPHLKTPFNDLKGAQVKTLSFLTYLLKSNADYIKSYEESICKSIVNLLVTCPPDSVSIRKARYDLELLVGLKQVLNTEYKRGLFPLIDTLLDERVLIGTGRVCIETLRPLAYTLLAELVHYVREDISLPQVEPIYQKGVDQQSMDEARVLLGRILDAFVGKFRTLKRTIPQLLEEGEEGKEQPNLRMKLEVPLQTVLNLQQPLEYTKEINDYKSLIKTLAVGMKTIIWSITHAHWPRPQQQNQQSSNLSLQHFRGLREDEVRKTSGVLKSGVHCLALFKEKDDDREILQSFSQMLAIMEARDIMDMFSFCMSDLFDSMITNNQLLHIFSTLLQAPKVLRPFTDVLINFLVSSKLEALKQPDSPAAKLVLQLFRFLFIAAAKAPESCERTLQPHVPVIMEVCMRSATEVEKPLGYMHLLRNMFRALNSAKFDSLMRDLIPSLQPCLNMLLSMLDGPISEDMRDLILELCLILPARLSSLLPHIPRLMKPLVLALKGSDDLVSLALRTLEFWIDSLNPDFLEPSMANLMSEVILALWSHLRPPPYTWGTKSLELLGKLGGRNRRFLREPLALESKENPEHGLRLVLTFEPATPFLVPLDRCIHQAVGAVMQGNGLEAFYRKKALQFIRVCLDSLLNLRENVPGEGVSPGVLGTLLISNLDPSRRRNDASDMKGDLGVKTKTQLLAEKSVFKTLLVAIIAANADTSLHDEKDDYVVDICRHFAMLFHVDSPSSSQSGFMHPIGSSLPSIIMGSRSRCNTSSNLRELDPLIFLDALVEVLSSENRQHAKAALSALNIFAETLIFLARMKHTGMLRGGPSTPMLVSSPSLNPVYSPPPSVRVAVFEELLPRLLHCCYSSTWQAQMGGVMGLGALVGKVSVDTLCIFQVRVVRGLLFVLKRLPVHANKEQEETNHVLTQVLRVVNNADEANSEPRRQSFQGVVEFLAQELFNPNASMVVRKNVQACLSLLASRTGSEVSELLEPLYLPLLQPLISRPLRSKNIEQQVGTVTALNFCLALRPPLLKLSPELVNFLQEALQIAEADETIWVTRMMNAKVVLTWNKLRTACIELLCTAMAWGDLKAQNHTELRAKIISMFFKSLTCRTTEIVNVAKEGLRQVVQQQRMPKDLLQSSLRPILVNLANTKSLSMPLLQGLARLLELLSNWFNVTLGAKLLDHLKKWLEPEKLVQTQKSWKAGDEPKIAAAMIELFHLLPPAASKFLDDLVTLVIDLERALPEDQFYSEINSPYRAPLAKFLNRYVLEAVDYFLARLSHPKYFRRFMYIICSDTGDLRDALARSPQKILASAFSQFYSQSEASAAQLSSVKDEALTGAVSESITVQSSSNMVTTSESYFNGLELVSALVKLMPEWLRNNRVVFDTLLLAWKSPARLARLQNEQDLSLPQVMESKRLIKCFLNYLRHDRTEVGALFDMLSVFLYRSRIDYSFLKEFYVIEVAEGYSPNLKKTILNHFLNIFQSKQYGQDHLVVTMQILILPMLAHSFQNGQSWEVVDPTIIKTIVEKLLDPPEEVSAEYDEPLRIELLQLATLLLKYLQTDLVHHRKELIKFGWNHLKREDNSSKQWAFVNVCHFLEAYQAPEKIILQVFIALLRTCQPENKLLVKQALDILMPALPRRLPPEKNDSRMPIWIRYTKKVLVEEGHSIPNMIHIFQLIVRHADLFYSCRAHFVPQMVNSLSRLGLPYNTTAENRRLAIELAGLVVAWERQRQSEMKVAQESESQNQLGDMLNPSVIGGDPKRSSDVPSFADDLSKRVKVEPGLQPLCVMSPGGASIPNIETPGSSGLPDEEYKPNAAMEEMIITFLIRVSLVIEPKDKESSSMYKQALDLLTQALEVWPNANVKFNYLEKLLGNLSPTPQSKDPASALAQGLDVMNKVLEKQPRLFIRNNINHISQILEPCFGNKMLDAGKSLCSLLKMVFSAFPLEAATTPQDIKLLHQRVQELIHKNLAAVTTQQIALELNNAHSIISFSLFVLNALAEVQKNFIDPFIGLLFRVLQRLARDMGSSAGSHIRQGQRPELDSSVNSRSTIDSTVISNMKTVLKLISERVMSSSDHRKSMGQILQALLSEKGTDSSILLCMLDMIKTWIEEDCRLASSTGSVSSLNPKEIITYLHKLSLVDRKSFPPAAQEEWDAKYLQLLYSLCADSTKYPLSFRQEFFHKIERQYMLGLRAKDPEMRKRFFKLYHDTVGKTLFSRLQFIIQLQDWEAVSDVFWLKQGLDLVLAILVENEPITLAANSARVPTLMIAGPVPDRITMPQQVPDAQESMDGTTLSFDSLAARHAQFLNDANKLVVADIMAPLKELAFADPNVAYHLWVLVFPIVWVTLHKEEQVALAKPIIALLSKDYHKRQQGCRPNVAQALLEGLHLSHPQPRMPSELIKYIGKTCNVWYIAIALLESHIVHMNEAKCSESLAELYRLLNEDDMRCGLWKRKSITAETRAGLSLAQHGYWQQAQNLFYQAMIKATQGTYNNTVPKAEMCLWEEQWLSCASHLGQWEVLA

SEQ ID NO: 54907 - protein, 379 aa, Zea Mays
MVADVKRIIETTQGQSTYRADQQMLIYQGKILKDETTLESNGVAENSFLVIMLSKAKASSSGASTATTAKAPATLAQPAAPVAPAASVARTPTQAPVATAETAPPSVQPQAAPAATVAATDDADVYSQAASNLVSGNNLEQTIQQILDMGGGTWERDTVVRALRAAYNNPERAIDYLYSGIPENVEAQPVARAPAAGQQTNQQAASPAQPAVALPVQPSPASAGPNANPLNLFPQGVPSGGSNPGVVPGAGSGALDALRQLPQFQALLQLVQANPQILQLGKQNPQILRLIQENQAEFLRLVNESPEGGPGGNILGQLAAAVPQTLTVTPEEREAIQRLEGMGFNRELVLEVFFACNKDEELTANYLLDHGHEFDEQQQ

SEQ ID NO: 54908 - protein, 184 aa, Zea Mays
MFLGMGRPAWREARATLQKILSADEPVLRDNEALRNKCLIPMSDIEMVLPITVGGYTDFFCSVHHARNCGFIFRGPQTPVNPNWFYLPIGYNGRASSIVVSGTDVIRPRGQGHPTGNSAPYFGPSQKLDFELEMAAIVGPGNELGKPIDINDAEEHIFGLTLMNDWSGILLFSIFICLRLRCMM

SEQ ID NO: 54909 - protein, 139 aa, Zea Mays
METAAVAASSAGRRIMVAVDEGEESLHALNWCLANVVSPAGGDTLVLVHARRPRPVYAAMDSAGYMMTSDVLASVERHANAVSAAAVDKAKRVCADHPHVKVETTVESGDPRDVICDAANKMAADLLVMGSHGYGFIQR

SEQ ID NO: 54910 - protein, 70 aa, Zea Mays
MLDPEVKSRTMELAIAIGNEDGVAAAVDAFHRHLPSELPLSPPAHVEEERTDFFQWFSRGLEKCCFPFSF

SEQ ID NO: 54911 - protein, 103 aa, Zea Mays
MDSDAEGTPSEFFDYFKVLCIQGFLTCRKHAERIILLVEMLQDSGFPCFKGGPRTIQNLRKRFHLSLTEEQCVSLVLSLISSSMDAWRTRQYDYYQRVLNGIL

SEQ ID NO: 54912 - protein, 51 aa, Zea Mays
MIYPHHDEISQDYPGLSAKAIYSLGYISVARVRPRTSKGITDLLLPQTSVA

SEQ ID NO: 54913 - protein, 1541 aa, Zea Mays
MENVDAVDCCKEGNHIAVARGNKLTILSPDFTETCSMSLLFQLWSDGSDSKGTTIKVDSIGWVHGDSIVIGCVRLNEDDNEEGYLVQVIRTEESTFCESPGKTDVYTYNDFFHGIMDDVLPPGAGPNLLLGYLHRWGLMVASNKKSVDEHIALLKWPSAHDDEKTVTYLEMLEDKYSPRIDLQENGDDNVILGFGVENVSLFQKITVPVGPEQKEVAPQHILLCLTGEGKVAVYYLARISDPSDLPHATVSTNEDYGEKHISPATVSEKELTPSVAGSVYKSTLTEHGAEPSSAQTGSNQQESINVKNSSSASKEQETTDNSLFISSNKKPLDTKQVNVTGPPAALRSLALTGNTKPTIFSSFSTEGMNPTGGNAPNELASSLQPSSRSFGNNQTGKEGLDSVQSVGIFGGSQNSNKDGNVYGFKSSLFTSSGSVPAKIGERNEVGFGVPSLQTSYTADRKVFGAPVALSSVPSSSISPAKPSPIGYSSSGFRTANSEAPQSLRGSPPSQQSMGKSHNSRTQAPAEYSRNSKKGTGFDSEQDLSKKFYSINEMTKELDALLAYIEKDGGFRDACITIQQRPLSMFEDGLQNFLQLLQVFKGKVEEQCSKIEDLRNNMFQVSARQTYMKGIVSQSSDNQYWDIWNRQKLSPEFEVKRQNILRANQDLTNQLVELERHFNNLEMNRSSETGRVASNRRAVYSNKTSSSQTQLSSVYSALNSQLAAAEQLSECLSKQISVLNIGSPSRKQGMVTKKLFESIGLAHTTDATKFSGSTPKPVKRFPSVNEHSKGILGSSKGGEPETARRRRESLDMSLASLEPQKTTVKRITQQQRLKISSDLPFRSNKKIFDSQMAAISQEKSSDSSNSSIVESYVSRLRSLSEDVNDKLSGPQQNPLFKWVKESTGSSQTSEQKHFELPGQMKSTAQSSKLTPSSPPSFSYTRMGAQDSINPSSVPSFGTKHTVSKPNTLTFKTTISPKSNANTEPNILPSITAPKTSLSPLSVKTAGESGDLPTLTMKNRQDGQSMPSLGNIKGPGASLQNKGGIFRDLDKSSFNSEHSKPAALHEKTDQLSGVGDAVQNTVKDTSKMAPQPSAFLPAPVTQTNSYSLRPTVSSSATSGAKTSDVLSSSMQKVSPIVPGGTVSSSVPTPAKDSSTGLSQNASKPETLISKVTSTIVSASSTSVISVTESKPSVPPTTGASLPSTHVSAPQTAPTTSESVFTSTGKNVGPNTDTISTDEDDMEEEAPSASAELNLGALGGFGLGSQPSSSPQKSNPFGASFGTSGNKSSGTPFTLTTSPGQLFRPASLSIPSAQPAQPSQSTSSSSFSNSFSSGLTGFGQPAQIGSGQQSAFGKPAQIGAGQHAGFGQTAQIQSGFGQPAQIQSGFGQSAQIGTGQQSGFGKPAQIGAVQSGFGQPAQFAAQQTLGSVLGSFGQPPQLGGIGSGGFGGFSSASTSAGFSSLSSGGGFAAAATGGGFAALASKSGGFVGAASSGGGFGGASQGGGFGSGGGGFGSFGGNQGAGFSAFGASGAGRPAADFLTQMRK

SEQ ID NO: 54914 - protein, 750 aa, Zea Mays
MSVVGFDVGNDTLVAAAARQRGIDVLLNAESKRESPAAIAFSRNARLIGCHAASASSAHAPFSSVKRLLMGATGRHPDSSLLRDLSRLPFPAAVGGGAVVHADHIGRRIALSPTHLLSMLLAYLKQLAEADLGGAPVADCVISVPCYFTQAQRRAYLDAAAIAGLRPLRLMHDLAATALGYGLYRSDLGGSGGPTCVAFVDVGQCDTQVAVVSFDMSGMKVLSHGFDADLGGRDFDEVLFEHFAEEFKDRYMIDVTGNVKASMRLRAACEKAKKVLSANAEAVVNIECLIEEKDVRGVIRREDFEKLCARLLERVVEPCNRAVTDSRIGLERLHSVELVGSGSRVPAIAKVLKEFFRKEPSRTLNSSECVARGCALQCAMLSPTFRVREYEVHDAIPASIGFYTSDGPVSTLSSDALFRRGLPFPSVKIITLQKNDSFSFDAYYVDANELPPGTSTDIGSFQIGPFQAHMEASKVKVKIRLNLHGLVSVESAALIDDYQRNATSADHMEVDTSGDDMGHKSRSERSIQRQELPITEYICCAMSKQELLEAQEQEHQLAYQDKLMERTKDRKNALESYVYDTRNKLSERYRSFATDSEREQISFNLQQTEDWLYEEGDDETEVVYSSKLEELKKLVDPIENRCNDDEVRAEIARELLKCIVDHRMAAKSLSAPERDAVDNECNKAEQWLSEGSKLQESLPKNVDPVLWSCEIKGKEEELDMFCRNITRHKGSPARTDGSRGSDHMPTPDRD

SEQ ID NO: 54915 - protein, 526 aa, Zea Mays
MPLLKQLSLHDNQLQEGVQAIADDQAGCLSRKLGCWSLLYKWDFKDWISLGGLREKDNTNVPNFSEADVMHNLQSFASVMRRRLLSENDNLAALLGNDDKSSDLQNLKEIQRSVDVNSVGSGSFSAFPGIYGQALAPLLPEDIDATTVQQLSTDVTQTTNVEMSGTTYSKWAYIITIPAAILLISLIVLILVLRKRGRAPVAPWKTGLSGPIQKALVTGAQKLNRAELEVACEDFSNIINTFPTCTVFKGILSSGVEIGVVSTTISSSKDWSRSAESCFKKKIDRLSRVNHKNFINLLGYCLENEPFTRMMVFEFAPHGSLSQHLHVKEFEHLDWAARMRVIMGVAYCLQYMHHELSPPMAIHDVRSDTTFISDDYAAKIADVGVWNELAAKAKAGKEDGSSRAEAPPDLPSNAYCFGALMIETISGRVPDPYDHKPICSWASEHLKDKNYGKLVDASLKEHKESELEAVCEVIQECIDPDPTRRPSMRDVVGKLRDALGISPEAAAPRLSPLWWAELELLSVKST

SEQ ID NO: 54916 - protein, 318 aa, Zea Mays
MSSDDEVREEKELDLSSNDVVTKYKAAAEILNNALKIVVSQCKPKVKIVDLCEKGDSFIREQTGNVYKNAKRKIERGIAFPTCVSVNDTVCHFSPLATDDAVLEENDMVKIDMGCHIDGFIAVVAHTHVITNGPVTGRAGDVLAAANTAAEVAMRLVRPGKKNKDVTEAIQKVAAAYDCKIVEGVLSHQLKQFVIDGNKVVLSVSNADTKVDDAEFEENEVYAIDIVTSTGEGKPKLLDEKQTTIYKRAVDKNYHLKMKASRFIFSEISQKFPIMPFTARALEEKRARLGLVECMNHELLQPYPVLHEKPGVKAHQIH

SEQ ID NO: 54917 - protein, 422 aa, Zea Mays
MSKIMTRNPVYVMSDTLAIEALQKMVQGKFRHLPVVENGEVIAMLDIAKCLYEAIARLEKAAEQGSAIAAAVEGVERQLGGNFSAPSALIETLRERMFKPSLSTIVTENTKVAIVSPTDPVCVAAQKMREFCVNSVVVSTGNTLQGIFTSKDILMRVVSQNISPELTLVEKVMTVNPDCATLETTILDTLHIMHDGKFLHIPVIDKDGQIAACLDVLQLTHATIQLVEGGNGTVNNVANSVMQRFWDSALALEPPDEEFDSHSEVSLLLQSEAGDGKSSVYPPVVGNSFSFKLQDRKGRVHRFTCGSESLDELVSSVRQRLSIADEKEAVQLLYEDDEGDRVLLTTDADLAGALLHAKSSGLKVLKLHIEDPSLNTEVTKPSQELAPPPLKSGISMVHVGLTAGVVALSGAAVMVYLKRSQL

SEQ ID NO: 54918 - protein, 1069 aa, Zea Mays
MNFVLAVAPLLHNDHHYVLGNTSCSLPVTHVPLMDCTAEERGSCCNGRCCYSVVPKCLSSCDFTKHCDVIIDQIGHAAPKDNHQLQMPTRCCTLGENEKLICQCLSNKIAVRNLPQTSHCKDVSEKVMNQPSIAITERLENVSEPSVADDSSSKAVAEKKDAYRDSAVSKGQPNFGFSSGSSSIIVTKFQKSPEFNNVSSTAKHSKHKNLCDEGSRIEKSSASSYVPTSTGCEEPLNSSAKSELGPSRVKRKCNQISEGRRLEETDNEEHCSELLKKTRTLRCSVKGSESDDCTRASSQSSQKGVYQPQNEVNSFSCRVLRTKRKHPIMHLNKHVKQLHRQTKFFEGDEQPDAKGNFLGGLDSYDRKRQVEDMSTLDKTRHHQEGSRAFVRKLPKYVSLNCIVNEPNTNSEGACSGSGGIDSSLIATGITNDNRKSPKIVPLNLVLKKAKRCNAVKLRKTESTHLYEEKSSDCSVNSSDYSIEKYSVDDENCSPQAEYELQDSKRSRYSSNDLRSHVALHKRTSGVIGEDDSLGLTDVEINCLSISSSSNGTKNRRTSVSLARIKKFGSKSVCYSGSDKDNAVLAHEVNARRYSGRLSSNSPCCVCGISDLEPCNRLIECSKCYIKVHQACYGVLKVPRGQWFCRPCKNNTMDTVCVLCGYGGGAMTRALKTKNILKSLLQGLMNLERSEYYVDSLGNASSECTSLQNPVDSAHGDNIMNAKNITSNSWTSGKYYSSLLGPQPMQWVHMVCGLWTPGTKCPNDTTMSAFDVSGASPAKRNTACSICDRTGGSFVKCRAVNCLVFFHAWCAHQRGLLQSEPEGEHNENIGFYGRCVSHAIVFSSHVNPKKEYFRNNNWTCARTEGFKGRKGEGFSDSSHKKYEEYSGEFGVSQEQINAWLRINGSKPCGRGQKEYIHYKQLKGWKHLVVYKSGIHGLGLYTSVFIPRGSMVVEYVGEIVGQRVADRREIEYQSGKRQQYKSACYFFKIDREHIIDATRKGGIARFVNHSCQPNCVAKIISVRNEKKVMFFAERHINPGEEITYDYHFNREDEGQRILCFCRSRYCRRYLN

SEQ ID NO: 54919 - protein, 340 aa, Zea Mays
MAPPAAPTAPHHRTPLFLPRRAAATARAARAASLAVRAQPNTAAASTSAPEPPEKFKPPPGFKVPEPKRFEIKSGQQSSVLGALLAIPLRLGTGVFVLGYSPSLVSPSEIPSDQYALEFGAWKVKEESKIGQCKRPEKPIEIYEFEGCPFCRKVREMVSVLDLDVLFYPCPRKGPTFRPKVLEMGGKKQFPYMVDPNTGVAMYESDDIIKYLADTYGDGSVPIMLSLGLLTAITAGLATLGRIGKGNSYTASRIPPQPIEIWAFEGSPFCRLVRETLVELELPHLLHSCARGSLKRQEVFKKKGVFQAPYIEDPNTGVQMFESAEIIDYLKATYVLYQSS

SEQ ID NO: 54920 - protein, 188 aa, Zea Mays
MATAAHQVAATFLSFLSSSTHHLAPSSVSLGTTSVLPVSLRAAGTRGPRLAYRLRGRRVGAAVAQLPTTHPEVVSGEKKIRWSSRAVRSFAMAELEARKMRYPTTGTEGLLMGILVEGTSGAAKLLRANGITLLKVREEAANVLGKSEMFYFSPMHPPLTEAAQRALDWAVNEKLKSGGQAWYYSHDQ

SEQ ID NO: 54921 - protein, 617 aa, Zea Mays
MTIYACVLHLDRNFVHINGNRVFSVPSTDGWVTTGPGLGWTQGPALQQPAVQAPGSSSVRVLVDFAFPIPNPAGRRLASPSIFRVSSETSSKSIFRYSALRLPRLLRNPIRRPAAMDPAPQTHPILSYVLSRIPNLSMTKTPTAEFDIEQPPVHTPSPRTPSSAGEFELVERMPGLRHPSVLRAMTRAVADVSAARSALQVLGPRPDHELVDSSRAIVAAAEAGDSRIPAGDVEACRAVVRLDETHDAYEALLHEAESRLERVYRSAMEGTDLDDEAAESVKDQGPVAGPEGGDAAVGEEVVAVLKQAEEGKPVDSVRLVDRQLRHLPEAFGRILGLRVLDVSRNQLEVIPDAIGGLGHLEELFLTANDLVSLPDTIGLLSNLKILNVSSNRLRALPDSISKCRSLVELNVSYNGLTYLPTNIGYDLVNLRKLWIHMNKLRSLPSSVCEMRSLYLLDAHFNELCGLPSLFGKLSGLEILNLSSNFSDLKELPPSFGDLLNLRELDLSNNQIHALPDTFGRLDKLEKLNLEQNPLVMPPEDIVNKGVDAVKEYMSKRWLDILLEEEQRRIAAETPEMSSTPKAWLTRSVSWVTDVSESLAGYLGGNKSEKDAYLDQQF

SEQ ID NO: 54922 - protein, 89 aa, Zea Mays
MEFQSNVRRERAKRPDPPCTICKGTGRIDCRNCFGRGRTNHADVAMLPNGEWPQWCRICGGSGLDYCLRCHGTAFITKAMERSKNVTST

SEQ ID NO: 54923 - protein, 68 aa, Zea Mays
MDSGCLTMLGDTAPDRALFFLVRRVEEAVESFRRIQVEDIEPDGMPLLSVLAACRDLGAVSGCMYLKV

SEQ ID NO: 54924 - protein, 582 aa, Zea Mays
MAYLLLHPQFTCSQPPSHRLRGQIHYKTNNMGKNMAKSTVSLLNRSANFASRTSQDAVDGLSDESDGETSTKKKRTPRRGRKKATVETSRDVGEEIEVITEQTAAEETKEVKRRGRKKAATSASSEEEKDKAKEPKKRGRRKVKTVEEPIDNAGEHLSKDLMLYNEREDQTRLQNSASVLESKIASVLHEDIGEVDDLIPLVCCFGPAKYSFIPSGRPANRLIDHEIHDRMKDMFWSPDKFVRAPGGSSSNVALALAAIGGRVAFMGKLGDDDYGQSLLYHLNINGVQTRAVYMDPSAPTAVSLMKVRTEGSLKTNCVKPCAEDCFLPSDINPAVLKEAKMFYYNSSALLEPTTESSLLKAIDVSKKFGGTIFFDLNLPLPLWSSSKETKSLIKEAWEAANIIEVTKQELEFLCSIKPSEKFDTNDNDKSKFTHYSSEVIMKLWHSNLKVLFVTNGTSKIHYYTETHNGWVRGTEDAPITPFTGDMSQSGDAIVAALMRMLVINPHLITDKVYLHKAVKHAIKCGVIDQWVLARERGFLPKERADPTSEQYEVKSITEREYRTLPDAMQSENTSTSELAYVE

SEQ ID NO: 54925 - protein, 626 aa, Zea Mays
MAGKGDGPAIGIDLGTTYSCVGVWQHDRVEIIANDQGNRTTPSYVAFTDSERLIGDAAKNQVAMNPINTVFDAKRLIGRRFSDASVQSDIKLWPFKVISGPGEKPMIVVQHKGEEKQFAAEEISSMVLIKMREIAEAYLGSTIKNAVVTVPAYFNDSQRQATKDAGVIAGLNVLRIINEPTAAAIAYGLDKKATSVGEKNVLIFDLGGGTFDVSLLTIEEGIFEVKATAGDTHLGGEDFDNRMVNHFVQEFKRKNKKDITGNPRALRRLRTACERAKRTLSSTAQTTIEIDSLYEGIDFYSTITRARFEELNMDLFRKCMEPVEKCLRDAKMLQDFFNGKELCKNINPDEAVAYGAAVQAAILSGEGNEKVQDLLLLDVTPLSLGLETAGGVMTVLIPRNTTIPTKKEQVFSTYSDNQPGVLIQVYEGERTRTRDNNLLGKFELSGIPPAPRGVPQITVCFDIDANGILNVSAEDKTTGQKNKITITNDKGRLSKEEIEKMVQDAEKYKSEDEEHKKKVEAKNSLENYSYNMRNTIKDEKIASKLPADDKKKIEDAIDAAISWLDANQLAEADEFEDKMKELESLCNPIIAKMYQGAGEDMGGAGGMDEDAPAGSGGPGPKIEEVD

SEQ ID NO: 54926 - protein, 56 aa, Zea Mays
MFSTPAIFVKAVTDIVDGVKPTYEEFLQNLIAVTTALELAVTKVVDFISGKRISDL

SEQ ID NO: 54927 - protein, 209 aa, Zea Mays
MAVCWAVKMGPVSDSSSHVGCDRIQQKSRRGKGRLLYIPSRLQSASIYPAVSGRRVRVDLSVEGMKITALLVLKPSTSGAGSSSSGGQSGPEAVVLANATDVSHFGYFQRSAAREFIVFVARTVAQRTQPGQRQSVQHEEYKVHSHNRNGLCAVAFMDDHYPVRSAFSLLNQVLDEYQKAFGDSWKSATADGTQQWAFLTDALARFQHK

SEQ ID NO: 54928 - protein, 144 aa, Zea Mays
MSNEMYSTIARVTDGIYEGIAIGGDVFPGSTLSDHILRFNNIPQVKMMVVLGELGGKDEYSLVEALKQGKVEKPVVAWVSGTCARLFKSEVQFGHAGAKSGGELESAQAKNQALREAGAVVPTSYEALESAIKEVFDKLVLRLK

SEQ ID NO: 54929 - protein, 1372 aa, Zea Mays
MLHLQVHCVYESGADLMGPLLPAVADICSDFDPVSTVEPSLLKLFRNLWFYVVLFGLAPPIQNNEAPTKPVSTSLGTAESSSAIALQAVAGPYMWNSQWSVAVQRIAQGTPPLVVSSVKWLEDELELNTLHNPGSRGGNGNENSAVGQRAALSAALGGRVEVAAMNTISGVKATYLLAVAFLEILRFSCNGGILSATSTLNRSNSAFSCVFEYLLTPNLTPAVTQCLTAVAHRAFETVLSWLDDRISDIGEGADVRESVLSVHACFLIKSMSQRDEHVRDVSVKLLTQLKEKFPQVLWNSSCLDLLLISVHNELTSGPVSDPAWVATVRSLYQKIAREWLTSALSYAPCTTQGLIQENFCKPSGVQRTQHTADVVSLLSEIRICSGKNDWNGIRTANVPAVMDSAAAASGAKKEAPDFTLEVLSTAVVSATVKCNHAGEIAGMRRLFSTMGGINMGMSPPGTQSLHPHQSFDEVFVSKFVSLLQNFVVAAEKQPIDNSQFRETCSQATALLLDHMVSDSRANLEGFSQLIRLLCWCPAYISTPDAMETGIYIWTWLVSAAPSLGPLVLAELVDAWLWTIDTKRGLFASDMNYCGPDAKLRPHLIAGEPEAPPEKDPVEAIIAHRLWLGFFIDRFEVVRHDSIEQLLLLGRMLQGTMKSPAHFSHHPAATGTFFTAMLLGLKFCSCQSQSNLQKCNMGLQLLEDRVYRAALGWFSYAPEWYESPNKTYAQREAQSVSVFVHFLQNERTSGPVDSVSKLQGREGEPSMADHIHPVWGCVDNYTNAREKRKQLLLTLSQNEADRLEVWAQPIHTKDTTTFRGKISSDKWIDHVRTAFAVDPRIALSMPLRFPTNATMQSEITQLVQTRLLELRTIPEALPFFITPKAVDENSVLLQQLPHWAPCSVTQALEFLTPPYKGHPRVMAYVLRVLETYPPETVTFFMPQLVQSLRYDEGKLVEGYLLGATRRSNIFAHILIWHLQGEYVDESEKDAAALKGSAFQSLLPAVKDKIIESFTPEARDMFEREFDFFDKVTSISGVLFPLPKDERRAGIRRELEKISIPGDDLYLPTATNKLVRGIQLDSGIPLQSAAKVPIMITFNVVDRDGDPNDVKPQACIFKVGDDCRQDVLALQVIALLRDVFQAVGLNLYLFPYGVLPTGPGRGIIEVVPDTRSRNQMGETTDGGLLEIFQQDYGPVGSPSFETAREMFMISSAGYAVASLLLQPKDRHNGNLLFDSHGRLVHIDFGFILEISPGGNMGFESAHFKLSHEMTQLLDPSGTMKSDTWNQFLRLCVKGYLAARRHMNGILSTVNLMVDSGLPCFSRGDPINNLRKRFHPEMNEREAANFMVRTCADAYNKWTTAGYDLIQYLQQGIEK

SEQ ID NO: 54930 - protein, 884 aa, Zea Mays
MTVWYDLLQWRNEMYNSVIDAFKDFGQTNPQLHHLGYRDKAWNVNKLAHIARKQGLPEVCVTILDKMYGHATMEVQEAFVKICEQAKAYLEMKGELVSGLNLINNTNLEFFPVKNKAEIFRLRGDFLLKMNECETANQSYSNAITLFKHLPKGWISWGNYCDMVFKETKDEVWLEYAVSCFFQGIKYGVSNSRSHLARILYLLSFDGQNEPVGRALDKYLEQLPHWVWLSWIPQLLLSLQRSEAQHCKLVLMKIAQVYPQALYYWLRTYLMERRDVATKTEIGRNMLAQQRMQQAMMANNAANNLPDGSARASNHAGSNMTSDNQSHQASQSVGAAGSHDGGNVQGQDPERSTPEGGTNTSHDQGQQSSTGAEGSQVPLRRNSGHGWVTSAASAFDAAKDIMEALRSKHTNLANELELLLSEIGSRFVTLPEERLLAVVNALLHRCYKYPTATTGEVPQSLKKELSGVCRACFSQDAVNKHVDFVKEYKQDFERDLDPESATTFPATLAELTERLKHWKNILQSNVEDRFPAVLKLEEESKTLRDFHVVDIELPGQYFTDQEIAPDHTVKLDRVGPDIPIVRRHGSSFRRLTLIGSDGSQRHFIVQTSLTPNARSDERMLQLFRVLNKMFDKHKESRRRHLAIHTPIIIPVWSQLNQAVSGQLSPEAIVELRLQAYNEITKNIVNDNIFSQYMHKILPTGNYLWTFKKQFAIQVALSCFMSYMLQIGGRAPNKILFAKNTGKIFQTDFHPAYDPNGMIEFNELVPFRLTRNLQAFFSNFGVEGLIVSAMCSAAQSVVSPKQSQHIWHHLAMFFRDELLSWSWRRPLGIPSVPVAAGMINPSDFQQKVVNNVEHVISRIKSISPHCLAEEEVFLGGINIVSLWCF

SEQ ID NO: 54931 - protein, 449 aa, Zea Mays
MCDLFVSKYFPCIFFPNQAADIIAVSTSLLDTLPAVTTPTERADDDDETPMDVDIKINLDVDLERQITAAIDPKLLQHLVNALFRGTLSINDSDLSEPSDAEVDAVGCICAFLHVTFNTFPLERIMTVLAYRTEIVPALWNFIKRCHANRRWPFFSKFASSLPADAPGWLLPMSVFCPIYKHMLKIIDNGEFYEQEKPLSLKDLKSLVLILKQALWQLLWIIPSSSTQKVSSNPSGLKKLSVENVKIRARVGLSELLTQLQDWNNRLPFTSASDFYSQEATSENFVSQAILGNTRASEIIKLAPFLAPFTSRVKIFTSQLTSSRQSISHSALTRQRFKIRRNRLLEDAFDQLSLLSEEDLKGPIRVSFINEHGEEEAGIDGGGIFKDFMENITRAAFDVQYGLFKETADHLLYPNPGSGLVHELHLQYFNFLGSLLGKLLLHFFVLGAA

SEQ ID NO: 54932 - protein, 980 aa, Zea Mays
MKLRDRLRNEEIAAGSFLCGVKDCLLICPQSLSNIDYRRNMCAHARILALEEAIDTEWVYMWDKFGGYLLLLLGLTAKAEQIQDEVRLRLFLDSIGLSDLSAKEIKKWMPEDRRQFELIQESYIREKEMEEEALMQRREEEGKGRERRRALLEREERKWKELEISLLSSIPNTGSRDAAAMAAAVRAVGGDSALEDSFARDRVSSIANHIRKAQLARRAEQTGIPGTICILDDEPRSTGRHCGELDLCLCQSQKVTLSIAVMVQPVSGPVCLFGSEFQKVCWEILVAGSEQGMEAGQVGLRLVTKGERMTTVAKEWNIGASSIADGRWHLVTVTLDADLGEATSFIDGVYDGYQNGLPLPTDNGIWEPGTDIWVGARPPMDLDAFGRSDSEGSDSKMQIMDAFLWGRCLSEDEVTVLHTAMSPAEYGFFDLAPGDAWHGSYSARVDDWESEEAYELYDQGDVEWDGQYSSGRKRPVHDAVAIDLDSFARRPRKPRFETRDEVNQRMLSVERAVRDALIAKGERNFTDQEFPPEDRSLFVDPMNPPLKLQVVSEWMRPSDIAKDISISCQPCLFSGSVNSSDVCQGRLGDCWFLSAVAVLTEMSRISEVIITPEYNDEGIYTVRFCIQGEWVAVVVDDWIPCESPGKPAFATSRKQNELWVSILEKAYAKLHGSYEALEGGLVQDALVDLTGGAGEEIDMRSPQAQLDLASGRLWSQLLHFKQEGFLLGAGSPSGSDAHISSSGIVQGHAYSILQVREVDGHKLIQIRNPWANEVEWNGPWSDSSPEWTERMKHKLMHVPQSKNGVFWMSWQDFQIHFRSIYVCRVYPPEMRYSVHGQWRGYNAGGCQDYDSWHQNPQYRLRVTGRDALYPVHVFITLTQGVGFSRKTNGFRNYQSSHDSSMFYIGMRILKTQGCRAAYNIYMHESAGGTDYVNSREISCELVLDPYPKGYTIVPTTIHPGEEAPFVLSVFSKASIRLEAV

SEQ ID NO: 54933 - protein, 1105 aa, Zea Mays
MRGARPGVLPIYPQECRQARISYHGEFKVEVCFQYNEGAQIRHTFNFGHLPIMLMSKLCHLRGADPHKLVFHGEEATEMGGYFICGGMERLVRILVLQKRNYPMGLVRNSFLKRGAGYTDKAVVIRCVQRDQSSVTIKLYYILNGSARLGFWLGGREFLLPVGIVLKALIDASDREIFTSLTCCYSDKHGRGKGVVSTQLIGERAQIVLDEVRNLSILTRTQCLVHIGQYFRSVMEGFENDDYITVAEAVLKDYIFVHLENNHDKFNLLIFMLQKLYALVDQTASPDNPDALQYQEALLPGHLFTVFLKDRLQEWLRKSKRLILEEAAKNKGFDLGNALEIRKFLTKYTTSVGRAVESMIKVGNVNSRSGLDLPQREGMTIHAERLNFHRYISHFRSVHRGSAFAKMRTTSVRKLLPESWGFLCPVHTPDGEPCGLLNHMTSTCRVSSFYNSEGVIKNFGEMKKLLSAELVRVGMNPVLPKIEQTGPPEVLHVHLDGCILGTIASAMIEKAVNYLRTLKLLAHSGIPEDLEVGYVPPSFNGAFPGLYLFTNPARFVRPVRNLFILSDGKQSIELIGPFEQAFMEIRCPDGGDGGRQEPFPATHEEIHPTAILSVVANLTPWSDHNQSPRNMYQCQMAKQTMGFCGQALKFRTDVKAFHLQTPQTPIVRTGTYTKYCMDEFPSGTNAIVAVLSYTGYDMEDAMILNKSAVERGMFRGHIYQTECIDLSTKSRDNVPETFAKSILTRDTSNVIDSDGLPRLGQAVHPNEQYYSVHNSLTNVIRPVKLKGTEPAFIDYVAVNGTGSKCGLQKANIRLRRVRNPIIGDKFSSRHGQKGVCSQLWPDIDMPFSANTGMRPDLIINPHAFPSRMTIAMLLESMAAKAGSLHGKFIDATPFANSLKKDKDSDKPNSIVDELGPMLASYGFNYHGNEVLYSGVFGTEMDCEIFIGPVYYQRLRHMVSDKFQVRTTGRIDQITRQPIGGRKHGGGIRFGEMERDALLAHGSSYLLHDRLHSCSDYHIADVCSFCGSLLTATMIKSDTQKKVKHEMLGLPTVRPAKNFACQACKTSKGMETVAMPYVFRYLAAELAAMNIKLELRLSNKSGLPLS

SEQ ID NO: 54934 - protein, 329 aa, Zea Mays
MKVVPLKARGEPVVVSLSLSQIDGLSSIRMYIPKDLIPVEVRENTLRKVEEVLLRFAKDGVPLLDPEEDMKVQSKSFRKATRRIEALESLFEKHDIRNSPHIQQKLKVFHAKQELSAKIKSIKKTMRSSTALAFKDELKARKRVLRRLGYVTSDDVVEVKGKVACEISSADELTLTELMFSGALKDATVEQVVALLSCFVWQEKLQDAPKPREELDLLFYQLQETARRVANLQLECKIQIDVESFVNSFRPDIMEAVYSWARGSKFYQIMEMTQVFEGSLIRAIRRLEEVLQQLILASKSIGETELEAKLEEAVNKIKRDIVFAASLYL

SEQ ID NO: 54935 - protein, 426 aa, Zea Mays
MPFIEALGQFSYRVGPGNFCLVHVSLVPVLNVVGEQKTKPTQHSVRGLRGLGLAPDVLACRSTEPLEEHVKAKLSQFCHVPDQKAHEAILKVLDLQYDGKVPREPELTKWTKRATKFDKLKTPVKIAMVGKYTGLSDSYLSVIKALLHASVAMERKLVVEWVPSCDLEDSSAKETPEAHKKAWKLLKGADGVLVPGGFGDRGVQGKILAAKYARENNVPYLGICLGMQIAVIEFARSVMKLRGANSTEFDPATTSPCVIFMPEGSKTQMGATMRLGSRRTYFHVSGCKSAKLYGNASSVDERHRHRYEVNPDMVPDFEKAGLQFVGKDESGKRMGIVELPSHKFFIGAQFHPEFKSRPGKPSPLFLGLIAAASGQLEPLLQRSNPTTKACSISKVPKLKLYPTGPVNNPLNSLVNGYYPNGTGIHT

SEQ ID NO: 54936 - protein, 97 aa, Zea Mays
MAKRRRHELAPVVEELISPMNSLDDGCLMHIFSFLSPIPDGASLHATLGYGCVSRGQSEMRWSLEFIQISRLLFLLLGRVTPFLLRLVVPMLHVTSK

SEQ ID NO: 54937 - protein, 419 aa, Zea Mays
MFVIEDKGGAIALMLASLLFLGTWPAVLTLLERRGRLPQHTYLDYSITNLLAAVLIALTFGQLGDSRRGMPNFFTQLGQDNWPSVLFAMAGGVVLSVGNLSTQYAWAYVGLSVTEVISSSMVVVIGTTLNYFLDNRINRAEILFPGVACFLVAVILGSAVHSSNAADNEQKLGASTNAYKLGTSGNVEPSKQAVDREERTNLISDAPKDLEESGASGIRQPDKAEAGTAEYLIELEERRSIKVFGSNTFIGLGIVFFAGVCFSLFSPAFNLATNDQWHTLRDGVPHLVVYTAFFYFSISCFVVGVGLNVLFLYRPMAGVPRSSLGAYLRDWDGRQWALLAGLLCGFGNGFQFMGGQAAGYAAADAVQALPLVSTFWGVLLFGEYRKSSRKTYVLLGFMLFMFVAAVAVLMASSGHRSTE

SEQ ID NO: 54938 - protein, 390 aa, Zea Mays
MGSVPEEKAKLGFGGLVGDLREVYESGRTQGLEWRQSQLRGLVRLLEEKEEEIFDVLHEDLGKHRGEAFRDEVGVLKKSVVDKLQNLKNWAAPEKAHTPLVAFPATALVVPEPLGVVLVFSCWNLPIGLALEPLSGALAAGNAVVVKPSELAPATSAFLAANIPKYLDSKAVKVVEGGPEVGEKLMEHRWDKVLFTGSCESHHRSEMVHLFRPSLHRHRLPAGGGGVCSDSDRDAQVDAGEVLHQARVHGAHPEREAVPEAERLPGRPQGGVFRGPRRPLQPQDAEHGAHASAQPSARLRHHDGGDIRPAAPDHHGEEDRRQHQVPQVQAQAAGDLRLHQEREAEATHHRRDVVGEHHVQRRHRAVWPGQHPVRWRGAQRVRPVPRQVLV

SEQ ID NO: 54939 - protein, 630 aa, Zea Mays
MVQYNFKKITVVPPGKDFIDIILSRTQRQTPTVVHKGYAISRIRQFYMRKDHYKLALGQINTARNIIAKISKDYLRLLKYGDSLYRCKCLKVAALGRMCTVVKRISPSLAYLEQIRQHMARLPSIDPNTRTVLICGYPNVGKSSFMNKVTRADVDVQPYAFTTKSLFVGHTDYKYLRYQVIDTPGILDRPFEDRNIIEMCSITALAHLRAAVLFFLDISGSCGYSIAQQAALFHSIKSLFMNKPLVIVCNKTDLQPLEGLSEDDMKLVMEMKAEAMKTITQAVGPNEEGVLLTMSTLTDDGVMAVKNAACERLLEQRVDVKMKSKKMMDCLNRFHVAVPKPRDNKERPVCIPPAVLEARANAAAKEKKKLEKDIENENGGAGVYSASLKKHYILANDEWKEDILPEILDGHNVADFLDPDILVRCEELEREEGLRLEEQAAEDAFQIDGHELTQEQKEILAQIRKKKALLIQEHRMKKRTAESRPIVPRKFDKDRKFTTNRMGRQLSSMGVDPIAAINRARSQSRGRKRERSVSRAAADGDGMEIDGQQSNKKLRRTSRSRSRSRAPEEVIPGEGFKDSEQKKKAIKKAKASTRNRNKDARRGEADRVIPTLKPKHLFSGKRTLGKTSRR

SEQ ID NO: 54940 - protein, 556 aa, Zea Mays
MPATVFASPSIAASPSPSLSPWSPRPPPRRVHVRVRVRPPPPRSGSSGGDEPSTATPWASPDWLTSLSRAVGRSGGDDSGIPVASAKLDDVRDLLGGALFLPLFKWFREEGPVYRLAAGPQDFVIVSDPAVARHVLRGYGSRYAKGLVAEVSEFLFGSGFAIAEGDLWTVRRRAVVPSLHKRFLSIIVDKVFCKCAERLIDKLEPYALSGEPVNMEARFSQLTLDVIGLSLFNYNFDSLTTDSPVIDAVYTALKEAELRSTDLLPYWKVGFLCKIIPRQIKAENAVMIIRNTVEELIMKCKEIVEAENEQIEGEEYVNEGDPSILRFLLASRDEVSSVQLRDDLLSMLVAGHETTGSVLTWTIYLLSKDPTALRRAQDEVDRVLQGRLPKYEDVKELKYLMRCINESMRLYPHPPVLLRRAIVDDVLPGNYKVKAGQDIMISVYNIHRSPEVWDRADEFIPERFDLEGPVPNESNTDFRFIPFSGGPRKCVGDQFALLEAIVALAVVLQKMDMQLVPDQKINMTTGATIHTTSGLYMNVSLRKVQQEAELALSESK

SEQ ID NO: 54941 - protein, 78 aa, Zea Mays
MVACYGESVTNTAGARVVMFLDQGRQNFEQQRREHPDVVTSDLPSIAFLEKAASGNKYEITEFVDEPSFYLAVLQFQG

SEQ ID NO: 54942 - protein, 336 aa, Zea Mays
MPSRELLAAAAEMTEALRCRDAELEANDDLLIGPPPPAVVAEAASANEAERFEEVTRILAADTNSPYEVLGVNWKMSTDNMKKRYWKLSLLVHPDKCPHPSAQEAFVKLNNAFKDLQDPDKRGAIDEKIKKKEEMEQFEVELKAMREAAEWRRIQGVSLAGDDELLAGPKESQRPTRDEWMTTLPPERKAGVPMHSTTSFSMNGKEGRGDTSVWTDTPLDRAQKAQQSYLEAYNKTKAIAEGDDVKSKNPDASIVDKYNTSKRSVSLVQKHRESKKEKKKQKQQEKEEWEGSHPWKPWDREKDLSAGRQNVALDAENMSQGLSSRFASGAVQRNFL

SEQ ID NO: 54943 - protein, 292 aa, Zea Mays
MIDFPKQRIVVAGAGSAGIGVVNAASRTMARMLGNNDVAFESARSQFWIVDAHGLITEDREDIDPDARPFARRKSELGHQGLSEGASLVEVVKKVKPDVILGLSAVGGLFSKEVLEALKDSSSSRPAIFAMSNPTKNAECTPGEAFSILGEKVIFASGSPFHDVDLGDGKIGHSNQGNNMYLFPGIGLGTLLSGARVISDGMLQAAAERLASYMKEEEVLEGIIYPPISRIRDITKEVAAAVVREAVAEDLAEGYRDMDARELARLSEEETNEYVKTNMWSPVYPTIIYKKD

SEQ ID NO: 54944 - protein, 57 aa, Zea Mays
MKAVEKLISGTEIDLTELERRANQPQILKHYKIPPQELSISTLPDAIVCRIAARDAL

SEQ ID NO: 54945 - protein, 454 aa, Zea Mays
MIVTSGGLNQQRTGIIDAVVAARILNATLVVPKLDQASFWKDSSNFSDIFYADWFISSLSKDVKIVKELPHIGGKLRAPHRMRVPRKCTERCYLNRVLPALLKKHVIRLTKFDYRLANRLQTDLQKLRCRVNYHALRFTAPIQEMGEKLIQRMRERSMYFIALHLRFEPDMLAFSGCYYGGGEKERRELGAIRKRWKGLHPNPEKGRRQGRCPLTPEEVGLMLRALGYRKDVHIYVASGEIYGGARTLAPLKALFPNLHTKETISSKEELAPFSKYSSRMAALDFIVCDESDAFVANNNGNMAKILAGRRRYFGHKRTIRPNAKRLYPLFLNRGNMSWDAFSSKVHMVQKGFMGEPKELRPGRGEFHENPSTCICERTDGKAVARAKSQDDQVLNSVADQGKGIGEPAVPNHTDEEAGEPDDDEDVPADKEVVDAEMVDDVLAGDPELEQILSD

SEQ ID NO: 54946 - protein, 136 aa, Zea Mays
MGLNLLEVLELQLPSFFSDFDPRAAAANLPSGVQAYLAGLTFALAASPCSTPVLATLLGYVATSRDPIIGGSLLLTYTTGYVAPLLIAASFAGALQSLLSFRRYSAWINPISGAFLLGGGVYTLLDRVFPATSMVM

SEQ ID NO: 54947 - protein, 345 aa, Zea Mays
MLAMKMMVTLGRVRRASQRAEGYDNLKGNENRRSEEVMPRKTVKRIEEEVEDQEDSGGSGDDNGDGHDEEEEAAILDKELKKEKLKNAAALKELQEKAEQKLQDELQRKDEETSQQIEKAQEIAKAELAAAVAKEKASQIEQIAEANLNIDALCMAFYARSEETRQSHSVHKLALGTLALEHALSSGSPIRSEVELLRKSVEGIDKDSLLELALSSLPEDVLDYGSDTMMGLKQKFNSLKETIRHFSLLPAGGGGILAHTVARVASSIKIKGDNSGDGIESLINKVERLIVDGDLITAADALEQGLHGTEAEEIATEWVKQARKRAIAEQTLALLQACASSTTFS

SEQ ID NO: 54948 - protein, 121 aa, Zea Mays
MNRPMKIESDGNLDPKKGGVGLDSPKTTGLTSVKQWDDWDIVGLPGAELLSASEKLLCCQNRLLPSHYLRMQEVLMQEIFKGSVLKKEDAHVLFKVDPTKVDSVYDMVTKKLGNHVELPTV

SEQ ID NO: 54949 - protein, 213 aa, Zea Mays
MDNAEVRSVVFVLRRNVQLVEPEIIQHVLLDMPGLAFFTTYALLVLFWAEIYYQARAMSTDGLRPTFYWINGVVYAIQIILWLVLWWKPVRVMVILPKMFFAGVSLFAALGFVLYGGRLFLMLQRFPVDSKGRRKKLQEVGYVTTICFSCFLIRCVMLCLNSFDKEADLDVLNHPILNFLYYLLVEIVPSALVLFILRKLPPKRGITQYHPIH

SEQ ID NO: 54950 - protein, 244 aa, Zea Mays
MAGIRLTPEEPEMPVGTPPRPQLPPFVAAAGGGGGGLEMASDDERSIAADSWSVRSEYGSTLDDDQRYADAAEVLAASASSANFPSAASDYCSDKDDQDPGDVEGSMLGLQSYWDASYLEDLANFQEHGHTGEIWFGADVMDTVAVWTKSLCNIIEGKIPSGQDNIKSEVNENLFSNYPVLDVGTGNGLLLQALAKQGFTDLTGTDYSKGAVELARNLAARDGFSSINFLDLIIWLCTLQHTSS

SEQ ID NO: 54951 - protein, 169 aa, Zea Mays
MDHHCIWINNCVGHENYKIFLVFVLYAVVASFYALILIVGSVLHSVPKDEQPGSDSSRTSIIICGVILSPLALALAVLLGWHIYLILQNKTTIEYHEGVRAMWLAEKGGDLYHHPYDLGVYENLISVLGPNIFCWLCPVLNTVGNGLRYRTSYDIPVSTPPKKIAAHSQ

SEQ ID NO: 54952 - protein, 120 aa, Zea Mays
MTLEFVTALLLRVSRKSSLNKMDSRSLAVEFAPLIMWRQGDTGTDLRNHLKFTLKPPPKIVDTTSNAATWDLLDEDDEDASSQIPLDDASPPDYSSIEVIQCLIEHHNAIFTDANETVWR

SEQ ID NO: 54953 - protein, 389 aa, Zea Mays
MSSSMESSYLPATTESLAQAQEAKDASESISILYRVIQDPSSSADALRTKEVAITNLTNYLTKENRAEELRNLLTQLRPFFAVIPKAKTAKIVRGIIDAVAKIPGTSDLQISLCKEMVEWTRAEKRTFLRQRVEARLAALLLENQEYTEALTLLTSLIKEVRRLDDKLLLVDIDLLESKLHFSLRNLPKAKASLTAARTAANAIYVPPAQQGTIDLQSGILHAEEKDYKTAYSYFFEAFEAFSALEDPKAIFSLKYMLLCKIMVNQADDVAGIISSKAGLKYLGPDVDAMKAVADAYSKRSLKYFETALRDYKSQLEEDPIVHRHLSSLYDTLLEQNLCRLIEPYSRVEIAHIAEMIELPIDHVEKKLSQMIVDKKFAGTLDQGWRLHI

SEQ ID NO: 54954 - protein, 649 aa, Zea Mays
MKANMGTKARPPSADAEKGEIGEIDTRAPIQSVKAAVSLFGEVRFSSDKSAERKPKAPQTERVLAKETELHMAQKELNKYKEQLSNAETTRVQALSELEKAKKTVEELTAKLDLINKSKQLAIQATEDAKTQIKQLEGGSTSEGLGTDGALKQELESAREQYAVALADLDAAKQELRKLKKDFETSLDMRLSAAQQEEESLHTTEANIEKANQLRSEIAEIQESLMHVKAATVQAHEEEAQILAEKDVARTTYKQALEETQKKLLSLRNDFDPAAYDSLKQKLEQTNSEIASMQKKIEEARARDLESVAVVSTELDDAKEMLQKVAEEKSSLRSLVESLKVELEAVKQEHNQLKEKDTETESIVGDLHVKLQKCKSELEAAVAAESKAMSASDDLMLALQQLSSESKNALQEAEMMEKSAAELREEGEKARVELAEAEQKMQLALKEAEEAKAAEARALDQIKQLSDRASAARSSTSESGAIITISKEEFVSLSRKVEESEKLSDMKVAAAMAQVEAIRASENEAIKKLETARKEMEDMELATEEALKRAEMAEAAKKAVEGELKRWREKEKKTAEAQPSAGAEELGSGSPPVPQTSAGKASEKNDGHRNSRTLLRRSFMLPNITSMFHKKKNQPGSSSPSYLPGEKSV

SEQ ID NO: 54955 - protein, 92 aa, Zea Mays
MVRDGNLIVNGVVQEEEFVLEPADYEMDPLTVPEGYVFVLGDNRNNSFDSHNWGPLPVKNILGRSVLRYWPPSRITDTIYQHDMVQHTAVAS

SEQ ID NO: 54956 - protein, 244 aa, Zea Mays
MTEDRAHKVADEPAASGRQRPERKKRKWDQPAEDLVSAAVTAAAVSGMPVMNFGALPGVVLPGVTAYGAATLPSVVPVPYSLPPHIAPSVLQNAAAAAQKLSQAKIPDEVIAREIVINDADPSVRYKLTKRQTQEEIQKCTNTVIITRGKYHPPNLLPDGEKPLYLHISAGSQLKDTAERIKAVDRAASMIEEILKQGTTSESISVPFSSSTGQAVRPFSASVFLGFDADPSLNITARIRGPNV

SEQ ID NO: 54957 - protein, 308 aa, Zea Mays
MVELISSLDKTKLYVVGAGMFSGVTVALYPVSVVKTRMQVASGDAMGRNALATFKNILKVDGVPGLYRGFPTVIIGAVPTRIIFLTALETTKAASLKLVEPFKLSEPVQAAFANGLAGLSASTCSQAIFVPIDVISQKLMVQGYSGNVRYKGGIDVARKVIKADGIRGLYRGFGLSVMTYAPSSAVWWASYGSSQRIIWSALGHLHNKEEAPSQLKIVGVQASGGIFAGAVTSFVTTPIDTIKTRLQVMDNENKPKAGEVVKRLIAEDGWKGLYRGLGPRFFSSSAWGTSMIVCYEYLKRLCAKVEEV

SEQ ID NO: 54958 - protein, 107 aa, Zea Mays
MAGGGVVKHILLASFKEEVTQERLDELIRGYAALVGVVPSMKAFHWGTDVSIENMHQGFTHVFESTFESTEGIKEYIEHPAHVEFASVFLPVLEKVLIIDYKPTSAN

SEQ ID NO: 54959 - protein, 206 aa, Zea Mays
MEAEVGPPNPPRPEPAGSEPDDARLSPPPPAPAPPPPPPPPPAAEAAAAPTASAAFSLQAPAPAPAEANGSSDRKRRRKAEDGDGCKTCSCKKSRCLKLYCVCFASGLHCTESCGCEPCHNKPQLQGTLRMATVLPLKPVQTFEAGQDIVEQVIRSPMDLIRRKCTCKKSGCLKKYCDCYQGGAGCSINCKCDDCRNPFGRKDDGL

SEQ ID NO: 54960 - protein, 209 aa, Zea Mays
MTFIPLPWEARIKIMKGVAKGMSVLHEFSPKKYVHGDLRPNNVLLGTNMEPFISDFGLGRLANIAGASPFLQSDQVELEKEQIQQIDASVSPLMSKGSCYQAPEALKTLKPSQKWDVYSYGVVLLEMITGRSPSVLLETMQMDLVQWVQFCIEDKKPSADVLDPFLAQDSEQEGEMIAVLKVALACVQANPERRPSMRHVAETLERLNG

SEQ ID NO: 54961 - protein, 362 aa, Zea Mays
MGIYEKGFERPSPIQEESIPIALTGSDILARAKNGTGKTAAFCIPALEKIDQEKNAIQVVILVPTRELALQTSQVCKELGKHLKIQVMVTTGGTSLKDDIVRLYQPVHLIVGTPGRILDLTKKGVCILKDCSMLIMDEADKLLSPEFQPSIEQLIRYLPASRQILMFSATFPVTVKEFKDKYLPKPYVINLMDELTLKGITQFYAFVEERQKVHCLNTLFSKLQINQSIIFCNSVNRVELLAKKITELGYSCFYIHAKMLQDHRNRVFHDFRNGACRNLVCTDLFTRGIDIQAVNVVINFDFPKNSETYLHRVGRSGRFGHLGLAVNLITYEDRFNLYRIEQELGTEIKPIPPQIDQAIYCQ

SEQ ID NO: 54962 - protein, 332 aa, Zea Mays
MASNLLSAVAIEKETPESELPPTFLREDGRGAGSVRARFESMIRRVQGEVCAALEEADGGGARFVEDVWSRPGGGGGISRVLQDGRVFEKAGVNVSVVYGVMPPDAYRAAKGEAGKNEVAADGHKPGPVPFFAAGISSVLHPKNPFAPTLHFNYRYFETDAPKDAPGAPRQWWFGGGTDLTPSYIIEEDVKHFHSVQKQACDKFDPSFHPRFKKWCDDYFYIKHRNERRGLGGIFFDDLNDYDQEMLLNFATKCADSVLPAYIPIIERRKDTPFNEEHKEWQQLRRGRYVEFNLVYDRGTTFGLKTGGRIESILVSLPLTARWQYDHVKNKY

SEQ ID NO: 54963 - protein, 256 aa, Zea Mays
MGGGSVQMAYAVSANAAASAPAPTHGEDPYVTREYLKGKDYNIYTHSYLHYGAFASRAEILKAKDGPFSSCMLRGFIGQYTYNEEQYDATAAPEGAVYGKCREEIGRALNLNAPCEMKNCTFNGIWNGGGGAGQGSIYVASSFYFVASEVGIVDGNAPSGNTTPGAFGASAEKACQMSVEEAKIEYPNVNDVDVPYLCMDLAYQYTLLVDGFGVERTKEITVVDKVKHGEYYVEAAWPLGSAIEAVSSTKEWRQDK

SEQ ID NO: 54964 - protein, 298 aa, Zea Mays
MAAPASTTAAAAAALLLLLLLSLAAAADMSIVSYGERSDEEARRMYAEWMAAHGRTYNAVGEEERRYQVFRDNLRYIDAHNAAADAGVHSFRLGLNRFADLTNDEYRATYLGARTRPQRERKLGARYHAADNEDLPESVDWRAKGAVAEVKDQGSCGSCWAFSTIAAVEGINQIVTGDLISLSEQELVDCDTSYNQGCNGGLMDYAFEFIINNGGIDTEKDYPYKGTDGRCDVNRKNAKVVTIDSYEDVPANDEKSLQKAVANQPVSVAIEAAGTAFQLYSSVIGAHLAAGFICGPFG

SEQ ID NO: 54965 - protein, 650 aa, Zea Mays
MDDVCEGKDFSFPEQEERVLELWAKLDAFHEQLRRTEGGEEFVFYDGPPFATGLPHYGHILAGTIKDVVTRHQSMRGRHVSRRFGWDCHGLPVEFEIDKLLGITNRQQVFDLGIGKYNETCRSIVTKYVSEWEAMVTRTGRWIDFKNDYKTMDLNFMESVWWVFAQLWEKDLVYKGFKVMPYSTGCKTALSNFEAALDYRTVPDPAVMVSFPIVGDMDNAAFVAWTTTPWTLPSNLALCINANLMYAKVRDKSNGKVYVIAESRLGQLPVKAKASGKKQAPSKGSNAEAAQDGLDKESYELLVKIPGPYLVGLKYTPLFDFFIELQETAFRVIADNYVTDDSGTGVVHCAPAFGEDDHRVCLAAGIFETAGLVVAVDDDGCFIEKISDFKGRYVKEADKDIISAVKDKGRLVSKGSIEHSYPFCWRSGTPLIYRAVPSWFVKVEKIKDQLLECNKETYWVPDYVKEKRFHNWLEGARDWAISRSRFWGTPLPLWMSQDRKEIVVMDSIEKLEKLSGVKVTDLHRHYVDDITIPSKRGPKFGTLKRVDDVFDCWFESGSMPYAYIHYPFENRELFEKNFPGNFVAEGLDQTRGWFYTLMVLSTALFGKPAFKNLICNGLVLAEDGKKMSKSKKNYPSPKDLIDEFGAFVLF

SEQ ID NO: 54966 - protein, 74 aa, Zea Mays
MKHGTSEEMAICRPCCMHLSFGYILLLDSARASAMCTFYMLKGQHKKVLGWRSLDPLLTCHVFKCRRDAYHFIE

SEQ ID NO: 54967 - protein, 177 aa, Zea Mays
MDMQFPNGQLRYVAGDGFTARAFLPLRGGVLQAHGKFPGEKRLSFSFKNRNGGSVVPMVQWPDKSLSVGVVQALSWRRSGLMLQPATQISICPTIGGRHPGVCVELIHSADDNVGVVCGYSHTASSPASAYASISIGRSKLNGGAARSGLAFRVDAPLLHGFGRPWFSVQMNSGIEF

SEQ ID NO: 54968 - protein, 377 aa, Zea Mays
MGFIGAHGVETLKRYRYSGEDRSVVAKYVLQPFWSRCVTLFPLWMPTWLCFPTFQITLTGFSFLVLSALLGYICSPHLDTAPPRWVHLAHGLLLFLYQTFDAVDGKQARRTSSSSPLGELFDHGCDALACAFEALALGSTLMCGGWTLCFWVVAAVPFYLATWEHFFTNTLILPTINGPTEGLMLIYVSHLFTFFTGAEWWAQDFRKSLPFFGWIPLPFLSEIEIPLYVLVLILMIVCAVIPTVRSNVSNVQEVVEARKGSMALALAMILPFIVLLAGVAIWCYLSPSSIMRNQPHLLVIGTGFNFGYLVGRMILAHLCDEPKGLKSGMFMSLVFLCFPIANALIAKINDGSPLVDELVLLLLYCAYTVCYVSVFWD

SEQ ID NO: 54969 - protein, 270 aa, Zea Mays
MATSASTSGEWLKGALQELRERKGSSLEFDSDLISGLVSFCELAPPSDATSYLENFIGKEAAQDIIQEYLRRRGHIGSSNGTESFQSSNLQPYVKPSADAATTQTKKQTRTQKDSASSSSQSSKSQSEIAESQVPSKRGSKKKGAKVISLAEAAKGSIVFKQGKPCSCQARQHDLVSNCLSCGKIVCEQEGEGPCSFCGALVLKEGSTYAGLSDVGLPLSEAETAAEAYAKRLVDYDRNAAARTKVYDDQSDYYEMEGNSWLSSKIYTCP

SEQ ID NO: 54970 - protein, 227 aa, Zea Mays
MAAAVAEGSASSAAKEVEYQAGVQKLVDLLSNLNPAAKEFVPSAAASPPKKALSADAPVFDYHSIGGGNGATDAAFYVGFGHQPRTRGNGYINQGRRRTNGRVRRADREDSIRRTVYVSELDHTVTEERLADIFTTCGQVVDCRICGDPHSVLRFAFIEFSDEEGARTALNLGGTIFGFYPVRVLPSKTAILPVNPKFLPRTDDEKEMVMRTVYCTNIDKMILGASF

SEQ ID NO: 54971 - protein, 850 aa, Zea Mays
MFESQQGWVMNTMQREPAPPQVEYAPVIFSQDTVSYLARIDMMSGEEDRENIFRARTTGKAVLTNPFRLLGSNHLGVVLTFAVYRPDLPADASVEQRVEATIGYLGGAFDVESLVENLLSKLAGNQDIVVNVYDVTNASDAMVLYGPSSLDEQVPFLHVSMLDFGDPFRKHEMRCRYRQKLPMPWSAITNPLGTFVIWMLLGYSIAAAYSRYDKVTEDCRKMEELKTQAEAADVAKSQFLATVSHEIRTPMNGVLGMLDMLLGTDLTMTQKDYAQTAQMCGRALITLINDVLDRAKIEAGKLELEAVPFDLRSLMDDVVSLFSSKSREKCIELAVFVCDNVPKVVIGDPWRFRQILTNLVGNAVKFTERGHVFVRVCLAENSNVEANQVLHGAMNGKGGRVESTTNGAFNTLSGFEAADRRNSWQYFKLLLSDKESLLDDLEGENSNQSDSNHVTLAISIEDTGVGIPLQAQDRVFTPFMQADSSTSRNYGGTGIGLSISKCLAELMGGQISFTSHPSVGSTFTFSATLKHSYKDISVDSSRSLTEALPTAFKGMKAILVDGRPVRSAVTRYHLKRLGILLQVVNNMNAVVKAFPGQNGATGSREKASILFIESDFWRPETDVQLLNHLREQKNGQLSDGHKVVLLVTSEADKDKYGSIFDIVMCKPIRASTIASSIQQLLKVEIAERKDNQNRPSFLRSLLVGKNILVVDDNKVNLRVAAAALKKYGANVSCVESGKDAISLLQPPHRFDACFMDVQMPEMDGFEATGQIRQMELKANEERKNKLASIEGSTTAEYHLPVLAMTADVIQATYEECIKSGMDGYVSKPFDEEQLYQAVSRLVVGTTDSAV

SEQ ID NO: 54972 - protein, 847 aa, Zea Mays
MAAGSGGGGFLGDVNDPWLKPRLLRAVVTGRLPQPGAAAELSPTEVASILEVVRTHGLLTEDLPGRGALVNPKLAEAWRAAVDAWVERVVALVESDSQSSSFQLVIVISCTSMSDLFVRLAKFSNLKKEGSSFAGRVVEPVLRLLNQNGLVADEAIDLLRTVIKLYPSSVNRHYNKVESAIAAKIMSNVKPSEKFARTLALLPSVRVSEDSWSLMIRRILIVVNNLLNDAFIGLEEEKKGHDIMLLLVPPGTDPLPTLGDEVMPGGNVHIMKKFRVFTVPTISALTLCCSVMLTSYYPVQVNVPIHALIALMRRVLLVDGSLHNKLFPSTTSLHQELICFDLPSLHSTFLDLLNATIKGMRSQLLPHGASIIRLITEYFKIAKLPTLRTKTYSILQLLLTSMGVGTSLHLLEATVRNAVADLNDDGEINMTMINTNSSQLTNESSSKVYSKKRKQEPQMQNSTISGSEKVAISPRKRKGSSIPITSKGVAPESTGDVTLSTPHSVKIAALETLEVLLNVGGSLRMDRWRSEVDMLLINVARSACGMGGSYEQKPSTFGEPNISDFQLASLKGLLASFLSSHARPPYLANGIELFRKGKLEIGTKVAEFCSHALLALDVLVHPRALSLERTVPASSGFNYTAQKKTVFGAGTHQISPFGDQPQAMEVEDMYDDWLISNNNEPPEVPVNGSDAVVSKGVLVEDGKQLNPIAEDPKVDPPRITDAAQDAPASTKTDVKVVDAAAATAAKPNTAENPSSSNAVPSPVRTTDSDSRKHASFPEQDSPHENKSAAVHPGEASATPGVGSSHHRHEAPEARSASFTELFGSESGIESESEDLMPDIVDGDPDSD

SEQ ID NO: 54973 - protein, 126 aa, Zea Mays
MRLSREAGLEYVEIQNLTEFYDDNRTQFAPMLGGYGASFLDARGKLVARSYDILGLYSAFVFQKPDPEAIPPIVTPDLPDPDKGHEEEWLQPQQASVEDGRRSHADVLPIDPEKGILGPGPADMRL

SEQ ID NO: 54974 - protein, 191 aa, Zea Mays
MCNAAESIYKLGPKYVLVKGGDMPDSSDAIDVLFDGKEFTELRGLRIKTRNTHGTGCTLASCIAAELAKGATMLHAVQAAKKFVESALYHSKDLVIGNGPQGPFDHHFELKSPSYKMGSLQKFNPDDLFLYAVTDSGMNKKWGRSIKDAVKAAIEGGATIVQLRRRDTGVLGSCQGLCGNLQVQWSAATDQ

SEQ ID NO: 54975 - protein, 265 aa, Zea Mays
MDDPSSASNKHKRKRGRKPKASPPFPDRSSPSPSAAPAPAGRRGRKPRRHEAPADADATRPPSPPRRGEPKPVANGGDVVAVAESGPASWDEVVRVVPCMDAVVKVFCVHTEPNFSLPWQRKRQYSSSSSGFIIGGRRVLTNAHSVEHYTQVKLKKRGSDTKYLATVLAIGTECDIALLTVNDDEFWEGVSPVEFGTLPALQDAVTVVGYPIGGDTISVTSGVVSRIEILSYVHGSTELLGLQMQLLIQEIQVAQLLMIGENVSV

SEQ ID NO: 54976 - protein, 381 aa, Zea Mays
MDYAENVLLLWKIWMDYSEQLPATTRERVISTFPHYGHGGIVESARELFMQLNGENTSSGRLGFLSTLLGEGSECHGYKVRLVGHSLGGAVATVLGMMLYGKYPSVHVYAYGPLPCVDFVIAEACSHFVTTIICNDEFSSRLSINSILRLRSAAISALSDNSPADTAMIQKLARRILHVNRYHDNGPDDGIIQGYADHTRTADTTVPNERQISHQIPLCNTELDLHNTQNGFFRYNGSSASIDEHLSYEGISSGHDMQIIPLDGADSGFEGHQTSYREIPVEPPEMFLAGLIVHIVRQRRSLFPLWKCWSIQETEPPYKAVLAKRENFRDIVVTPYMFTDHLPWRCSCFYYTCLTIRTVLDGVLIFFNCAFFSGMAACNGR

SEQ ID NO: 54977 - protein, 96 aa, Zea Mays
MNQLGLVVREDAVGNIFGRWEGSEPGLGAVATGSHVDAIPFSGKFDGVVGVLGALEAISLLKRSAFLPKRSLEVIMFTSEEPTRFGISCLGRICWL

SEQ ID NO: 54978 - protein, 567 aa, Zea Mays
MREVVTVQVGGFANFVGSHFWNFQDELLGLADDPGADPVFRTAALDMDVLYRAGETHQSVASYCPRLVSVGSRGSLGSLSSSGTLGSSSAAADEPNIFTWSGKVTKSVAKPHERNLFLQSLSEEEQNPSSSDGQNNASVEDKDLVANLENGVKFWTDYSKVQYHPQSLYELYGSWTDFDRFDNYGTAKEVVSEWSQMEEMNERLRFFVEECDHIQGIQFLVDDSGGFASVAAQFLESIVDDYTNTPVMLYCVRNPDSYGSSRNQCETIIRSLHDAVSLSKLSYYCNLMVPIGLPSLSYLSPLLSIKDEKHFHSSAICAAAMHSLSIPFRLQHVGPASDSAHSSGKLDIGELVHILSDQGRQNMITALDVAMPAPSLTDRTDLRNIQRSLHSLTPEISDEDEDPYAVESMVVHGVLDAGGKRASISQVKESICSALEGRATKPKFSHLSVSRCPLPIPLPFPSIFSSSVGQQGEILGTSHAGARPKGPLAVGSVPMAARLRSSSAIAPFIERRSASLQRLGVARGTLGSQVLHDWGFGREEVEDMAEHLAKMLRPFYPEMDLTSDSDD

SEQ ID NO: 54979 - protein, 255 aa, Zea Mays
MQSEGIPEMQRSNLVSCIIQLKALGIDNILGFDWPASPSPEAMIRALEVLFSLGILDEDAKLTVPIGFQVAEIPLDPMISKMILSANDFGCSDEILTIASFLSVQSVWVSVRGVKKEFDEAKLRFAAAEGDHVTFLNIYKGFHQSGKSSQWCYKNFLNYQALAVRKAIIAGSFTNACHLEEYSQNGMYKTIRTLQEVYIHPSSVLFRVNPKWVVYQSLVSTDKHYMRNVIAIEPSWLTEAAPHFYQFRAFNPAPH

SEQ ID NO: 54980 - protein, 214 aa, Zea Mays
MPSGNRLEIKLTKQDVLRKVKNFVDENQGNGLGSYDLSLVYPKRVFFEQDMEATLSELGIQNRHAMIVVPHRQSGQVSRRHSSASYDMGVNSGADDVGGNSGAGGYFGYLRTVLSYVNPLSYLRGNTNSSNTELQSNEGLRQLRHGSGPWSEPRPLGNRGHEVTDADSANTLRRRPRPFGANIHTLGSEDHGPSDERNVFWNGNSTEFGGDDRK

SEQ ID NO: 54981 - protein, 75 aa, Zea Mays
MSRSSSASVPFLWSPHSAKALLKVTLFSASGRETRRHCISMHMFLRFSGSSMILGGADVYSLLNTIMTKARRGLA

SEQ ID NO: 54982 - protein, 69 aa, Zea Mays
MTKKQAPRMNTPARQAAATFLVLLGNRQLPPEEEDEGEVVRRQEDRLPRLTIAGPTRKFANRRGASLAG

SEQ ID NO: 54983 - protein, 367 aa, Zea Mays
MVLILFDTVSMKMVRRFEGHTDRITDLCFSEDGKWLISSSMDGTLRIWDISLARQIDAMHVDVSITSISMSPNMDVLATTHVDQNGVYLWVNQSLFSVSTNTENYASGKHVRNVCLPAVSSTERSEEEQVQNLGESYKSSIKPFVITDHQIPNLVTLSLLPKSQWQSLTNLDIIKVRNKPIEPPKKPEKAPFFLPSVPSLSGEILFEPPASSKDTDISTTKNTNHKMSELSSHFSQQLQFCGETKNYSAFTDYLKGLSPSSLDMELRMLQILDDEESEDLEQRPELQSISSLLDYFIHELSFRNNFEFVQAVLKLFLKIHGETIRRHSMLQSKVKKLLEVQSLVWQKIDKIFQGARCMVTFLSNSQF

SEQ ID NO: 54984 - protein, 264 aa, Zea Mays
MTCSMDLPAKGGFSFDLCRRNSMLEKNGLKLPGFRKTGTTIVGLVFQDGVVLGADTRATEGPIVADKNCEKIHFMAPNIYCCGAGTAADTEAVTDMVSSQLQLHRYATGRESRVVTALTLLKSHLFRYQGHVSAALVLGGVDCTGPHLHTVYPHGSTDTLPFATMGSGSLAAMSVFESKYKEGLTREEGIQLVSEAICAGIFNDLGSGSNVDVCVITKGKTEYLRNHQLPNPRTYVSSKGYSFTKGQTEVLSAKITHLKQKTAA

SEQ ID NO: 54985 - protein, 99 aa, Zea Mays
MSSASSRAKREWLVSMQFFAKADASTLNRCSSRAALLAPMLLVRHPSRVHVGSRTLLRSPTIGDMDPTTEHVLRQWRPPRWSLMPPYLMSIGGRCGLDR

SEQ ID NO: 54986 - protein, 1013 aa, Zea Mays
MARAEANWERLVRAALRGERLGSAYGQPVTGIAGNVPSSLGNNVHIEEVLRAADEIQDEDPTIARILCEHGYTLAQSLDPNSEGRGVLQFKTGLMSVIRQKLAKRGGAAIDRSQDIAKLQEFYKLYREKHKVDELIEDEMKLRESAVFSGNLGELERKTRKRKKVLATLKVLWSVIEDMTKDISPEDANKLISEEMKRVMQKDAARTEDVVPYNIIPLDSLTSTTNAIVNFPEVRAAISTLQYYTDLPRLPGTFSVPDARNSDILDLLQCVFGFQGDNVKNQREHIIHLLANEQSRVGKLSGNEPKIDEGAVHAVFSKALDNYIKWCNYLPLRPVWDNNDSLTKEKKLLYVCLYYLMWGEAANVRFIPEGLCYIFHHLARELGVILQKQTAEPAESCNSGGGVSFLDNVIYPFYEIIAAEAANNKNGRAPHSEWRNYDDFNEFFWSHKCFHLRWPWNLSDPFFSKPSRKYKGLLSRNHHYGKTSFVEHRTFLHLYHSFHRLWMFLIMMFQGLTIIAFNDGSFDRKTILQLLSLGPTYVVMKFIESLLDILMMYGAYSTSRGSAITRVAWRFCWFTIASVAICYLYIKTLQDGTESATFKIYVFVISAYVGIKIIFSLLMSVPCCHGLAEACYRWSAVRLVKWMHQENNYVGRGMHESPLDYIKYATFWIAILGAKFSFTYFLQIKPLVEPTRTIINFTGLQYAWHDFFSKNNHNALTILSLWAPVLSIYLLDIHVFYTVLSAIYGFLLGARDRLGEISTVEAVHRFFEKFPGAFMHRLHVEVPKRKQLLSSGQEIELNKFDASRFSPFWNEIVRNLREEDYINNFELELLLMPKNDVGVLPIVQWPVFLLASKVFLAKEIAEDCKDSQEELWLRISKDEYMQYAVVESFHSIYHILTSILEKEGRLWVERIYGGIRDSISKRTIQSDLHFKKLLNVIAKLVAVLGILRGTTESSDLKKGLVNAIQDLYDVVHHEAFSVDMSGHIEDWDQINLARAEGRLFNKLKWPNDPKLKT

SEQ ID NO: 54987 - protein, 819 aa, Zea Mays
MKEEMPVTTPNGLVRQSFTEQAVTKDKSGMRTLLDGCLSEDMPSRTRSGLVRRSPTVKTLSKDKSVIKGLADGCLKEDKPLGTRSGLVSGSLAAKVPIKAEVLTKGQHDRWLKNDKAAAMRSDHGGRRLAAKTVSEDKRGVEGLPDGWQKEYRPRKNGPCSDPYYIDPVSGYEFRSLKDVHNYLETGDISQCAVTPKKSTICEDITESQTHTSTSPQHMRPGTANKGIQCEILTSDGIMAPWEDNGNDTEHTMLPEPESLKATQGYGNKLETSEPTRVQPVSPHNGSRQTKSVKRKESNAEVKSKKRKTSSAVTRVRASPRLAALNAHLDVSIEHEDDMVSTNHVDWVQTIEERAIDQAQKSQSGSFDQIHGNLESTFSQLQLSQADPANGMQVIQANTTIHSQPSQLDTLSPTQKKQENSSKQLQSVVTDSSIPKRTTQKCTIDQPSQPDINHIRTDQEFTGNQFPSSLPVDTVISLGDTEEFTAGHSQPRNSDTAGQIQANEENTADQVQLSLAETVILVPAIQEYAAGYSLLSKADTTDQTQANQEYIADQVQSCLTDALIPVKAIEEYTTDYSHISKADITNQIQVNQESTDDHLYLRQVDCLAEMQIIEQNLSKQPQLSQPDTGDQIRIDLESTTNHLQPNYDENSMLQSGFSWAPEQNRGAPTTDFWKNVESQASSVSMPINGAPLSSFPANVRFQNAAAAAAAAEPALPPQVAPTETGSDQSGLAFQSLFGNIWSDPCIEFAFKTLTGDIPVLDDTTAVTDYFPEQQDLNKDPAPNCAGSVFDSSRNHTQVDVNLPPPAPDGFYDGSWFPPQ

SEQ ID NO: 54988 - protein, 140 aa, Zea Mays
MIDIHSTVEFLDALRDAGDRLVIVEFYGTWCGSCRALFPRLCRTALETPDVLFLKVNFDENKPMCKRLNVKVLPFFHFYRGADGLLEAFSCSLAKFQKLKDAVAMHNTARCSIGPPVGVGDVDLLDSTSPQEKPAEASPH

SEQ ID NO: 54989 - protein, 254 aa, Zea Mays
MEAGLRALGHRYFGGGGGGLGGFAAARATRLRRQRQRRMAAFCSLAVNGDGNGAAGGPVGSGVEVARARRMLHVVLVSPLIPGNTGSIARTCAASAVGLHLVGPLGYKVDDTKLKRAGLDYWPYVVVKIHDSWDHFCDYFMKQEGDKRLLAFTKRGTHIHSDFSYRPGDWLVFGSETKGLPQQALEDCCREGLGGGTLRIPMVETYVRCLNLSVSVGVALYEAARQLNYEQLQYQPDELPEEAQELFPAEDIYA

SEQ ID NO: 54990 - protein, 122 aa, Zea Mays
MCVDPPPAQHAIAVPARGGGVNAHAVQAELIGIPRLWSVCAPPPAAGAMAMGSLAFATALVFVFVFAIAVPAVAAAAQAPAPAPTSDGTSIDQGIAYLLMIMALVLTYLIHPLDASAPYKLF

SEQ ID NO: 54991 - protein, 86 aa, Zea Mays
MRFSERFCVFPPPSSAFSWAHQSTSVEKVVSRMGLGRCIERCSEACCTSDVHGFCTLLMLLYIRFVASICRLLYVQCGSCRAMCFL

SEQ ID NO: 54992 - protein, 229 aa, Zea Mays
MKEVKKRMEKDVNEVTKIARLAKSKVEQLNKDNAVNRGKPGFGKGSGVDRSRTTTTVALTKKLRERILEFQTLREEIQQEYRDVVERRVFTVTGERADEETIDKLIETGDGEQIFQRAIQEQGRGRVLDTLQEIQERHDTVKEIERKLLDLQQIFLDLAVLVEAQGEMLDNIETQVTGAAEHIQTGTNLLQKAKKLQKNTRKWTCIGIIILLIIILIIILSLKPWSWGK

SEQ ID NO: 54993 - protein, 500 aa, Zea Mays
MGKEKSHINIVVIGHVDSGKSTTTGHLIYKLGGIDKRVIERFEKEAAEMNKRSFKYAWVLDKLKAERERGITIDIALWKFETTKYYCTVIDAPGHRDFIKNMITGTSQADCAVLIIDSTTGGFEAGISKDGQTREHALLAFTLGVKQMICCCNKMDATTPKYSKARYEEIVKEVSSYLKKVGYNPDKIAFVPISGFEGDNMIERSTNLDWYKGPTLLEALDQITEPKRPSDKPLRLPLQDVYKIGGIGTVPVGRVETGVIKPGMVVTFGPTGLTTEVKSVEMHHEALQEALPGDNVGFNVKNVAVKDLKRGFVASNSKDDPAKEAASFTSQVIIMNHPGQIGNGYAPVLDCHTSHVAVKDLKRGFVASNSKDDPAKEAASFTSQVIIMNHPGQIGNGYAPVLDCHTSHIAVKFAELITKIDRRSGKELEKEPKFLKNGDAGMVKMIPTKPMVVETFSAYPPLGRFAVRDMRQTVAVGVIKSVEKKDPTGAKVTKAAAKKK

SEQ ID NO: 54994 - protein, 227 aa, Zea Mays
MNINGWEAMIFIGLNAAISVRVSNELGSGRPRAAWNAVMVVVGEALVIGILCMALILIFRDSFSIIFTSDTTLQRAVARIAGLLGLTMVLNSVQPVVSGVAVGGGWQGLVAYINLGCYYIFGLPLGYLLGYKFSFGVGVIKLSQLHAVCSQKSCRMNETRIISQRKILVVNYIPSHFSFIAGDLVRHALWYHPSDAHLARCGLEDRLESRGRTSFRPCAKVGRQRHR

SEQ ID NO: 54995 - protein, 827 aa, Zea Mays
MKGGRLHRPEPPQTHLAMAAAAAAPPIPAPNPTDDWVDGSWTVDCSCGVTFDDGEEMVSCDECSVWVHTRCARYVRGVHTSFSCHKCRRSKRVPSSADEAEVAELLAELPTHRPPPLYRRWAEVPLPARVHVHGLPGGGDGALFRGAPAFSAALWRCTGYVPKRFGFRYCEFPSWADDNDGADALFALAREKPREMTDDVLISTEPKKEKHYVRSLSCRGKKIDSNQQAMTPLTKAKKREPDSWKNECQQSEGCGIQDSICDDGHAETNMVSSDLLTAKTKKKMEESLEPSGENNNCEQVEISSKDGKKVPMKLEVSSGVQTTSSIVEQEVHSGFVGVEVTMYKQQPEEDHIVCSRPDITSSGPIKVQDIQGLPKQPNQASNLQVVAGVPDLLIGQPKPQTIKTEPSSQENKAAHCVDLVSDDHESNKQGLGDAAVLSIVQKDSSNLKYGSVSHEHLKSEAQNPRHTVAENPNSTLGSAKVCTSFSGSVSTPPELSHSLASKEPSSGNSDCSKKEELLSPTVSKHDPVKFSEDSSQEVTRYSEKVQLKDSQPSAPKSSQASRIHLSTVKHRLPVSKEQSQKIALTGGTSARSFHGEVPSLQSRNKAAACSSSQKKDKIYQRIINVTQDSSNNSAPTELRASDSAAPLSDEQLALLLHQQLNSSPRVPRVPRCHQAAGAQMLHSTGSSVFSKRYSSHGGRDHAAVIKKRNREDSLKDSEDTKRTEKRHRVSSTEHAPVKNSCRSAENIASEQKIRGICPTGANAGLSKDDLMDTIVSHNLPGLIDEIVSKDRNITYVELCDAIHQGLKEIEWGRFFVSQLCGCHQRLP

SEQ ID NO: 54996 - protein, 428 aa, Zea Mays
MPPAIPSLVHPSRVRILHPGGSHIHGPVVYWMLRDQRLADNWALLHAAELAAASTPAAPLAIAFTLFPRPFLLGAHLRQLGFLLRGLRRLAADAHARGLPFFLLEGGPAELPSLVRRLGASALVADFSPLRPVREALDAVVQELLRDAANMAVHQVDAHNVVPVWTASGKLEYSAKTFRSKVNKVINEYLVEYPEVPQWAPWCMEQPKSVDWDALINSIFSEAENVPEINWCEPGESSAMEVLLGSKDGFLTKRIKNYDTGRNDPTKPHALSCLSPYLHFGHISAQRCALEAKKRRHLSPKSVDTFLEELIIRRELADNFCYYQPQYDSLAGAWEWARKTLTDHTGDKREHIYTREQLENAKTSDPLWNASQLEMVHHGKMHGFMRMYWAKKILEWTSQPEEALSIAIYLNDKGSPSRIYPRGGLGWG

SEQ ID NO: 54997 - protein, 222 aa, Zea Mays
MLTSGLTASISLEKAGQMTSGQVVLVTAAAGGTGQFAVQLAKLAGNKVVATCGGESKAELLASLGVDRVINYRNERVKDVLKKEFPRGVDIIYESVGGEMFDLCLNALAVHGHLIVIGMISQYQGEDGWKPKNYTGLCEKILAKSQTVAGFFLVQYAHLWQDHLNKLFDLYASGKLKVSLDPKQFLGVASVVDAVEYLHSGKSVGKVVVCIDPSYGQIVAKL

SEQ ID NO: 54998 - protein, 146 aa, Zea Mays
MPTSMDDEEKRRKNDSRRDKAIARVAIENPYIKEIIDDAADRPEEWKETVGDESREFGRYMRQREEQEKQEEELFTRAPVTKRDKQIEKRIRRQLHGLGGLTDGFDLGMNMLLGGDKEDDGGSSKSHGKSGNRKKHLKSSKKRKRH

SEQ ID NO: 54999 - protein, 320 aa, Zea Mays
MANRRLWVRTCVRECQATGIVGENVISHCQSKENYTSVGVSWYNQEQIYIQWKELNCRTDCRYFCMMQREGERQSLGLSPVKYHGKWPFLRVSVFQEPLSTALSAVNLLMHFTGWLSFFLLVNYKLPLRPQTKRTYYEYTSLWHIYAILSMNAWFWSSIFHTRDIELTEKLDYSSAVALLGYSLILSLLRAFNVKDEASRVMFAAPILAFVTTHILYLNFYELDYGWNMKVCVVMAAVQLLTWAVWAGVSRHPSRLKLWTVVFGGALVMLLELYDFPPYMGFADAHSLWHASTIPLTYLWWSFIKDDAKFRTSTLSKKAK

SEQ ID NO: 55000 - protein, 847 aa, Zea Mays
MKKNNSSIESTGGGGGTVSGSGSGSGSFNLRNLSKVILPPLGGPSGGQSQSHGGSDKWVVSPLDSRYRWWDTFMVVLVAYSAWVYPFEVAFMNASPKGGLEVADIVVDLFFAVDIVLTFFVAYIDGRTQLLVRDRKKITLRYLSTFFIMDVASTIPFQGLAYLITGEVRENAVYSMLGVLRLWRLRRVKQFFTRLEKDIRFSYFWIRSARLVAVTLFLVHCAGCLYYLIADRYPDRQKTWIGAVIPNFRQASLRIRYISSIYWSITTMTTVGYGDLHAQNNVEMIFNIFYMLFNLGLTAYLIGNMTNLVVEGTRRTMEFRNSIRAASSFVGRNHLPPRLKQQILAYMCLKFRAESLNQQQLMDQLPKSICKSICEHLFVPVVKDVYLFRGVSREMLLSLVTKMKPEYIPPKEDVIVQNEAPDDVYVVVSGEVEVILFDGIYEQVQATLGARDIFGEVSALSDRAQAFTFRTRTLSQLLRLKQATLKEAMQSRPEDSVVVIKNFLKHQVEMHGMKVEDLLGDNTGEHDDDANVLTVAAMGNSGLLEDLLRAGKDADVGDAKGRTALHIAASKGYEDCVLVLLKHACNVNIRDAQGNTAMWNAIAAGHHKTFNLLYQFGRASNPRAGGDVMCLAARRGHLGALQELLKLGLDVDSEDHDGATALRVAMAEGHADAARFLILNGASVDKASLDDDGSGSGSGSGAARLAMSPTELRELLQKRELGHSITIHDSPAVVPNGGSSGHSRPGRLQSTSSDSQRWPRVSVYKGHPFLRNRTSEAGKLINLPGTMEEFRAIVGEKLKVDAEKALIVSDEGAEIDSIDVIRDNDKLFMVTEEDLRRLASMDWLSCE

SEQ ID NO: 55001 - protein, 537 aa, Zea Mays
MNTVASLPLAPRLLIKPSLACFSRKDVGRYGGIKVYAVLREDGAEFARNNNLEALFQVDDPGPRAPVKKFLDVNEALEVVRFDIQYCDWRARQDLLTIMLLHSKVVEVLNPLAREFKSIGTLRKELAELQQELEKAHNQVHLSEARVSSALDKLAHMETLVSAPSTAEPPTSSSLSATASSTARVRAKNKQPRRRLDVSGPVKPYNPSLKNFWYPVAFSSDLKAPDTMVPIDCFEEQWVIFRGKDGRPGCVQNTCAHRACPLHLGSVNEGRIQCPYHGWEYSTDGKCEKMPSTKMLDVRIQSLPCFEQEGMVWIWPGDDPPKATIPSLLPPSGFTVHAEIVMELPVEHGLLLDNLLDLAHAPFTHTSTFAKGWSVPSLVKFLTPASGLQGYWDPYPIDMEFRPPCMVLSTIGISKPGKLQGKSTRQCSTHLHQLHVCLPSSRNKTRLLYRMSLDFAPWLKHVPLMHLLWSHFAEKVLNEDLRLVLGQQEGMIDGANVWNWPVSYDKLGIRYRLWRDAVERGADDRLPFSSTQAESLS

SEQ ID NO: 55002 - protein, 363 aa, Zea Mays
MMLLHGWKGRRRKEKRSPLLLRALKSIGEQLYLVLTILLRLFENGCLGHHCLPLSLRIQNTVLTASKKMLELKMSSAVVAIESKPGGILTSRDILMRVIAQNLPPESTTVEKVMTQCPECASVDTPILDALHTMHDGKFLHLPVLDRDGNVVTVVDVLHITHAAIATVGNSGAAGSESTSAMMQRFWDSAMSIGPLDDDDDSTRSEGSTKVASEAADIGRSALFPASALSNTFGFKIQDKQGRMHRFNCETSSLTDLITSILQRVGDDIDRKHLPQILYEDEDHDKVILSSDSDLIAAVDHARQIGWKSLRLHLDYARRKRGDGSSDFEYAGKDAWASAYSAVAAGAALVAGLGVMAYLKRSG

SEQ ID NO: 55003 - protein, 290 aa, Zea Mays
MSMMGELKYFLGFQVKQLKDGTFISQTKYIQDILTKFGIKDAKPIKTPMGTNVHLDLDTGGKSVDQKVYRSMIGSLLYLCASRPDIMLSVCVCARFQADPKEVHLRAVKRIMRYLVYTPKFGLWYPKGFTFDLIGYSDADWAGCKIDRKSTSGTCQFLGRSLVSWVSKKQNSVPLSTAEAEYIAVGHCCAQLLWMRQTLRDYGYKLSNVPLLCDNESAIRMADNPVEHSRTKHIDIQYHFLRDHQQNGDIEIAYVSTKEQLTDIFTKPLDEKTFSKLRNELNIHDSWNFD

SEQ ID NO: 55004 - protein, 701 aa, Zea Mays
MQFYDLPWKILCEVMNVELKAEPDNDEVYAQLTLLPESKPEENGSSEEMPASPPAALARPRVHSFCKTLTASDTSTHGGFSVLRRHADECLPPLDMTRQPPTQELVAKDLHGVEWRFRHIFRGQPRRHLLQSGWSVFVSAKRLVAGDAFIFLRGDSGELRVGVRRAMRQQANVPSSVISSHSMHLGVLATAWHAVNTGTMFTVYYKPRTSPAEFVVPCDRYMESLKRNYPIGMRFKMRFEGEEAPEQRFTGTIVGNVDPDQAGWAESKWRYLKVRWDEASSIPRPERVSPWQIEPAVSPPPINPLPVHRPKRPRSNAVASLPESSAPTKEAAPKVTLETQQHALQRPLQTQDNVAPKSVFGDNSELDSAHKSSLRPSGFDLDKSTIGMQRKLGSDIWMRMNRPDGYSEMLSGYQPPNEGARNSQGFCSLPDQIAAGRPNFWHTVNAHYQDQQGNHNLFPGSWSMMPSSTGFGMNRQSYPMIQEVGGMSQSCTNTKFGNGVYAALPGRGIDRYPSGWFGHTTPGGRVDDAQPRVIKPQPLVLAHGEALKMKGNSCKLFGIHLDSPAKSEPLKSPPSVATPAAEKWMADGIDADKSPEPHKTPKQLGATQVDPVPERCPQASRGTQCKSQGGSTRSCKKVHKQGMALGRSVDLTKFNGYTELVAELDEMFDFNGELKGCSKEWMVVYTDYEGDMMLVGDDPWK

SEQ ID NO: 55005 - protein, 90 aa, Zea Mays
MFIADLLIFLVVCIWIPGCLEGTATGGQSNCSWINTLLECRIMMPASKVKLPRMMKLLIDWKIWIGLFPNFCFLMLLQFVTNELKLTANN

SEQ ID NO: 55006 - protein, 603 aa, Zea Mays
MATGDNDKPPSLDADVDMADLASLDATAATSAAAGGAPSTRFRPKAKGKPRPKAEPPRPVPVAVPKPFEDDTQLYIMQYPLRPCWRPYELHEICEEVRVKPLSSEVEVDLSINTQSENYDQEAPLRLTKQTLSSSKAVDVTNYAVGVLNGNLVHLNHIDAVVQMRPSMSHIISGRAHTRQASQPREMNGGASTSMDSSHKGNERPEDSKDRAEDSEPWISLIYQPAGSNTATKYHDKMIANEGVPIDFTMSSSCYLTSLCPGASTSRKRINKFQAIREMLLLPLEERLKKWFTEVSGVNRFDALKDLAPTCSEVEILKMLPECAYLVRGLWVCKSSLLFDGVYSGPMDRILLEFTKRDPVPSNILEPFINLIGNRAMRDWILSPLCKRRQILKDHKFISADLSFIKRYPHIVNEQECAWSARETTLRESLEMSTTLAKKTMNSTRPNVASKGPHSNMSKGRDGPSQGSDDLARSVLGTVFTANKVRSMQAVVRDLRQLAAKYASNRKDGSKLQALCNAAKNCASLPHDELNRKIHLVAVPVHSVFVAKHEDKRALRNIFILLFRHKEPNGTLTKQEVVAAAAKHIKREITDREYHQIHLVIPS

SEQ ID NO: 55007 - protein, 773 aa, Zea Mays
MATPPPAATASALPKSGAVSKGYNFASTWEQSAPLTEQQKAAIAALSHAVAERPFPPNLEKSSGKDEGLAVPEKESALEEAGAIDAVLVNTHQFYKWFSELESAMKSETEEKYRLYENTLQERVNTCDVILKQVDDTLSLFEELQSLHSSVATKTKTLHDACDQLLVEKQRLIEFAEALRSRLNYFDELENVSSSFYSQNMNIGNEQFLPLLKRLDDCISYVENNPQYAESAVYLVKFRQLQSRALGMIRSHVLSILKGASSQVQAAIRSSDSGKNIVTEGVEASLIYVRFKAAASELKPILGEIESRSSRKEYAQILSECHSLFCEQRLYLVRGMVQQRILEFARKEALPSLTRSGCAYLMEACQFEHQLFAHFFPASAADVSSMAPLMDPLCTYLYDTLRPRLIYEGNIDSLCELVDILKVEVLGEQLSRRGESVAGLRPILQRILADVHERLAFCARTHIREEIANFRPSVEDLDYPGKLERPVDMSSSATVGDNSDIYITWYRPLEKTVSCLSKLYRCLEPSVFTGLAQEAVEVCSTSLQNASRVISKKATPMDGQLFLIKHLLILREQIAPFDIEFSVTHKELDFSHLLDHLRRILRGQVSLFDWSRSTSLARTFSPRVLENQIDARKELEKSLKATCEEFIMSITKLVVDPMLSFVTKVTAVKVALSSGSQGQKLDSVLAKPLKTQAFASPDKVAELVQKVAAAIQQDLPKVMTKMRLYLQNPSTRMILFKPIKTNIVEAHIQLHSLLKSEYSSEEMQSIDHGFILL

SEQ ID NO: 55008 - protein, 296 aa, Zea Mays
MKCVCLFLLVSAPLKKRSWTVQNKRWVSMQKLSRLGCLTQLPQVSLSDLIPIYLIFVYYTTGTRMTFSRSFPTTAQDRRALLQEILRRGTSSLGTDIPSEREINRLAARTDEEFWLFEKMDEERRLRENYKSRLMDGNEVPDWVFANNDLPKRTVADEFQNIMVGAKRRRKEVVYSDSFGDQWMKSDEGFEDIPKATQRSKKTAYSSDIQVEFSERRKRPRSVENSADGVSNPTWTPDKGRAGVSSYSKDETEDDGEDEVITSGLQKGNSFTWNTLGRRRSSHFSSSSDSRGRPTF

SEQ ID NO: 55009 - protein, 64 aa, Zea Mays
MLVTGYLRRGPAHSDNSTCSIKAWKAAEVPMIELIAMNSLLLFFLLCSQEWILASAWMYPGGDW

SEQ ID NO: 55010 - protein, 164 aa, Zea Mays
MRRKRKTGRLFYFYLASQASQGGHTPIPPPSPAPSSPTAGHATMLPPAARLAARRLLGLASASASEAAGRRIASAGYSAAASRGSVSSTRPFSTALNYHLDSPENKPDMKWEFSQANMKKVNEILSHYPSNYKQSGIIPLLDLAQQQHGGWVPVAAMDAVSSTM

SEQ ID NO: 55011 - protein, 508 aa, Zea Mays
MSAGFNKQILAQKLSKLNSSQQSIETLSHWCVFHHRYCQQVVETWDCEFHAAPGERRVSLLYLANDIMQNSRKEGNGYITEFMRVIPAALNEVLTIRDDFGRNVPKRLIDIWEDRKIFDTQAQSLKDDFFRRLKDIRNKLKNTGSELLEKVVSSYKHVLNAPMDEDTLMRKCQAALINFDELNKTYGNNSVLGSSNQSEFMQGVQEQHNILRNSIEQLKLSESLRATLISHLKEALNEQELKVEQVRSLLQAAQPRFKRAAELCVGLGSNMEMHEPSNQGHKRSSLSDPLSTVAPGAEKSLQKGQSSAVLYSQEGNGFEHIMTETKLAAGDASDNIRGGDLPSQVNGGNTKLKIEEHTSGNKRQKLEDDTDISQPQSQSPPPPPPFPHPDAFEPPPPPPPEVPPSPEPSPPPPPTSPPPNMIPPPPPAMPPQMISHVPPPAGTFVPFPAGPPGPMYSSYPPFTPVVNFPITSPPAGFPSPSPPPPFQGLVGTFYGPQFPTAPPPADRK

SEQ ID NO: 55012 - protein, 74 aa, Zea Mays
MALEHLMLHYVQGRVLLQVQVSMSPEILIRDAMEVAKQAEEEILRADASISQISLQLRLGQQIKQLQLASQERR

SEQ ID NO: 55013 - protein, 428 aa, Zea Mays
MYMPPPPPTGGAGEQPRLYQEFFLQGRFIFGPDVRSVFLTMILIIAPVVVFCLFVARHLINDFPDSWGISVMVVVVVFTIYDLTLLLCTSGRDPGIIPRNSHPPEPESIDGINDTGVQTPQQFRLPRTKEVLVNGISVRVKYCDTCMLYRPPRCSHCSICNNCVERFDHHCPWVGQCIGLRNYRFFYMFVFSTTLLCLYVFAFCWVYVIKIRAAEQSSVWKALLKTPASVALIIYCFLCVWFVGGLSVFHLYLMSTNQTTYENFRYRYDRRDNPYNKGVLNNFLEIFCTAIPPSKNNFRARVTAGQGLQQTRSQSRGFMSPSMGKPIGDLEMDRKPVAPWDEPRTAADIRDLEAGLGVMFDEKEGRVAHASPDLSRDLPAEFVEGRSGMHSRQSSWVQRGDAIEASAVQMANARTTEASNNVAWSGTH

SEQ ID NO: 55014 - protein, 75 aa, Zea Mays
MHWHFILGMVEITTDGSVSQAVRLKHQVSSDQMCKRVRYPVACSMTCDILKGQLEAKHINVFNFICLYCNCISLQ

SEQ ID NO: 55015 - protein, 494 aa, Zea Mays
MAAMNGEVLGECGRNINSLKRKRESPAAYAAGVFCTSELHQHTVNDSAVRFHLDKDRKAKIVCHFNKQVLQSYKKFMSSAPPKRILLRQGAVWKDFPEKIVKLAQADFRAKKMITETGYQNQLFLLDFAHMTFIDTKTGFQRPIAWIDENEKCYFPESFIQDQKLFMKKDFGNGNHEYISEERNGTRETNHQFGASESSAESSNFESSIGDVSSPKRARAEKNFIVKKYCDMGEAIGENESCTLLPTACNLLPHQANLGEVSRAQRTIEAVEKLLLQGMGSVIESKDIIGIYRTPLLDDHGQVRYHIHQKQVQVTGCHRGNANVRYAWLPCSKSTVHVMMLNGVLQVDKPPNKCAAYGEGTLLTPANRSDACVKYSDVDENGIVRMMLCRVIMGNVEIVHPGSKQCQPSNKYFDSGVDDLKNPRHYVVWDMNLNSHIYSEFVVTVKLPSKTKDSFVSQENCQNSSDLSLVLNSSSPDCISQVRCFTWGINKIVL

SEQ ID NO: 55016 - protein, 225 aa, Zea Mays
MLQEVSELDLTDCHGKVRVPKQLFVNTDPSSIPAAVRRAGLSLPLVAKPLVAKSHELSLAYDPTSLTKLEPPLVLQEFVNHGGVMFKVYIVGDAIRVVRRFSLPNVDEGDLSNNAGVFRFPRVSCAAASADDADLDPRVAELPPRPLLEILARELRRRLGLRLFNIDMIREHGTRDRFYVIDMNYFPGYGKMPGYEHVFTDFLLSLAKKEYKRRQSYSSLSSGEW

SEQ ID NO: 55017 - protein, 249 aa, Zea Mays
MACSHIAAAGVSSPAAAAARSPAHSPASAFARLRSTPRFASAGLSVKGNGAAFPLVAAAGPAAAAPVADLDGRPATEKQPIIVIDNYDSFTYNLCQYMGELGLNFEVYRNDELTIEDVRRKNPRGILISPGPGEPQDSGISLQTVLELGPTIPIFGVCMGLQCIGEAFGGKIIRAPSGVMHGKSSPVYYDEELGKALFNGLPNPFTAARYHSLVIEQETFPHDALEATAWTEDGLIMAARHKKYKHIQL

SEQ ID NO: 55018 - protein, 149 aa, Zea Mays
MIYFIDEVESSPVAQNLALRDLPLRDVLFVSERTLIGVGFDCNPMIFAADDTGLWTFIRFLDERKAAPSASKASQLSEALGKLYGQSKQGTSSDTVEPSKPRGGAHENCITCIVPLRKGSDGSIKRFSTSGLDGKIVVWDLENHVSIAK

SEQ ID NO: 55019 - protein, 567 aa, Zea Mays
MVPDIIGRFMDMLLEFAPLSKAYNLAKDIGLRREFLYNFGPRAAVPKLGNDHGLEISFWIELVQKQLLWALDREKIWSRLTTSESIEVLEKDLAIFGFFVALGRSTQGYLSFKGLTDLDDSLNGIVRYLIGGSVLYYPQLSSISSYQLYVEVVCEELEWLPFYNDDVLSAKTDTEGREEVPKGEVISRVLNVCSYWMTSFTKYSSWLENPSNVKAAKFLSKGHVMLSDCMKELDISRNMSNDSGFLEPEEELDTGTELASFDKSLENVEEALVKLENLLQELHVSSSHSGKEDLKAACSDLEMIRRLKKEAELLEASFLAKAEYLEADASSGSLSPAEEGPVKTSSRTNDTSAPQKTGSRVDNKRRPFWDFFGRSLKVDPALADQDLITVANVEKEGMESNDILRFEQLRRELIELEKRVQKSADEAQKEEEMVVAEKTTAPSPGSSVSSRQTTKKENVITKSVEKVKETTTTVLQGTQLLAIDTGAAMGLLKRALIGDELTQKEKQALQRTLTDLASVVPIGILMLLPIPSTYAPGRLDLLRQIEKVKEMEVAEGSSEDILEELNK

SEQ ID NO: 55020 - protein, 241 aa, Zea Mays
MRGADADDRQLRDDLMTMLIAGHETTAAVLTWSVFLLAQSPTRMRKAQAEVDSVLSNGAITVESLKKLEYIKLIILEALRLYPQPPLLIRRSLRPDKLPGGCNGAKEGYEIPAGTDIFVSVYNLHRSPYFWDRPNEFEPERFSVPKKDESIEGWSGFDPDRSPGAMYPNEIIADFAFLPFGGGPRKCVGDQFALLESTVALALLLRKFDVELRGSPDEVEMVTGATIHTKNGLWCRLRRRT

SEQ ID NO: 55021 - protein, 614 aa, Zea Mays
MKFWSLKIHTGNQLGVVPCGLRRRRKSETLRAQYIDVRELRICAGTWNVAGRLPPNDLDIQEWLDMEEPADIYVLGFQEIVPLNAGNIFGAEDNRPVAMWEHIIRETLNKISPDKPKYKSHSDPPSPSRFKPSDDAFVMEDELISESDSEGDGEVHPLNEQDLVDSVDGIHGNKCEPQTILQDEEFSRLPSVKTFDRSNNLSFKESNLEEKICQKILTKTFSHSERLGMIWPEPPLDMFAQCLPDSTKPFASGKVLRSYLSFKSVNGDSGPFAEDNSVPDFYMSCAAVKRKRPYFVRIISKQMVGVYLSIWVRRSLRKHIQSLKVSTVGVGAMGYIGNKGSISVSMSIYQTHFCFICCHLTSGEKEGDELKRNADVQEIHRRTIFNLVSRVNMPKTIYDHERIVWLGDLNYRINLPYEKTHELISKQDWNKLFGKDQLKVELKKGHLFEGWTEGVINFPPTYKYKVNSEKYISDDNKSGRRTPAWCDRILSHGKGMRLLSYKTVDLRLSDHRPVTAVYMADVEVFSSKKLQRALTFTDAEAEEQLSFEEDNASGIYNLGLYESSSEVYTPLVRAKVFSKVTWLKPQPLMRALSRPRRNGLPAVSRSFPTLRLRR

SEQ ID NO: 55022 - protein, 690 aa, Zea Mays
MAHLLLSTRLCPKLLETLTARQWYLGVDIMGIHVKSGLTAMVYRKGLRLSNASRQSHTSGEIVNYMAVDVQRVGDYAWYFHDIWMLPLQIILALAILYKNVGIAMVSTLVATVLSIAASVPVAKLQEHYQDKLMASKDERMRKTSECLKNMRILKLQAWEDRYRLQLEEMRNVECRWLRWALYSQAAVTFVFWSSPIFVAVITFGTCILLGGQLTAGGVLSALATFRILQEPLRNFPDLISMMAQTRVSLDRLSHFLQQEELPDDATINVPQSSTDKAVDIKDGAFSWNPYTLTPTLSDIHLSVVRGMRVAVCGVIGSGKSSLLSSILGEIPKLCGHVRISGTAAYVPQTAWIQSGNIEENILFGSQMDRQRYKRVIAACCLKKDLELLQYGDQTVIGDRGINLSGGQKQRVQLARALYQDADIYLLDDPFSAVDAHTGSELFKEYILTALATKTVIYVTHQVEFLPAADLILVLKDGHITQAGKYDDLLQAGTDFNALVSAHKEAIETMDIFEDSDSDTVSSIPNKRLTPSISNIDNLKNKMCENGQPSNTRGIKEKKKKEERKKKRTVQEEERERGKVSSKVYLSYMGEAYKGTLIPLIILAQTMFQVLQIASNWWMAWANPQTEGDAPKTDSVVLLVVYMSLAFGSSLFVFMRSLLVATFGLAAAQKLFIKMLRCVFRAPMSFFDTI

SEQ ID NO: 55023 - protein, 56 aa, Zea Mays
MDPRAFLLQKFSSEERVQIDTALEQGVDAVRTLVLKGFSGSTERFNLVQKYKFHRV

SEQ ID NO: 55024 - protein, 84 aa, Zea Mays
MAKSWLDIGLAVFVAIPSLEGGQVFVQTAFNAHVLGFREVGRGWAHTGTSPEMPSGEADTRSPPKGALGRLLIHVDVAFTGGLA

SEQ ID NO: 55025 - protein, 91 aa, Zea Mays
MGGKCPHRKVKKRRLSHKTARRGKFLLKADDAVYDELVKLADQGKDAEAKELPVDEDLPGLGQFYCLHCDRYFASESVKDDHYRSKRHKKR

SEQ ID NO: 55026 - protein, 139 aa, Zea Mays
MPFWLQQQLDLGNVPCIASFSLSLHWIQRTQRTACRYGGKNIAFHVNEGSTSFWLSLLVEFEDGDGDIGSMQLKQANSAQWRDMQHVWGATWSLTPGPLVGPFSVRLTTLSGKQTLTAQDVIPKNWAPKATYTSRLNFA

SEQ ID NO: 55027 - protein, 71 aa, Zea Mays
MVAGTDPNRGPSIPLEFARLLMQCKPATCRGALVPGAASQQIKETARGRPRGPGLLTATGEREPMWSECCI

SEQ ID NO: 55028 - protein, 345 aa, Zea Mays
MVDLMVDSAQPLLMSWEERVDRNGGITDIKIDDDIRAYSADVISRTCFGSSYIKGKEIFMKIRELQQAVSKPNVLAEMTGLRFFPSMRNKQAWELHKQVRKLILEIVKESGEDRNLLSAILHSASTSRVGIAEAENFIVDNCKSIYFAGHESTAVTAAWCLMLLGLHPEWQNRVREEVHEVCRGQPVDSRSLQKMKNLTMVIQETLRLYPAGAFVSRQALQELKLGGVHIPKGVNIYIPVSTMHLDPELWGPDVKEFNPERFSDVRPQLHSYLPFGAGARTCLGQGFAMAELKILISLIVSKFVLKLSPHYQHSPTLKLIVEPELGVDLTLTKVQSVCTKRGTAI

SEQ ID NO: 55029 - protein, 139 aa, Zea Mays
MDGGDAPAAGGGKVACAAWIRRREDKSAAAPARVFAAYGRAGAAGSPAALEVLGFDAKECSLSPSPLARAVIGDGGAGDAPRGIAVHPAGDELVCATAKGCRRELEGEGGGDGFGGTSKGRGAVLEGDRRGGRRSWSWK

SEQ ID NO: 55030 - protein, 628 aa, Zea Mays
MATTEDSAAAGEARRLFALLESQQQVLSDCHGAWSRALAHFASREEDLASRSAALDEALAAADVSTSETLAALEARESSIPARLAEASAALSAAVAEAETESTGPPPTDIKGALRWICRRMDAAALWRFMAARRRELAVVRREAGPAVAMAVDPPRLVLDVVSDFLAAGDGVGGDQCWVLGMLLRSLFDLDGRKPPEIGDTLVERAFAVTKEWQERFGINMDNLSSEDKEVEMAEADGSENSGATEKKEGKEDEEQEEVEEEDEEEEEEEDPEEEEEEEEEDDPEEVEEPEAPGKEGNEVKGEGAEGKVSEEGEGAEGRVSEEGQGAEGKVSQEGQGAEKIGHEDEKKGAAVGTMKVKTGEEGNKGASEQSEAQIFVQMVAAFGLKDKFDEEFLRRLFVANGRKRELARIACVLGFEESLGDIVEELIKSGNAIEAIYVAHEADLLGKFPPVPLFKSYLQNSTDKAQAVLKSGRHSSSALEEANSLEGNAYRSVIRCVESCQLQSVFPLEVLRKKLGKLEKEKSDRKKAAGPSRFPNKRSRGAAGPYPFPAAKAARGSSFGPRFQNPVSRSLNYAPHAGYINPAAASPFSVPGSVSGRRGGVPYGGPGATYGGSPSFATGGGQQPFRR

SEQ ID NO: 55031 - protein, 149 aa, Zea Mays
MQYFQENLHNLSVVPNEEYDVLELKWNNGGEWMIGDFADDRTLRASIASFTAADGLQFPRDSDFYTRTSNFSDFAWSEQPEGQMAGASEAFQTPGAVSNRLSCGMTPKTVRLPKNGEMLLSVHGSPLGVYKEENLAAIEESGNGSEDAP

SEQ ID NO: 55032 - protein, 466 aa, Zea Mays
MICQTFKLLRNSYTYFVFFQVFGRTVICRDLETATKVARSNGLDCITLDGDQVGKKGAMTGGFYDSRRSKLKFVKIIRDNKTAIDRKTGHLESVVNKLKDILFWFNYNLVTKQQQMDAERDHAKSELEQFKADIARAMKQRGSLEKALVKKEKSLNNICNQIEQVQSSIAMKNDEMGTELIDQLTSEERDLLSRLNPEITDLKERFLMCKNSRIEIEARKEELETNLSTNLIRRQKELEAIISSADSRTLPLEAEAKEQELKSSKRNLDELTSLLKANVDAINNFTRKMDDLKRKRDDLKAREAILEQTVQDGAKDLEQLMNSRNTYLAKQEECTKKIRDLGLLPADAFEAYKRKNKKQLHKILYDCNEQLKQFSHVNQKALDQYVNFTEQREQLQRRRAELDAGDVKIMELISVLDQRKDESIERTFKGVARHFREVFSELVQGGHGYLVMMKKKANVLIVLFYC

SEQ ID NO: 55033 - protein, 76 aa, Zea Mays
MGFTSKLKRSRHGVSMKLRVRDPRPTQTVQDGLSFVASLKRVFACEPDKYDEIIATMRQFKSGRSIDSLFVLSVNC

SEQ ID NO: 55034 - protein, 686 aa, Zea Mays
MNEWNRLHDCCHADQENLLEVQVYAMSDSLTSKIGGTNKENYGDISDMNSDSSYRSFGRAGSMGLIGLENLGNTCFMNSSIQCLAHTPKLVEYFLGDYAKNINRTNPLGLNGELALAFGELLRSLWTTDGKPVPPHYFKEKIACFAPQFGGFNQHDSQELLAFLLDGLHEDLNQVKCKPYEEAKDASGRPDEEVADEYWSNHLARNDSVIVDTCHGQYKSTLTCPTCSKTSVTFDPFMYLSLPVPSTAKRVMTVTVFSTDGSREPCSYDVSVPKFGTLSDLVQALSIVCLLGDDEILLVTEVYNNCIIRYLEEPSDSVSLLRDGDKLAAYRLPKRHEKSPLVVFTHQHFVQHSSDGNLTPQMREFEAPLLAALPEEISGLSLQDIYLKLLSPFQLSNGASSLNDCMESNSDSVDTPSDSGSINFQNSQLEDGPESNHCSASECEVTKGPDDLYDGVSGSNKEAHMDFEFYLKSERGEGQQQKIEINELHLLLETAPSRLHVNVHWLQNASRKYATSMLNNLPEIHKLELIPKGTEDSVALHGCLEAFLKEEPLGPEDMWYCPRCKKHQQAMKKLDLWRLPEVLVIHLKRFSYTQFTRNKLETFVDFPTVDLDLSSYVADKSEQPSSHYRLYAVSNHYGNMGGGHYTASIYHEEGKGWYKFDDDCVTPMSEDSIKTPAAYVLFYRRE

SEQ ID NO: 55035 - protein, 152 aa, Zea Mays
MRPPPKPASGGGATQLASRPTSNRPGGGVLRLRLRLLQAPAVVALAAALAVSSAATPPPAPAPAPLCNLPPTLSGSDGGGRQGEANRIRHPKSERAARCTSKCVSTCVLGGYGAPGVAGPFNIRRPLVVFKDTFRSRQYWTAKMTSDREGVQ

SEQ ID NO: 55036 - protein, 277 aa, Zea Mays
MLMLLKPILSFCGMHIDPMRELRETCQYNGFDLGLPEPTKYNGEFHVKVEVNINGKMISCTAANRNSKDARKVAAQETLSKLKNYGYKHKRKSLEEILRSTTKKESELIGYDEEPINVEDDIDMQMNNLLINGERTSIQSTAGDNKVDKNDANSGRNNKSNVVMQNGCLPRGATDKINQKEYHGDMVRKTARSFLYELCAANYWKPPEFELCNDEGPSHLRKFTCKVLIEITGTSVSLLECYSDPKLQKRAAQEHAAEGALWYLKHLGYLPRDENRF

SEQ ID NO: 55037 - protein, 104 aa, Zea Mays
MQKLPSFDEDWARERKNAEAAGEVLRYVGVVDVVNKKGQVELRAYKRDHPFAQLSGSDNIIAFTTSRYKDQPLIVRGPGAGAEVTAGGVFCDILRLSSYLGAPS

SEQ ID NO: 55038 - protein, 954 aa, Zea Mays
MGKVEDEYESHAANRRGEVIDWLAELLPEFDLPLDSSDEELREYLIDGTALCYIAEKLMPGIQEEMWGGNAWDQRSNVKKFLYFVAEMGLPGFSVKDLEEGSVSSVVECLLALKDNVTTGLGQNVTNNAAKTPLRRKLELESDGPIISVMTPGRRPGEERWKGHWDPKSQQRSILHSGQKVHDAFQLKRGSYTDLPAAKVSEMMHPRSLDNAPTQSLLRVVNGILDESIERKRGEIPHRAVYLLRNVVQEIEHRIAIQADHIRNQNSIIKTREDKYRSKIKALETLVNGTNEENEVEKSKLDEKRKLGEQDMVRLMQEKENAENTIASLQQEIQVLSRMHEQYHERKETEARQMEEHLAMRLKEAEFLLMQSEKKVEEIESVSQLKSQLWTRKANIFQSFMDNQKLSIKDIRISSQSIKQEMFALQMKWIDEISSIGRELKGLVDAADNYHKVLAENQKLFNEVQELKGNIRVYCRVRPFLPGQDGKTTIIDYIGENGEILITNPFKQGKDVCRMFKFNKVFNTHASQAEVFSDIQPLIRSVLDGFNVCIFAYGQTGSGKTYTMSGPGTSKEDWGVNYRALNDLFDISLSRRNAFSYEVGVQMVEIYNEQVRDLLSNDIAQKRLGIWSTSQPNGLVVPDASLHPVKSTLDVLQLMEIGQTNRAVGSTALNERSSRSHSILTVHVRGVDLKNGSTSRGCLHLIDLAGSERVERSEAIGDRLKEAQYINKSLSALGDVIFSLAQKNAHVPYRNSKLTQVLQSSLGGQAKTLMFVQINPDTGSYSETISTLKFAERVSGVELGAARSNKEGKDIKELLEQVSSLKDTISRKDMEIDQLLKNKAKSPGSSIDRNDSRQQIRRLSGTGSSEAECEDNMSDDGCSVAGTEYSVGGASEATAERMQKAPSRIARLFHTKNGQPANSKPKPRESALKPPGRTTSTGGSQATGGSLVKPPKRR

SEQ ID NO: 55039 - protein, 195 aa, Zea Mays
MALYNLSTITDNLQAILSVQPIPPLIKLLKGSKKSSKTADKCCALLESLLAFNQCPLALTSEEGGVLAIVEVLEEGSLQGREHAVGALLTMCESDRSKYRDLILNEGAIPGLLELTVHGTPKSRMKAHVLLDLLRDSPYSRPKLQADTLENIVTNIASQIDGEDRGGKAKKMLAEMVKVSMEQSLRHLQRRASFA

SEQ ID NO: 55040 - protein, 423 aa, Zea Mays
MVIQYKKKHCIDERFCFFQGCCVYLHNAPLVNADYNVISDLALKRVKQDLTMHGGQVCSSIAPATHLVVVSVLQVYNFDNLYKSFPPAERRYLHDKRLHVVSNKWLEDSVEKQMKLSETAYSLKPDTLEELEIKRSEENVQPPEHKFEEHKEVERSHAENMPRKRSRPTSSRTARAAPRAVRRIRPRRGNQKAKIGDVESEESGPSECQDDENLDTDDTSKIEEGITNKNKGLPAPASKPAWRTGATKGNQHTKIDDSGSEESGPCETAQDDYISKMEVDNIDNDRGPPPGAQLFTLGEQEVKGVKLNTVEEKQDSPFQRTTAAEAMSSTPGEKIEQMADPLHAMLLDMLPLLGQKRTEDTSKAPLAKAEKDPPAIGSSTSNSEILLPDAGTSGVPAPEPSAAPPKKKKVSYRDVVSELLKDW

SEQ ID NO: 55041 - protein, 441 aa, Zea Mays
MVLAAIAASFRLHKTVPELSGNKSQLELDIYEEVGIPNSTVVVNMIHPLDGSNWTNIIFNIVPFPENVTISSTWLSILRSKFMSLVVRQSSIHLTEPLFGNASAFEVIKFPGGITIIPPQTAFLLQKPHATFNFTLNYPIYKLQDRTNELKDQMKAGLLLNPYENLYIKLTNSQGSTILPPTIVETSIVLEVGNHQPSVPRMKQLARTITNSSSSSGNLGLNHTVFGRVKQISLSSYLRHSLHSGRGSDAPSPAPMHHHGHHSHHHRHHHHSHDDNRHPAAPAPAPVHFPAPQPRYGAPPPSGGCPYSKNKPKKSGRAAPAAEPAANDHRSASIALPPHPSSPSPASWSQHAPSTPAVPPPPALPEPPLPTISFAHPRPPSERGTGTSPAPSEEATRAGPSGMSQVAPAPHSSYATRMQGDVPCCWVLFVLALCVLTSLLR

SEQ ID NO: 55042 - protein, 74 aa, Zea Mays
MWCMIYKNNQRNKQFISTQCQAAYTTDEKQLYHANAVSSGMYNKYNLINQHLDRKDWIMVAVGRPRRFFYVLHH

SEQ ID NO: 55043 - protein, 198 aa, Zea Mays
MDRSINFRGIAGSAGNIMQGMGKFVFGNEGLDSKEDSYVERYLDRISNGTIPDDRRSAMTELQSLVAESRLAQMSFGAMGFPILLNIFKEDREDVELVRGALETFVSALTPIEMSQGPKTEVQPASVNSDLLSRETENISLLLSLLSEEDFYVRYYTIQLLTALLTNSLKRLQEAILLIPRGITVLMDMLMDREVGAR

SEQ ID NO: 55044 - protein, 70 aa, Zea Mays
MTGCGFSSSSSEFGMVLHVPKSLASCGMMKLSSLPVRSAHLLRSASVSPTRFGDLTTSIPWIHCGFDSPR

SEQ ID NO: 55045 - protein, 1299 aa, Zea Mays
MAHAGRSGTGAQAQGAPRPSSHQVPSKTSAVAAGGSSSAPTPTSAAANAMPSSSAQAPPSEGPDTLADKKRAAGGGSVFKPPPPMVAVAVGSIDEDEKPGPTENDATSLSTTIRSNSLRRYRGSGSDDKTSLNESTVTDEDERAPSPNHQDEPHRQEAHISRSSQGSRPHGTPRGYGYYDDRGSHDKHGDRERSASIGYSNSGRRRYHDDRESHTRRAERERSTSNEYTNKRSRHEHSSRSSRTSARSDWDDGRWEWEDTPRRDYRDNRPGSRRQHPTRSPMLAAASPDARLVSPWLDGNTPRLAASPWDNVSPSPAPIRASGSSKGSSYSHSSGRSHQLTFSSTTSSNIIDADRSPSNPDRNSEITEEMMQEMDYNADRAWYDCEEHTTMFDGDHSMYLGDDNSYKKREAEMPKKLTRRDGSLMTLAQSKKMSQMTADNAQWEDRQLLRSGAVKGTEVQTEFDDEEERKVILLVHDTKPPFLDGRVVFTKQAEPVMPLKDPTSDMAIIARKGSSLVREIREKQSMNKSRQRFWELAGSKLGNILGVEKTAEQVDADTAVVGDQGEINFKEEAKFSQHLKDKAEAVSDFAKSKSLSQQRQYLPIFTVRDDLLQVVRENQVVVVVGETGSGKTTQLTQYLHEDGYTTTGVVGCTQPRRVAAMSVAKRVSEEMETDLGDKVGYAIRFEDVTGPNTIIKYMTDGVLLRETLKDADLDKYRVVVMDEAHERSLNTDVLFGILKKVVARRRDFKLIVTSATLNADKFSKFFGGVPVFHIPGRTFPVNIMFSKTPCEDYVEAAVKQAMTIHITSGLGDILIFMTGQEEIEATCYALAERMEQLISSSTKTIPKLEILPIYSQLPADLQAKIFQKAEEGARKCIVATNIAETSLTVDGIFYVIDTGYGKMKVYNPRMGMDALQVFPVSRAAADQRAGRAGRTGPGTCYRLFTESAYQNEMLPNPVPEIQRTNLGNVVLLLKSLRVENLLDFDFMDPPPQENILNSMYQLWVLGALNNVGGLTEIGWKMVEFPLDPTLAKMLLMGEQLECLDEVLTIVSMLSVPSVFFRPKDRAEESDAAREKFFVPESDHLTLLNVYLQWKSNQYRGDWCNDHFLHVKGLRKAREVRSQLLDILKTLKIPLTSCHMEWDVVRKAICSAYFHNSARLKGIGEYVNCRNGMPCHLHPSSALYGLGYTPDYVVYHELVLTTKEYMQCVTAVDPQWLAEMGPMFFSVKETDTSLLDHKKRQKEEKTAMEEEMEKLRRQQAEAARMEKEKEREKRAKQQQQVAMPGLKKGATYLRPKRMGL

SEQ ID NO: 55046 - protein, 348 aa, Zea Mays
MQRTLEDEENYESTLMSVDLNKEHLAIDNAGMKPVNCSKNTLGASIASPENTQVSEHSSSDEDANMTEQQDDDVTANGGNTQDLECTSPERSVERRPGFHGNPVPTAPEREVTDTEQVPETESEAGNVGCDDQRCDNIGGETMPLEDEVLLPENEEPTALLKDAGQPQSNMVPIPILDDGGGHCSEEKHEGACSESKRDDTHVGAIRTGDLLASEVAGSWAVETAPSVNGENESPRSLGDATERDEDGGSVAADALLTLVNSEGQAAGSQNNVEQASSKITDDRRVLSAMIGIVDPEFRKQMSRSGAGNEEPMSDAETDEGVEEGDSDSGSDGSDSDSEEAMVEDSVG

SEQ ID NO: 55047 - protein, 76 aa, Zea Mays
MPSLLTSPSSAVLGRRARRPSSLRRPPSFPWQELRSAPADLGTRRGSKQRLLPQDRLTVSRELLSLTSPTDKQCRR

SEQ ID NO: 55048 - protein, 319 aa, Zea Mays
MKRPQYRALSVRKETQTLSRNSEPREGQGSFNMATTMDNETRLNNIVKRPLKSLSKSSDYMLGPKECVLIVGWRPKVTEMIREYDNYLGPGSTVEILSETPIKERSSIINPLLQSQLKNVKETIINVRESAKSDKEVPLSIVVISDRDWFVGADAAQADKQLAYTLLLAENICQKHGVMVENLVSEIVDMGLGKQISKIRPSLSFIGAEEIMSRVTAQVAESSELNEVWKDILNAEGDEIYIKEIGLYMKEGEKISFLELSERAVLRREVAIGYIKDGKQHINPINKSEPLSLEMNDSLIVISEFEGEQPIMMGGETSG

SEQ ID NO: 55049 - protein, 110 aa, Zea Mays
MESLELDSFGLSIVPSSLVSTYCLFVEDVLDIVSDTVVVHEDAVSRVQRLTQGILGTQNIHGPGGEIDEYGRFGGRGRRRRANGQGKSGGRELRSEPKHPDDEWELPMDY

SEQ ID NO: 55050 - protein, 219 aa, Zea Mays
MLVAFCEQTEGQKLLEDLPVQAMLETLTKRYEKELIHPIQNLFSGELARAMLIQIQKLKLDLESGLLEMDQILRANAINFAVLAALPAFGLSLLLLVLLRAWVQRDHGAEGRGNIARCQRRLLLVDVERRLMEFQHYRDNGMEEEARCKFGLVLYTLDRLCKAVESHAKETGEWLSLRQDIFDLSKLDMGMPDKMIVVSRLKWMYNCLLPFSSSRLPRL

SEQ ID NO: 55051 - protein, 492 aa, Zea Mays
MSRSAIFKFISSIDKRFRILCYLMKFWAKVHDVNCPKDRTMSSMAIISLVSFHLQTRCPPILPAFSAVLKDGTDFASIEKNVSLFQGFGHSNKESIAELFVSLMSKLVSVEGLWEQGLCASNFEGTWISKTWAKGVGNLNVEDFLDRSQNFARSVGVKEMQKICECLRASVSDLSKFSKGEIAAPKLKALLFKPLNQVNPVIKPHQKTIKRKRTNPNKTRTNPIQKNAKKKKALEQDKLAISPGQKDGKKTLDQEKSVSSPIQKGAKKTKPLNQDKLVISPGQEDDKKPLVQDEPIVVSPIQKNNNKYVDQEKSLQQEKQIISPGQKDDKKSSKVGPDSACNHVQQKKVKATVSTGRAANTHVSSSRPRSVFIPQAHWPSQPIVDRFAHIPEHLISPSAFSYGLPQPLMHPAYPHPHSHQGLVGQGQGNFLHFNPGIELQHQGQAFFGPPAVYHPMVNGFHPFGINGAQQVQYIDNRMVQRPPYGFGPGFWG

SEQ ID NO: 55052 - protein, 271 aa, Zea Mays
MALRCALQMLKHDNEGKEFVEKIATRLHALSYHMRSYFWLDFQQLNDIYRYKTEEYSHTAVNKFNVIPDSIPDWLFDFMPCQGGFFVGNVSPARMDFRWFALGNMIAILSSLATPEQSNAIMDLIEERWEELIGEMPLKICYPAIENHEWRIVTGCDPKNTRWSYHNGGSWPVLLWLLTAACIKTGRPQIARRAIDLAERRLLKDGWPEYYDGKLGRYVGKQARKFQTWSITGYLVAKMLLEDPSHLGMIALEEDKAMLKPVLKRSASWTN

SEQ ID NO: 55053 - protein, 404 aa, Zea Mays
MKNMGFDAYRFSISWSRIFPNGTGEVNWKGVAYYNRLINYMVKKGITPYANLYHYDLPEALEVRYGGLLSREVVRSFADYADFCFGAFGDRVKNWLTFNEPRVVAALGYDDGRFAPGRCTGCEAGGDSGTEPYVVAHHLILSHAAAVQRYRRRHQPTQRGRVGILLDFVWYEPLTADSAADRAAAQRSRDFHVGWFLHPIVYGEYPKSVRRSVKGRLPKFTAEEAGLVRGSIDYVGVNQYTAYYVRDRRPNATAAPPSYSSDWHAEFVYERDGVPIGPRANSDWLYIVPWGLYKAVTYVKEKYGNPTMLLSENGMDDPGNVTVGQGVRDAARVAYYRSYVAELKAAIDGGANCVGYFAWSLLDNFEWKLGYTSRFGLVYVDFRTLRRYPKSSAYWFRDVIAGTN

SEQ ID NO: 55054 - protein, 275 aa, Zea Mays
MNVKEDYGELSSIARQGSGSACRSIYGGFVKWCMGEKDDGSDSIAVQLADETHWNDLVIIIAVVSSKQKETSSTSGMRDSVETSPLLQYRAQTVVPGRVLKMEEAIKNRDFESFAKLTCADSNQFHAVCLDTSPPIFYMNDTSHRIISLVEKWNHSEGTPQVAYTFDAGPNAVLIAQNRKTAAHFLQKLLYYFPPQDNDLSSYLVGDKSILGDAGLHSMKDVEALPAPPDTKIPDQKFKGDVSYFICSRLGAGPKVVVDEGQALIDSVTGLPKGV

SEQ ID NO: 55055 - protein, 212 aa, Zea Mays
MGPVTKNEWVMIGTMLLAVSLWIFGETIGVSSVVAAMIGLSILLVLGVLNWEDCLNEKSAWDTLAWFAILVGLAGQLTNLGIVSWMSNCVAKVLQSFSLSWPAAFVVLQASYFFIHYIFASQTAHVGALYSAFLAMHLAAGVPALMSALALAYNANLFGALTHYSSGQSAVYFGAGYVDLPDVFKLGFITAAINAVIWGVAGALWWKFLGLY

SEQ ID NO: 55056 - protein, 82 aa, Zea Mays
MAVHRLQPSPSGLQCSTARSPVLLHGPRLTGARTGRRAPTTGYVHPLSFGPSSLSSVLSHRAPKRFGLMPHLWLFFQHLTFE

SEQ ID NO: 55057 - protein, 113 aa, Zea Mays
MSEIHVWRLTTGRRELVVLSGAHTIGGKRVSGVPVVFDNTYFKVLLDNRPPQTSSTGNGMAAMVGLRTDWALTEDDECLRWIRIYAEDQARFFDDFRDTYIKLVDSGASWRTA

SEQ ID NO: 55058 - protein, 548 aa, Zea Mays
MYMRVWDVVKIAKDPSETRPLILCEYSHAMGNSNGNIDAYWMAIDNTFGLQGGFIWDWADQEDSDGSKFWAYGGDFGDTPNDSNFCLNGIVWPDRTIHPALHEVKYLHQPIKISSADNMLKIENGHFFETTEALDFSWVLHGDGCVLGSGPLNIPTLAPQTSQLINMESSPWFALWSACAAKEVFLSVNVKQRHETRWAKAGHLLASAQLCLPQKNGFVPSVIALSSSPLVCERIGDNVTICKNNAWKIKVNSQLGTIDSWKVNDVELMSKGILPCFWRAPTDNDKGGFFTKPYDSRWREAFLDNVSFHSSQFSVKELPDNTVEFSTLYYGVPGHLPKPDDEASESILFRVKMVCRIHGSGDVVLDYEVNPRSDLPPLPRVGVVFSAGRSLSHVTWYGRGPFECYPDRKAAAHVGVYESSVEELHVPYIAPVECGGRADVRWVALRDAGGLGLYASAHGGSPPMQMSASYYGAAELDRATHVHRLVKGDDIEVHLDHRHMGLGGDDSWSPCVHEQYLLPPTRYAFSLRLCPLLPSSSCHDIYRSQLPS

SEQ ID NO: 55059 - protein, 52 aa, Zea Mays
MQRDIRELACGWQPSEVRFCVWQIEVLDSKERHMEEAWAVSVDLSRVDRSTT

SEQ ID NO: 55060 - protein, 890 aa, Zea Mays
MITPGEFTEMAWEGIVGAVDAARLSKQQIVESEHLMKALLEQKDGLARRIFSKAGVDNTSVLQATDDFISRQPKVVGDTTGPIIGSSFVLILDNAKKHKKEHGDEFVSVEHILQAFTSDKRFGQQLFKDLKIVENDLKEAISAVRGSQRVTDQNPEGKYQALEKYGIDLTESARRGKLDPVIGRDDEVRRCIQILCRRTKNNPVIIGEPGVGKTAIAEGLAQRIVRGDVPEPLMNRRLISLDMGALLAGAKFRGDFEERLKAVLKEVTASNGQIILFIDEIHTVVGAGAAGGAMDAGNLLKPMLGRGELRCIGATTLDEYRKYIEKDAALERRFQQVYCGEPAVEDTISILRGLRERYELHHGVKISDGALVAAAVLSDRYITGRFLPDKAIDLVDEAAAKLKMEITSKPIELDEVDREIIRLEMEKLSLKNDTDKASKERLSKLEAELESLKQKQKSLSEHWEYEKSLMTRIRSIKEETDRVNLEIEAAEREYDLNRAAELKYGTLLSLQKQLEEAENKLVEFQQSGKSMLREEVTDVDIAEIVSKWTGIPVSNLQQSEREKLLLLEDVLHKRVIGQDIAVKSVANAIRRSRAGLSDPNRPIASFMFMGPTGVGKTELGKTLAEFLFNTENALIRIDMSEYMEKHAVSRLVGAPPGYVGYEEGGQLTESVRRRPYSVVLFDEIEKAHQEVFNILLQLLDDGRITDSQGRTVSFTNCVIIMTSNIGSPLILDTLRNTTDSKEAVYEIMKKQVIEMARQTFRPEFLNRIDEYIVFQPLDTTEINHIVEIQLNRVQNRLRQQKIHLQYTAEAVELLGSLGFDPNYGARPVKRVIQQMVENEIALGVLKGDFKEDDTVLVDVSSAAIAKGLAPQKKLVLQRVENGNDELVAND

SEQ ID NO: 55061 - protein, 179 aa, Zea Mays
MHKASDGQRRRVQICMGLLKSFKVLLLDEITVDLDVLARSNLLSYLKKECEERGATIIYATHIFDGLDDWPTHIVYIAHGKLQLAVPLEKVKEMSQLSLMRTVESWLRKERNEDRRRRKERKEKGLPEFDKVVEGSRVIGDPAKNADRVINNGWAAGRLTSTIAGEENFVFSSNSVLRQ

SEQ ID NO: 55062 - protein, 108 aa, Zea Mays
MFDASGEPTSLSFVFHKPHNPSTAATMSSSPSSVNRRPPGPLALGLESLAKKKTHRKKLTAKPPPDPVVALQWSDTERLVSSFESSSRCSSSGSGGQLHHPQLLWHLP

SEQ ID NO: 55063 - protein, 140 aa, Zea Mays
MGLNIPHPECCPICDQEFEDIDHLLVGCVFSRQFWYRWLGQVNLQGLTQPGDRSTMDWWKKAFDQLQGIAAKWLNSLIILGFWTLWNHRNGCVFEMLISDVASAIRKVEKELELWEMAGSKSLSPNGSHSCDLVGSSFVV

SEQ ID NO: 55064 - protein, 906 aa, Zea Mays
MASSGVRNGVGSRMSAKPDRQGAGATPKTAAGKHRLSSAAAGGGAYRRTSSGPLHAAAGGRAASDGVSSRVRVAVRLRPRNAEELVADADFGDCVELQPELKRLKLRKNNWESETYEFDELLTEFSSQKRVYEVVAKPVVESVMEGYNGTVMAYGQTGTGKTFTLGRLGEEDTAARGIMVRAMEDILADITPGTDSVSVSYLQLYMEMIQDLLDPVNDNIAIVEDPRTGDVSLPGATVVEVRDQKSFVDLLRVGEAHRVAANTKLNTESSRSHAILMVNVRRSVKGRTEMDVSISGENGHSLSMMGSLRPPVVRKSKLVVVDLAGSERIDKSGSEGHTLEEAKSINLSLSALGKCINALAESSPHVPVRDSKLTRLLKDSFGGTARTSLVVTIGPSPRHRGETTSTIMFGQRAMKVENMVKLKEEFDYKSLCRRLDIELDKLIAENERQRKYFDDEVERIRDEAQCRIAEAERECKITLENEKTKCHQEYLDSIRILEEKWKVHQQSPKKQNEEAESTSNDTREVHNLLQNEKMLRQSAEDEASDLKNQVSHWKKLEATATAEVVKLRKMLDTEASQKEKLEAEIDILRSQLLQMSMEADETGSLDKGNGPGKIFPGLDSLVSQTRSSQFREQSNGPKQPIAKLFEQVGLQKILSLLESEEPDVRVHAVKVVANLAAEEANQEKIVEAGGLTSLLMLLRSSEDETIRRVAAGAIANLAMNETNQDLIMAEGGVTLLSMTASDAEDPQTLRMVAGAIANLCGNDKLQIRLRGEGGIKALLGMVRCGHPDVLAQVARGIANFAKCESRAATQGNKVGKSLLIDDGSLPWIVKNANNEAAPIRRHIELALCHLAQHEVNSNDIINEGALWELVRISRDCSREDIRKLAYRTLTSSPTLQAEMRRLGIKL

SEQ ID NO: 55065 - protein, 198 aa, Zea Mays
MAFGRSLVTDSNGNYKGPLTLSLKQGSLLVMRGNSADMARHVVCTSSNRRVSITFARVRPSTPVDLSPLPSPTKALTPWQPQPATASQVPAPACMTQKPPVSGAIIGYAPTPQTVLAPAAWGMAMRAPVMMVAAAPARPMVMASLGTGGGNISKWMSRSGTGVFLPWTVGPKRYNKHLPPRIQKRRFSAMMSPIEAQG

SEQ ID NO: 55066 - protein, 314 aa, Zea Mays
MDGNKKASKMLPHIVVVASTNRIDAVDPALRRAGRFDSEVEVAVPTVEERLLILKLYTKNLHLDEKVDLQTVAAFCNGYVGADLEALCREAAKLAYHRMLNLCEGDKVLKLLMEDWECARSMVGPSITRGVTKEISIVSWDDIGGLKDLKKELQKVVEWPIKHAAAFSRLGIPPVRGVLLHGPPGCSKTTLAKAAAHAAQASFFSLSGADLYSKYVGEGEALLRRTFQKARLASPSIIFFDEADAIAPKRTGPGGNSSGNATVGERLLSTLLTEMDGLELATGIIVLGATNRPNAIDAALLRPGRFDKVLQCFC

SEQ ID NO: 55067 - protein, 83 aa, Zea Mays
MGNAEVDIRPLVEIVKMKLQDVADRTVVKKLVPNRQNCLAEESSIYISEGKVKQDMVVRLRNVESGEIELQLQWIDLPGSKGV

SEQ ID NO: 55068 - protein, 62 aa, Zea Mays
MATGPRSLHALLGGGAGLFHLFLTLRFQMQLLKRLQIMLLYGSIGCWLSVMTSPSREIGKFL

SEQ ID NO: 55069 - protein, 953 aa, Zea Mays
MPPFRMPSHFLALPLLLLLLLQAPSPEAAESTPGTRTRKIGSSGASSVFSLFNLKDKSKFWTESIIRKEFDDLEGSASRDSSKNGLLNFTRAGNIANYLSLAEVDSIYLPIPVNFIFIGFDGNGRHEFKLGPEELERWFTKIDHIFEHTRIPPVGEVLTPFYKTTVKKLQHYDLPLVSHVNHNFSVHAIHMGEDVLSVFEHAIKVLSCKDDLVDSRENEEIFLQVDSAQMEHIFSTLVDHLQIQEAYNIFVLNPKPIGKRINYGYRKGFSESEINLLRENKTLQARILQSKSDNKLFLDIEKGVNRRPLYESHPLSSFSWTRTDSMDMGDWSKKCKEALSKFELLKEGKSKEDIVYEKAVQILHGTKDEVHDIVQSALKSSDLKGLHAQCLTDIWIGRERFAFVDLSAGPFAWGPSVGGDGVRTELSLPNVAKTVGAVAEVTEEEAEEKLQDTIRERFSSFGEDYHAVDILLAEIDVYELFAFKHCVGRRIQLALCKELDERMHDLKKELEGYNTGDFDETNKKKALDALKRMESWNLFRDTSVEHHSYTVAHDSFLAQLGSMLWGSMRHVIAPSASHRVYHYYEKLSFQLYFVTREKVRSIKQLPVNVKSIRESLNSVLLHHQNSMFSQNMLSLSEDPSLMMAFSMARRAAAVPLLLVNGTYKSTVSTYLDSAILQHQLQKLNEHNSLKGRHSNHRSTLEVPIFWFIHNEPILLDKHYQAKALSNMVVVVQSDDDSWESHLQCNGRPILWDLRKPVKAAIAATAEYVSGLLPPHLVYSHAHETAIEDWTWSVGCNPSAVTSEGSQLSEFQQDVIARNYIITSVEESIQVINSAIQQLVIERTTEKGFKIFKAHESKMVEKYNAVVSLWRRVSAMSKGLRYGDAVKLMSMLEDASNGFSSAVNSTISSLHPVQCTRERKVDVQLDLTTLPAFLAVFLLLWFLLRPRRPKPKIN

SEQ ID NO: 55070 - protein, 175 aa, Zea Mays
MVAALTNESATSKSVYFSLCTSEMIYITHLLAPEPEKLAGPLLADTYVTLLKGRNAWYGQKLAKGELTLEMGDSIKGKGTIQGVSAVNAFYELLSQGSLSVMHPETKKAVAPVELCPILKTLYKILIKRELTTNSILQAIRDESMYDPRERIEMAQRQSLYRPSLLGLPKADAKA

SEQ ID NO: 55071 - protein, 405 aa, Zea Mays
MRMGGTRIKTRKRNIAAPLDPASFSDAIVQIYLDNGGDLELVAKSIESSDLNFSRYGDTFFEVVFVGGRTQPGTVKPEEGDRHPYSMLDCVAQRETILPFVLYIQKTLRRRPFLIKNLENVMRKFLQSLEFFEENERKKLAIFTALAFSQKLSGLPPETVFQPLLKDNLVAKGIVLSFITEFFKEYLKENTLDDLIALLKKGKMEDNLLDFFPSAKRSSEALSEHFIKEGLTSLVEYNEKKMFEVKLKEIKSTLTTMINDEAAIPEVIETVKQQVKDAKFPDLEVIRMLWDVLMEAVQWSGKNQQQNSNAALRQVKAWAELLNAFCTSGRLELELIYKVQTQCYEDAKLMKLFPEIIRTLYDQDVLAEDTVLLWFRKGSNQKGRQSFVKALEPFVKWLEEAEEEE

SEQ ID NO: 55072 - protein, 75 aa, Zea Mays
MESGFPLYLMESGFGASLFSCDFGIPAPFPFMEGMRCCWSAHWNGTDIDRTFRFISKELRLTDLWISLDALTKVN

SEQ ID NO: 55073 - protein, 359 aa, Zea Mays
MISAKDEPDAPLSPAMDGLLRVHKRITDSSDGESSQPQRSAGNIGPTRLLVPSSQAGSLIGKQGATIKSIQDSSKSIVRIVENVPPVALNDDRVVEIQGEPLGVQEAVELISSHLRKFLVDRSVLPLFEAHMKMHGMPREQPVPPPQHWGPPQTWIRPPNIPPGGPGFGGNPQFMHPRPQDSYYPSPDVPHMEKQPHYGISAYGREAPPSGASATGNQPPSHAGSQVAHDMHIPLAYADAVIGAAGASISYIRRHSGATVTIQESRGAPGEMTVEITGTAAQVQTAQQLIQNFMAEAAPPPPGPAPASNPPAPPVDPSYGSYPPPYGAAPSYGSSAAAGPPQYNGGNYGGPTYPPSYGY

SEQ ID NO: 55074 - protein, 119 aa, Zea Mays
MPSLLTSPSSAVLGRRARRPSSLRRPPSFPWQELRSAPADLGTRRGSKQRLLPQDRLTVSRELLSLTSPTDKQQPQQLRAPPACGFVKPSRQQQPRCLHVVRSTPICAAPARRRPPARC

SEQ ID NO: 55075 - protein, 1277 aa, Zea Mays
MKPSPHFPEIGKKPKDLIAKDHTFNIAAYISSGADVIAAALRKHVEEEARDLSGEAFLRFMDQLYEQISSLLQSNDVNENLLALRAIDALIDMPFGEGASKVSKFASFLRNVFEVKRDPEILVPASEVLGHLAKAGGAMTADEVERQIKTALGWLTGERVEYRRFAAVLILKEMAENASTVFNVHVPEFVDAIWVALRDPKQAVREKAVEALRACLHVIEKRETRWRVQWYYRMCEAAQVGLGRNASVHSIHGSLLAVGELLRNTGEFMMSRYREVADIVLDYLKHRDQLVRRSITSLLPRIAHFLRDRFVTNYLKICMDHILFVLRTPDERASGFVALGEMAGALGVELVPYLPAITSHLQDAIAPRRGRPSLEAISCVGSFAKAMGPAMEPHIRSGLLDAMFFAGLSDKLIDALESISTSIPSLLPTIQERLLDCISQALPKSSIRPGASVGRASRSNNLQQFVDSNSPVLVQLALWTLANFNFKGHELLEFARESVILYLEDEDSSTRKAASLCCCKLVAHSLSASSASQFGSNRTNRIGGAKRRRLVEEIVEKLLMAAVADADVGVRSSVFKALYRNPAFDDFLAQADILTSIFVALNDEEYDVRELAISVAGRLSEKNPAYVLPALRRYLIQLLTYLDQSMDSKCREESARLLGCLIRSCARLILPYIAPVHKALVTRLCEGTGPNANNALAAGVLATVGELAKVGGFAMRQYLPELMPVVVDSLLDGGAVSKREVAVSTLGQIIQSTGYVIAPYNEYPPLLGLLLKLLNGELEWSTRLEVLKVLGIMGALDPHAHKRNQHNLPGQHREVLRPTIETAQHIVSMEELPTDYWPSFSASEDYYSTVAISSLMRILRDPSLSSYHQMVVGSLIFIFKSMGLGCVPYLPKVLPDLFRAVRMCEDGALKEFITWKLGTLISIVRQHIRKYLQDILSLISELWTSSFSLAAPNRTIQGPQGSPVLHLVEQLCLALNDEFRMYLLHILPSCIQVLGDAERCNDYYYVPDILHTLEVFGGNLDEHMHLVAPVLVRLFKVELVDIRRRAIVTLTNLIPKVQVGTHVSALVHHLKLVLDGNNDDLRKDAAEALCCLAHALGEDFTIFIPSIRKILVKHHLRYRKWDEIENRLLRRELLITENLSVQKYTQCPPDVIRDPLDDCDGTPSEIADDTQRQARSHQVNDVRLRSAGEASQRSTREDWAEWMRHFSIALLKESPSPALRTCARLAQLQPSVGRELFAAGFASCWAQMSESSQEQLVRSLKTAFSSQTFLLKFLPRC

SEQ ID NO: 55076 - protein, 397 aa, Zea Mays
MGEEQWINKKSDKVDDGTLFQEIVLRKHPRDNQEIPCCVEDATREDMEITFLGTGSSQPSKYRNVSSIYINLFERGGILLDCGEGTLGQLKRRFGVNDADEAVKGLRCIWISHIHADHHTGLARILALRSKLLKGVPHKPLLVIGPRPLERFLNAYSTLEHLDMQFLDCRHTLKSSVEAFLSENDTDPATPQLETTMFAPGTRMENYNRKPASPRDTTALANFKEVLQESGLEILYSVPVLHCPQAFGVVLKAMEKANSTGKVIPGWKVVYSGDTRPCPGLIDASRDATVLIHEATFEDSMKDEAIARNHSTTKEAIEVGTSAGAYRIILTHFSQRYPKIPVIDEVDMEKTCIAFDLMSVNLADLPVVPKVLPHLKVLFKDELVVDEAEEVQEAAVY

SEQ ID NO: 55077 - protein, 373 aa, Zea Mays
MFLMPGLIITLYVTGALNTVLSLEHQKEIRRYLYNHQNEDGGWGLHIEGPSTMFGSALTYVILRLLGEGPDSGDGAMEKGRNWILDHGGATYITSWGKFWLSVLGVFEWSGNNPVPPEVWLLPYLLPFHPGRMWCHCRMVYLPMCYIYGKRFVGRITPLLLELRKELFKDPYSKIDWDKARNLCAKEDLYYPHPFVQDVLWATLHKFVEPVMMHWPGSKLREKALETVMQHVHYEDENTRYICIGPVNKVLNMLACWIEDPNSEAFKLHIPRVYDYLWLAEDGMKMQGYNGSQLWDTAFTVQAIVATNLIEEFGPTLKLAHNYIKNSQVLDDCPGDLNDWYRHTSKGAWPFSTADHGWPISDCTAEGLKHSEE

SEQ ID NO: 55078 - protein, 817 aa, Zea Mays
MVGSSVEGGADGDGGCCGVGDTSPGTIVWVRRRNGSWWPGRILGPQELPPSQIMSPRSGTPVKLLGREDASVDWYNLEKSKRVKAFRCGEFDACIEKAEATQGTLVKKREKYARREDAILHALELERKQLASKYQTQGFRPGPPGNISACTKHHKDLGSTRYKSKKGKKRKDASVPPDVKKEVGQCFLPAGSKRNFSGSLTQGNLVSNHMGDFSPLGHSHGGATLENKESTVVKKNRSDGSDFEDSLVSKSDRRRPLSQVLQSSENLLPHLKQNDDFGALLIAESNNPSLAASWSRRNKYTYMASDSGETESHSDLPSIKMSSTRTDFENESYLQHPVYFSEEQTSDFIEKQITESSERECSESETEDDAELLQNASVILRTESHAPCPYSIPVSDKFKHVDYDDNEVIYSTYMPQLNEYEEEDGSSELGVSQWHMKGKRNNRNAVKRLVDMRDGNTWLNKYNGSLKGSLHNTNGGNPRKEGMHTSGEQFFEESFYQIKEEPNYDSDETNLFENMSHSETNLYYGKKYPSSLRTTRDLSRGYSYFNDSSNVSPLNKDTERIYHVDRNAYWDRPSFYQRKLTSSFGGMGPMLFNVNLKVQASYQGEHVPLVSLMSRLNGKAIVGHPIQIEIVEDGSTAVFCGDSGMQETTAAPPAWPTGRRTAMQRVPRSNPSGALLDGDNEGGLVYSDYETKPTLRKYSSSSNHQVKVNNKISSNAKRSSAKPPKKSSKKTNLSSQKLRALSSISTAKNHHGEGGQAKANWHNDIFGGLIGSEGAVPLVTCVPTKVVFTRILEAVGRPPLSAARRVRMASPPVRDPP

SEQ ID NO: 55079 - protein, 450 aa, Zea Mays
MDTESLQQGSSSSWHTTGAVSCGAAQQQKRQRCQGSSSDQAGSSSSSSLQISEPEPQQIQEEEDYYMEDDCDDDFDGYDEDDYDFDEADFNQHLADKFDDLDLPPGVEATVPWLQKTTPKEDVKEPPKSNTADENANKYTQFKQFDTVQNFSDHYYAKNSHGEPNRAWSKRVQHDWKLLEKDLPAYIFVRVAEDRMDLLRAAIIGPKGTPYHDGLFFFDIHIPSAYPCAPPLVYYHSGGLRINPNLYNNGKVCLSLLGTWDGRGCEKWNPAQSTMLQVLVSIQALILNDKPYYNEPGYESYANTPNGERLALDYNDNTFLHSCKTMLYSLRRPPEHFADLVAGHFRVHGHTILAACKHYMAGNDIGSVVPEEEEEEEEEESSEHKSGDAGASGSAPELGVIKAIPTKRRSSFNPSLKVLYEDLLMEFNVKGADTRKFIDEKLKKNKPAAA

SEQ ID NO: 55080 - protein, 196 aa, Zea Mays
MQAIMIGVDLSAREYYIPGPSGSYLNYGAAASEVEIDLLTGASTIVRSDLIYDCGQSLNPAVDLGQVEGAFVQGIGYFMSEEYVTNSDGLLISDGTWTYKIPTVDTIPKQFNVKLLNSGFHKKRVLSSKASGEPPLLLAASVHCATREAIRAARNEQHCSGSKPSPSHFDLEVPAIMPVVKELCGLDNVERTAGVG

SEQ ID NO: 55081 - protein, 646 aa, Zea Mays
MEETHNTLKFASRAKRVEIYASRNRIIDEKSLIKKYQKEISSLKQELDQLRRGMIGGASREEILSLRQQLEAGQVKMQSRLEEEEEAKAALMSRIQRLTKLILVSTKNNIPALTDGHQSHNSLSEQDKLITSQDSSTLVQTEGTTKDPLSSALPDSLDEINQLRSGTGEQSSVTGSATDSMQVGFTASDHMDLLIEQIKMLAGEVAFGTSSLKRLIEQSIDDPEATKDQIENLEREIQQKRRHMRALEKQIMESGEASVANASMMDMQQTITKLTAQCSEKAFDLELKSADNRVLQEQLHQKNLEIYDLQEKVLRVEQQLSAKVDISPEKETDCAQQETIDLKSKLQSKEAEIEKLKYEHLKISEEHCDLINQNHKLSEEAAYAKELASSAAVELKNLAEEVTKLSVLNAKQAKELLVAQEMAHSRVHGRKGRTASRGRDEVGTWSLDLEDMKMELQARRQREAALEAALAEKELLEEEYKKKFDEAKKKELSLENDLAGMWVLVAKLKRGALGISDLNVDDRTVNLADITNSTKENKGGKNFALVEKQASEDSVKSLSSEEHTSPEFEPLLVRLKAKIQEMKEKDIDPLTDKDGNSHVCKVCFESAAAAVLLPCRHFCLCKPCSLACSECPLCRTRIADRIITFT

SEQ ID NO: 55082 - protein, 679 aa, Zea Mays
MPSMIDLVKDVRWNSELGGVQMEMRLVNYFAAQFNKQLGDGVDIRQSPKAMAKLKKQVKRTKEILSANTAAPISVESLYNDVDFRSTITREKFEELCEDLWEQALTPVKEVLTHSGMKIDDIYAVELIGGATRVPKLQAKLQEFLGRRGLDKHLDADEAIVLGASLHAANLSDGIKLNRKLGMIDGSTYAFVLEIDGLDYVKDESIDQILVPRMKKMPIKMFRSIRHTKDFDVSLNYDKAYELPPGIPSHKFAEYSVSGLTDASEKYANRNLSAPIKANLHFSLSRSGIIALDRAEAVIEITEWVEVPKKILTLESNITNQNSSSEVGAANSTTDSKENLSSGSNTNSSTPIDESNAQEIITEKVLKKRTFRVPLKVVEKTTGAGTILSKELYSEAKNRLEALDKKDAERRKTAELKNNLESYIYSMKEKLEESADILTVSTEQERESFAEKLSEVQDWLYMDGEDAQANEFKERLDQLKAIGDPILFRLNELKTRPTACENARLYLDELQKIVKNWETNKPWLPQKRVDEVVSEAEKVKAWLKEKENLQKKYTFEPAYFFLLSCKRWLTPIEHFAVPLSLTHQFSHLKKFLRKFWTYKIRSQVSIGFQNQNRRSRRKQQRRKNLLARRKPPIRNLHPTRVNTPKRLRNLRLKKRISLHQPTLVIQNLNLMTSCEKQNP

SEQ ID NO: 55083 - protein, 300 aa, Zea Mays
MTLAIGDGANDVSMIQMADVGVGICGQEGRQAVMASDFAMGQFRFLKRLLLVHGHWNYQRIAYMILYNFYRNAVFVLMLFWYILYTAYSATLALTDWSSVFYSLIYTSVPTVVVGILDKNLSHNTLLCYPRLYEAGLRNEGYNLTLFWITMLDTLWQSLVLFYVPFFTYNISTMDIWSLGSLWTIAVVIIVNIHLAMDIQRWVLITHLAVWGSIAATFLCMVLIDSIPIFPNYGTIYNMAASRTYWLSVCLIIVLGLLPRLLCKVVYQTFWPSDIQIAREAELFKKLPQQLGSRPASDIS

SEQ ID NO: 55084 - protein, 272 aa, Zea Mays
MITHIIEMEMDYINTSHPSFVGGTKVVELAKHEVLPPKTSASLSGRKDGTIVGSEIQLAAERSQKSRAVFARDAIRRVTSEQASVEAETSLTGGNQIGNSQVGESSSKLPSIIPLKEPPITLKPSETEQDATEVAVVKLLIKSYYDIVRKNIEDAIPKAVMHFLVNHTKRDLHNFLIRKLYRENLLNELMRETDEVLMRRQRIQEMLEILEQAHRTLEEFPFEVDKLEKGYNLTEHATGLSKIHGVSGDSTNVIYTSSPNCYSPHRASHMVL

SEQ ID NO: 55085 - protein, 446 aa, Zea Mays
MDQNILTGNIPTSFSNLYSLTLLNLSHNSFSGRLPDYLNDLKLLNKIDLSYNNFQGEIPKASIFDNATVVSLDGNPGLCGGTMDLHMPSCPTVSRRATIISYLIKILIPIFGFMSLLLLVYFLVLEKKTSRRAHQSQLSFGEHFEKVTYNDLAQATRDFSESNLIGKGSYGTVYSGKLKESKTEVAVKVFDLEMQGAERSFLAECEALRSIQHRNLLPIITACSTVDTAGNVFKALIYELMPNGNLDKWIHHKGDEAVPKRRLSLTQRIAVVVSVADALDYLHHDCGRPTVHCDLKKLNSKNCSCRSISSIGIKGTIGYIPPEYGGGGHVSTSGDVYSFGIVLLEILTGKRPTDPMFTGGLDIISFVENSFPDQIFQVIDPHLVEDRQKINQPNEVANNEMYQCLVALLQVALSCTRSLPSERSNMKQVASKLQAIKAAQLGGKSK

SEQ ID NO: 55086 - protein, 170 aa, Zea Mays
MSYYGVDFKIKFLTVGGKKLKLTIWDTAGQERFRTITSSYYRGAQGIILVYDVTKRESFSNLADVWTKEIEANSTNKDCIKMLVGNKVDKDDERMVTKEEGLAFAEEYGCLFLESSAKTRENVEKCFEELALKILEVPSLLEEGSSSVVKRNILKQKQESDAKNGSGCCQ

SEQ ID NO: 55087 - protein, 237 aa, Zea Mays
MKKLKKSEMLRRGQVEHVKAERNLLAEVDSAYIVKLYYSFQDEEFLYLIMEYLPGGDMMTLLMRKDTLTEDEARFYIAETVLAIESIHKHNYVHRDIKPDNLLLDHSGHLKLSDFGLCKPLDSSNFPNLNEPDYMSGKVTTPLPDTTRLSNPSAPRRTQQEQLSHWQKNRRMLAYSTVGTPDYIAPEVLLKKGYGTECDWWSLGAIMYEMLVGYPPFYSEDPMSTCRKVKFFLICNS

SEQ ID NO: 55088 - protein, 180 aa, Zea Mays
MADSATSRPTVLVTGAGGRTGQIVYNKLKERSEQFVARGLVRTEESKQKIGAAGDVYVADIRDADRLAPAVQGVDALIILTSAAPKMKPGFDPSKGGRPEFYYEDGMYPEQVDWVGQKNQIDAAAGVKHIVLVGSMGGTNPNHPLNSMGNGNILVWKRKAEQYLADSGIPYTIISKEAFT

SEQ ID NO: 55089 - protein, 78 aa, Zea Mays
MACFLHSTEKLYGEPHMNSRLLAWRTLRRSFLLITIHFMLGLVTEILMSSVTRRWEYLKARFLSSTQRVKWLSTVLLM

SEQ ID NO: 55090 - protein, 291 aa, Zea Mays
MVVDQVDMLCFHPMHSRDCSQVQRLASIYQLKSGCQGSGKKRFVTVTLTGHSSLPSADGQVRLEKLLGTESENSVSSSKGPARLKGHSAPGKCVKHWESSGNKSTKKQVSFAERPVSFVKCGTIVDSLTEAIAGPSGGDTSCVKPVESNSTHLGSFEVHTKGFGSKMMAKMGFIEGTGLGKDGQGIVQPIQAVHRPKSLGLGVEFDSVAEAIKARAEPIKLISELRRNVWAPETSGVGSFEKHTKGFGSKMMVNMGFVPGSGLGKDGQGIATPLTGVRRPKSRGLGAEDKY

SEQ ID NO: 55091 - protein, 138 aa, Zea Mays
MSEGRCMADLCGALHCDLMMQFKKPKSKCNAAAATRNRHLCESLADSCFPINQGLAASRLHEFFLRQFCDAHTCSKGTKPFPKGGRKQTNRLYLALSILTLILLPLFYLIVFLHQREMRKGTQDLKRFSKIGQKKKPS

SEQ ID NO: 55092 - protein, 143 aa, Zea Mays
MAIAGQCSSCYYTSPTLQLHRRHSHLPRQPQAARRARRPRLQVAAAADSGPIRAATDAEFFQPSDTRPIMLFDGVCNLCNGGVRFVREHDPNRFFRWVRNSNRSIRYVPLQSESGRKLLQRSGRSPDDISSVVLVEKDSLKRC

SEQ ID NO: 55093 - protein, 113 aa, Zea Mays
MNQPVQKNTLYVGGLAEEVDEKILHAAFVPFGEVKDVKTPLDQSTQKHRSFGFVTFLEREDAAAAMDNMDGAELFGRVLTVNYAFPERIKGGEQGWAAQPSCCIKYRHHFSAI

SEQ ID NO: 55094 - protein, 425 aa, Zea Mays
MIRDLNVAKRTEDIGFYAGFVGASFMFGRCLTSTVWGIAADRVGRKPVVVFGISSVVVFNTLFGLSVNYWMAIATRFLLGALNGLLGPIKAYAIEVCRPEHEALALSLVSTAWGIGLIIGPALGGYLALPAENFPTVFSPDSIFGRFPYFLPCLCTSIFAAVVLISCIWMPETLHKHKVHENRSRNIEALEARLIDSNEKVEESGSLDSKKSLFRNWPLMSSIIVYCVFSFHDMAYTEVFSLWAESDKKYGGLSLSSEDVGQVLAVTGASLLVYQLFLYPSINKVLGPIKSSRVAAILCIPILFAYPYMTYLSEPGLSIVLNIASVIKNNLGVTIITGTFILQNNAVPQDQRGAANGLSMTGMSFFKALAPAGAGIVFSWAQKRQHAFFFPGDQMVFFLLNAVELVGLLLTFKPFLAVPEQYDTR

SEQ ID NO: 55095 - protein, 158 aa, Zea Mays
MCSGPRKPSTPPLPAETATAKNSSVMATALLLELAAADDVVAFRRAAEDDKAPALDAVGHWYGPSAAGAGAAAGRPRLEARTPTMVAALYGSTAVLAYVLSSAPAEAARASPTDGATPLHLAAAGGAPAAVAAAHILLAAGASADARAFSGLRAGDSL

SEQ ID NO: 55096 - protein, 51 aa, Zea Mays
MEQRTNQEQDGDCFSRKSNENQILGRRSLRRAAEKVVSYKEMPLNVKMRRP

SEQ ID NO: 55097 - protein, 601 aa, Zea Mays
MEPLLQAYTERSRLPAPGDADELSVIEGQIAWMVHIIAAIVKVRQVTGVSQETQELIDAELSARVLQLISVTDTGAHTQRYQELSKQRLDRAILIFVQSFRRSYVGDQAMHSSKLYGRLSELLGLNDHLILLNVIVGKIATNMKCYAESEDVIDHTLSLFLDLATGYMTGKLLLKLESVKFIIANHSPENFPFLAEYKCSRSRTTFYYILGSLVFMEDSPVKFRTFMEPLQQVALNLEATPDAAFRTDVAKRAFVGWMRDLRGIAMATNSRKTYGLLFDWLYPSRMPLLLRAISLCTDEPEVTTPLLKFTYEFVLNKAQRLTFDSSSPNGILLFREVSKIIVAYGSRILLLPNGTDIYGSKYKGIWISLTVLSRALCGNYVNFGVFELYGDRALADALDISLKMTLSVPLSDILAFKKLSKAYFGYMEVLFNNHIKFVLNLDTNTFIHIVSSLESGLKGLDAGISSQCASAIDNLAAFYFNNITSGDSPPSPASVNLARHIGECPNLFPQILKTLFEIMLFEDAGNQWSLSRPILSLIMTSEQMFSELRAHILASQTVDQQQRLSQCFDKLMTDVNRNLEPKNRDRFTQNLTAFRRDFRLK

SEQ ID NO: 55098 - protein, 65 aa, Zea Mays
MDMNPLLPGKDDVYYTETDAVSHPLPALDAPSLSTERIAPFLNLPFAESAIRCCCFWTVKQYSGQ

SEQ ID NO: 55099 - protein, 439 aa, Zea Mays
MRPAVLAALLLVAAAASTAAALYSSGSPVLQLNSNNFKSKVLNSNRVVLVEFFAPWCGHCKQLAPTWEKAAGVLKGVATVAALDADAQQALAQEYGIKGFPTIKVFSPGKSPVDYQGARDVKPIVEFALSQVKALLRDRLSGKASAGSNGKTSGGSSEKNEPSASVELNSRNFDELVVKSKDIWIVEFFAPWCGHCKKLAPEWKKAAKNLKGQVKLGHVDCDAEKSLMSKYKVEGFPTILVFGADKESPFPYQGARVASAIESFALEQLEANSGPVEVSELTGPDVMEEKCASAAICFVSFLPDILDSKAEGRNKYLELLLSVAEKYKKSPYSFVWTAAGKQANLENQVGVGGYGYPAMVALNVKKGAYAPLRNAFQRDEIIEFVKEAGRGGKGNLPLNVAPTVVTSEPWDGKDGEVIEEDEFSLDELMGDSSSVNDEL

SEQ ID NO: 55100 - protein, 509 aa, Zea Mays
MHYYYEGVCSWQWFYPYHYAPFASDLSGLGQLNIKFELGTPFKPFDQLMGVFPAASAHALPLQYRRLMTDPNSPIIDFYPTDFEVDMNGKRYSWQGIAKLPFIDEDRLLAEIKKVEHTLTPEEARRNSIMCDMLFVNGSHPLSPYIYSLNSKFGHLPDKRRNEIKEKLDPSARLTKLNIVVVRQSLTPAIILYSGGMNGYITLCSGDPCPPIFRSPVDGLEDIMDNQVICSIYNLPDHHKHIAQPPVGVIMPKKIVEAGDLKPPPVLWHEDSGRRPHDNSNRQNPSGAISGRQLGEAAHRLVINSLNAQGRGQHSGTSMPYRTIMNGLHHLDVASPVSNQGMRPQVGQSAGPPGWYVPRGSVSNGQPPAYASSGSGHYQYESSGHSQYEQGNHGRQQSHPYARDGFHDTRGRVPPAYGYQQSNMYPSGPGLYGQPPSAYPGVHGGGYQPPPYGGGQQWQQQSYSSYAVRGPYGGRPPPTRADSGSQQPQNRYGALDRSNNRRPSSGYRR

SEQ ID NO: 55101 - protein, 770 aa, Zea Mays
MDTPDRPRAAAAAGFEDSPVFNFINNLSPIPPPKPLDSAHNVQLFKSSDLAPVSSIFASPHVNPVKETKVLIRDESVHLPQELHSPSSVRTRIDTSGSFRMIRCKDIVSDNCNITCQLNEASIDSSDHTSNSTGQLTQSIQDAAGSMESDKDQCDANKTDLTISQECTGLEGMNLDESGPDKMDSSHSGIVVHENQLSEQNNDEPAAYNEGYIITHQSTSDMLTLAIPSGTETQPVNDTQMADNPYSCESLLDDQSSGYCTQNSVHEPHLYWTGAVEGSAVSYTPQTLPGALQSQLMPCNKLSEPKDYVPTEQNALSQHLRGMRRRSLFNEKAGISNKGVDKTSDHHPVNSTTPKCKTISGDNSKPLRTPPCALPGIGLHLNALATIPKEKIVPREIQSTINESSNLIGPAGSSPAPFEQNIINDDFTQTTDVATAEASSQGSPKKKRHKFDNGDGTSCKRCSCKKSKCLKLYCECFAAGVYCSEPCSCIGCQNNQSHMETVLSTRQQIESRNPLAFAPKVIHTSEPGMDLGDFSNKTPASARHKRGCNCKKSSCLKKYCECFQGGVGCSVSCRCEGCKNAFGKREGASVLGIGEPKQGLEEKYVCVKEEKSEIDKQLVVYQTTDAAPAENVLTTPSMVECRPLACLPPASSKKSSKKPRSSTKLTGHPSRPCNLQAPPKTDVVLSPFENYAEMVLGDSTSDILKGNSSPHTSVKVVSPNKKRISPPRMGIGLSPICRSGRKLILKSIPSFPSLGGDVNNEDPKAKLPAP

SEQ ID NO: 55102 - protein, 254 aa, Zea Mays
MMMSDDDDAEPQLNAVEGYYFVDSKNEKEPVCFSTLPFWFGDTDDLPDGKKKLVLRGTGDPGVKVYDEVVACRLGLEGKQPEFAVLTAKGRRWIRLIRPLNSYEEMIRTVLITAQMLHFLRRKPHEPEKTLWNHLCKVFNKFDVPPSEDDFRNHCSLMKQFAAKDPVLAKSEILRVFIEGKSRKKFTEVGADHIDVKQPFITDDEGIDEMNVEDVDNESDEDDDEYLFDSICAICDDGGDILCWIKRFSVFYCD

SEQ ID NO: 55103 - protein, 599 aa, Zea Mays
MARIVSRALPFASRSSLRLPLPPPFPGAALVRSAAAGSPLPPAAEAALAASLLSWRGHTATPESSIAAPPPFAGFLAGIRRFRKGRRGQASAKRSQPQDAPPPPPPPPPPPKEREIELVARIGIEEDMPDDPEVLNIVEILKLNVPMAMKIALDGLLDSSYSTRDTSISDVGKYDKVEVSVLLCNDNFIQDLNKEWRDVDCATDILSMSQYIPDLDVPILMLGDIVISVEAAERQAGEKGVTLLDEVRVLVVRGILHLLGFQHESSNEAAAELEKEEQLILKSLRWKGKGLAKSVLDSSKPQTDSLDGQVTNDLKKAGSLRFYKPKFKYIFCDMDGTLLNSKSQVSARNAEALREARSRGVNIVIATGKARPAVIDALSMVDLSGRTGIVSESSPGVFLQGLLVYGLEGRRIYKRNLDQEVCREALSYSIENKIPFVAFSQDHCYSMFDHPLVDSLHYIYHEPKAKIVPSIGQLLETAEIQKVLFLETPERISSALRPYWAKAIEGRAHVVQAQPDMLELVPPATSKGNGVKVLLNHLSISPDEVMAIGDGENDIEMLQLASFGVALANGSDKTKAAANVIGATNDEDGVAQAIYEYAF

SEQ ID NO: 55104 - protein, 296 aa, Zea Mays
MGKYGINVPRGAAAGSVHEVKDALKNMFPSEKEIVVKSQILAGGRGLGTFKSGLQGGVHIVKAEEAELIASKMLGQILITKQTGPEGKIVSKVYLCEKLSLTNEMYFAITLDRKTAGPLIIACSKGGTSIEDLAEKYPDMIIKVPIDVFKGITDEDAAKVVDGLDGEIGCMVNGAGLAMATMDIIKLHGGTPANFLDVGGSASEGQVVEAFKILTSDDRVKAILVNIFGGIMKCDVIASGIVNAAKQVDLKVPVVVRLEGTNVDQGKRILKESGMTLITAEDLDDAAEKAVKASVK

SEQ ID NO: 55105 - protein, 231 aa, Zea Mays
MTKFQYGSQMTEFMVDMKCEGCVTAVKNKLQTLEGIKNIEVDLSNQVVRVLGSLPVKTMLDALHQTGRDARLIGQGNPNDFLVSAAVAEFKGPVVFGVVRLAQVNMELARVEATFSGLSPGKHGWSINQFGDLTRGAESTGNVYNPPDHLSDKPLGDLGTLEAGENGEAHFSGPKEKLRVVDLIGRSIALYATEDRSDPGIAAAVIARSAGVGENYKKLCTCDGVTIWESS

SEQ ID NO: 55106 - protein, 196 aa, Zea Mays
MRLPAGARLALLLARRSLSSSPRIPRAHTGIWSEAPSRSSPFSPPSSARRSFHGTRPVAARDYYDVLGVSKSASQAEIKKAYYGLAKKLHPDTNKGDADAERKFQEVQRAYETLKDEQKRSLYDQVGPDQYEKTASGGGGTGFEGGFGNPFEDIFGGGGGGGGMNDFFRNIFGDRDFGGRDVKFKGAAKRSPSKRL

SEQ ID NO: 55107 - protein, 166 aa, Zea Mays
MNSVPKPAPGSETSGREDFAVGDKDAVVIVDHGSRRQESNLMLNDFVEMFRAKTSYRIVEPAHMELAEPTIKDAFGKCVQQGASRVIISPYFLSPGRHWKQDIPALAAVASKEHSNIPYIVTAPLGLHELMVDIMNDRIKYCLRHVAGDVDECTVCAGTGKCRMYS

SEQ ID NO: 55108 - protein, 595 aa, Zea Mays
MGMFCLTNNTDILDLSCIESNMGERTESIRNGNSSCLTMQEEHLQAECGGYPHPDYISVDMIDERSLHDLPHGLSQNNEQYEMEQLPQNICESGSMQMASPDQYCSSPDQYCDDTSLSDFYMDVSSPESISCEQNQPEDIFFKSESSTDSSPVPSSRNSTTEDADKYLGQPSKQLLDSKIVPFSNQHTFKNMEYQKPLVLDKQYAYRSNNSSIHNSTKGCFSRDGDMVSDLCVLEGNRNPAPAHLWPYQGKFHHNFQQPVYGNSIIPAFGGTRYKPHDERTTLRLALQDISQPNSEANPPDGVLAVPLLRHQKIALSWMVKKETSISLCYGGILADDQGLGKTVSAISLILTERPPVPQSSTKNEPCEAVTLDEDDDCIGPHSEKLMRTCSSQVTSNTVKQENPIVAVKARPAAGTLVVCPTSVLRQWAGELKNKVTSKANLSFLIYHGSNRTKDPNELTKYDVVLTTYSIVSMEVPKQSNPDSDGEEKGKPDPYGAPVSSSGSKKRKASSSKKTKNKSVAESCLPEKPLAKVAWFRVILDEAQSIKNYRTQVARACWGLRAKRRWCLSGTPIQNAVEDLYSYFRFLRYNPLRCI

SEQ ID NO: 55109 - protein, 630 aa, Zea Mays
MHLSLGCRDPAHCTVAATVSSSTMSAASTVDPHPPHQQQQCSDKVSSMEMEIPADLIIRIGESVFPLHKAVMVPKCGYIRRAVEAVATRPSSKGGADADADPPATVELDLSALPGGADAFDKAARYCYGANFEITPQNAAALRCAAAFLDMRHASADLAGRVDEFLARAALRALPGAVAVLRSCEAPGLRAAAEELGVARRAADAVARGVCAEALSLSYSSASRGPGWWKLELAALSPRSFGKVVTALRCRRAEPAVVAAAAAAYAELTTEIRRGPPRAARVRGRRAGKHHAPGVPAPFLCRLLHAAVAAGASAKTCRDLELRVAAVLDQATAQDLLAVALDATGERVRNTDIVRRVVVAFVERQAAVTPAGERRSRRASMSGTTAATELGAARPGALEKVAMMVDEVAAEIATEEALPISKFVGVAGAVPKDARPSHDCLYRAVDIYLKTHPELDEIQREKVCSVMDPLKLSYQARTHASQNKRLPLQAALSALYYDELKLRSAATADVVLDTQSSAAGRACAQARAADAALARENEALRSELARMRAYLSGMERSKGGRSTPPSSPSRRAKKASFLGSVSRTMSRLNPFRSGGWMAKVTTSNAAGGGRQSKTMMQHVVTPKRRRASIS

SEQ ID NO: 55110 - protein, 195 aa, Zea Mays
MQTSAFGKSKGLRETLAEGTWMEAFDGLGISIILTCNPSIQYTAFDQLKKRIIQRQRRKNAASAEDNSIVSLSAFSAFLLGAVSKSIATVLTYPLIRCKVMIQAADPDEDDDVDSERPSKSRTPKTMLGALHAIWSKEGIPGFFKGLNAQILKAVLSSALLLMIKEKISKFTWVSLLALRRYLFVSQKRIKSVTV

SEQ ID NO: 55111 - protein, 366 aa, Zea Mays
MRSGRLAVAVAVALAWAFAASAAAAAQKYNAIFNFGDSITDTGNLCTNGRPSQITFTQPPYGETYFGTPTCRCSDGRVIPDFLCSRFGLPFLPPSKSTTADFKKGANMAITGATAMDAPFFRSLGLSDKIWNNGPISFQLQWFQQVTSAVCGQDCKSYLANSLFVFGEFGGNDYNAMLFGNYNADQASTYTPQIVSAIAAGVEKLLAMGATDVVVPGVLPIGCFPIYLTVYGTSNSADYDALGCLKKFNDLSTNHNAQLQAQISALQAKYKSARIMYADFYSAVYDMVKNPGSYGFSSVFQACCGSGGGKYNYQNSARCGMSGASACSSPASHLSWDGIHLTEAAYKQITDGWLNGPYCRPAILHS

SEQ ID NO: 55112 - protein, 125 aa, Zea Mays
MKGDYHRYLAEFKTGAERKDAADSTLAAYQAAQELPPTHPIRLGLALNFSVFYYEILSSPDRACSLAKQAFDEAISELDSLGEESYKDSTLIMQLLRDNLTLWTSDMQEDGGDEMRDANKPDEEQ

SEQ ID NO: 55113 - protein, 398 aa, Zea Mays
MPPAQAPSSGGAAWRQLLLLLTVLPLTLAALAFVLQWRGGGGVDDPTTRWPSHAFPGMAEPTPPSLPSSDCADVLVGSSAPSFPYIRGWSFTSDSGAAMGSVEEHLQPKVCVQTSTSAGLEQILPWLFYHKVVGVAQFLLFVEGKAAKPNVAGVLESIPGVKVVYRTKDLEERQARSRIWNETWLSGFFYKPCNYELFVKQSLNMEMAIVMARDGGMDWIIHLDTDELLYPGGAAEYSVRRLLAEVPRDVDMVIFPNYESSVEHDNIKDPFSEVSMFKRNYDHLPKDTYFGMYKEATRGNPNYFLTYGNGKSAARIQDHLRPNGAHRWHNYAKSPNEIKLEEAAVLHYTYTKFSDLTSRRDRCGCKPTKEDVKRCFMLDFDRAAFIIASTASEEEMLR

SEQ ID NO: 55114 - protein, 107 aa, Zea Mays
MANEGVAAERAVKAPPPETESIVWREDKGRFQTPDGEAFLQYRLLDGRGAPAAAVMDLVHTYVPRSKRGQGLAARLCDAAFAHAQARGMRVLPTCSYISLLTLCHLI

SEQ ID NO: 55115 - protein, 220 aa, Zea Mays
MIVVYSPESKPDRGIFVKHFKHIPMADMELVLPEKKNPSLTPMDWVTFLISAVIGLVTLIGSLEMPKADIWFVTAILSGLVGYCAKIYFTFQANMVQYQNLITKSMYDKQLDSGRGTLLHLCDDVIQQEVKEVIISYYILMEQGKATVQDLDSRCEQLIKEEFGMECNFDVVDAVKKLEKLGIVSRDSIGRILCVPLKRANEIIGTTTEEMVMRAQQASG

SEQ ID NO: 55116 - protein, 173 aa, Zea Mays
MILVKRMREELFDSILSQDISFFDEETVGDLTSRLGSDCQQVSRVIGNDLNLISRNLLQGAGALIYLLVLSWPLGLCTMFVCATLSAIMLVHGRFQKRAAKFAQEFTANANNVAQEVITLVRTVRVYGTEKQEFKRYANWLDKLYDVSFRQTVAYGGWSLSLNYLYHSTQLCV

SEQ ID NO: 55117 - protein, 168 aa, Zea Mays
MVGSVGNGLADLGARAVSMNGAGKALRPAEAAAAAAAAETLPMELDPSEALVAAAVEAKGEKAANGRREIVMGRNVHTSCFAVKEPDADDEETGEREATMASVLALYRRSLVERTKHHLGYPYNLDFDYGALTQLQHFSINNLGDPFIESNYGVHSRQFEVGAHKCPF

SEQ ID NO: 55118 - protein, 650 aa, Zea Mays
MVEDSSSVAVLDTAAGVWCDTKSVVTTPRTGRYSADAAGGDASVELTRRCRHAAAAVGDLIFVYGGLRGGVLLDDLLVAEDLAAAETTSAANHAAAAAAASSNVQREPGRYAYNDEQSGQTVTVSSPDGAVVLGTPVAPPVNGDMYTDISPENAIIQGQRRLSKGVDYLVEASAAEAEAISATLAAVKARQVNGEMEHSPDREQSPDAAPSAKQNSSLIKPDPALMNNSTPPPGVRLHHRAVVVAAETGGALGGMVRQLSIDQFENEGRRVIYGTPENATAARKLLDRQMSINSVPKKVIASLLKPRGWKPPVRRQFFLDCNEIADLDNAERIFSSEPSVLQLKAPIKIFGDLHGQFGDLMRLFDEYGAPSTAGDIAYIDYLFLGDYVDRGQHSLETISLLLALKVEYPHNVHLIRGNHEAADINALFGFRIECIERMGERDGIWTWHRVNRLFNWLPLAALIEKKIICMHGGIGRSINHIEQIENLHRPITMEAGSVVLMDLLWSDPTENDSVEGLRPNARGPGLVTFGPDRVMEFCNNNDLQLIVRAHECVMDGFERFAQGHLITLFSATNYCGTANNAGAILVLGRDLVVVPKLIHPLPPAITSPETSPEHHIEDTWMQELNANRPPTPTRGRPQAPNNDRGSVAWI

SEQ ID NO: 55119 - protein, 214 aa, Zea Mays
MVGMYQHQLRDDPFDTLSGGHCGEQPRVAGGGASSSSPSAVHDPLSAEVHGGGQPRQRVEALADGRSMLRGGGSGIVGAAGGDLGVLVRWMRELAADPVGPLPAPSEHRVRKRHVLAWRRARYLRLEDVADAEELPSFSKKRKLYWDQKKKGCLNMPTRKSERLAKRMKLMASLLLTQRKKIGVDSVFWKLIVTKMTWRKKRTKINLKDPALSE

SEQ ID NO: 55120 - protein, 222 aa, Zea Mays
MSCKFRHKTTAVIERPLFYGLKMGLLPSGNRALKLSIHAFLLFHFLVFFLPWQFRKGGSVGSQILTEISILIVTAGVSFCLEINYHFVQVAHTRRCSFAPPQSTAAAETNPTEFILETLEQSDPQSLIQYLAYQDLCVVSECNLEPWRRAAFFEESGETYRRIVTACLKPLEEFTSKIAEALEGFSSDQPELMLQQSRLFSAFDDSQVKLHHVYNDLCCIFG

SEQ ID NO: 55121 - protein, 1406 aa, Zea Mays
MKPLSRNIVRFEIVHLVYNPLVDHYLAVAGYEDCQVLTLNSRGEVTDRLAIELALQGPYIRRLEWVQGSQVQLMVVTNLFVKIYDLSQDNISPMHYFTVADDVIVDATLVPSSMGKLVLLVLSESGVLYRLNVTLEGDIGAKILTETVLVEDVISMHRGLSLYFSSTYRLLFVSHQDGTTFMGRLNADSSSITELSYINEDHDGKSKPAGLYCWRELVAGSGILTCLSKSKSNAPLVALLSPHQLVAQNMRHNTGANSSVVGVAAYKPLSKDKTHCLLLYDDGSLHIYSHTPSGGDGSMNLTAEQTKKLGSSILSSRAYTGTKPEFPLDFFEKTTCLTCDVKFNSETTKSGDSESIKQRLTSDDGYLESLTPAGFKVAISNPNPDIVMVGCRIHVGNTSASNIPSEITIFHRVIKLDEGMRSWYDIPFTTAESLLADEEFTITVGPTFDGSSIPRIDCIEIYGRAKDEFGWKEKMDAALDMEALGGNATGGRSGKRLQIVKAAPIQEQVLADALRILSRIYLLCQPSCFTDMVDGGMELDNMKCRALLETIFQSDREPLLHSAACRVLQAVFPKKDMYHHVKDTMRLLGVIKSLPAITSRIGVGGAASSWVIKEFIAQIHTVSKVALHRKSNLASFLESHGTELVDGLMQVFWCILDLDRPDTQTINSLVVPCVEFIYSYAECLALHSNEKTSVSVGPAVALLKELLFAPYEAVQTSSSLAISSRFLQVPFPKQTMIANDDAPENQAKASASAMNSTSANSQVMIEEDPVTSSVQYCCDGCSTVPILRQRWHCSICPDFDLCETCYEILDADRLPAPHSKDHPMSAIPIEVDTFGGEGSEIHFSVDELTDSGVLHADRSVQTSPSSIHIFDASESADLPETITDQATVSISASKRAINSLVLNHLIEELRGWMGTTAGTRAIPLMQLFYRLSSAVGGPFMDSSKPENFDLEKFVKWLMDEVNINKQFPAKTRCTFGEVLILVFMFFTLMFRNWHQPGSDNSHSKSSGSSDLTDKGPAQVLGSTTITLPSSSADLDKNEFASQLVRACSALRQQKFLNYLMDILQQLVHIFKSSSINGEAGSSGSGCGSLLTIRRELPAGNFSPFFSDSYAKSHPTDLFMDYYKLLLENTFRLVYSMVRPEKEKSAEKDRCYKVPNTKDLKLDGYQDVLCSYISNPHTAFVRRYARRLFLHLCGSKTHYYSVRDSWQCSHEVKKLNKIINKSGGFRNPVPYERSVKLIKCLSTLCDVATARPKNWQKFCLKHMDLLPFLMDNVYHFSEECVIQTLKLLNLAFYSGKDANHNAQKAETTDLGGSTRTSSQSPDMKKNRKADDGSEGSSEKSCMDMEQVVEMFSDKEGDMLKNFINIFLLEWNSAGVRHEAKCVLFGVWYHAKNRLRETMLSILLQKLP

SEQ ID NO: 55122 - protein, 77 aa, Zea Mays
MVRDVKLNPNPEEVADVKYVNRDQLKELLRKADAGEDGVKMSPWFRLVVDNFLMGWWDHVEQGTLQGAADMKTIHKL

SEQ ID NO: 55123 - protein, 160 aa, Zea Mays
MLPLRVQQSHTGGNLSNGSKANVHTGAPPPWLKANEHDPKNLSLKSCGLSSRKGKLRKLNPNRVGAAWAERRRAEMEMEKQGEIVPATSDSSWLPNFGSVWQSGTRKESRKEFEKSHKIHDTKSDHDLSLEIKPYISKRMRVGAEKASDKAEELGSHLPQ

SEQ ID NO: 55124 - protein, 290 aa, Zea Mays
MCRSIHQSPQRPARSCCPQATSSSSVRRPCVVAASMQQRVSISRYYIRTSPVVPMATTPHHHKHSQPAITDHSISSLVYRTAPHPRARRRSPASTYICLAARAKLAEMARALPLVLAASVLLAAAALLLAAAPAPAAAVDFGAEDLASEEALWALYERWRGRHALARDLGDKARRFNVFKANVRLIHEFNRRDEPYKLRLNRFGDMTADEFRRHYAGSRVAHHRMFRGDRQGSSASASSFMYADARDVPASVDWRQKGAVTDVKDQGQCAAGRSRRSPPWRASTRSRPRT

SEQ ID NO: 55125 - protein, 251 aa, Zea Mays
MEALRAWRASSNLIGFAASRAAASASRPLGLRIRCCSAAAATTNPPAQPQDRRRRSASSSASTSDRDSIRAIRLKKVDELRGKGYEPYAYRWDRTHTTKALQEQYTHLMNGEVCEDVSVSVAGRIVARRAFGKLVFMTVRDDAGTVQLYCEKDSLTEDQFEQLKAFIDIGDILGASGSIKKTEKGELSVYVKNFEILTKSLLPLPDKYHGLTDVDKRYRQRYVDMIANPKVADVFRTRAKVLTTCDAKSVF

SEQ ID NO: 55126 - protein, 315 aa, Zea Mays
MEFLILAGDHLYRMDYEKFIQAHRETNADITVAALPMDEKRATAFGLMKIDEEGRIIEFAEKPKGEQLKAMMVDTTILGLDDVRAKEMPYIASMGIYVFSKDVMLQLLREQFPEANDFGSEVIPGATSIGKRVQAYLYDGYWEDIGTIAAFYNANLGITKKPIPDFSFYDRFAPIYTQPRHLPPSKVLDADVTDSVIGEGCVIKNCKINHSVVGLRSCISEGAIIEDSLLMGADYYETEADKKLLAEKGGIPIGIGKNSCIRRAIIDKNARIGDNVKILNADNVQEAAMETDGYFIKGGIVTVIKDALLPSGTVI

SEQ ID NO: 55127 - protein, 442 aa, Zea Mays
MAHAASAILNFSENCRPDILTPYLDVIVGKLLLLLQTGNQMVQEAALTALASAADSSQEHFQKYYDAVMPYLKAILMNATDKSNRMLRAKSMECISLVGMAVGKQKFKDDAKQVMEVLMTLQGSQMEADDPITSYMLQAWARLCKCLGQDFLPYMSVVMPPLLQSAQLKPDVSVTSAGPEDENGESDDEGVETITLGDKRIGIRTSLLEEKATACNMLCCYADELKEGFFPWIDQVTTTLVPLIKFYFHEEVRKAAISAMPELLRSAKLAIEKGQAQGRDKSYLKQLSDYIVPALVEAMHKEPEPQICASILESLNESIQLSGTLLDQNQVRSAVEGVKEVIVASTNRRIERTERARAEDFDSEEEELLREENEQEDEIFDQIGDCLGTLVKTFKTSFIPFFDELSMYLTPMLGKNKSPEERRIAICIFDDVAEHCREAAVL

SEQ ID NO: 55128 - protein, 101 aa, Zea Mays
MKSVSTHDILTHKNAPSSQPAYVIRVSVSCVNKRKKRHFKNKSHSKSKKRRRRRKYSMLLENYNSVRWKQKGLGCIMRCKLGWWACGRVCVCVYSFVTSAA

SEQ ID NO: 55129 - protein, 283 aa, Zea Mays
MGAVAVNLVPGEKPADIYSEIASRVLNVVCEDSMKDPATNPTASLARVLVDQVDRKLVKQTVMTSVYGVTYIGARQQITKRLQEKGLITDDKLLYDVSCYATRVTLDALGQMFQSARGIMAWLGDCAKMIASKNQPVKWTSPVGLPVVQPYKKYKNYMIRTSLQCLALRREGDAIAIQRQKAAFPPNFVHSLDSSHMMMTAIACKESGLHFAGVHDSFWVHACDVDQMNQILRQQFVELYSMPILENLLEEFQTSFPTLEFPPCPPQGNFDVREVLTSTYFFN

SEQ ID NO: 55130 - protein, 97 aa, Zea Mays
MALVQAGMGLTRVVILVGAGVAGSVVLRNGRLAEILGELQEILDKGKKVKDGGGGDGETDLNEALTSQVRRLAMEVRQLGNSRSITVLNGGSAQSAY

SEQ ID NO: 55131 - protein, 541 aa, Zea Mays
MLTSENQLDFPKIINLLQRKYLLKDDFSLKVRALQTLGYILIAKPEFMLQKDMLNLIETALSSEVDYRFKIQGLQNLYEYLRDAESQLTAESTAKPPGQCEINGRSEVPVAAGAGDTNICGGIIQLYWSSILERCLDTNDQVRQSALKIVEVVLRQGLVHPITCVPHLIALEMDPLEGNSKLAHHLLMNMNEKYPSFFESRLGDGLQLSFKFFESIVSNHKMSANIKSNPIAFVKPGISRIYRLIRSNRNSRNKFVHSIVRKFESDSRSRSTVSFLVYCAEVLASLPFTCSDEPLYLIYDINRAIHLRAGGVEGNLKRWTSMSQSQEMAGMPTLPGESHVVMQEEPGGYYDNMGDATERVNDNPCSTSDVDIAKVQGDCHDAIALQLLLKLKRHLKVVYGLDDARCQAFSLKEPPKSGETFSRQNVSFNIGNTNLSLPSCLQDAASVYQDFKTVLREDSMDFAVFVPSVQTRKRPTPRNTTSPTPRSMTRVRRTAAPSVTKARGGARGDDSDDTDDDDWTGGPRVLDFSGGGRVTRQRVQV

SEQ ID NO: 55132 - protein, 1912 aa, Zea Mays
MKTESSPAGDSEEPLVHFKWRYMVRLIQWHLTEELLVPSVLIEWLSNQLQERDSDDVLELLLPIILGLVDTITLSQTYVRMFVELLVRRLNVDRPKRFSVSSVIAELLRYMVLAVPDTFVSLDCFPFPSFVVPDVYGRGALLKITSGGGILCSKRRDAYRYLSCGYAVSSIQKRAHDLAAVANPSLQARGAAKVVQALDKALVTGNLSVAYFSLFNDLSDALMEERWIKEVNPCLQSSLMWIGTVELSLICSIFFLCEWATCDYRDCRASPSQNVKFTGRRDLSQIHMAVSILKNKMDEMNNLSRPKSSTRITLNKVAKGSLNDACLTAAAVDDSSGLRSNAKNVDEKKDTNDIFESPGPLHDIIVCWLDQHEVSNVAGFTRVDVLIAELIRNGIFFPQVYVRQLIISGITDKNDTMLDVERKRRHHRTLKQLPGSSLFDVLEETRTAEEQQLYEMMSTYSSERRLVLSELSCGHSFYASGRGEYTSSSCIRKQSDLPVASEGDKHGRVLEQVEDVKALLSSLLGFTYPPLVESKLCEIKTSFQESVTSTLTQVETGEAKSGCEDCMRSKGQKLDDSATPFQGFPLIQSGEEDIWWVKKGTKLQESFNVEPVQKSVKQTSRGRAKVVRKTQSLAQLAAARIEGSQGASTSHVCESKMSCPHHEPNNDGDNVKDFDHTRAANVTAIGKSLKRLRLLERRSVSSWLLKSIRQLVDGNGMTASKATNSISILPLQPDDKTASKWRLGDEELLSVLYVLDTCCDSVSGVKFLIWLLVKIRGVGSSGQPGRTYMLMRNRDHQVCQVNEALVFSSLLRYENILLATDILPDVLSALVNRNSMSATTRHPGSTAFAYVRYFLKKYRDVASVAKWEKNFRTTCDQRLLAELDNGRSIDGDLVSSSGILAGEEIDEQVRQKLNGRSSRLVQNMKEIVQRQADGIQRSLKEKKVLAGAAPRNPLTFEKEDSYQIAHDIVLGLVECIRQNGGANPDGDLSIVASAVSAIVVNAGHMIAKHLDFAGGNYQGVNSVATSLNFVRHTLLIHINSLCLLKETLGDRFSRAFEIALAVETSAAVTAAFAPPKMHRNQFQPSPEAHDAYGNHTSELSNSGKGFVGRTAKVSAAISALVVGAVVHGAVSLERMVATLKIKDGLDIMQLLRGLKSNTNGVSHPTGGFRIENSTEVSVHWFRILLGNCRTVYDGLIADILGDPYIIALSRLQRMLPLTVIFPPAYSIFAMVLWRRYIFNCEDPQLYQSFSNAINDITRHQPFREIYFRNTHRLYNLLASDVGDSKFAAMLESHSPDRNSKILPFIPLRARLFLDAIIDCNTPTIQGDGASEPCDPKDNELKLSERLMQLLDTLQPAKFHWQWVEMRLLLDEQALMEKVAAGKTTLESLRSLSPKAEGFALSDSEKGFTEVILSRLLARPDAAPLYSELVHLLGKLQESLVMDVKWILQGQDAILGRRSTRQQLVHIAQRKGLSTKAQVWKPWGWSSLLSDAIPNKTAKRKLEVTSIEEGEVVDDTVDAKRTTKTPPHSVDRSFEGIRSINKYLTEKALAELVLPCIDRSSADIRGILSVDLTKQMGAISEHIKAIALNGAKQAGSVSSGNEVPSNKSSGRRGIRGGSPNIGRRAPVGNDPSPPSASALRAALWLRLQFIIRLLPVIMADRSMRHTLASAILGLLATRMIYEDADLPLPPTNATALRRDVDSLLEPPLDVLLDRPGESLFEKLLCVLHALLGSYKPSWLKSRSASRSSIKSQRDFSAFDNEAAEGLQSALDHMELPETIRRRIQAAMPLLPPSRRPCMQCQPPQLSLAALSPLQSSTSGVGPQQKSSCVSWVPTNVSVRSKAALPSHDPETEVDPWSLLEDGTNCPPSTASGSNGSSGVTGDHANLKASSWLKGAVRVRRTELTYIGSVDDDS

SEQ ID NO: 55133 - protein, 454 aa, Zea Mays
MAEDGCDRDQQQQQPAAAAASGGAGVEGRSRESVKLFVGQVPKQMSEAELVAMFRGVALVDEVTVIRDRATRVSRGCCFLICPSREEADKAVTAYHNKRTLPGASSPLQVKYADGELERLEHKLFVGMLPKNVTDAEMIDLFSKYGNIKDLQILRGSQQTSKAGCAFLKYETKEQAVAAIEALNGTHKIEGSSVPLVVKWADTEKERQARKAQKSPFQSSNMLNANAMRQNSVFGALQMGYVPQYNGFGYQPQGTYGLMQYPPLSPVQNQAAFQNMVQPINQASSTRGANSELPPDLVPRSFNSTQLGSPYSPLPGLQYPGVYPGGPINHRPFSNSHSSTKVQNLNANLPSSSPSSNPAPQIEGPPGANLFIYHIPQEFGDHDLANAFHSFGRVLSAKVFVDKATGVSKCFGFVSYDSPASAQAAISVMNGYQLGGKKLKVQLKRDNSKHSKPF

SEQ ID NO: 55134 - protein, 53 aa, Zea Mays
MASVVSFVCERGMLSCFARVAREVHIRNPCVWLPVSPGAWPMGCRNKTNSLFG

SEQ ID NO: 55135 - protein, 244 aa, Zea Mays
MLFRSFNESLLWETLTGKEHLFFYGKLKNLKGSALMKAVDHSLKSVNLSHGNVGDKQVKKYSGGMKRRLSVAISLIGDPKVVFMDEPSTGMDPASRNNLWNVVKEAKKNRAIILTTHSMEEAEVLCDRLGIFVDGDFQCLGNPKELKARYGGTYIFTVTTPPDQEMEVEHLVRQFSPSANKIYHLSGTQKFELPKQEVKIAHVFDMVEKAKRRLSIHAWGLVDTTLEDVFIKVARGAQVFNEFA

SEQ ID NO: 55136 - protein, 143 aa, Zea Mays
MELSTPVGSSLARTATMALVSPSFKITNQMCARGMPLECQFPHRLPSVACSMLLNTQPSQRTNHKDCGLLQVQCTENLMQSPVSFSDFSVSVCAQEDGLIKLQVNVSGTMTDSIFEKVFTKNVAAAQPLPGFRRMKGDVLKGY

SEQ ID NO: 55137 - protein, 90 aa, Zea Mays
MLQIFVAIMTKAYPNVERSELILIQEIATYMLLVCGAVYIIAGILCLGVLKRSRQHKATSQEQAAKDLEELEKRREELESLLTAERSEMA

SEQ ID NO: 55138 - protein, 253 aa, Zea Mays
MGSVTLLTGQPKEGVFVEARSESTGFYEEATTDSFGRFRLRGLVPGSTYSIRVAAKDNLQFAAVERASPEYLSVNVGHEDMTGIDFVVFERPEVTILSGHVEGDGIDTLHPHLSVEIRSATDSSRVEAVLPLPLSYYFEVRDLPKGKHLVQLRSGLPSHTHRFESELVEVDLEKDPQIHVGPLKYKTEERHQKQELTPAPVFPLIVGVSVVALVISMPRLNDLYQSAVGMTSLGSGMAPTKKEPRKNILRKRV

SEQ ID NO: 55139 - protein, 385 aa, Zea Mays
MLPITLGRVPPSDLVLKDSEVSGKHAQINWNGKTLKWELVDMGSLNGTFLNSQAVHHPSAGSRHWGEPAELAHGDIITLGTSSKLSVQILLQNQRVPAGVGMASDPMVARRSGKKLPMEDISFCQCPLQGVEHFGLFGIFDGHGGDGAAKAVSKILPEHLGYILSHPETKERVQSYSDASDVLRYAFTLTEDTIDHQYEGCTGTALLIWFDQNKDCFAQCANLGDSACVMSVNGKTIDMTEDHRVTSATERARIARTGQPLRDGEARLSGLNLARMFGDKFLKEQDPRFSSEPYVSQAVRITKACTAFAVIASDGLWDVISTKRAVQLVVEGKERRSSGDATSAAARVASRVLDEARSLRTKDNTSVIFVDFDVLRRDPCISPVD

SEQ ID NO: 55140 - protein, 795 aa, Zea Mays
MARGGGGGCCPPMDLMRSEAMQLVQLNAEKSPFQRTYAAQIKRCSEMARKLRFFKEQMSKADIGPTQLNETHLDFDDLEIKLGELEAELTEVNANNEKLLRTYNELLEYHTVLQKAGDFFYSAQRTAASQQRELEANQSGQTSLESPLLEQEMSTDPSKQVKLGSLSGLVPKEKAMAFERILFRATRGNIFLRQEPVDEPVTDPVSGEKVTKNAFVIFYSGERAKTKILKICDAFNANRYPFPEDVSKQLHAVQEVSGKISELKATIDMGLAHRDSILKNIASDFEQWNHLVKKEKAIYHTLNMLSVDVTKKCLVAEGWSPVFASIQIQDALQRATVNSKSQVGSIFEVLNTKESPPTYFQTNKFTSAFQEIVDAYGVAKYQEANPGVFTIVTFPFLFAVMFGDWGHGICLLLATLYLIIREKKLASQKLGDIMEMMFGGRYVIMMMAVFSIYTGLIYNEFFSVPFGLFGKSAYACRDSSCSDATTEGLIKVRDAYPFGVDPVWHGSRSELPFLNSLKMKMSILLGVAQMNLGIVISYFNAKFFRNSLNVWYQFIPQLIFLNSLFGYLSLLIIIKWCTGSKADLYHVMIYMFLSPTDEIGENQLFSGQKTVQLVLLLLALVSVPWMLIPKPLLLKKQHQQRHQGHQYAMLQGVDESVGAELGEHHEEAHDHEEFEFSEVFVHQLIHTIEFVLGAVSNTASYLRLWALSLAHSELSTVFYDKVLLMAWGFNNVIILIIGIIVFIFATVGVLLVMETLSAFLHALRLHWVEFQNKFYEGDGYKFAPFSFALIREEED

SEQ ID NO: 55141 - protein, 62 aa, Zea Mays
MDVHDDLDVFLRTETQGNKYLGCEHYKRNCKLVAACCNKLFTCRFCHDKVTQEVHLLTLMTM

SEQ ID NO: 55142 - protein, 330 aa, Zea Mays
MNFPLQRPPCLLHLFISRGFPCPLLNHRAGRLPVALAAALARRSRDKRGKAAACRLKPSLPPSSPPPYVRFFLLMETSAPPNAPAPPAQPRRRLPDFQQSVRLKYVKLGYHYLISHGMYLLLSPLMALVAVQLSTVSPHDLADLWEQLRFNLLSVVACSTLLVFLSTVYFLTRPRPVYLLDFACYKPESERKCTRETFMHCSKLTGSFTDENLEFQRKILERSGLGEDTYLPPAVLRVPPNPCMDEARKEARAVMFGAIDQLLEKTGVRPKDIGVLVVNCSLFNPTPSLSAMVVNHYKLRGNIVSYNLGGMGCSAGLLSIDLAKDLLQAV

SEQ ID NO: 55143 - protein, 191 aa, Zea Mays
MSFSSGGHHPSRPDQPRIPFPVRCFPFTTTPPPRRSRRPRRQTLRPRRNGDTYAGEYFADRMHGFGIYSFANGHRYEGAWHEGRRQGLGMYSFRNGETQAGHWQNGVLDTLSTQNFIPGSPIAVNHSKVLNAVQEARRAAEKAYDIPRVDDKVNRAVAAANKAANAARVAAVKAAQKRIPSNGDDLPLSVV

SEQ ID NO: 55144 - protein, 50 aa, Zea Mays
MRIKAKRAERARWRTGNRASTGQGKRLARQHAKLSPATTVESATERWRIR

SEQ ID NO: 55145 - protein, 278 aa, Zea Mays
MMQQPPPQQPQPGMAPPPPPQAAGGQPPQWGGIPPPMAQQYGAPPPQQPPAMWGQPPPQAHYGQAPTPQQYYAAPPVPVQAPAAPAAADEVRTLWIGDLQYWMDENYVFGCFSNTGEVQNVKLIRDKNSGQLQGYGFVEFTSRAAAERVLQTYNGQMMPNVDLTFRLNWASAGEKRDDTPEYTIFVGDLAADVTDYLLQETFRVHYPSVKGAKVVTDKLTMRTKGYGFVKFGDPTEQARAMTEMNGMPCSSRPMRIGPAASRKNTGGVVQERDICWWA

SEQ ID NO: 55146 - protein, 516 aa, Zea Mays
MMLLNQIRGKAVVFTGHSLGGAVAALTALHYLCISSSSSPPAPPVLCVTFGSPLLGNEALSRAILREHWGGNFCHVVSQHDVVPRLLFCSPDAVPAHIIVGMQLQQWPAWTRHTGAVSTVTAHMADTDKDVLRQLIQTHVGAVAVEQKLAASETTGGSPYRPFGTYVLCSPEGAACVDNPTAAVQMLYATFASQSSAGAESPEAAHSCYGELVLKMPHHLLLKRWLRVDDDMPATPNYDDGVSLALEASGIDVMAMEASTARHWLKTSKRAGRRPSLNCARLATQLGRVTPCRAQIEWYKALFDAEMGYYDAFKQRRSPRKYTKVNLNRIKLGQFWDRVLSMLDAGQLPHDFHRRAKWVNASRFYQLLVEPLDIADYHRHGHHLTSGSYMTHGRERRYELFDRWWHEKGCTGAGGGITSSMSAASASSRRRSKYAGLTQDPCFWARVEEAREQTESARRERDVAELAMKLEELQEFERYSRELVATKEVSVDVLAPQSSYTLWVEDWNQLKLRAQG

SEQ ID NO: 55147 - protein, 113 aa, Zea Mays
MAVDIAPDNLEADTSSYHCSVVRDLALEQIDPSLAIGFYCRDKDDFDDFCSRASELAEKANGAPLFTVMQSVQPSKQMYKQDDGLCCCSGSSMANEDYDLDASGEAGEEWQIL

SEQ ID NO: 55148 - protein, 401 aa, Zea Mays
MAKTDFILMDSAGVSGASGTSWTDEETLLLLEGLEIFGGKWAEIAEHVATKTKAQCMLHFLQMQIEDRFHDGKDINQNIPVSTDQATTEKAIAETSEKMEVEDKVEGRGTVDEKASEKTEGNCEETKTENASVVVNKDTQNSDGRDSGASPSTEEPKQSSDEQPVVKENSADVDTSGEKLSNVAIDILKSAFEATGHSPEYEGSFADAGNPVMALAAYLAGLVEDDNTTTSFRSSLKSVSDVSPALQLSSRHCFILEDPPDELKDICASVSKKNRDGDQKQDEDMIQNSIDTEKKEINEKEGKSLSVEKKNNSSMSQNDHQESGIKSVSSDDCSLVEPKTNNAKESGDSTAIGDKSATETTKGNTEQVNDLPSVEVEAPDDSSSKASVQMNTNIMRFSVKE

SEQ ID NO: 55149 - protein, 313 aa, Zea Mays
MAAACLRRLHRIPHPVLKLAAATHWPLPFPGAKLAPVTQSCPSADRVEVQLSARCPGFASNGNFKHRWHHKLGSSVGAVLIGHAAFFLGLSNGSAFAQEDSVSPAAASEHAEGNAPGLQPIEDGSVVSNEHTVKWRIYTDNAREFFQKRQLDEAEKLFQAALLEAKEGFGLRDPHVASALNNLAEFYRLKKEHVKAEPLYLEAIEILEESFGPDDIRVGRTVHSLGICYHLQLKLAQAQTCYERALKIEGRVLGVGHPEYSSTMYSLAKVLSLQGKRKNAECLIEESIRILEEAGLGDSLTCLRRMVSLSREN

SEQ ID NO: 55150 - protein, 967 aa, Zea Mays
MLVELKKLIEANPLFREKLVFPTLKASRLRTLINQSLNWQHQLCKNPRPNPDIKTLFTDHTCSPPNGARASPVSVPLAAVPKAGAAYPPLTAHTPFQPPPGPSLAGWMANAAASSSVQSAVVAAASIPVPPNQESEQLMKRLRPGGHGIDEATYPAPTPQPAWSVDDLPRTVACSLSHGSNVTSMDFHPTRHTLLLVGSANGEFTLYEIGLRETLLSKPFKIRDINACSPQFQNAVVKDSSISINQVTWSPDGEMIGVAFTKHLIHLHGYQPPNETRHLLEIEAHSGGVNDIAFSRPNKQLCVVTCGDDKLIKVWDMHGHKLFTFEGHEAPVYSICPHHKESIQFIFSTSLDGKIKAWLYDNMGSRVDYDAPGKWCTTMLYSADGTRLFSCGTSKEGDSYLVEWNESEGSIKRTYSGFRKRSAGVAGVVQFDTAQNHILAAGEDNHIKFWDVDNNNMLICTDAEGGLPALPRLRFNKEGNLLAVTTADNGFKILANADGLRTLRALGSRPPFEAFRPQYEASSMKVSGAPVVASISPNIGRMDHLDRNSPAKPSPILNGGDTASRSIDIKPRISEEKPDKAKPWELMEVLNPQQCHVATMPETPDQARKVVRLLYTNSGVGLLALGSNAIQRLWKWSRNEQNPSGKATASVVPHHWQPNSGLVMTNDTADTNPEEAVPCIALSKNDSYVMSACGGKVSLFNMMTFKVMTTFMPPPPASTFLAFHPQDNNIIAIGMEDSTIHIYNVRVDEVKTRLKGHQRRITGLAFSTNLGILVSSGADAQLCVWTNDTWEKKRTVSIQMPAGKTPSGDTRVQFSSDQSHLLVVHETQLAIYDASKMERIYQWIPQDTLSASISHASYSCNSQLVFAAFTDGNLGVFDAENLRLRCRIAPSVINSNPPVHPLVVAAHPHEPNQFAVGLSDGSVKVLEPLESEGKWGAPAPADNGIIPNGKTPASSATSNPAADQIQR

SEQ ID NO: 55151 - protein, 479 aa, Zea Mays
MDILGPSLWDVWNSFGQLMTPNMVACIAVEAISILEKLHAKGFVHGDVKPENFLLGQPGSPDEKKLFLIDLGLASRWKESGSSGQHVEYDQKPDIFRGTIRYASVHAHLGRTGSRRDDLESLAYTLIFLLRGRLPWQGYQGENKSFLVCKKKMATSPDLLCCFCPTPFKLFLETVTNMKFDEEPNYSKLISLFDELIEPQHLRPIRIDGALKAGQKRGRLHVNPEEDEQPKKKVRLGSPANQWISVYNARRPMKQRYHYNVADARLHQHIEKGNEDGLFISSVASSANLWALIMDAGTGFTSQVYELSPIFLHKDWIMEQWENNYYISAIAGAMNGSSLVVMSKGTPYTQQSYKVSESFPYKWINKKWKEGFHVTSMTTAGSRWGVVMSRNSGYSEQVVELDFLYPSEGIHRRWENGYRITSTAATGDQAAFILSIPKRKLMDETQETLRTSAFPSNHVKEKWAKNLYIASICYGRTVS

SEQ ID NO: 55152 - protein, 189 aa, Zea Mays
MGHREAWSQARSLFNQLGRMDSPTSSAFYNALTDVLWHFGQRQGAQQVVLEGVNRRVWENTWGDFCLDLHLMSCGAAQAMVHAWLLNVRSIVFEGRAMPEFLSILTGWGKHSKVAGSSTLRRVIEALLLSIGAPFQAERFNIGRFVSPSALVSAWLRESGTINILLLRNERTQHANASNLVPRLQALQL

SEQ ID NO: 55153 - protein, 226 aa, Zea Mays
MMKVDLVMHELCLIHTDLKPENILLVSPEYIKVPDYKVSSRSPKEGSYYKRVPKSSAIKVIDFGSTTYDQQDQSYVVSTRHYRAPEVILGLGWSYPCDIWSVGCILVELCTGEAIFQTHENLEHLAMMERVLGPLPYHMFKRADRHSDKYIRKGRLNWPEGCTSRESMKAVMKLSRLQNLVMQNVDQAAGDFIDLLQGLLKYDPSSRLTAREALRHPFFTQGFWRR

SEQ ID NO: 55154 - protein, 157 aa, Zea Mays
MKEAGIPRRLIKPEDIPGLREAGWTPDQLGHSKSRSSFSPDYNTYRQQLTTLMQTALKNLNEHPDAWPFKEPVDSRDVPDYYDIIKDPIDLRTMLRRVDSEQYYVTLEMFVADMKRMFSNARTYNSPDTIYYKCATRLENFFSGRITVLLAQLSTKS

SEQ ID NO: 55155 - protein, 715 aa, Zea Mays
MAKKGAKRKQQPPPAAPTAKKGSKAVPPPKAAKRAPKKQELLESSDDSDTEQQLLEEASHLDVPSDSDAEELSGSDAEADELSGSDADSDGSSSSGDDVEDEEEEEEGDGSDDDPLADDFLAGSDEGSEGGDSGLESDESDDLEAKSRAIDEQKIKAEEDAEEELQTNIRSESDEFRLPTAEELEEEAHRPPNLPNLKRRISEIVRVLSNFSKLRQKDVPRKDYIEQLKTDIISYYGYNDFLVEALIEMFPAVELVELLEAFEKRPPECLRTNTLKTRRRDLAAALIPRGFNLDPIGKWSKVGLVVYDSTISAGATTEYMAGHYMKQGASSFLPVMALAPQEKERIVDMAAAPGGKTTYIGALMKNTGIIYANEFNEKRLHGLLGNIHRMGVTNTIVCNYDGKELPKVLGMNSVDRVLLDAPCTGTGTIWKDLQIKTSKDIEDIRSCAFVQKQLLLAAIDLVDANSKTGGYIVYSTCSIMIPENEAVIDYALKKRNVKLVPCGLDFGRPGFIRYREHRFHTSLEKTRRFYPHVNNMDGFFVAKLKKLSNTIPVTSEPSKASEEAAKADGEDEKAISNEQETGVPDKDEKTVEIKNHKNVTNKRTSVTKETGSHKRESNKPGKHLKINKNNATKEIDGPESSETNRDGKEEHRVQTKKMSHKRKFASDRSKKSGPESFSGVKEKRQVSDKKRKKKWQFKLRRDWEAEKKGDKRRKV

SEQ ID NO: 55156 - protein, 718 aa, Zea Mays
MEQPQCNAPLQAVGQEKPRERRKRRYRRCVAEQLRESFAVDADYEYISKDHKPDCQNGSSRSTKVSSPDVITKPDHDESAEVVDSKSEEAQITDSEQATYASANNDLKGTKAYQEADVSGLYNLAMAIIDYRGHRVVAQSIIPGILQGDKSDSLLYGSVDNGKKISWNETFHSKVVEAAKRLHLKEHVVLDGSGNPVKLAATVECKGIVGSDDRHYILDLMRVTPRDSNYIGQGHRFCVLRPELIASFVEAESMKQSLKQKVPDAPVASTSDAKATSVEADDKSEESSVHTHKENDNSSSEILFNPNVFTEYKLDGSPEEIAADEELVKRAGTYLIDIVIPKIVQDLCSLDISPMDGQTLTDALHLHGINIRYLGKIAGMVKHLPHLQDLFSAEIIVRSAKHVIKDILRQSLDHDIGPAIAHFLNCFMGKVLGASTEGSLSDMQSKTLKGHENSQTQKSTKGHKLSNAAASRKSLSAYSHLTSDGIWFSIKEFAKSKYQFEVPDDARLSAKRVAVLRNLCQKVGITIAARKYDLDASTPFEASDILNLQPVVKHSVPTCTEAKNLMEAGKVRMAEGTLNEAYALFSEAFSLLQQITGPMHKDAANCCRYLAMVLYHAGDTAGAVVQQHRELIINERCLGLDHPDTAHSYGNMALFYHGLNQTELALRHMSRTLLLLSLASGPDHPDVAATLINVAMMYQDASNMNTALSMKRRHMIYW

SEQ ID NO: 55157 - protein, 203 aa, Zea Mays
MGTLVKEEFGRPNRENTMGMRHGSYDKLDDDGLAPPGTRVSGEDVIIGKTSPIPQDDAQGQASRYSKRDHSTSLRHSESGMVDQVLLTTNADGLRFVKVRMRSVRIPQIGDKFSSRHGQKGTVGMTYTQEDMPWTIEGITPDIIVNPHAIPSRMTIGQLIECIMGKVAAQMGKEGDATPFTDVTGLCCAKHAMIHGYYGTTAR

SEQ ID NO: 55158 - protein, 724 aa, Zea Mays
MPDSPELVVRALGKRLAQPRLGKDALIKLLKQAESALSEFSQSSSLQDPLHALSKSLVQTTLLNHKDKDVKLLVSVCLIEVMRVLAPDPPFSDEILKEIFKLFISIFADLAETSSPFLTRRMKILENVAALRCSMIMLNIGCEDLILDMVKIFFSTVKHGLQKSVHQAMLSMMTQILNEKVTQSLVDVILRNLVKDDKGASHKLAFNIIENCADKLEPIIHSFLSSCIFNKDMPVTELRRLYHKIILEIFQCAPQILFAVIPSLTHELLSDQVDIRLEAVHLIGRLLALSNLQFGQENKMVFIEFLRRFSDKSAEVRIAAIDAAKACYMDVSRDEAQHILSSLEGRLLDFDEKVRIRAVHTVCDLAKSNLSSSAKLILHAAERLRDKKASVRKNVMHKLLELYRDYCEKCSKGTATVNTHYEQIPAKLIVLCFDNDIESFRPQNMELIFAEELFPFSLSPKERATHWIAFFSYFKPEHIKALNIIFSQKRRLQLEMQTYLSLRARKEESSEEMQKRIRAAFRKMATSFPDISKAEECFENLHQMKDNNIFKDLDELINEGTSFAKGRVTRDMFLKRIGQKHPIYTFSRVLSIKCLHSIFNQEMICAILESLLSRGNELIDYVESACDLLLVIAMVFPSLFRGSEEYLLKLFLEEPILINVKTLQMLAHLAKSTHCLSTNFSNVVYPLLEQKCIEGTRAESKYAITAIAALHSDDKKFAKLFKVG

SEQ ID NO: 55159 - protein, 175 aa, Zea Mays
MEKIRHVHSHIMESGSPEDEAGSEDNFVQGENGTSVANASIDPAQSLHGSNLSPPTVLQFGKTRKLSERSDPRNRQLLQKRQFFHSHRAQPMQLEQVFSDRDSEDEVDDDIADFEDRRMLDDFVDVTKDEKLIMHMWNSFVRKQSSCRQASWVNNLQSVCLVLAIPVWSKIHSLL

SEQ ID NO: 55160 - protein, 132 aa, Zea Mays
MIKFKKGELTNLESWNPVKMLITDTRVGRNTKALVAGVSERASRHPDAMASVFHAVNSISEELSSIVELAAEDEIAITSKEDKLAELMEMNQANWSWWWRLCVDSNTDVIGQYCSGESHHRARISRLSLLQS

SEQ ID NO: 55161 - protein, 126 aa, Zea Mays
MAVDTTQPEYWLNWRFLLCALWVYSCMALAFFLIKKYEGASSPDSNGDDGGDREEALPRVRPGVVYLEDCWKTCLEGIHPGWLLAFRVVAFFVLASLLVVDIITDGWSIFLYYTQWTFLLVTLYFG

SEQ ID NO: 55162 - protein, 205 aa, Zea Mays
MGDACVPADCAGVGKSCLLLRFSDDTFTTSFITTIGIDFKVRTVELDGKRVKLQIWDTAGQERFRTITTAYYRGAMGILLVYDVTDESSFDNIRNWIRNIEQHASDNVNKILVGNKVDMDAKRVVSTAQGQKLADEYGIKFFETSAKTNRNVEQVFFAMARDVKQRLTETVAAAAEPPTIQISRPDPDQADAASSRRWSSSCCNT

SEQ ID NO: 55163 - protein, 275 aa, Zea Mays
MDRYQRVERPRNESTIEENEIRITAQGLIRNYVSYATSLLQERRIKEIVLKAMGQAISKSVAVAEIIKKRIPGLHQDTNISSVSITDVWEPIEEGLVPLEMTRHVSMISITLSPRELDKHTPGYQAPVYIEQPRQQQVPPPQRQPRRPPAQFQQLEYEDSYARGRGRGRGRGRGWGRGGYGGYGGYGNNQGGYHQGGGYYDNQGGYNGYDNQGGYSGYDNQGGYGGGYGYNQGRYGNYQENGGYNRGRGSGMRGRGNWGYRGDSSAGGSLGLVKG

SEQ ID NO: 55164 - protein, 494 aa, Zea Mays
MCAHALSLSHPGIRCRCLAAYGDPVSAVKWATRLGREHHDDLAQFMLGMGYATEALHLPGISKRLEFDLAMQSNDLKRALACLLTMSNSRDVGQETAAADATDVTQILSLAVAKQAKQESLTDAVQGIVKFVKEFFDLIDAADATGQSDIAREVLKRLAAAASVKGALHGQMLRGLALRLGNHGELTRLSGLVSNLITAGHGREAAFAAAVLGDNALMEKAWQDTGMLAEAVLHAQAHGRPSLRNLVITWNKMLQKELDHTPTVKTDAAAAFLASLEDPKLTSLGETEKKPPIEILPPGMPPLSAPPIVIKKAGAKPGLPNAAKASNGPIGAPMAQGAPMAHGTPGPQGVPMNQVTPSQGSHDEARPSDATVADAAAAVAEGTAAPPAAEGTSAPPAAEGTATPSSEEAKAAPGNEEGTSNPINEEATAAAVSVAAGSPDSAAAPAADTSSDAPAVNPTEDTVSAPSTEAPPELTDKPSSAEASLPPPPSVSGV

SEQ ID NO: 55165 - protein, 373 aa, Zea Mays
MNETLKQNRLQRDHVEGSCSYVMEDQSNTNDCPNKDDASWRIGATDSDSRNRTGSTQKAMSLPSSPHEYRGQVTQKSDDFISKEKMALAWNKVFQSSPFLNKALLPFKEWNIDFSEITIGTRVGIGFFGEVFRGIWNGTDVAIKVFLEQDLTTENMEDFCNEIYILSRLRHPNVILLLGACITPPHLSMVTEYMEMGSLYYLIHMSGQKKKLSWRRKLKIIRDICRGLMCIHRIKIVHRDLKSANCLVNKHWTVKICDFGLSRLMIDSPMTDNSSAGTPEWMAPELIRNEPFTEKCDIFSLGVIMWELCTLSRPWEGISPVQVVYSVANEGSRLEIPEGPLGRLIADCWSEPENRPSCQEILTRLLDCEYTVS

SEQ ID NO: 55166 - protein, 1108 aa, Zea Mays
MACWVAAAMHLLLLCNAAAAARAAVALFAATPMPPRLSLAEAAAAAGAGDYDDGGTGDKGSQALVGSPIVAGAMNNRLRALTSSFAAAIGKKLDYCIKDTETEWNQAFDFSKDTTFLTNCMKETKGDLQQRICTAAEMRFYFDSLMGGDDTAEANYVRPNVNCNRSSWIDGCEPGWACSAGADQKINLQDTKNMPYRPLKCQSCCPGFFCPHGLTCMIPCPLGAYCPRSSLNTSTGICDPYNYQPPPGNPNHTCGAADIWADVVTTDDIFCPAGFYCPSTIQKLPCSSGYYCRKGSTSQTRCYKKSSCPPNSATQDITIFGALLVVASCLVLLIIYNFSGQILTNREKRQAKSREAAARHARETAQARERWKSAKGVAKKAGVGLQSQLSRTFSRKKGGGGGGGQSSQLQAGASTKVGDDAGGKKHSNLADMVRSIDDNPESDEGFNLEVGDKALKKPTGKEMHTRSQIFKYAYGQIEREKAMQQENHNMTFSGVISMAQDHDVSTRLSVEIAFKDLTLTLKGSKKKLLRSVTGKLSPGKVAAVMGPSGAGKTTFLSAIAGKATGCDTSGLVLINGRIEPIRGYKKIIGFVPQDDIVHGNLTVEENLWFNARCRLSAEMSKADKVLVVERVIESLGLQPVRDSLVGTVEQRGISGGQRKRVNVGLEMVMEPSVLILDEPTSGLDSASSLLLLRALRREALEGVNISMVVHQPSYTLYRMFDDLILLAKGGMTVYHGPVKKVEEYFTGLGIVVPERVNPPDYYIDILEGIVKPSLSSGGSVKDLPIRWMVHNGYDVPRDMLQSSSESESTSRGDAGHAPDEPSSVVSLLWGNLRDILGQKKDEYDYNKTSEDLSKRKTPGILRQYRYFLGRCGKQRLRDARIQGVDYLILCLAGICLGTLAKVSDETFGALGYTYTVIAVSLLCKIGALRSFTLDKINYWRERASGMSSLAYFLSKDSIDHFNTVVKPIVYLSMFYFFNNPRSSIWENYIVLLALVYCVTGIGYTFAVFFQPGSAQLWSALLPVVLTLIATQQKDTILADLCYTKWALEAFVIANAQNYSGVWLITRCGSLVRSGYDIEHEALCIAVLIANGVLFRCVAFFCMVTFQKN

SEQ ID NO: 55167 - protein, 154 aa, Zea Mays
MELLKELVPGCSKVSGTALVLDEIINHVQSLQRQVEYLSMRLAAVNPRVDFGGLDSFLTTECGRIAGFNCKNGIDLEQVTWPEMGVHGARQLMQLQQQFWHGDLTHPHQVASQWEKRGDGHPPVFSNSSPSLFGYDLTSSGAQQTPASKLKTEL

SEQ ID NO: 55168 - protein, 121 aa, Zea Mays
MCYFFGDISSKRDPEAYLNCLFHSYDYFVGKYRCDENEMLPLIVNTPGWVKGAGFDMLVEMLRYICPTIVVQIRITIKNKNLPDGGFWLDGGQTGPMMINIDAAFHDASNRSFLLGKRSAN

SEQ ID NO: 55169 - protein, 2471 aa, Zea Mays
MDLAGMKRRELQALCKRHGLPAGGTNADLVGRLDAVLSGPAVVEEEVAGVPARKGCLKQTGGGATEAKKVTFGAEVGKARRLRSRVIWSPVVAKTRGKSARAGTDSAAEDGISADVGADVPVRRSRRNSFNPAEAEEAGEAVAVDRKPKRKNQENDEGVAVIAQARVTRRSNLEWSATVLPPAVEKKRGRQNAAESDVQKSALVEVTARTTRSRSIVPVVVPPTVVENKRRKTGDPQTTVELTMLSDVPRSDFPATRSLRNKIVHVNNSVVDETHTTRQLENKMRPSTRRHQQVASSPEDKGQKIPATSKSPLLRWSRRNYSEANSANSVNIKLAKDSSTAQPLAHHNSHSEDLEKQPAVKEPIKRSTRKSIALAALEKEKDVIEGKNPEAHVRRSTRKSVVQVKDTKSIVEETQYANSEDVAKQPATKGPARGLRRKSVITELHEKEKSLIAEKNMETDEAILTRKPVIPVKNIKAVGEGIQIGKGKDVDKQFVVKQPTRRSSRKSVLPDMLENNSGLLAPKMNAEMNVRRSTRKSVLPDMHNEKQDHHKMARNENLQSGKYQDGEKQQKVKDSIRQSRRSIATVLLEGQNNDEGKKFKNPTRRTTHKSHALNAVEEVSMDHIEVGEEGLKLRKRSRFLLEISSSANVSWKHQNAQISNEKDNTEGSQQASNCTTSKRRSSKKRRTTAPEEVMPFKVANDDIVIMEETKDTLEYNNESSSKVQEICQVNAAREEFSSGPLLVTVAPSDEICTVQSVAVVIPGSESGDDANQSSDKSKQPQEHSVTQTVDDHLSETRSGKLDQSTCITGLVSDNCVVSEDKTLMSEDREEQSPVSGEQRVSLEANANEPEEKNLANVTSTDLHTKSLQHDIDRIAKETDKDVLSLVFPIEEHEEKYGVSPIAVEKCVCREASACESARKPLTVIFSNNLHTKHLQHDCDVLIKETGEEVLAQENCNDQPVPAQTDQEIKLNDELADPDVLAQENCNDQPVPAQTDLEIKLHDELADPDHEEQSPVSGERRVSLEANANEPEEKNLANVISIDLHTKSLQHDNGRIAEETDKEHEEKYAVSPIAVEKSFRQEASAIESAGKPLTVIFSNDLHTKHLQHDCDVLIKETGEEVLAQENCNDQPVPAQTDLEIKLNDELADPDVLAQENCNDQPVPANEPEEKNLANVISTDLHTKTLQHDNDRIAEETDKDHEEQSNVFGERRVSLEANANEPEEKNLANVISTDLHTKTLQHDNDRIAEETDKDHEEQSNVSGERRVSLEANANEPEEKNLANVISTDLHTKTLQHDNDRIAEETDKDVSSLVFPIEEHEEKYAVSPIAVEKSVSREASACESAGKPLTVIFSNDLHTKHLQHDCDVLIKETGEDVLAQENCNDQPVPAQTDLEMKLNDELADPEVLAQENCNDQPVLAQTDLETKLNDELADLAMESGCSITERNEGLVAHNLDQEGFLEATPECKQECGLPEETVISSKETGSLLCADQSPIGLESLFSQESIVESVGHCALASATTHTENGFDDSKDCHNKSALENVHVPEPCSHNDTKGGIFKNVDCMHTSQRDDRMEGVPEANTDEEHVLSAFLLDANHLNVVINSEEVVCEGEDSKELLHSEDCKASSEKTDVNDGNVYGISDAVVRCALHAPADDNYEIFLGPNTDVPRQVYNDGCSDVKEDRFASKPWTIDIIEDASVKERSNLKDWQLDSKLEGTEIVESGLYFNKDIGNILHSGSIGEITPSGSGLSKDSSVDYRGEVLDGFSMEASLERSSTRGEQNGCRLDAIENPSITLATSGYKHEGALSEEAVYTKKNYAGTCLSNPRELIMELQSHFSKENINESDPHDSLVFPTAENSADEQLVKVHHGSNLSQLGLTDLLDGPIGCSNTDVLCQCDNHKNQSNEDKVEEVEAVSAAKYIESEVVLLPSQERSNLNNEQLNTKLESPNIMGSCLNCDNDVCNTSDNGSVFVIGKRTPSASGLPEDYPKDSDLQQPVLDSFSVVSSFQDNISGKKTVSGVAGSEILSLSLATPDYKHEDGFSEEAVCRTKNYTGTSSVDPRHLDMEGHSIYSEGGTEKSNLQDNLAFLSAESGKDEPIICHVEKLVDAHASSDTYQGPCQDLGRHEEQESCMSIPMQAKESGGVLRSSHTKGSVTAAQIDLAGDAHLIVSDNAAAKQVFSEEKEETKSISSSDIDILHEKSYSSGHDDHAACAAETQFYHPQKASISDGLHLGPSSLQVESLDALDSDILYVNTGVLEQHHKEGYYEPSVYQITSGICTMSEAEPFEVLETGKDVKTPSKLDEQLNPGLDGDEAEKHSLDCGTDTSPVMSKRTLSSPGSGPCQQYVNESTTSTQSTDNHPNDLPAPRSPEQSACFQNDNDSGSVGICQSSRRRGIDELCGKLQSFKVSSAVKGSYVAMGAPRPKPGDSTSRSAAALLRNIENTTAVKAGRPPVKPNADGKDSSRRALQPISGRPDSR

SEQ ID NO: 55170 - protein, 286 aa, Zea Mays
MGTGDYSNPFDLFESLFEGFGGMGGMGGGRAARNRPMQGDDESYNLVLNFKEAVFGVEKEIEITRLEGCNTCDGSGAKPGTKATTCKTCGGQGQVVSSTRTPLGIFQQVSTCNTCGGTGEFSTPCNTCGGDGRVRRTKRISLKVPAGVDSGSRLRVRSEGNAGRRGGPPGDLYVFIDVLSDPVLKRDGTNILYTCKVSYIDAILGTTVKVPTVDGTVDLKIPSGTQPGTTLVMSKKGVPLLGKSNARGDQLVRVQVEIPKRLSSDEKKLIEELANLNKAQTANSRR

SEQ ID NO: 55171 - protein, 268 aa, Zea Mays
MYLLLADKSPAETGAEICINYGNKGNEELLYLYGFVVDNNPDDYLMVHYPLEALRQIQSADIKMKLLEMQKGELRCLLPRSLLDNGFFGIRSSEDKDSKKNTGPFSSFSWSGQRKVPSYLPKIVFPHEFMSTLRTIAMQEHELEQVASLLGEVGYSEDRETSCAAIQSAIWEVCGDQGALGLLVDLLGVKMAELEEGSGTEASDAELLEQFDSIQPEDYASESGEKHERKSKTNYRSCVVYRRGQKQLTRLFLREVEHLLELSAKEQS

SEQ ID NO: 55172 - protein, 109 aa, Zea Mays
MRAGCTPRLFYLCCIKHHLVILKLESRSSVDCILWHLLSHSTLFEWFNFVPTASSPWNFHELVWVGPIIVPYFHCRSGRWGWYHCTKHCSIIVGAGCCISCEISTGCFR

SEQ ID NO: 55173 - protein, 87 aa, Zea Mays
MLDNGRPFSTQLRLRMKLQRREQKHRLPRLTRNQIPMKKTTIFHHLRRTRTGIGRMNCILIQTVVLTLEKYQGHPSCAFCLQGIRDV

SEQ ID NO: 55174 - protein, 587 aa, Zea Mays
MMEVAGAQARAVPLLLRNTASLRTSVSVSCTGSRRSWVAAATAEGDETRGFDKVPMDTPGAYRLVDRDTGRSVIVWGGTDDSDEASMPSPAVLSRTTDRRHSQGVGGGTGIGNFGRFKAQKIKSLVTRSAHRKRESSNRSSTAWSDESSFNGSDDEEESYFERRKHVSDSERHPKMSSGSRDGRTRSAHSLSSVLSQYRGDDDTDFPGSEATSGSKRWGNVADVTYGRQNQKQREPLNFPQRKGPLDGGFFSRRSFKEIGCSDEMLGALRNFDFPRPSHIQAMAYGPILEGRSCVVADQSGSGKTLAYLCPIIQNLRNEEVQGLHKSSPRNPRVIVLTPTAELASQVLNNCRLISKSGVPFRSMVATGGFRQKTQLESLDQELDVIIATPGRFLYLLQEGFVQLANLRCVVLDEVDILFGEEGFEQVLHQLITVAPVTTQYLFVTATLPLDIYNKVVETFPDCEVIMGPGVHRTSSRLEEILVDCSGDDNEEKNPETAFSNKKTALLKIIEESPVRKTIVFCNKIETCRKVENALRRVDRKASQIKVLPFHAALDQAQRIANIKEFLNKQTADSMFLVCTDSADATI

SEQ ID NO: 55175 - protein, 1480 aa, Zea Mays
MAGVCGSPFCSREASAPAPASCGRWDELLNSSTCANNILATGAAALLAVVLALQLLVRVARNGLRHAPVVALSSPLQRAAVAANACLGLAYLGLAAWMLGTDLTQRASVYLPHRWLVSLAQGLCLLLAGFAFSVRAQLLGAAFLRVWAALLAAYAAFVCCTSVVHMVADKVLAVKTCLDVLSLPGALLLLVYGIRHAREEEEGDGNGGTESSLYKPLNAEAHDDGAADSRVTPFAKAGVFSIMTFWWLNPMMKKGYEKPLEEKDMPLLGPSDRAYSQYLMFLDNLNRKKQLQAHGNPSVFWTIVSSHKSAILVSGLFALLKVLTLSAGPVLLKAFINVSLGKGSFKYEGFVLAAAMFAIKCCESLSQRQWYFRTRRLGLQVRSLLSAAIYKKQQKLSGSSKLKHSSGEIINYVTVDAYRIGEFPYWFHQTWTTSVQLCIALGILYNAVGLAMIASLVVIVLTVICNAPLSKLQHKFQTRLMEAQGVRLKAMSESLIHMKVLKLYAWETHFKKVIEGLREIEIKWLSAFNLRKSFNGFVFWTSPVLVSAATFLTCYLLKIPLDASNVFTFVATLRLVQDPIRQMPDVIGVVIQAKVAFTRITKFLDAPELSGQARKKYCVGDEYRIVMNSCSFSWDENPSKPTLKNINLVVKAGEKVAICGEVGSGKSTLLAAVLGEVPKTEGMIQICGKTAYVSQNAWIQTGTVQDNILFGSSMDRQRYQETLERCSLVKDLEMLPYGDHTQIGERGVNLSGGQKQRVQLARALYQNADIYLLDDPFSAVDAHTATSLFNEYVMGALSDKTVLLVTHQVDFLPVFDSVLLMSDGEIIRAAPYQDLLAHCQEFQNLVNAHKDTIGVSDLNRVRSHRTNENKGSIDIHGSLYKESLKPSPADQLIKTEEREMGDTGLKPYILYLRQNKGFFNGSMGILCHVIFVCGQIAQNSWMAANVQNPDVGTLKLISVYIAIGFITVFFLLFRSIALVVLGIQTSRSLFSQLLNSLFRAPMSFFDSTPLGRILSRVSSDLSIVDLDVPFGLMLALGASINAYSNLGVLAVVTWQVLFVSVPMMVLALRLQKYYLASAKELMRINGTTKSALANHLGESVAGSITIRAFEEEDRFFEKNSELVDKNAASYFYNFAATEWLIQRLETMSAAVLSFSAFIMALLPAGTFSSGFIGMALSYGLSLNNSFVFSIQNQCQLSNQIISVERVNQYMDIPSEAAEVIEENRPSPNWPQVGRVELRDLKIRYREDAPLVLHGITCTFEGGDKIGIVGRTGSGKTTLIGALFRLVEPTGGKIIIDSVDITTIGLHDLRSRLGIIPQDPTLFQGTIRYNLDPLEQFSDQQIWEVLDKCQLLEAVQEKEQGLDSLVVEDGSNWSMGQRQLFCLGRALLRRCRVLVLDEATASIDNATDAILQKTIRTEFRDCTVITVAHRIPTVMDCSMVLALSDGKLVEYDKPTKLMETEGSLFRDLVKEYWSYASNGNI

SEQ ID NO: 55176 - protein, 126 aa, Zea Mays
MNWIQQYSPMKVDWANKWAVIPYNGSPAYLQGVQVTLPAGAVTELLLLSVESQATPAGQSVDPKVQAVLDQFVEVFEDPVGLPPSRTCDHTIPLVPGTNVCVLPLSSKLSQCQTMLKMTTPSGAAL

SEQ ID NO: 55177 - protein, 66 aa, Zea Mays
MKLEKKRSSSMDKILGKLRSAQKKAQDMRSVVSSSEGQCSVRATKKTSSSVKTGRPFSCCFTYRAC

SEQ ID NO: 55178 - protein, 525 aa, Zea Mays
MDPRARYPSGMGNGRGGNLNYYGRGPPPQQPHQHHNHQQTSGAHHHQQTSGAHHHQQYAQRQHQHQHHGHNRHQQQQQHHIYQQQQQQWLRRSQIARETSGAAVTSEPKSLAPSTAADGVDSSSQDWKAQLKLPPPDTRYRTEDVTATKGNEFEDYFLKRELLMGIYEKGFERPSPIQEESIPIALTGSDILARAKNGTGKTAAFCIPALEKIDQEKNAIQVVILVPTRELALQTSQVCKELGKHLKIQVMVTTGGTSLKDDIVRLYQPVHLLVGTPGRILDLTKKGVCILNDCSMLIMDEADKLLSPEFQPSIEQLIRYLPASRQILMFSATFPVTVKEFKDKYLPKPYVINLMDELTLKGITQFYAFVEERQKVHCLNTLFSKLQINQSIIFCNSVNRVELLAKKITELGYSCFYIHAKMLQDHRNRVFHDFRNGACRNLVCTDLFTRGIDIQAVNVVINFDFPKNSETYLHRVGRSGRFGHLGLAVNLITYEDRFNLYRIEQELGTEIKSIPPQIDQAIYCQ

SEQ ID NO: 55179 - protein, 168 aa, Zea Mays
MSSLRLLIFGDGEVEPNEEQVLQITLEICKEDVISLIVQDLPSLGWGVRKDLAICWCILLRQKVDETYCCVQYLENHLELLDFLVGCYKNLDIALNCGNMLRECIKYPTLAKYILESGSFELFFEYVELPNFDIASDALNTFKIVAGSAYQARSCSRRVLEFPLRAVF

SEQ ID NO: 55180 - protein, 507 aa, Zea Mays
MFGFSNPQIRQLIQELPNARSCLKYFENGGDTILGYRAVQVNWKDLDYCNVCDMDEEYEDNLFLQCDKCRMMVHARCYGELKQLDGGLWLCNLCRPGAPRVSPKCCLCPVTGGAMKPTTDGRWAHLACAIWIPETCLKDVKRMEPIDGLSRINKDRWKLVCSICGVSYGVCIQCSHPTCRVAYHPLCARAADLCIELENDDKIHHMYLDEDEDPCIRLLSYCKKHRQPSAAERPSLESDPPEPIQVVQTDMASSSGCARTEPYNLHRRRGQKQPQVVATASLKRLYVENRPHIVSGYCQNRVGNTCGESIQPFGLSDAVQQEAIGNVSSMVEKYTIVKATFRKRLTFGKSKIHGYGVFAKVAHKAGDMMVEYIGEIVRPPISDTRERRIYNSLVGAGTYMFRIDDERVIDATRVGSIARLINHSCEPNCYSRAITILGDEHIIIFAKRDIDPWEELTYDYRFFSSDQRLPCFCGFPKCRGVVNDVEAEEQSAKIRVKRSELFEKSEK

SEQ ID NO: 55181 - protein, 258 aa, Zea Mays
MKKVTVQTVRDALISKKVESREQDNAPLSDDFPEDENEEDFDNRMRAQILKKRRELGDVCPHETSKADKPHHKDKELSDRRSNIEHRRDTEDDDQEHELQKAKKLSLKKKGAGSEASAERMSKADANLQLLNPAEQERHLQKQKKRRLQGREDETLAKLQKFKSSFLSKNLATNHVEEKNPSTDKAEKEDEEEDDYKGWHTNLLSFLPSSSKDGMTRKDDPDDYVVVDPLLEKGKEKFNKMQAKLKRREREWAGRSLT

SEQ ID NO: 55182 - protein, 657 aa, Zea Mays
MEDEEMEKKVQQYLQRKGFRLTELALQEERNRLSTSAISDVALARSDNDPARYYDGYSRLRTWAYSSLDQYKHELLRVLYPVFIHSFMDLVAEGHMQEARSFFHTFREDHEVMHSRDLQKLEGVLSPSHLEEMELARSFRKNKFKIKLCEYSYELLLQYLQKTQALVVLGVINEHITFEVSPGQPSLISDDADVVALIGTSKDLAKQINQKEVHWGLLEDSVEERMEKALAESDKIEAESKDADAEDNKKRNAEGGKQGASLKKAKKDKLVGATGKSVRTETSMVSVAPRVKPELTLPATPVEVEQSILEDLRNRAQLNSVALPSVSFYTFLNTHNGLNCSSISHDGSLVVGGFSDSSVKVWDMSKMGQPAKISRSQGENGPSQGERISTLDEGKRTYTLFQGHSGPVYSAAFSPFGDFLLSSSSDSTIRLWSTKLNANLVCYKGHNYPVWDVQFSPVGHYFASASHDRTARIWSMDKIQPLRIMAGHLSDVDCVQWHVNCNYIATGSSDKTVRLWDVQTGECIRMFIGHRSMVLSLAMSPDGRYMASGDEDGTIMIWDLSTGRCVSPLLGHSSCVWTLAFSCEGALLASGSADCTVKLWDVASSTKTLKTEDTKGSSANRLRLLKALPTKSTPVYSLRFSRRNLLFASGALSLSSS

SEQ ID NO: 55183 - protein, 239 aa, Zea Mays
MSSGAKAGIGAVVAILVLISFVGAAFWYRKKRRRVHGYHAGFLMPSPASTTTQVLAKTNFSAGSPESKDSMPEFSMGNCRFFTYEELYQVTNGFSAQNLLGEGGFGSVYKGCLADGEFAVKKLKDGGGQGEREFHAEVDIISRVHHRHLVSLVGYCISDEQRLLVYDFVPNNTLHYHLHGLGVPVLEWPSRVKIAAGSARGIAYLHEDCHPRIIHRDIKSSNILLDNNFEALLWMLALM

SEQ ID NO: 55184 - protein, 272 aa, Zea Mays
MDRVVSQLLVEIDGLSDNSQDLFIIGATNRPDLLDSALLRPGRFDKLLYVGVNTEASYRERILKAQTRKYKLHKNVSLLSVAQRCPPNFTGADIYALCADAWFHAAKRSVETFETDPSRSNDASAEEVIVEIDDFITCQQRCLLVRARQVGRCEQNPYVIVSSGAILRGSAHGRGLGGLAGSFVPPNGFTCSASAQPAPPPLPLALPSDSRNRRVLILDLIVLSEMIASGKEGGRRGCRTVNSSTRGTVPLASSPGSDPLPPPRKGEVLPEG

SEQ ID NO: 55185 - protein, 135 aa, Zea Mays
MMIRRGSSKISSPLALLCLLLLLLLLVIVCSSSNCAAAARLLPGAGPLPPLRAAAPSGGDEHSAASETTKGAAEACEEGNENDECVGGVRGGERQGRVRAEAAARRRAPRLHLHAAQGQAVTVSDEDGACRGCRK

SEQ ID NO: 55186 - protein, 410 aa, Zea Mays
MMMDKLEVPRRKVRKDWYVGLNPDPVDRSHPDVNDSSIAKVATSNETPLIDQNKSGSMKGGEALKNSSEQHSAETKLNSTQVQENVQLPNNVNDTHSESISSVTTKAENTSQTHTQRRLLETADKSDDQTGSSETHESDSGAKAAATVENSEPLDEDADASFDLFRDPEDLPDEYNYDYDDYVDDRLWGDEDWKEQEHEKEEDYVSIDAHILSTPVIADIDKDGVQEMVIAVSYFFDHEYYRDSDHAKELEGIDMGKYVASSIVVFNLDTRQVKWAADLDLSTDAVNFRAHVFSSPTVVDLDGDGYLDILIGTAYGLFYVIDHRGKVRNKFPLEMAEIHAPVIAADINDDGKIEMVTTDSHGNVAAWTAEGEEIWEVHLKSLIPQETSMFLVERMGQKSNLSHIEHMEES

SEQ ID NO: 55187 - protein, 692 aa, Zea Mays
MLQEFVDNVIAVTKESVKTFTYESLNNIARFINGMSALLLTLLPGKGNILEGINGWELKPALRGPRLPRWMESGVSSFNEFIHELSVDSDADSIADSVAGDDDHEEFVCPPSPLSQSSRLSHASSFGRHDRRLRRHIRYAVSWILWPLRFFVSLIFILFNAIKFRMDLHLAIEIFIESVFDIVHKAAHYILSPSEVWQNLFCWIQGSGHDTSSVVDVLTANVGSDNPVPTERKTVYRHSLNTDSRTCEDVITELGYPFEAIKVVTSDGYVVLLERIPRRDSQKVVLLQHGILDSSMGWVSNGVVGSPAFAAYDQGYDVFLGNLRGLVSREHIDKSISSYKYWKYSVNEHGTKDMPAIIEEIHKIKISELGKSQPQSAEGTGDQNDKLKSLEVQASQEDSIEDQPYKLCAVCHSLGGAVMLMYVVTSRITQKPHRLSRLVLLSPAGFHEDSNVVFSMVEKLILFVGPVLAPLIPGLYIPTRFFRMLLNKLARDFHNYPALGGLVQTLMGYVVGGDSSNWVGVLGLPHYNMDDMPGVSFHVALHLAQIKRAKKFQMYDYGSSAANIEAYGTPEPLDLGAHYGLIDIPVDLVAGQRDRVISPSMVKKHYKLMRKSGVEVSYNEFEYAHLDFTFSHREELLSYVMSRLLLVTDPGKGRIKQTTVRLRRQKKVQSEIEESIECRAKEESDELAGHLE

SEQ ID NO: 55188 - protein, 733 aa, Zea Mays
MEAEQQKQQPQRPRRKGLKRKLEDEASAAVAAAATSAAASAAAASLGSAGADDDNEEEDGSAGTPEICCRHSHAALAREVRAQVDALVRCASSWRHADRAAAKRATHVLAELAKNEEVVNVIVEGGAVAALVCHLEEPAVAAPTQEEQQLRPFEHEPEHQQLVVDAGALPPLVKLLKRQKNTTNSRVVNSVIKRAADAITNLAHENSNIKTSVRMEGGIPPLVQLLESQDLKVQRAAAGALRTLAFKNDENKTQIVQCNALPTLILMLRSEDAAIHYEAVGVIGNLVHSSPKIKKEVLNAGALQPVIGLLSSCCTESQREAALLLGQFASADSDCKVHIVQRGAVCPLIEMLQSADVQLREMSAFALGRLAQDTHNQAGIAYNGGLVPLLKLLDSENGSLQHNAAFALYGVADNEDYVSDFIKVGGVQKLQDGEFIVQATKDCVAKTLKRLEEKINGRVLKHLLYLMRVGEKSVQRRVALALAHLCAPEDQSSVFIDNNGLDLLLDLLISMSSKHQQDGSAALYKLANKAAALSPMDAAPPSPTPQVYLGEQYVNSSTLSDVTFLVEGKRFYAHRIALLASSDAFRAMFDGGYREKDARDIEIPNIRWDVFELMMRFIYTGSVQVTSEIAQDLLRAGDQYLLEGLKRLCEYTIAKDVNLDNVSDMYDLSEAFHAVSLRHTCILYILEHFNKICTRAGSAQLIQRVIPELRNFLTKALSSSRSPSTTDDRNLQT

SEQ ID NO: 55189 - protein, 932 aa, Zea Mays
MIESKDILVRRLRVLSPGEAMEQNIRQAEKMSRNIERASRASKDESTSWEMPYGDINRKKPAVRSSDTFTTSDGIAKRARFDMSATSNLPVLGLSDYSDMQADNDASVGHSSDPAILNNEVSPVEKMIEMIGALLAEGERGAESLGILVSTVEADVMADIVIETMKHLPEASFHLATNNGVQQLNFKYSSGLVTQNLPANSDSTLFTAQSTPTADGVSISPSDAFVMTSVHDAKRDPRRDPRRLDPRRIVSSSAVNSIQVKMETNSVHQTDNLSNTLYSNSRKAENYSDYQGDLHKNEGEQQSASQPNQTIAKDKLELLDVVTEPEPTFEVEAPVDVRIHSSDVDEDIVKPMSSVVNSLDESDSMDLEVDPFLPAPKAPTPDDTNDDLPIITSQLELSEKGKISINKLAIGRILDDYKKNSFNARFSLLAHLIAQSAADDNIMDLIQRHIIFHSHDQEGYELAMHVLYQLQSISVANSPESSTSTSKHYEKFFISLARSLIDSLPASDKSFSKLLCDAPYLPESLFRLLEDLCMSEDNSQQLKDGDGDRVTQGLGTVWSLILGRPPLRHVCLDIALKCAAHSQDEVRGKAVRLVAKRLYDLTYATEKIEQFAIESLVGVANEHTVDTDINSKSLKESTAEIEVGSQGTSVSGSQIPDTEFSENGPFKTSSVSTKQSAVSVSEAKRRTSLFFALCTKRSSLLQHLFNAYGRSPKVVKQCIHWHMPNLIRNLGPSCPELLNIIHNPPEGSEHLITLTLQTLTEDSNPSADLVAAVKQLYNTKLKDASILIPLLPSFPKEEVLPIFPRLVDLPLERFQDVLARILQGTAHTGPALTPAEVLIAIHDINPEKDKVALKKVTDACTACFEQRTVFTQQVLEKSLNQLVDRIPIPLLFMRTVIQALDAFPALVDFVMGILSRLIDKQRKKLYHSSVLT

SEQ ID NO: 55190 - protein, 365 aa, Zea Mays
MLEDIYASLFLVKCDTLLNRANHRQGEKQTKTTKFCSGICLFFVLICVIWAPMLIYSSGNPTNIANPIVDVSVKIDIKALGGRLNLFKTTACEKIPWKYLKAYDDVDPLDYLGAYNVDDIQLICCQPDASTMWLIPPPVQNRFIQSLEEREMLFGKMELILNWDFLRARPKGKELVRYESPIEHCPSVDDVKRVLNGTANSFSIIDAYPRYFRVTGSGEVRRLEAAIDSVSGELLLNNGTPWWSFYDTNPSDLAGCQGLNGPMAIVVSEETPQGIIGETLSKFSIWSLYITFVLAVARFIRLQCSDLRMRIPYENLPSCDRLLDICEGIYAARAEGELEVEEVLYWTLVNIYRSPHMLLEYTKPD

SEQ ID NO: 55191 - protein, 245 aa, Zea Mays
MDVDTLESSHTDSGKENGSVAPHTPVLEFTRTNKNTELKLKGEKLDNNSVSLVLRIADFSGWRPVNDAAANSYRRSESELAVNSHQNISKLVPDYALIDGVMRPKDVNASTSCLDSVSSATNLGGSQGSEGSVISVQLAESSKSVSDYGAEDYGTMDCGGYKDGISTLDCSHVLDNGSRSIFHIDQASPFLELASCGSSTSTDNQDVMNGELVFIEAQYKHLVDELTRMREEAREGARKNWLPDT

SEQ ID NO: 55192 - protein, 81 aa, Zea Mays
MAPLESGIKTFSMEDDDNDDGSSEDADEEEDAELTKQLNKQRRKAIAAAHGRRRPTSSRNAYKDKGKGTMNSKMQRQACNW

SEQ ID NO: 55193 - protein, 538 aa, Zea Mays
MNALVRVSAVLTNGQYMLNLDCDHYINNSKALREAMCFLMDPNLGRSVCYVQFPQRFDGIDRNDRYANRNTVFFDINLRGLDGIQGPVYVGTGCVFNRTALYGYEPPIKQKKGGFLSSLCGGRKKGSKSKKGSDKKKSQKHVDSSVPVFNLEDIEEGVEGAGFDDEKSLLMSQMSLEKRFGQSAAFVASTLMEYGGVPQSATPESLLKEAIHVISCGYEDKTEWGTEIGWIYGSVTEDILTGFKMHARGWRSIYCMPKRPAFKGSAPINLSDRLNQVLRWALGSVEILFSRHCPLWYGYGGRLKFLERFAYINTTIYPLTSLPLLIYCILPAICLLTGKFIIPEISNFASIWFISLFISIFATGILEMRWSGVGIDEWWRNEQFWVIGGISAHLFAVFQGLLKVLAGIDTNFTVTSKASDEDGDFAELYMFKWTTLLIPPTTILIINLVGVVAGISYAINSGYQSWGPLFGKLFFAFWVIVHLYPFLKGLMGRQNRTPTIVVVWAILLASIFSLLWVRIDPFTTRVTGPDTRTCGINC

SEQ ID NO: 55194 - protein, 80 aa, Zea Mays
MSLAKVYNLFRQLGLRHIFVVPRPSRVVGLITRKDLLLEEDNNNVMPELQSTSVRGLLNGKMLGGNIHLERPLLDNLVIE

SEQ ID NO: 55195 - protein, 920 aa, Zea Mays
MTTNTKRAYKLQEFVAHSSNVNCLKIGRKTSRVLVTGGEDHKVNLWAIGKPNSILSLSGHTSAVESVGFDSTEVFVAAGAASGTIKLWDLEEAKIVRTLTGHRSNCMSVDFHPFGEFFASGSLDTNLKIWDIRRKNCIHTYKGHTRGVNTIRFTPDGRWVVSGGEDNIVKLWDLTAGKLLHEFKCHEGQIQCIDFHPHEFLLATGSADKTVKFWDLETFELIGSTGPETTGVRSMTFNPDGRSLLCGLHESLKVFSWEPIRCHDTVDVGWSRLADLNVHEGKLLGCSFNQSCVGIWVVDLTRLEPYTMGTSTKVNGHSELKTVSSGTLPLQNDSGSRANIGRSSVLQNTENNLKTTSGRLSASQNSDSAPKETNSAPSSGLIPSTPHRAGVGSHNRSVGNSAFQSGGTTLKRSSLRNNSASNVHNFSKADVVPVIVPRTSSGGELATDSRSDAADVAPVLPKVTRRVEPATDSRKESNDVELVVPRASSRMEIADLAPISSSKSGRRLESAPDSKEESADTAPVVVSNPRANVRMEIVSDSAPALSKSNRKLDSGTNSKKESADAVIVPRTNSRMEMISDSRREPSAGRISPFRIQSRYAEPRKLAHARTDSNKVDSRSKITETEDFNCQIFLPRRNSVFQTISSEEPREDVKCGPVDRVGFSNSSEPNASVRNENYVPRMRKPGDNCYIEVSRAGRARSSVSNWEGRDQPPSHEEPTTSSSTLAPTGHPYSSRGSNQASEAPIIASDEDVLSLIMERHDLFLSSTKSRLMKLQIIHQMWERNDIRGVLSAMDRMGDHAVCADMASVLMEKSETITLDLCTSILPVVTDLLESKIDRHLVVALELLVKLVRTFGPMIHSTVSSGPCVGVDLEAEQRRERCNLCFIELEKAKNKLPSLTRRKGAVANAAQELALVFQEIMS

SEQ ID NO: 55196 - protein, 463 aa, Zea Mays
MLGRTRDQIRTTEQVKATIGTCQALKLDALVIIGGVTSNTDAAQLAETFAQLKCPTKVVGVPVTLNGDLKNQFVETTVGFDTICKVNSQLISNACIDALSAEKYYYFIRMMGRKASHVALECALQSHPNMVILGEEVSVSKLTIFDITKQICDAVQARAEKDKYHGVVLIPEGLVESIPELYALLQEIHGLHNKGVSVENISSHLSPWASALFEFLPPFIRKQLLLHPGSDDSAQLSQIEIEKLLAQLVETEMDKRLKEGTYNGKKFNAICHFFGYQARGALPSKFDCDYGYVLGHVCYHIVAAGLNGYMATVTNLKSPVNKWKCGAAPITSMMTVKRWSRGAATSQIGKPAVHMASVDLKGKAYELLRQNSSSFMMEDIYRNPGPLQFEGSGADTKPISLCVEDQDYMGRIKKLQEYLEKVKSIVKPGCSQDVLKAAVSAMASVTEMLTIMSSLSFSGQATI

SEQ ID NO: 55197 - protein, 173 aa, Zea Mays
MSALSAHKGKITVVDIGNNNISPEGLHPVAEFLKRTKSLQWFSLYMNDISDEGAEKVAEALKDNKTISTIDLGGNNIHSKAVSAVAETLKDNAVLTTLDLSYNPIGSDGVKALCDVLKFHGKIQTLKLGWCQAWKVQSVLPTVSSTTQRYRHWICGQTGLETMVLYAWREVSR

SEQ ID NO: 55198 - protein, 306 aa, Zea Mays
MDGSKGSVGGGDGTGPEKPSADSNPSLDPPQPTAAAVEATDDGAAAAAAEAARRPFTALSQEEADLALARVLQEQERAYMLLRMNGGGGEGSDYGSSDEGSYEYDEEGEEDYEEELEHRLRVHHHEHPSGDGEGEGGGEGEGAEGSDYDEEFEEDEEGEPEVDPAEFEDDEAYARALQDAEEREVAARLMALAGLSDWRTVEVEHEEDHANDPQEAWQEVDPDEYSYEELVALGEVVGTENRGLSADTLGSLPSVTYKLQHVQDGNTEQCVICRVELEEGESLIALPCKHLYHPECINQWLQINKV

SEQ ID NO: 55199 - protein, 733 aa, Zea Mays
MAEPTPKSKRTKKAKKPSAREGDGEDMDTLKSDVATFASSLGLLPGAGDSNGGFDDSDFRKSGPMYKSSKFPSKQPHQKPDNTANPHLNPRPTKKPHPLELRDSYAATKPGAVNTNYPLMKAAALSGQWYTDADELEARVLGGRKQVPPAVGLQEMQGIVERKRELAEKLMLQYAREYDAVRRGHGDLKLLDISAKSGTSADKVSAFTCLVEDNPIANMKALDSLLGMITSKVGKRYAFTGFDAIKELFLMRLLPDRKLKSLIQRPLDILPETKDGYSLLLFWHWEDCLKQRYERFVMALEDAVKDMLPNLKDKAMKVALQRPPQYACGCLFILSEVLKAKPPLWGIVLQNESVDDGDEHFEDILEIPEDSSVASAVLHKHNEKVAAHEKHNLDAADGIDSVKQVNLVDENNASTDSSRQHAFYDPRHREPSYCNADRVSWWELTVLASHVHPSVSTMARTLLSGNNIVYSGDPLTDLSLPAFLDKFMEKKPKGNRIAEGRWHGGSQIAPAKKLNLNHHLIGEELLELAENEVPPEDIVFHRFYLNKTGTVKRKTKQKDSVLDEDAGELLADNDADEASDESGDEILDLGDGLADDGEYDYDDLDSNAFEEEKDLLRDDSDVEFDDVSDDTASGDEGSENDDDIPILAGDSDGNLSDDEMVDAGKGGVSYTKKRRAGKKSGLSPFASLDDYEHLMVGDADATTAKRKHMATGRAGGEKKPKLRPRKKRSRSSE

SEQ ID NO: 55200 - protein, 694 aa, Zea Mays
MDNLFKRTMPWFGEEVGKRDLSTQNGLVPGLSLVQWMNMQHNPSLANTVMQPELLNSLAGKPVQTLAAADLSRQISFQPQFLQQNNIQFNTSLLPPQNQQTEQLANVIATPNQLGSVIVPQKAVQNSSSEQKQNLVTQPLQVSQPMVSVAQPQLVHTQLQQPQVVLQAQPQQPQVIVQAQLQQQQPLVQNHTTIQSGLQQIQLLQQQQVQQSVQEQQQIKIQPFQVPNDANMVTQLSDQMKIQLLKALQPQQPLVMEQQKMIFDLQQQAVNSQSTAQQCSQVATQVVGLHSSSTNQYPTQQKTQPLKTFQDFPGNAVSIVKPEIVTSVGARSLHVPGGVQSMKMDEVPSSSTSPSTNNNPVILRSTPSSSKNQCLPTAAKAPQSSVVLGSTLEQGMKPCDSTQHPMVIPKLAEERPATGQDYMNSTQLDYLDTSSSATSVCLSQADGSLQQSFPPSSFNQHQPLREAVPDSEFEVTDAGNNFLFGANIDGHMEPLNEDDLLGTAFEADKYMEQMPGNGISNYISSKDSQQELSSSMISHPFGVADIAFNSIDSSINDIQFLNRNSRAPGPVQQRMRTYTKVHKRGAVGRSIDINRYSGYDELKHDVARMFGIEGQLSDQNRVGWKLVYEDHEKDVLLVGDDPWEDFVNCVRCIRILSPQEERQMRLASDYGDSFLGNQACSSSDGGRPWRVTGD

SEQ ID NO: 55201 - protein, 679 aa, Zea Mays
MDDSELLSENAASEPFEPSPFMPKEMDDDDYDVIAENQQGLVDNQSAFTNEKENTVVSARESNVAKIKVVVRKRPLNKKEVSRKEEDIIDVHNSQFLTVHEPKLKVDLTAYVEKHDFCFDTVLGENVTNDEVYRETVEPIIPLIFQRTKATCFAYGQTGSGKTYTMQPLPLRAAHDMVCLLHQPMYRNQHFKLWLSYFEIYGGKLFDLLSERRQLLMREDGKKQVCIVGLQEFEVSDVQIVKEYIEKGNAARSTGTTGANEESSRSHAILQLSVKKHIPVTETRRQRDRDAIEAKNTKHVGKMSFIDLAGSERGADTTDNDKQTRIEGAEINKSLLALKECIRALDNDQIHIPFRGSKLTEVLRDSFVGNSRTVMISCVSPSSGSCEHTLNTLRYADRVKSLSKGGNTKKEQFAVQSVSSGKESTYTSYPLSCEAEETMEQTQEIRPVDSSRKGVDSFTSNSSIEPEKNSYCMIPSYPHKGKEETSTRSGLNDRERGDLKYNQAGFNSKTHSLQESINSQEEVKVTKVSPPRRKANRDEKSERQVNYMKKESGPEISRTGVKQQQQLKQLQRPSSTSSSQVLSKQSEKEDMEINTILEEEALIAAHRKEIESTMEIVREEMNLLAEVDQPGSLIDNYVAQLSFLLSRKASGLVSLQARLARFQQRLKEQEILSRQKPLR

SEQ ID NO: 55202 - protein, 931 aa, Zea Mays
MGKVEDEYESHAANRRGEVIDWLAELLPEFDLPLDSSDEELREYLIDGTALCYIAEKLMPGIQEEMWGGNAWDQRSNVKKFLYFVAEMGLPGFSVKDLEEGSVSSVVECLLALKDNVTTGLGQNVTNNAAKTPLRRKLELESDGPIISVMTPGRRPGEERWKGHWDPKSQQRSILHSGQKVHDAFQLKRGSYTDLPAAKVSEMMHPRSLDNAPTQSLLRVVNGILDESIERKRGEIPHRAVYLLRNVVQEIEHRIAIQADHIRNQNSIIKTREDKYRSKIKALETLVNGTNEENEMTVDRLELVEVEKSKLDEKRKLGEQDMVRLMQEKENAENTIASLQQEIQVLSRMHEQYHERKETEARQMEEHLAMRLKEAEFLLMQSEKKVEEIESVSQLKSQLWTRKANIFQSFMDNQKLSIKDIRISSQSIKQEMFALQMKWIDEISSIGRELKGLVDAADNYHKVLAENQKLFNEVQELKGNIRVYCRVRPFLPGQDGKTTIIDYIGENGEILITNPFKQGKDVCRMFKFNKVFNTHASQAEVFSDIQPLIRSVLDGFNVCIFAYGQTGSGKTYTMSGPGTSKEDWGVNYRALNDLFDISLSRRNAFSYEVGVQMVEIYNEQVRDLLSNDIAQKRLGIWSTSQPNGLVVPDASLHPVKSTLDVLQLMEIGQTNRAVGSTALNERSSRSHSILTVHVRGVDLKNGSTSRGCLHLIDLAGSERKNAHVPYRNSKLTQVLQSSLGGQAKTLMFVQINPDTGSYSETISTLKFAERVSGVELGAARSNKEGKDIKELLEQVSSLKDTISRKDMEIDQLLKNKAKSPGSSIDRNDSRQQIRRLSGTGSSEAECEDNMSDDGCSVAGTEYSVGGASEATAERMQKAPSRIARLFHTKNGQPANSKPKPRESALKPPGRTTSTGGSQATGGSLVKPPKRR

SEQ ID NO: 55203 - protein, 150 aa, Zea Mays
MNVEQQLADIELASKQKAVFESLKAGNAALKSIQNEINIDDVQKLMDDTAEAKAYQDEINAVLGEQLSAEDEEAVMAEFENLEAQLAVESLPDAPATEVRPEEKTKAPADTEAAPEDIDDVIELPDVPTKVPERPEAPEKNKVLEEPLPA

SEQ ID NO: 55204 - protein, 1448 aa, Zea Mays
MASSLVTTDRRWGATPARKSSMTVLGKVPKPINLPSQRLENNGLDPNLELVPKGTHTWGSKAPSTTPNAWSSSSILSSKNDGSSTSSSHFNVRPTSGGGSRPSTAGSESLGSPNAWGANSRPSSASGTFPSSHLPMATNRPQSAETRPGSSQISRFADNASDNVKASIRTIDRSESSSRGPGFTLSTGDFPTLGSEANSQRGHSSKGRPTSSLGKEVSQGEQVKSLATGTGEVISPSNNHPVDIMKTEHHAHTGGAPVPATSVPNEGLQQQPYPPNFPMPPLQFDSWRAPPGHPPEGMWHRGPVPGGPYRPVGPPGSFPVEPFGYYGQFPPNSEAAGRQGSGHGGYHTKNDVYHPMPHNSYIMNQPVIPVRPVYQGPVLYDGYYGPQANFNNTNVRDPHFVGGPGILNQFPNQNDRFHPGHPQNRPGKHETVPREQLESDKLHVFHQEHPGSLHDNPDRLGGSREFERNVQPAPPLLPHPDGKQTDMNMRADTRDTFSETERTVVLTKSVPNQRGSVGIDHLSVYENTRSHHRETCDGTLRKKFKEDSSVVLDQHPVIKKNAALIEKIESLNNKARNVYAQNLPEPASSKEFKKHKKTTDVSSNDVISTTCTSDQAVSVSHISAVVQRRPNVTIEGTILGPAHSHLTEFSKAEKLGDSINNHLHRRVDSSRNSYHGPCKDRPANKFGSCGRGESYITNSLPVADLGNDIHHGQQPQIASQLQPVIVPDDMPASLDYESQRAKMKELAAERAKRMKAEEEERIKNQKAKALAKLEELNRRSSVLQKKSNDTKVETDDAHDKQQIGLDVNAKLDTSTEQHDVVTPDRLTALLPPNDPNHTMVQIQAQSTAQSNALDGGKAHDAHTTSSLVKNTHSNMEHVVQKSISQSHNISMVKTKQGYRKRQVVSEEKISGEKASASVTTDSSVQKNVDVPVDTVTAVVAPHDDPPTQNKKGTRHLRTMNQEHVNSADGTNSTESGLSRPQQARKSGKHQHVLRPVEKPHGNDGVLWAPDMLPLHNEQSDGAMPTAAVADVTQPAGKAINDGENVTRTKRAEMERYVPKPMSKELQQHNPSHDKEAIDKPGAAKSHPAAEPKKTSKGHGGKSNPSWRKRDPDQPAMVAPNSVDQADNSYESKEVQNCTDMNQPVELGKEDTQLKSNVDAAAENSSAPAQTVPLSAGGAKEHSAANRQRRQHFKAQRNEASSYSNESKVREGKNDSVYQSASPVIDSNSSNHKNVPRSDVKNSGIVSHSRAWKPKTNSHPQNSSDGKIAVEGKVDSHGGRLELNMPKGSDTITHQDTSSKPMKRSDGTDEASHSKQENLTQEDGNQKIETGQEQANPAPRRQGQPNARYHRGGGAHRGRGGYDTGRPNHGTNAERWKGGSHLEYQPVGSQNKAGGDFQLSQGMEDRTEGPPASGQAFGERGHSRGLRPAGRFVRRNTASTSTTNSHQHE

SEQ ID NO: 55205 - protein, 239 aa, Zea Mays
MLLWSYFSVVLTDPGSVPPNWNLDFDAERGETAPLTSSEFSSQMNSQQSVALGNTANPRARYCRKCNQLKPPRCHHCSVCGRCVLKMDHHCVWVVNCVGALNYKYFLLFLFYTFLETTLVTLSLLPHFIAFFSDIEIPGSPAALATTFLTFVLNLAFSLSVFGFMIMHISLVSANTTTIEAYEKKTTPHWIYDLGRKRNFAQVFGNDRKYWFIPAYSEEDLRRIPALQGLDYPVSETRF

SEQ ID NO: 55206 - protein, 170 aa, Zea Mays
MLAFLNSIYKTLERYRSCSFASEASAPLEAELNNYQEYLKLKTRVEFLQTTQRNLLGEDLGPLSVKELEQLENQIEISLKQIRSSKNQQMLDQLFDLKRKEQQLQDANKDLRMKIEETSEENVLRLSSQDIGCSGSSGHGDEANQEHLQLALDPSLHIGYQAYMDHLNND

SEQ ID NO: 55207 - protein, 219 aa, Zea Mays
MLEFMKQLRQHVTVGVVGGSDLVKITEQLGSTVITDYDYVFSENGLVAHKNGQLIGTQSLKSFIGEDKLKEFINFTLHYIADLDIPIKRGTFIEFRSGMINVSPIGRNCSQEERDEFEKYDKVHNIRPKMVSVLREKFAHMNLTFSIGGQISFDVFPQGWDKTYCLRYLEEFQEIHFFGDKTYKGGNDYEIFESERTVGHTVTSPSDTAQQCRSLFLSK

SEQ ID NO: 55208 - protein, 131 aa, Zea Mays
MRNGTNQAAMFSAKNTFDIVLWKKHEGDGKVLLPWQSMVSGFLAGTAGPVCTGPFDVVKTRLMAQGRTGDAKYKGMVHAIRTIYAEEGLRALWKGLLPRLMRIPPGQAIMWAVADQVMGLYERTHLQPVHI

SEQ ID NO: 55209 - protein, 1063 aa, Zea Mays
MDLSRFASGVGPSRVAPRAGLQIGAAENGFRACSLRRARHRGGGNGNLTAAASTLRGRGGLFYLAPTRRSHPSLRLFYLLPTRGSHLSLRARWRPRCQGNDSLAYVDGPLETAKGSGEVDDNVPTSSGSDDDRGLADVDGLREMLQRSRNELEVARVNSTMFEEKAQRISESAIAFKDRADGAQRDVCAAVATVQEIISKEADAKEAVQKATMALSMAEARLQLAAEALEANRGSVGPTEVSIEGMEQEALLSAQEEIKDCRAALSRCAEELSRVQDKKMELQKEVDRLTDLAGKAQMDASNAEEDVANIMVLAEQAVALEMEASQRVNDAEMVLLKAEKAIASIDTVVELPSPAEEQRSTEEDSVSEGYEYSSDVTDDVYVRDEVSSIERLMVGDLTVQGFEQLEPSREIYDEESSNKMSVEPQKEAESDSDKSKQGKKQEMERKEHTKEPLSAPKALVKRSSRFFSASFFSSKVDGEFTPTSVFRGLMKSVQKQAPKLVVGILLLGAGAFFLNRAEKSQLFQQQGIATSIGKVTSTTKPIVLEIRRIPQRVKKLIELLPHQEVNEEEASLFDILYLLLASVIFVPLFQKIPGGSPVLGYLAAGVLIGPYGLSIIRNVHETKAIAEFGVVFLLFNIGLELSVERLSSMKKYVFGLGSAQVLATTAAVGVIAHCFAALPGPAAIVVGSGLALSSTAVVLQVLQERGESTSRHGRATFSVLLFQDLAVVVLLILIPLISPNSSKGGVGFQAIAEAMGMAAVKAVAAITAIIAGGRLLLRPIYKQIAENQNAEIFSANTLLVIFGTSLLTARAGLSMALGAFLAGLLLAETEFSLQVESDIAPYRGLLLGLFFMTVGMSIDPKLLLSNFPAISVILSLLIIGKTLLVTFVGRVFGVSAIAAIRVGLLLAPGGEFAFVAFGEAVNQGLLSPQLTSLLFLVVGISMALTPWLAAGGQFLASKFEQHDVRSLLPVESETDDLQDHIIILGFGRVGQIIAQLLSERLIPFVALDAGSDRVAAGRALDLPVYFGDSGKQRGTAQKLELKELVLLQLLWILLVQTTELSGR

SEQ ID NO: 55210 - protein, 375 aa, Zea Mays
MPHHKFTDSSDWPVIDALPSYGRGRELPGKRHQSLIFGSNLTDVIITGANGTVDGQGAVWWDWFHNHTLNYTRPPLVELMYSTRVVISNLTFINSPFWNIHPVYCSQVLVQHLTILAPISSPNTDGIDPDSSTNVCIEDCYVRNGDDIIVIKSGWDEYGISFAHPSSNISIRNITGQTRNSAGLAFGSEMSGGISDVRAEGVRIVNSVHGIRIKTAPGRGGYVKNVYVADVSFDNVSIAIRITGNYGEHPDDGYDRNALPTISNITIKDVVGVNIGVAGMLQGIPGDSFSGICLSNVSLSVRSTDPWNCSLVEGYSSSVSPEVCEQLRATPGPGSGQMCYGGNYPAAAAQPQPPQKSGASRLVSPFLSISWFLRR

SEQ ID NO: 55211 - protein, 126 aa, Zea Mays
MAAAARPSNDDLRMAVKEIICDSETGRQEYEEAVIAITVEQSLKRYCQRIRRPDFWGGESEFLVLSRLCRQPIIIYIPEREYHGRGNGFIPIAEYGLEFTKNTKQWKKKTPVRLLYSGRNHYDLLV

SEQ ID NO: 55212 - protein, 191 aa, Zea Mays
MVPCQNTRTSQGAICKPDIRCCVSGREGSGSHLLRPPQQDAPEEAKQAALVFVAWFHPPPHASPTARRLVRASQFRLVLQRLSPVACSSSSHDDGVCPRRRPASSISRAAIRQEDPLRRPPPAAATSQAFRQANKEPRCRCQGCAGRVGIVRDREHSEIRHELFQHRGRHFRPSWYRLCRSSCIMGFGQPH

SEQ ID NO: 55213 - protein, 1148 aa, Zea Mays
MRADLKSLISSAATCKSWNAAAKYYRNMCRFIDLSSVGPLCTDSVFCDIMAGFEKQNIRTLILAGCSNLSSHALGRVLEHLPQISYVHIQGCSHLGDLKNKFQHVKWIRSSLNPEGSYRKMKTLKQIGDGNNYASKVARNFDQLDDSDELDGYFADISKIEGASLFSFGQGFYKRSKLLDARKSSAVLSRDAEMRRLMQRQAENSYRKMEEFVINRLREIMRCNRFDFFIPKVSKIEGRLKNGYYARHGFRTIKHDIRTMCQDALRYKDGNDLDDVKQIVVSFIQLAKRLGNPRYISERNGAAAQDSLDISQYSFDTKLKKKQNKTRANLVAAGADNSSRAFDLEIKRSLSKLKKKDVCSGSETSDDDGYSEGDETESETTVSDTESDFDVNSGAWDLKGNCLKLTEHGESVIDDRILGARMTKASLVPPVTRKYEVIEEYLIVADVEEVQRKMRVSLPDDYSEKLLSQKNGTENLELPEVKDYQPRKVAGDEILEQEVYGIDPYTHNLLSDIMPSDLELSPTDKHIFIEELLLNALNKQVRHFTGLGNTPMTYNIRPVIEEIQRSAEDSGDRRTLKMCLGMLKSMRNRSDQNFVAYRKGLGVVCNKKGGFGVDDFVVEFFGEVYPSWRWYEKQDGIKHIQNNSEDQAPEFYNIMLERPKGDRHGYDLVFVDAMHKANYASRICHSCNPNCEAKVTAVDGKYQIGVYTLRPIAEGEEITFDYNSVTESKEEHEASVCLCGSQVCRGSYLNFSGEGAFEKVLMEFHGVLDRHSLLLQACETDSVSQQDLIDLGRAGLGTCLLAGLPVWLVAYTAHLVRFIYLERQKLPDEILRHNVDEKRQFLIEINMDSEKNDAEVQAEGVLNSRLQQIVHTLDKVRYVMRCIFGDPKNAPPPMVRLSGKSLVSAIWKGDSSIVAELLQSMEPHVEEEVLSDLKAKICAHDPSDSEDIEGGIRNSLLWLRDELRTLPCTYKCRHDAAADLIHLYAYTKCFFRVRDYKTVKSPPVHISPLDLGPKYADKLGPGFQEYCKTYPENYCLAQLIYWYSQNSEPESRLTRARKGCMSLPDVSSFYVKSLKPLQERVYGNRTVRFMLSRMEKQAQRPWPKDRIWVFKSDPRYFGSPMMDAVLNNSPLDKEMVHWLKTRPNVFLG

SEQ ID NO: 55214 - protein, 406 aa, Zea Mays
MSRGELIIEDNQVKEGSASQSSGWADEFQTPYIANANSWADQFAHEELSQGADKWVSEFSSQPNHGALNENWVDEFSKLNVTDEWAEEFSGGGFGESSADPWVDEFQEHLSSFKQSPGASRGVYVFSENNPYVGHPNPMQEGQELFRKGLLSEAVLALEAEVLKNPDNTEGWRLLGVTHAENDDDQQAIAAMMRALEANPTNLEVLLALGVSHTNELEQGEALRYLYRWLQNQPKYGGLVPLQSTDSPYGPDVVRLFNEAAQMSPEDADVHIVLGVLYNLSREYDKAIASFKTALQLKPQDYSLWNKLGATQANSIQSADAILAYQQALDLKPNYVRAWANMGISYANQGLYEDSIRYYVRAVAMNPKADNAWQYLRISLSNASRADMIAACDARNLDALQKEFPL

SEQ ID NO: 55215 - protein, 1138 aa, Zea Mays
MRTLSFSEHETFDHPVACLLVVSSMDKEPVNKFVDLFNTNQLPSLLNEGIMDPQILKHYLVLHDQQEGPQDIAVNVLAEMRSTLGLNDCKLLCINSSTEAGGSNADNSWLPYKALVLNNHDGSCILSVDDLNEIKDFMQDFVSNHIIPYMEQKIRVLNQQVATTRKGFRNQIKNLWWRKRDDVPEAPNGPMYTFTSIESQIRVLGDFAFMLRDYELALSNYRLLATDYKLDKAWKRFAGVQEMSGLCYFILDQSRKDAEYCMENAFSTYLRIGSSGQRNATRCGLWWAEMLKTRGQYREASNVYFRVSNEEPSLHSAVLLEQAACCYLLCNPPMLRKYGFHLILAGNSYFVSDQKQHAVRVYRNALFVYKQNPWSYINNHVHFNIGRWYGVLGILDVAIKHLLEVIACSHQSLTTQNMFLNDFFHYVQSMGKKFDVYKLQLPVFNMSSLKVLHEDHRTYASHADVGVSESTWQELEEELIPSSSIVKTNWLDTQPMRKYKDSCICVAGEAVKLSVELKNPLQIPVAVSGISIICQLSSTLDALSSDVSGLDLDGGEDKVNTEPSISMLETDGDKFTLSKLDIVLGGGESKRVQLDVTPKVEGILKLVGIRWTLSESVVGYQYFEFNAQKKIKKGKRGPHRSWNNSLVVIKGLPKLTGSIDRMPTKAFAGDLKLLTLNLRNHSEYAVKGIKMKLSNPRFLIPGDSSDIGLKFPHCLKRHVQSESSVVSAKTMKDNFKSLLFAFPQDIEIQAGAALSWPIWFHAATPGNVSLYISLYYEMGSSSDIKYRTLRMHFNLEVLPSLDVSFSVSTSSSRLQEYIVRMDVMNKTPSESFVLHQLSCVGDKWAVSALAACSSINSVETVSENQAVSYFFKIKDCEADSCKEAESDSCTSDMALCPGSSTDLFDIARSPFVDFHHQERCRQVKMAKGPCSLLDFVLISKAVDNSSKPTPDFELLSHHTCHCSALSQNPIWWLMEGPRTISHDFSKSYCEANLQLVIHNSEAHKILVRVVTFDVIPEKTVHPHDSTSAQGGWYDVSLESDVKAISSSKSTHQEKRSSKSIPPYVWCSLSCAQIELQPDSCARVPLKVCIFAPGTYNFSNYELQWKVHLSEGPHVGENENRLSGGGLGYPFYVTVLQGV

SEQ ID NO: 55216 - protein, 347 aa, Zea Mays
MHDQESKHEEKNDENSGSNPVEVHKHDLDKEHVEEVDQKSSSNHVEISAHDMCEDNEHVEKIDHVERIDQNSSRDPVKAIMQEMIKVCLVSGSVEKVEEEDSSKKDLEKEIAPKDNKDMEASDGSKLGVNGPGIILSKHNDECGGGAQEAESMENTPTAQLMMHQDQLLDDMVTDTVTETGGAVADTEEDDTVAETEDVVTDTEDTVTDTEDALAETEAEKGERAIADKGELEQDEKKDLVALPELASSPALSSLVKPTVVKKELDFPRPNETGMKTEQDYTNGELREHNDLVSKVQGEGGVATTMESRSSALMIILALIFALATGITIVVRLYSPSRATKLQMDLP

SEQ ID NO: 55217 - protein, 72 aa, Zea Mays
MGCAEEINLAELWRDPSACVTKKIGEPPRLVDWWESHRPSGLATAVRHPIAAACSVSSSIEVRFRGSEESPW

SEQ ID NO: 55218 - protein, 206 aa, Zea Mays
MRLSYSPAAHIFLFLVQWTDCSLAGALGLLRILIYKVYVDGTTTMSTHERKASIKEFYAVIFPSLLQLQRGITDVEDKKQKAICMEKYRKKDEDGRDTLSDIDVEREEECGICMEMNSKVVLPNCTHAMCIRCYQDWSSRSQSCPFCRDNLKKTCPGDLWIYVEDQDVVDMETVSSENLRRLFMYISKLPLIVPDVIFSVYDSHIK

SEQ ID NO: 55219 - protein, 899 aa, Zea Mays
MDGGLERNGVSSVADILAQDVHELHTSSIVHEDGVENNLLAQIPSFTIKLCLNAWARNCMEAPDFLRDECMVLRSAFGIQNFLLHPKHNSQVDGKQMYDKDGNCTIKGRKLVKQIEIEVKKIRVVPQRPKLRATSSFRNLYMQAGSEYVRQISKILKSQVTMLTSTSSTSLPEEMFTCTLELQSSCKGHKRDSISPQYLKPGTGESQLFYLESQGDVILVEVQDNNRVVIGRAKIQVSSLTDTQQDEIIRWWPLYLDDQDCVGKVQLGMNLSMSSNNYGSEKMLQGGPAVDTIIYDMVLEAAMRAQNFNSKMLHINGPWIWLLDEFSDYYGISDAYRKLRYLSYIMNVAIPTKDCLELIYELIVPVTKAREDRTLTRQERSILIDCEDRIKSLLAALFENYKSLDEYSPTGLSDLFGPITDSAAPALAPAVQIFSVLHDILSKEAQDILRNYLQIAAAKRCRRHMIETDEFLSSNNDSLLTDPMTISAAYLKMKTLCINMSREIQADIKIHNQNILPSSIDLPNIAASLYSTELCKRLKGFLSSSPPSRPVQHVAELITATSEFERDLESWQVRPVHGGVISRQLFHDYIMVWIEDTRLQLLDNCKAEKISCPAVSTVSPFVEQMYEQIKESINEYGVVINRWPQYLMSLESAVADVEREIMKALEKQYMDILMPLRDGIPEKIEKQVQRLTRRQSIAPYVVPNQLGAFMNTVKRMLDVLHCRVEDILKSWAAYLTISCGNTVFGEQMNSITVMLKKKYKKYLQAIVDKLVSNTQANRNTRLKRILEETREADGESDIRDRMQAVRLQLSDSIHNLHEVFSSRIFVAICRGFWDRLGQIVLRFLESRKENRIWYRGSDYALGILDDVFASEMQKLLGSALQDKDLDPPQSVIDARSILC

SEQ ID NO: 55220 - protein, 339 aa, Zea Mays
MGTGVQAYISYRVITKTNLPEFEGPEKIVIRRYSDFEWLHDRLAERYKGVFIPPLPEKNAVEKFRFSKEFIELRRQALDLFVNRIASHPELKQSDVLRTFLQADEEIMDRARSYETGIFKKPSDFLQMFKDVQSKVSDVVLGKEKPVEESTPEYEKLKSYIFELEIHLAEAQKQAYRLVKRHRELGQSLADFGKAIKLLGSCEGDLMEKVFSEVGSKSEMLSIKLQREADNLLFNFEEPLKDYVRALQSIKATMLDRANAFRQHFDLDQERKYKELNLEKLKFMNPEKYAEAESEFRGLKADSEEATKKFEHIGQAKLAKDIADAWRSVLPKLEACSTS

SEQ ID NO: 55221 - protein, 142 aa, Zea Mays
MPTEEGSDGGGGAGAGAGEKKSSQAPAKPGACGAAKFLAGLPSRGNFSSGSAPSNLGGFRVYVCEHSTDPPEGQVIKTDSTNILIRHLQLNKQKTEGKDVDSRTVGENNRGKRSAARSLDVNNSAKKANLGTSSGSSAYEVL

SEQ ID NO: 55222 - protein, 768 aa, Zea Mays
MAWLVAISKAARLRSANAVCSQLVVSSPFRAPRSDNAAGGMLRNLQVRYRSSYTGSFPHWIRELDSPREASLLKQIYKSDPERVVQIFERHPSLHSNSAALSEYIKALASLDRLEDSPLLKTLQRGFATSAAEEERSTGLAAFGSVGRRTKDGALGTANAPIHMVTAGTGQFKEQLWKTFRSVALTFLVISGIGALLEDRGISKGLGLNEEVRPNMDSKTKFSDVKGVDEAKAELEEIVHYLRDPKRFTCLGGKLPKGVLLVGPPGTGKTMLARAIAGEAGVPFFSCSGSEFEEMFVGVGAKRVRDLFNAAKKCSPCIIFIDEIDAIGGSRNPKDQQYMKMTLNQLLVELDGFKQNGGVIVIAATNFPQSLDKALVRPGRFDRHIVVPNPDVEGRRQILEAHMSKVLRADDVDLMIIARGTPGFSGADLANLVNVAALKAAMDEAKAVTMQDLEYAKDRIMMGSERKSAVISDESRKITAYHEGGHALVAIHTEGAHPVHKATIVPRGVSLGMVIQLPEKDQHSVSRKQMLARLDVCMGGRVAEELIFGESEVTTGSSSDLNYATRLARAMVTKYGMSKRVGLVSYSENSVSGQTSVIDKEVKEILEKAYNNAKAILTTHDKELHMLANALLEHETLSGAQIKKLLPQVDNSNNKQKKAAKVPQKTPAARAKGVAQEAAGKAKGVAGTAAVPQEAATSVAAKAKGVAGTAAAAQEAATANTEGGAGTAAAPQEAATSVAAKAKGVAGTAAVAQEAATANTEGVAGVGS

SEQ ID NO: 55223 - protein, 980 aa, Zea Mays
MDKQTIPLSPNQLLLRGCSLRNTEYIVGVVIFTGHETKVMMNSMNVPSKRSTLEKKLDKLILALFATLFTMCVIGAIGSGIFINEKYFYLGLRGHVEDQFNPKNRFVVTILTMFTLITLYSTIIPISLYVSIEMIKFIQCTQFINNDLHMYHAESNTPALARTSNLNEELGQVEYIFSDKTGTLTRNLMEFFKCSIGGEMYGTGITEIEKGGAERAGIRIDDDEGKRSANAVHEKGFNFDDARIMRGAWRNEPNPEACKEFFRCLAICHTVLPEGEETPEKISYQAASPDEAALVSAAKNFGFFFYRRTPTTVMVRESHVERMGSIQDVPYEILNVLEFNSTRKRQSVVCRFTNGRLVLYCKGADNVVYERLADGNHDMKKISREHLEQFGSAGLRTLCLAYRDLSREQYESWNEKFVQAKSSLRDRDKKLDEVAELIEKDLILVGCTAIEDKLQEGVPTCIETLSAAGIKIWVLTGDKMETAINIAYACSLVNNDTKQFIISSETGAIREAEDRGDPVEIARVIKDSVKQNLKRFHEEARHSLISTPERKLALIIDGRCLMYALDPTLRVDLLGLSLSCHSVICCRVSPLQKAQVTSLVRKGAEKITLSIGDGANDVSMIQAAHVGIGISGQEGMQAVMASDFAIAQFRFLTDLLLVHGRWSYLRLCKVITYFFYKNLTFTLTQFWFTFQTGFSGQRFYDDWFQSLYNVIFTALPVIIVGLFDKDVSASLSKKYPQLYKEGIRNSFFKWRVIAVWGFFAFYQSIVFFYFTAAASRHGQGSSGKILGLWDVSTMAFTCVVVTVNLRLLMACNSITRWHYISVAGSIVAWFMFIFIYSAIMTSFDRQENVYFVIYVLMSTFFFYLTIVLVPIIALFGDFLYLSIQRWLFPYDYQIIQEQHKDEPHEYSRVPLPETSHLSPEEARSYMISMLPRESSKHTGFAFDSPGYESFFASQQGIGVPHKPWDVARRASMKPQRAGKS

SEQ ID NO: 55224 - protein, 155 aa, Zea Mays
MAGARGQYATPPLAAVSGQRQTLALPFGRVPHRSGPHERAQATGRAWDREQARLGKQGTRQGLHSAWLVKMEQRARRGRRRAQGGLRQGAAGRWRERSKGQLGSWPNGVGGGSRSPNAGEPGTRGAAWVWRNPSREGKDLARAQGRHPWRGSAAC

SEQ ID NO: 55225 - protein, 124 aa, Zea Mays
MDDADDIYMRSWTGTIIGPPNTVHEGRIYQLKLFCDTDYPDKPPTVRFQTRINMTCVNQETGLVEPSLFPMLGKWEREHTMEDILSSLKREMSTPQNRRLYQPHEGNEDQRVEQKGLSLRCAVM

SEQ ID NO: 55226 - protein, 584 aa, Zea Mays
MPLFDKKPFSLLEPPKDLDSKEKVFQIRFTKEIFRDYEEYLKRLNLYRQRVWTCNISGKSNLTFEEALVSEHKAMEKAQNLPTELMAQVLRMTQYSPLGLYELVDKIYASLLEEVFEGIELHANKDGNVAPCKILKILDSGGTKMCEVGWIRKGKAITNTSVIKAADLFYRRAPVSRNTLKFFIRDATSQSNPWVIHENLAKKFGITIEPPDSVMKKGRKRQENETVEDGRKKLKTDEEHAYVLIKYPIDDLLVRPNADDPSLFKRPLLATDFRVPRCSVGDLLMVWDFCSSFGRALNLSPFPLTDLENAICHKESNVLLVEIHAALFHLLMKDEGDYFTVPQNKKQKLKVSSVTWAEYLCDFLEMTKNEELSTNIATVRRGYYGLIDTNIKLKILRELVEEAIETSAIREILSDRVDQKQVLNATKRENTRKDKKEQNLNTEIAMKNEENQTDAVQGGHEGVDELVRRKEENDKSNISRGRTEVKRHMVQHLETEIEKLSIRSSPLGKDRQYSRYWFFKREGRLFVETADSREWGYYSTKEELDALMDSLNVKGIRERALKRQLEKFYSKISVLVLGGLQGVW

SEQ ID NO: 55227 - protein, 269 aa, Zea Mays
MVKQRQIFNEVSARLSDLEVTLDAGIQHRNKALESIGSQLWRWTIMVKKEKAVYDTLNMLNFDVTKKCLVGEGWCPIFAKSQIKDCLQRSTIHSNSQVGTIFHEMDTIESPPTYFRTDKFTNAFQEIVDAYGVARYQEANPAVYSVVTFPFLFAVMFGDWGHGICLLLGALVLILREKRFSSQKLGSFMELAFGGRYVILLMAIFSIYCGLIYNEFFSVPFHIFGKSAYECRDKSCSDAHTFGLIKVREPYPFGVDPSWRGSRSELPFL

SEQ ID NO: 55228 - protein, 67 aa, Zea Mays
MCCYFPLPLMSNKYLGFPQENLQEMGVEHLLDPLFLFNPSCSSSSRSLLHVGRSRGRRKQWRAAAKG

SEQ ID NO: 55229 - protein, 115 aa, Zea Mays
MSYITFNMYFNQILKVVLEVLDDSDSSMRELALSLITEMLNYQKDAIEDSMEIVFEKLLHVTKDAVAKISNEANQCLNVLLAKYNPFTCLAITVPLLVSDDEKMLVVCINCLTKL

SEQ ID NO: 55230 - protein, 96 aa, Zea Mays
MVRLPYTTALTTLFSYGLLFAFGQLRDFFRKFVDWFKAKNVKGYAPICLGLEDFYVRRLYLRIQDCFGRPIASAPDSWFDVVERTSKDNNKTLHCC

SEQ ID NO: 55231 - protein, 60 aa, Zea Mays
MERFHNLNENFYSCLDQQQASSHLYHDQRKGLKVQQGGTDQDHQVPHLLKQQERQGVHTA

SEQ ID NO: 55232 - protein, 90 aa, Zea Mays
MLNMNFSIFLLQIASIVASGIQPLHNLTLLRFIDQKVGAGESVLWTQQQIERGFTAIENLIQLKGCAGKYATGDEVQLLQNQVRLPRRAR

SEQ ID NO: 55233 - protein, 167 aa, Zea Mays
MNEIIDKYNTHSKNLGKTEQPSLDLNLEHSKYANLNEQLAEASLRLRQMRGEELEGLNVEELQQLEKNLESGLHRVLQTKDQQFLEQINDLERKSTQLAEENMQLRNQVSQIPPAGKQAVADTENVIAEEGQSSESVMTALHSGSSQDNDDGSDVSLKLGLPCVAWK

SEQ ID NO: 55234 - protein, 102 aa, Zea Mays
MGNILFLSGLGLTIGLKSTMQFFTKPKNYKGTISFGAGFFLVLIGWPFFGMLLEAYGFIVLFSGFWPTLSVFLQRIPIIGWIFQQPFVTSFLDRYRGKRVPV

SEQ ID NO: 55235 - protein, 604 aa, Zea Mays
MDKQEPVANGEQTIGLAEKPKELPVASKDEKATVPPILVDSNAFNLPSEGQTQAGTSNMDGGHNGAHNFYASQAQPFYYQGSGSENPTQAWDTYPPYMSVEGLEVGPPVVYNEDPSLMFHGGYGYDPYYSPIATPVPNAVSGGGQLYSPQQFFSAPYYQQSVPPDMQYLSSPTPISQGDTIMPIDPTQGAFIADTLSPNSFLFGPRPEWFRSSEGTGSFPSPAASPQPSRGVPGSYDQNNFPMASRMSSPHQKPFYGLRSTTDSYGRGFSHGGMFPQASNYGGSVTSFGLNGRSLISTEKGRRRGRGNALICSCNGPLDFLNEQSRGPRATKPKKQPEVDSKDEVPTTGVGRELYNKPDFVMEYTNARFFIIKSYSEDNVHKSVKYGVWASTTNGNKKLDSAYREAKEKGEHCPIFLLFSVNASAQFCGVAEMIGPVDFEKSVDYWQQDKWTGQFPVKWHIVKDVPNNLFRHIILENNDNKPVTNSRDTQEVKLEQGMEMLKIFKNHDDDASILDDFEFYEEREKALQENKARLHQQHLPSSIVIEPKKPLTAPSDLVGHITKSFAEAVRLGEAKTVSHLTEKVSGGDPSIPVKHVEVKQSGLS

SEQ ID NO: 55236 - protein, 668 aa, Zea Mays
MAAQSKQFKDALEILGSNSELFVKLLQKPNQHIADSIQQHENSKVSAGLEPDKIHGQTNFVGGRGSSKQHPLATKEQAKERKYMFFWRKSKSNRRQMLDATDGAQTVSKIVILKPNPERGINQKAATARTLHQQPCTSNAPGCSGRENSKFSIKEVKKRFRFVTGERSERNLSPAEDLQGDPRKIKDSVVAINKYFRHLPEGSLANKSASDIENGIKPFISSKQKNQNGSITEISGHIVAPKGASVFYEEARRHLSEMLKGNDCSINYPEVQISKSLEGILSLPHGNVSTTGSSLRGKDYLDPSPGETDVYDACEVEREECTQERSQSQEDFGSIAHCTCTTVDDQVTVREGYYTNEAQEGPRHAHDEPDTLYIEGLDKFICRENIRNEESSPAEQSRDDIRQEILEEINQGKEHVKMSLASVEGIDEKLGQQEPETPEPRASAKLISDGSPNQSDEKQERPSPVSVLESSFEDIGSPDCINKKECELHGLQRTLYFPDNEPDVNVLWEDKNVRLDYIKLVLELSELCAEQNLEVWYLEDELISPCLFEELQSQGDQTDDRMLLFDCICEALTEIQERYFRLSSWLTFLKHDIRTPPTGENLITEVDRYVNGYIIQYSLPSTLEQTIKRDLEVQTWMNIRSKTEGIIMEMWEFVLDELIDETVSDLWI

SEQ ID NO: 55237 - protein, 480 aa, Zea Mays
MGLVKEGIDMEEGTLEIGMEYRTVSGVAGPLVILDKEIVNIRLGDGTNRRGQVLEVDGEKAVVQVFEGTSGIDNKYTTVQFTGEVLKTPVSLDMLGRIFNGSGKPIDNGPPILPEAYLDISGSSINPSERTYPEEMIQTGISTIDVMNSIARGQKIPLFSAAGLPHNEIAAQICRQAGLVKTLEKGKHAEGGEDDNFAIVFAAMGVNMETAQFFKRDFEENGSMERVTLFLNLANDPTIERIITPRIALTTAEYLAYECGKHVLVILTDMSSYADALREVSAAREEVPGRRGYPGYMYTDLATIYERAGRIEGRTGSITQIPILTMPNDDITHPTPDLTGYITEGQIYIDRQLHNRQIYPPINVLPSLSRLMKSAIGEGMTRRDHSDVSNQLYANYAIGKDVQAMKAVVGEEALSSEDLLYLEFLDKFERKFVTQGAYDTRNIFQSLDLAWTLLRIFPRELLHRIPAKTLDQYYSRDASH

SEQ ID NO: 55238 - protein, 470 aa, Zea Mays
MDSSYSLTGNYGAHGLKSDVRDITNHIENLSLSELLDGTYKYSSLGRDKGKKVLRTKEELLVSVRKAFSMLSDMDYCHGKDSNLILGPKPPPACTSSCDIKEQCCDKPSPLVKDSSQINVCDTALCHPKDILSRLTLPHQQDLDSLLTPGSESTAAVKPVRGASLPPFPWSHSQAGGCRQSVDCGKHGSSRSYSQWQWVRVGSNLTSLDYEDTSVHRIDHLLQEMDAAKLCRMDSCDGQYNLCGTESTSGSLAQNIQSRKNGGEHGSQQLQTLDRVDSLDGFQKHDSEHSLLKTSQVSPKIQHAAEILCDMRRSIESLSGQGYSNGVIKWPKSPSEKVMKARKPSSQFGITESSSGSRNNDATWNGSSHSTKKFCDRKNDSACLNYPGKETIRWPVPVEGGASPVRSSERGPMLDMRQPHGNGGRHPVQVPSQVARLEKEYENQQKLRKATLTSSLGPPGDWSRERNRRV

SEQ ID NO: 55239 - protein, 90 aa, Zea Mays
MAAVRSLLRSSASLLRAAPALARSSATTRPSLRRALAAPPRLLRSPVESSFCVESLLPLHTATAGARMTSMLAAPGQGLGWLTQAETDGV

SEQ ID NO: 55240 - protein, 359 aa, Zea Mays
MLQSKSFVKKTKQGRIQKVVREHYLRDDIYCGFVPCTACAAAAERKLGAAAAAILVVDTNVVLHQIDLLENPAIEDVVLLSVVLDEVKNKNLSVFNRIKALCINKARRFYVFANEQHRRHPSPTKEMLEPLLRTASSIGLNLDVSSSKALAESLDNAKSNDPYFNKLIRILATRCMTQAVYFCSGDLTFSEYYHYGLAASLYTHFTSPIRRYADVVVHRLLAAALNIAKLPPIFQDGPQLTGIADNLNYRHRNAQMASRASVELHTHIYFKTRPTDTEARIVKIKANGFIVFVPKFGIEGPIYLTPKGDKGGDWVVDEVHQRVTKPGTNISYAILQTVRIHMEVVEPQPHRPKLQLTLI

SEQ ID NO: 55241 - protein, 505 aa, Zea Mays
MEAAAALPPERDTSADWGDGVVPLGFRVKASSRESPSQKAGNVLEADLRSHWATATNTKEWILLELQEPCLLSHIRIYNKSVLEWELTAGLRYKPDAFVKLRPRCEAPKRDVVYPANHTPCRYLRISCLRGNPIAIFFIQLFGIPVPGLEPELQPLLSYLLPQITSSKQPLSHNMHLQLLKDISTRLPPFLPQIEADLNSVVDTPESSVRFLALLAGPFYPILHLINERDPTKSLFGSADSDALRTSPASTPTVSSNFEAQPRRSRSPSVQPASYLLAFRSETTMLLLRKAHKDKTLGVVCVRASKVLQKLLEPEPFLDKSMYTDVMLPNQVSDEIPKSDALSLVHSTDYSSMFGEEFSLSENQFDGSLLNILDIAAVEEGILHVLYAAASQPMLCRKLAETTSDIWSVLPLVQALLPALRPPISSGPIEHIDDSFSQWNHPNIQNALSQIVTMSVSSSVFHPLLRACAGYLSSYLPSHVKTACVLLDLCRGALLSWIPMITAKV

SEQ ID NO: 55242 - protein, 134 aa, Zea Mays
MPALAKPASRTAKPAAAPKPKPAAAKPKAATAGASHPPYFEMIKEAITALKERTGSSSQAIAKYVGDKHGASLPANFKKMLSIQLRGSAAKGKLVKVKASYKLSDAAKKASPKTKAKPKTVKSPASKKARKASA

SEQ ID NO: 55243 - protein, 175 aa, Zea Mays
MAAPPARARADYDYLIKLLLIGDSGVGKSCLLLRFSDGSFTTSFITTIGIDFKIRTIELDGKRIKLQIWDTAGQERFRTITTAYYRGAMGILLVYDVTDESSFNNIRNWIRNIEQHASDNVNKILVGNKADMDESKRAVPTAKGQALADEYGIKFFETSAKTNLNVEQVFFLHRT

SEQ ID NO: 55244 - protein, 697 aa, Zea Mays
MEVNSSGEETVIKVRKPYTITKQRERWTEAEHKRFLEALKLYGRAWQRIEEHVGTKTAVQIRSHAQKFFTKLEKEAINNGTSPGQAHDIDIPPPRPKRKANSPYPRKSGLSSETPTKELPSDKSTKPNMPLSNENVLMAGDASLQKFQRKELSGKESCSEVLNLFRDAPSPSFSSVNKSSSNHGAPIEASKTKIRDMTIMENSSLNPNMQEDVKEINDQEMERLNGTQISSKCEHSHEGYLDISMQQMKLKPESVETTYVDKQTARASHSLAERTGTTSIPVTATEETHSVLTSDQVGINGSMNPSIHPMFPADPKFDSSATPQPFPHNYAAFAPMMQCNCNQDTHRSLVNMSSTFSSMLVSTLLSNPAIHAAARLAASYWPAAEGNTPIDPNQENLADGVQGRSIGSPPSMASIVAATVAAASAWWATQGLLPFFAPPMAFSFVPAPSAAFPTVDVPRPSEKDRDCPAENAQKECQEARKQGQFEGFRVAASSEYDGSGKGEVSVHTELKISPVQNADATSAAGADTTDAFMNKKKQDRSSCGSNTPSSSDVDVDNVPEKEGNGNEKAKQASCSNSSAGDTNHRRFRSSGSTSDSWKEVSEEGRLAFHALFSREKLPQSFSPPQAEGSKEVGKEEEDEVTTVAVDLNKSTTSIDHDLDTIGFKPYKRCSVEAKENRVPASDEVGTKRIRLDSEAST

SEQ ID NO: 55245 - protein, 607 aa, Zea Mays
MDLDPEGIFRDDSDEDEDSVQEREANKEMVVYLVDASPKMFTPATTQDNEKQETHFHTIVNCITESLKTQIIGRSYDEVAICFFNTKEKKNLQDSAGVYVYNVGDREQLDRPTAKLIKDFSLIEDSFMSTIGSRYGITAGSRENTLYNALWVAQALLRKGSVKTVSKRILIFTNEDDPFGTITGAVKTDMIRTTLQRAKDAQDLGLSIELLPLSPPDDQFNMSLFYADLIGLDGDEMTEYLPSADLDGVYLMAHILVSSGTRLGIAKPHEYMILELKFISDLIEYVERSFICNDTGALLQDAQTRFQMYNDTIVKFSVRELSEVKRVASHHLRLIGFKPLDCLKDYHNLRPSTFIYPSDERIFGSTCVFVALHSSMLRLGRFALAFYGNPTRPQLIALVAQEEVTSSGRQFEPPGMHMIYLPYSDDIRYPEEVHVTSDDAPRATDEQIKKASNIFKRIDLINFSACQFANPALQRHYGILEALALGEDEMPDIKDETLPDEEGLSKPGVANAIEEFKTSVYGENYDQEEAEAAAGKASRGNASKKRKEVTDAAAQISAAYDWAELADNGKLKEMTTVELRSYLTAHDLPVSGKKDVLISRILTHLGK

SEQ ID NO: 55246 - protein, 1125 aa, Zea Mays
MSSLSRELVFLILQFLDEEKFKETVHKLEQESGFFFNMKYFEEKVHAGEWDEVERYLSGFTKVDDNRYSMKIFFEIRKQKYLEALDRHDRAKAVDILVKDLKVFSTFNEELYKEITQLLTLENFRENEQLSKYGDTKSARSIMLVELKKLIEANPLFREKLVFPTLKASRLRTLINQSLNWQHQLCKNPRPNPDIKTLFTDHTCSPPNGARASPVSVPLAAVPKAGAAYPPLTAHTPFQPPPGPSLAGWMANAAASSSVQSAVVAAASIPVPPNQAVSMLKRPALTDYQSAESEQLMKRLRPGGHGIDEATYPAPTPQPAWSVDDLPRTVACSLSHGSNVTSMDFHPTRHTLLLVGSANGEFTLYEIGLRETLLSKPFKIRDINACSPQFQNAVVKDSSISINQVTWSPDGEMIGVAFTKHLIHLHGYQPPNETRHLLEIEAHSGGVNDIAFSRPNKQLCVVTCGDDKLIKVWDMHGHKLFTFEGHEAPVYSICPHHKESIQFIFSTSLDGKIKAWLYDNMGSRVDYDAPGKWCTTMLYSADGTRLFSCGTSKEGDSYLVEWNESEGSIKRTYSGFRKRSAGVAGVVQFDTAQNHILAAGEDNHIKFWDVDNNNMLICTDAEGGLPALPRLRFNKEGNLLAVTTADNGFKILANADGLRTLRALGSRPPFEAFRPQYEASSMKVSGAPVVASISPNIGRMDHLDRNSPAKPSPILNGGDTASRSIDIKPRISEEKPDKAKPWELMEVLNPQQCHVATMPETPDQARKVVRLLYTNSGVGLLALGSNAIQRLWKWSRNEQNPSGKATASVVPHHWQPNSGLVMTNDTADTNPEEAVPCIALSKNDSYVMSACGGKVSLFNMMTFKVMTTFMPPPPASTFLAFHPQDNNIIAIGMEDSTIHIYNVRVDEVKTRLKGHQRRITGLAFSTNLGILVSSGADAQLCVWTNDTWEKKRTVSIQMPAGKTPSGDTRVQFSSDQSHLLVVHETQLAIYDASKMERIYQWIPQDTLSASISHASYSCNSQLVFAAFTDGNLGVFDAENLRLRCRIAPSVINSNPPVHPLVVAAHPHEPNQFAVGLSDGSVKVLEPLESEGKWGAPAPADNGIIPNGKTPASSATSNPAADQIQR

SEQ ID NO: 55247 - protein, 221 aa, Zea Mays
MKEVPLPAPAPPTRPSPPKLEKQSPPPATPVTDVPPFSSNPENINIQEPEVDAHAIYVRNLPLNATETQLEDEFKKFGTIKQNGIQVRSNKIQGFCYGFVEFEDSTSVQSAIEASPVAIGGRQCYVEEKRAPGSRGSSRGGRFAPGRGNSFRSEGTRGRGNYGGGRGYGRGEFSYRSDYGVRSGGRGGSLRGADVGYQRVDHAGYAGGRGSRTAAAGAPSK

SEQ ID NO: 55248 - protein, 599 aa, Zea Mays
MKAMMLKKLSKQLNGEDWSWNNLNTLCWAIGSISGSMVEEQENRFLVMVIRDLLNLCEITKGKDNKAVIASNIMYVVGQYPRFLRAHWKFLKTVVNKLFEFMHEMHPGVQDMACDTFLKIVQKCKRKFVTQQVGENEPFVSELLSNLATTIADLEPHQIHTFYESVGHMIQAESDNTKRDEYLKRLMSLPNQKWAEIIGQASQSIDILKNQDVIRSVLNILQTNTSVASSLGPHFFPQISLIFLDMLTVYRMYSELVSSTIAEGGPFASRTSFVKLLRSVKRETLKLIETFVDKAEDLPHLGKQFVPPMMDPVLGDYARNVPDARESEVLSLFATIINKYKGEMLEDVPRIFEAVFQCTLEMITKNFEDYPEHRLKFFSLLRAIGTHCFQALIQLSSQQLKLVIDSINWAFRHTERNIAETGLSLLLEILKNFEASGFQNQFYKTYFLTIEQEIFAVLTDTFHKPGFKLHVLVLQHLFYVVDSLTEPLWDSSSVPYQYTDNATFVRDYTIKLLGTSFPNMTVAEVTKFVDGLLSSKLDLPSFKNHIRDFLVQSKEFSAQDNKDLYAEEAAAQRERERQRMLAIPGLIAPSELQDEMVDS

SEQ ID NO: 55249 - protein, 462 aa, Zea Mays
MLDSRAAELDKEERPEVLSLLPSYEGKSILELGAGIGRFTGELAKTSGHVFAVDFVESVIKKNGSINDHYGNTSFMCADVTSTDLMIEANSIDLIFSNWLLMYLSDEEIDKLVERMVKWLKVGGYIFFRESCFHQTGDTERKFNPTHYREPRFYTKVFKECQTFNQDGTSFKLSLITFKCIGAYVNIKKDQNQICWLWKKVNSSEDGGFQSFLDNVQYKATGILRYERIFGDGYVSTGGAETTKEFVEKLNLKPGQKVLDVGCGIGGGDFYMAEKYGTHVVGIDLSINMIMFALERSIGCKCLVEFEVADCTTKTYPDHMFDVIYSRDTILHIQDKPSLFKSFFKWLKPGGKVLISDYCKSPGKPSEEFATYIKQRGYDLHDVEAYGQMLKNAGFSHVIAEDRTDQFLSVLQKELDKFEKNKDDFLSEFAQEDYDDIVNGWKAKLQRSSAGEQRWGLFVATK

SEQ ID NO: 55250 - protein, 258 aa, Zea Mays
MAVIAKIESIDSLKNLEEIIRASDGAMVARGDMGAQVPLEQVPSIQQKIVQLCRQLNKPVIVASQLLESMIEYPTPTRAEVADVSEAVRQRADALMLSGESAMGRYPDKALSVLRSVSLRIEKWWREEKRHEALELRSVSSSFSDKISEEICNSAAKMANGLGVDAVFVFTKTGHMASLLSRCRPDCPVFAFTTSTSVRRRLNLQWGLIPFRLAFSDDMESNLNRTFSLLKARGMIQSGDLVIALSDMLQSIQVMNVP

SEQ ID NO: 55251 - protein, 111 aa, Zea Mays
MEAAAATTAAALLPPARKVFILPLLLLLAASSLVPRASSDGAQYDYRAYTECKPHPEPALYNGGVLRWASKITDFRTEDEGNYSPAFVLYNMSAATAYSFSSSLLHCLHLS

SEQ ID NO: 55252 - protein, 852 aa, Zea Mays
MGEDEYRDYLSGIVAQLQEFFPDASFMVSNFWSGDKRSRISDILSEYDMTVMDYPQQYEGCPLLQLEMIHHFLKSCENWLSVEGQHNMLLMHCERGGWPVLAFMLAGLLLYRKTYTGEQKTLEMVYKQARRDFIQQFFPLNPQPSHLRYLHYITRQGGGSEWPPISRPLILDSVVLHVVPRFDVDGGCRPYLRVHGQDSSPGNKSAKVLYEMPKTSKHLPHYGQAEVPIKLSVFCRVYGDVVLEFIHIGDNIEHKETMFRIMFNTAFVQSNILALNRDDIDVAWNVNNQFPRDFRAEVHFSDPDSFKPAATVEEIADDGDETDVASVDTGEEFYEAEEDWHDARKDQETRSTDGGISLDDVADGGVATEERSSLEKHQFNEGVKIGVSQNLGSMNEKGASAPTPTFDNQEGLQQPREVLANGKLSSTNGQENSDVHDIQVVATSVDSEGHKFGSTCQEDMKGVIAQTLVTTVDPSCSDEIECQANEQTKISEYPDLDYTAFGSPRSLSRTNGDTHLRTTKNEGLQNGDIKIITENTISMDNDLVIYEEKTIVVNGNTVQEVKNIVNEKSIAAKIDKPIIESRNSLNNNNGKIQIAKPSDTSNGKLDGCRLESCLEEALPTKKTTVHDRIVVLPATDVGTEIKTKQEGLGDKQDFGIVLPQSRTVARARSPRLESDDRGQIPDKAVSSVLKKMAVGNAKMEEQPKLAKPKTIRRWISPKKESDATSVHRPSHPPSRYDSSPAALAIRSMPTDVKISAVNDAPLLSLKQPYGCNFTREVTSALSASSPPQQSLLPGAQIASRNQVSLPSLPPPPTNYSSSSTPMHRGLASTCLPNLPQGASPPRSSGAQKQAFA

SEQ ID NO: 55253 - protein, 298 aa, Zea Mays
MELSSSVSSTAAAAAQARLLRPPSFRQPGPAGFVSCRSYAIRSKLVRAMPPILASFQPASPRYPSFQDANGKRRNVPCYQRQQTPQVEARSMEEVYDTLAEHLLSVLKNIEHLDSKYIVGLAGPPGAGKSTVASEVVRRVNTFWSQKHTKGSGAPLPTKEIAAMLPMDGFHLYRAQLDAMEDPKEAHARRGAPWTFNPSLFLKCLHTLRTEGSVYAPSFDHGVGDPVENDIFVKPQHKIVIVEGNYLLLEEDVWTEIRDLFDEKWFIDIDIDISMQRVLKRHIATGKEPDVAAWRLLS

SEQ ID NO: 55254 - protein, 145 aa, Zea Mays
MGPICGVPDFKMRGKKSDELEPVDAGDEDDDGGDDGDEDGDFGEEGEEDVSEGEGYDNPKGNETKKQRGDPEENGEEDEEEPEDQEGGGDDDDDDDDDDENGDDEDDDNGDDDEEGVDEEDDDQDEDEEEDDDEDSLQPPKKRKK

SEQ ID NO: 55255 - protein, 378 aa, Zea Mays
MAGGPGGGGDAGGEHAAAAYWYDACEDSASLLCGIDFAASADFDPGLIPAMDCGADDGFVAEIDRILESINAEATPAPPPPPPAPAPAPAPAPVAPLQPQPQLQEAAATVAHNAVAVSDVAQRAPAVEARKEPRREFPVAAANGGDDCRDSKRQRLPAGGTGGPRHDWRRRPMAPPPPSRGWEDRGRGRREYDRPRKRDRDGHYGQCHDHHRRDPRGFWERDRGGKMVFRHGMWEAEADRQGKRARTKDGCPPAENKAEVDRSGKEKPATEEKARQYQLEVLEQAKSRNTIAFLETGAGKTLIAVLLIKSICDKMLKENKKILAVFLVPKVPLVYQQAEVIRERTGYRVGHYCGEMGQDFWDSRKWQREFESKQIMNF

SEQ ID NO: 55256 - protein, 78 aa, Zea Mays
MTYNLRPVIEEIQRSAEDNGDRRTSKMCLGMLKTMRNRSEQNFVAYRKGLGVVCNKKGGFGVDDFVVEFFGEVEKTPE

SEQ ID NO: 55257 - protein, 566 aa, Zea Mays
MQVLRLSCMARYESYPFYNTKSLARRSLASAMIDYFPLNVSSSFPASVGGVQPTPAPPGGRNPSPSPPAQARASPAPAAPLNISGPATATPRAAQPTPAPPGGRTRTPQHAAAATNDQTASGSSENKRKETSNRTKWLIASIATGLVAAFTSLALTMSIWYRRRKQQLYQRGHVIDAVPEDTMRDLEKNHLDSEEEEDEDGGRTSYQLYNYLVLEAATCRFSSRNKLGSGGFGTVYKGTLENGKEVAVKRLRDSKRTIQELEREISIVASLRHKNIVRFLGYCFQEEGRFFIYEYVPNNSLDKFWYKASSQWHQRLEWATWFNVILGVARGLKFLHDKGIIHRDLKPHNVLLDHNFNPKIADFDLLRMYDQQKTHESTEKAAGTFGYMAPECTSGRKLLLSIKSDVYSYGVLVLEIITGHKIYTFEGQNSEGLVEYVWQHWTEKRASDVVDCDLGMEGQEHGPWQALRCVHVALLCVQSDRSRRPTMGQVIAMLSSGDDGTEELPEPSRPAWVRRPSNDGVKFSAVLRVQVAPLDDVPPSTKWMGFLHGLDLIDYELNIFIFMILI

SEQ ID NO: 55258 - protein, 302 aa, Zea Mays
MAGWISSKLKAAETLLHQIDQQAAESLGKSPSASDLATLHSTTSRSADDLLDVPLPRRPPPSGPPPSLGLRLAAKRRSPPSQGPRRSASAAAMLAVQDQAGGEPTVGVVAEVKPETDGGDREDGKSVASESGSDEDSDGSGSEDSEDSEEERRREEERTRRRAERLAAMAARAIAEREDAVARLEGEKAGLEKLLAEREKEQAQEASELQTSMIETLEAVEIEKQRHHSTRMEALARLARLEVTNGELAKSLAREQWNLEVQVDQVAQLREEVELKKLAQDKYRRKLTKIQKTSAPPVDENL

SEQ ID NO: 55259 - protein, 554 aa, Zea Mays
MDTLKAQTVLFYDADIDGAPMNFCDVFLYSQALEGITLSMILEPPSEEEVSLLLEIFSICLTGGKEVNKEIMSNVQDLAKAFSEYKDEVLVKREELLEYAQSIISGLKRNADIVRIDAETLELQRKLDEKQKSRGQSPEYQDKTSDKIAAANLEVFKEALGELRLCSRVEELLLKKKSITLGDSLEIHSQKVDKLKVLADSLACSSSKAEQRILEHRRQKEDALNFRVKKENEVSVSEKELLDEITELEKQRDELEAQLKKVNISLNAAAGRLKQTREERDQFDEANNQIIFSLKKKEDDLSKSIALCNVESNVVKIWIGFLEDSWKLQSSYNEQKDNKTCDELEKCVSDFLKLTKHHLSAFKEVLSQLIENIETYVGNLAVLTSREEEKEHGDDEASERTDPRKSLEEEYLETEKKIIIAFSIVDHIKKLFYSGEGADSRRDDPEVKSLIEEIEKMRESFESIERPTLSIESEKAKPLPVEGSKLSPSPLQAPATPKAAHVDSPKSPMKPEQHFDSDAELATLGSEIGKEDKEYSVEEISGWEFDELEEDLKS

SEQ ID NO: 55260 - protein, 307 aa, Zea Mays
MAIELDDDSCNAMQTADPFREAPLGAPDTIGHRASRPQLLDRAGTGRRPFVAYPASWPASLRLGRGKRRRKREPSGQAGSADRLPPKYPRIPIPKQHPEKATSAEVWGAMVVRRLGGTGRALLTLPNIRRRASNSWAAVCDTFFSTKQVFESHRIVFTVGTSIASVLTAWAGYSLRHVQQLKIERRLESIESSLKDNHKVEHEEIKKIVTSSNISAPGCVATAMTTMVVGYALGWRGGAWYARRAFRREQQKLMMGHMKSSQNRWHWRPFNRLRNSRLTASKNKSTDALSTSRSGASANVGSAAGSA

SEQ ID NO: 55261 - protein, 124 aa, Zea Mays
MLEKFKNDVEKQQVEQMTDWQTKLVMMDSKERQYILQVSNYKAMLNRVGYTPEINHGVLMEMAEHKKDLERKTKPIADTLRSYQDLPPDKALAALAIEDKKRQYAAAEKYLEDVLQSALTTSGL

SEQ ID NO: 55262 - protein, 80 aa, Zea Mays
MLTPPDLEREFGLTGGNIFHGAMGLDSLFLMRPAKGWSDYRTPVKGLYLCGSGAHPGGGVMGAPGRNAAAVVLEDHVKTK

SEQ ID NO: 55263 - protein, 232 aa, Zea Mays
MQAPPERYGLAAMEFESAARRRQRRLSSPSLRTHLTPAFDAVAGGEGGVSGYSSSSSSSGLELGFDASLLRNRRSGFAAPSDLDSRVLLYSPQSVPPQMRAAYLAADDGVRAPGVNHYGSKYEAARLTGAPGFQGSENHISFASPPQTSSNIPTTVLGASTSTKLPAELQLPEGSVVATNAELKTPGPEATPSTLKPSANPEPRVDGDDITDALYGDHGHRRLPIFREICPD

SEQ ID NO: 55264 - protein, 1304 aa, Zea Mays
MSHEWGDELAAPSPLFLEQSYDSAHLLQQINSQKMLEDVSINHSTLLNTDNWKHANQQYFKCLAMMQQLRQVSLKFNKDLGLEEVNKAMSFMSHLLTVLSEQRHLAYNLFDQRNQFKHAIFLLGSGGKSKSLSSSQNVLLSSMWQQKKLFDAVITLITDSNLLLRSFKDCHYNSCNNFIEVEGISSLLGKFILNFSESKELLDECLLGSTNIFAGAYKSMPHSATEMEQLFTDNCQHIDSLLDGYLPGSNNIFPDAYKSIPLATTEMEQLFADNCQLIDSLREDMKVLCHRDLSVGSVKKVLISRLEELLEKGKMAMENRRHVEENHKLCLKLEASYIEILKETFMLVVGAVRKLTDHEVCSNGTEKSPVGNVASWKDTLQTCIMNLKLDDICVAGEKIRILVRLLVDYKPDIRTSIELHLMHLHAWLSVILSSAEGILSELLEAHITTSEMTLALGDLFIHLFTDGFGSTEDTAEDADELQQDAVGSGTGMGEGDGQKSVSSDIDDESQLGDSKDLTCKADPAPKNDDKAVEMQDGFNAQLSDVSEDLEGKDSGGEDEDTLDNQMGDTGDASEVVGKKSWDKDEDDDPKTSIEKYESGSSAKGTQQDDREMRAKDDGSIEEEDPMEMDSEEGKNNNLEHDPSTHDETELNTDEVMDKADAYDDRTGPELPEPENDSIDVDMVEQEQTDEINADNEDIGTEEAEQADQRLDASDDMEEGDMAQHSDGVVDNEGEHVEDANTDAGEMDSHQLDKADSLMPLSQGLQPDNMQINSNGESEANLANSSDMHGAVAPSVNFSGNEVPNMEISMPNTGNDSILSSNSKPDMQNDAQQHIKQTNPFRSIGDALEDWKERARVSADTQDHQPETGKDSSENTTEFRYVPEGEESTSQALGAATADQINYDNQINQSFLEDESCIRNLEHSDERTPDNPEVPYLQTSQALPNKSENANELDGREIQTDASVQNLVERTDHTFQDLVSFKQPPADDKIALIDLTTDRELPSQMDLDITDAETKRSNAVWKNLELATMKLSQELAEQLRLVMEPTLASKLQGDYRTGKRINMKKVIPYIASHFRRDKIWLRRTKPNKRNYQVVIAVDDSRSMSEGKCGKFAIEALVTVCRAMSQLEVGQFAVASFGKKGNVSVLHDFDQIFNSEAGVNVISSLSFEQDNKIEDEPVSDLLTHLNVMLDTAVARARTPSGQNPLQQLILIISDGKFHEKENLRRHVRDVLNRKRMVAYVLLDSPEDSIINLKEACFRVGEKVELKKYMDSFPFPYYVMLQNIEALPRTLADLLRQWFELMQSANE

SEQ ID NO: 55265 - protein, 161 aa, Zea Mays
MYEKKQGKDSFWYPYIKELDRHRGRGQLAVESPLLWTESELDYLSGSPLKDEVVARDEAIRREYNELDTLWFMAGSLFQQYPFDIPTEAFPFEIFKQAFVAVQSCVVHLQKVSLARRFALVPLGPPLLTYKSNCKAMLTVDGESVRLVVDRPYKAGEPIII

SEQ ID NO: 55266 - protein, 163 aa, Zea Mays
MIDLGLPQMVQNLKAQAWTDEDLLDALNQLEVGLKENLKKLSSFDKYKQQVLLGHLDWSPMHKDPSFWRENINNFEENDFQILRVLMTIIDTSSDTTALAVACYDLSQFLQYHPSGRIVVADLKAKDRVMKLMNHENTEVRKNALICVQRLFLGAKYASFLQA

SEQ ID NO: 55267 - protein, 210 aa, Zea Mays
MADHKEEPVPESVMDKITEKFHGGDSSSSSSDSDDEKKGSSLASAAEAMKAKIYRLFGRERPVHSVLGGGKPADLILWRNRKISGGVLAGATAIWLLFEVMEYHLLTLVCHCLILSLAILFLWSNASTFINKSPPNIPEVKIPEDVAVNVALSLRYEINRGFATLREIGHGRDLKKFLIVIAGLWLLSVLGSCCNFLTLFYIVLNEVLCL

SEQ ID NO: 55268 - protein, 616 aa, Zea Mays
MSNVAQADAKNTFQPPSQVKHGWGGVPGRPSMAEIVKMGRPQAKVGSRSVASSIVMPAIGDSAIPNTPNLAPNEYNQTVFASEVGHGAADKLPNVADEVHSVSKDASSLDMLPSAEGTDVEAPSMSANMQGSSTPDANEDDVEKDTNLEEGNTESLTTPGQVSASGKDLNGDVSTTTTQFDHLTLLDGPKLSDENPAVIIPGHLQVSNADCAHLTFGSFVYGTLDASLTTKPLESHGDIVTIPDDDYDQSEGSNVENLDITSVQQSEVTRSNFLDVTSNTEYNLSSPPDYATSSAALQDSTSQSYLQENRQFQSISPLPSFMQIQNGLMSPAIPPLREFDPAFSLLLTNPPIMHGTTSSSMSSATVSTQPQENANPVGLPNPQLTQSQPSTSIAPGPPLPQHLLHPYAQTTLPLGYASMIGYPSLPPSYAYLPPAAFQQPYMNSGMFLHQAAAAVPNSSVKYPLPQYKSNIALASLPQPGSLLSSYVGGFGTANNMPGNFPLNQSTTSATATLGFDGTVPSHLEDGNQFVCLQQNENPAMWMHGAGSRGMPPLAASTMYGYQGQSHQTGLRQGQLPSQYGSALGQSQPGLGPEHRNPSDSNLSGAAQANQMWPNSY

SEQ ID NO: 55269 - protein, 150 aa, Zea Mays
MDTNSTDPFNGLYVGAFSPYGPEIVQLRRKFGHWNSTDDVEFFEYVEAVKLTGDLSVPAGQITFRAKIGKGKRLENRGAYPEEFGVIASYKGQGRIAQPGFKNPRWVDGELLVLNGKSTIPHLGGAELGFLYSVPEQSFLVLFDRLNLPE

SEQ ID NO: 55270 - protein, 314 aa, Zea Mays
MEICYSWIRFEEENGTLDDYDLAVKKVTPRLKELMTFKSQEEAKVEAYPNLNDNSNANDSSQKRKPSNNKQQPPAKKRKENPPKSTMPSDDQGSNVQSGHSGAVTDVEVGGASREKVMASIEMKVDSDSRTGKSSSNEPKPSFYNDNCTVFVSNIDLKANEDDLRRFFSDIGGATAIRLLRDRFTKKSRGLAYVDFLDNKHLEAAIKKNKQKLLGKKVSIARSDPSKGKKSREAGQTSQDNLPPSGGDDAKATGSSGPDNEVPKGDAKTIGKNTLFAPRALVKPLGWTNKDEKKPDVAGELKSNEEFRNLLLKK

SEQ ID NO: 55271 - protein, 77 aa, Zea Mays
MFHPNIYADGSICLDILQNQWSPIYDVAAILTSIQSLLCDPNPNSPANSEAARMFSENKREYNRKVREVVEQSWTAD

SEQ ID NO: 55272 - protein, 478 aa, Zea Mays
MWLSRSCLLDVDVNKLWRTADSNGWRASSAPRTYWPPPPTESESNGYLRVRCNGGLNQQRSAICNAVVAARIMNATLVLPELDTNSFWHDESGFVGIYDVPHFIKTLKYDVRIVMSIPEITTNGKTKKLKGQQLRPPRDAPVSWYATDALETMKKYGAIYLSPFSHRLAEDIDNPELQRLRCRVNYHALRFKPNIMKTSSEIVNKLRSEGHFMSIHLRFELDMLAFAGCFDIFKPQEQKILWKYREEHFAEKELIPMKIRLKGKCPLTPEEVGFILRAMGFDNRTRIYLASGELFGGKRFMKPFKTMFPRLENHSTVGPGKLEENTQGLAGSAVDYMVCLLSDIFMPTYDGPSNFANNLMGHRMYYGFRTTITPNRKALAPILIDRMEGRHIGFERIRRVMSNTHFGAPHKRVHPESFYTNSWPECFCQTDAKNHADRCPPDNINDVLESQFQSEEEMEEARASNQTDPSSQIEELTI

SEQ ID NO: 55273 - protein, 349 aa, Zea Mays
MLQINNGSVEVDASIIGAQQDGKKVKVPLNSSDKLYKEIRDLNFEVVVQVLRQKATSIQQDYAEVKSTNTQSVSELKDFVRRLHSLPEIARHVHLAQHLQSFTGKPSFHARLDIEQTILEVQNFEICFEYIEEMIHKQEVIENVLRLLVLLSLTNAGLPKKNFDYMRREILHSYGFEHMHLLYNLEKAGLLKRQESRSNWVGITRALQLIVDVNDTANPTDISYIFSGYAPLSIRLVQHAVRSGWRSIEELLKLLPGPHLDLKRGGLTINSSPEVHPGLGAQQSIDRVGHRSLVLVVFIGGVTFAEIAALRFLSAQEGMGYDFLVATTKVVNGNTILRPIIANSKEGMM

SEQ ID NO: 55274 - protein, 100 aa, Zea Mays
MPQPSSFRVPEEAEEREATEGCSDGVTRVVEHALPLALSYDKVRLAAMTGLDPKQINNWFINQRKRHWKPSEDMRFALMEGVAGGSSGTTLYFDTGTIGP

SEQ ID NO: 55275 - protein, 583 aa, Zea Mays
MAMPVKLTPASLSLKAVCCRFSSGGHALRFGSSLPCWRRTPTQRSTSSSTTRPAAEVSSGKSKQHDQEASEATIRQQLQLVDVLENMGISRHFAAEIKCILDRTYRSWLQRHEEIMLDTMTCAMAFRILRLNGYNVSSDELYHVVEASGLHNSLGGYLNDTRTLLELHKASTVSISEDESILDSIGSRSRTLLREQLESGGALRKPSLFKEVEHALDGPFYTTLDRLHHRWNIENFNIIEQHMLETPYLDILALSIRDFSSSQFTYQQELQHLESWVKECRLDQLQFARQKLAYFYLSAAGTMFSPELSDARTLWAKNGVLTTIVDDFFDVAGSKEELENLVMLVEMWDEHHKVEFYSEQVEIIFSSIYDSVNQLGEKASLVQDRSITKHLVEIWLDLLKSMMTEVEWRLSKYVPTEKEYMINASLTFGLGPIVLPALYFVGPKISESIVKDPEYDELFKLMSTCGRLLNDVQTFEREYNEGKLNSVSLLVLHGGSMSISDAKRKLQKPIDTCRRDLLSLVLREESVVPRPCKELFWKMCKVCYFFYSTTDGFSSQVERAKEVDAVINEPLKLQGSHTLVSDV

SEQ ID NO: 55276 - protein, 266 aa, Zea Mays
MVPVVALVGLGLFERGFPVVGKCVEIGLPMLILFVALSQYLKHVHIRHVPVFERFSLLMCITLVWVYAHILTASGAYKHTALVTQINCRTDRANLISSSQWISIPYPLQWGAPTFSADHAFGMMAAVMVSLIETTGAFKAAARLASATPPPAYVLSRGIGWQGIGTLLDGLFGTGTGSTVSVENVGLLGSTRVGSRRVIQISAGFMIFFSILGKFGALFASIPFTIFAAIYCVMFGIVVHQHELDAQSLHHRCLTLPGFIYTRVLL

SEQ ID NO: 55277 - protein, 437 aa, Zea Mays
MAARAADENRRPGVGRPAPCVRDMGSRRALTDIKNLVGVAPNPCAVAKKPVLQKSRRDEKKTALPSSRPMTRKFVASLASKGQPECQPTGADPEPGVDQRKEPIGDGIIDIDVELDEPVDDSDCDVDMGDETENKDIMNQDESLMDIDSADSGNPLAATEYVEELYKFYRENEAKSCVNPDYMSSQQDINAKMRAILIDWLIEVHYKFELMDETLFLTVNVIDRFLEKEVVPRKKLQLVGITALLLACKYEEVSVPVVEDLVLISDRAYTKGQILEMEKLILNTLQFNMSVPTPYVFMKRFLKAADADKQLELVSFFMLELCLVEYQMLNYRPSHLAAAAVYTAQCAINRCQQWTKVCESHSRYTGDQLLECSRMMVDFHQKAGTGKLTGVHRKYSTYKFGCAAKILPAQFMLELGGTAPPPSGNNKFRVCWKHGQL

SEQ ID NO: 55278 - protein, 457 aa, Zea Mays
MEVKIEGSKCPCFTESGDMDDGISRKSSCRENSCDNYIYCPTATDVQNGSLDHFQEHWLKGEPVIVRDTLALTSGLSWEPMVMWRALREKKEKVERLSVLALECLGWCEVDVNIHMFFAGYSSGLVGPDDLPLLLKLKDWPPHSSFEERLPRHGAEFMSALPFREYTDPKWGPLNLAVKLPDNVNKPDLGPKTYIAYGVSKELGIGDSVTKLHCDMSDAVNILTHTDEIKLKAKRIAAVEKKKRCLGMKILSTKEASGGLQRCADYFGMPTAPSESNKEPRPEECVNELGIKQPVQHVASEEQEGVQDDAKADANVMNVSFGKGKSEDSFGTINGTNSGDKIESPSGLAERTLTQPTTKGCSKQRGRSSNGRGNRTKKIEEGNASGLIAVAPESEDDDDDAAFIDGNQAEGGALWDIFRREDVSKLHDYLMKHAHEFRHCNFEPVKLLILYMISVFI

SEQ ID NO: 55279 - protein, 958 aa, Zea Mays
MITGIITKDIESTVLALELKQHKLQLQEQRVMFTDVLEELMALAEATLWKVNQHLENIAICTLHEENNEARVDLENLKQNCEEIMKKLHAMNEENTTLKCLMSSFQTNLDAKNKALMELECSHATICTELELTIDAMNRRSTRENYFISENETLKQEIRNILCKDQCMVELMDNIEADKLFSTIEGRLQLVTDHVHNYITEQINTMSKLSNDLDIIEVSAQELSTQNSLLKSELIRKEELTKGLSFDLSLLQESASVAKDQAAEITGLRKVIKSLELELASKSLELDDVVSDRQQLEAMILKCNQNVAALEEELGKKIDELNIVSMENAELKSQIQHIEEISCTMEELADKSEVIRRLEEKLIESRTLIDERSVCLQSLQNDFSKLSDEKTSCDTELLILKEKLEMAQALAEESEAIATESRQIAEEHKAYAEGKDEEVKVLERSIEELENTVCVLESKVEIVKEEAERQRMQREELEVELQKVRQQMLAVPPSGKARRYMEDGMIDLADSSRHPVDMHNELLSAQETIRILRKEVSEKESEIAQCNAHISELNIHAEAAAQEYKHKLMELETMAQQVKTDNSTAHACSGRQEKINSKPRGSGSPFKCIGIGFVQQMNSEKDEELSAAKQRIVELEGIAASRQREIFMLNAKLATTESMTHDVIRDMLGVKMNMTTWAALADNQQKLETKEPITSQAQEIKDSNELMNLKRQLDEFIEERQSWLDEINQKQSELGAARITIEKLRQREHFMVAEIELLKAENSNYKTIILNLEAEVKNLTRQQNLQLRINHHVKTKEENILLKRQNEELSAKLKQLGGILTRTKEELARYRVSNGRDPHELIEEEELLRKKLDESERDRSQLAENLSSLCSSILKVAGVSDSESDATLLKASECLDQLQCRIASLEGQVEDLNLKCKLVREKARLCELRSNSSSLRTGAKGNLTSPSPDTSPSISSFR

SEQ ID NO: 55280 - protein, 317 aa, Zea Mays
MSKDENSALKVIDFGLSDFVKPDDRLNDIVGSAYYVAPEVLHRSYGTEADMWSIGVIAYILLCGSRPFWARTESGIFRAVLKAEPSFDEIPWPTLSAEAKDFVRRLLNKDYRKRMTAAQALCHPWIRGTQEVKINLDMIIYRLMRAYISSSSLRKSALRALAKALTTDQLFYLREQFTLLGPNKSGHISLQNMKTALIKNSSGAMNDSRILDFVNSICNIQYGMIDFEEFSAAAISVYQMEGLETWEEHAQQAYELFDKEGNRPIVIEELASELGLGPSISLHVVLKDWIRHSDGNLSFLGFIKLLHGVSSRAITKV

SEQ ID NO: 55281 - protein, 159 aa, Zea Mays
MQKREKSLRPTCQSAMRGTHVSQARRTTRYLRRQAMHGVGSRLSVCVARRRARCPRTARRRPCPVPVAGSVCPLPQWAERSREPGAGRRPADGDPRDENAAPVRVPRSRSRYPPQATTLLVKWSSSVLSDLLLSFPASSFFGAREIRLGHPRPRVSSRL

SEQ ID NO: 55282 - protein, 311 aa, Zea Mays
MSNLRDWLDLSLNHAVPSSLLILSRAFTVSGRMKPEEAVVATLSSLPDEVVDTIGTVLPSEDSVSERRRKLEFLEMQEELIKEEEKKKEKEEKAKQKKEEAKMKEPETAEEDLALKEMTDATAREELRKAKEHDKEKLCNISRALAVLASASSVSKERQEFLSLVNKEIELYNSMLKKEGTEGEEAAKKAYIAAREDPDNDAEAAAEEKVSSALIEKVDAMLQELEKEIDDVDAQIGNRWQLLDRDHDGKVTPEEVAAAAAYLKDTIGKEGVQELITNLSKDTEGKILVEDIVRLASQTEEHNDDEEQSRQ

SEQ ID NO: 55283 - protein, 52 aa, Zea Mays
MMVTSSPWNFQSVWWQVIAHGHILTWRRWRRGRDRTRERRHERHMVNIFCWL

SEQ ID NO: 55284 - protein, 520 aa, Zea Mays
MRNATNFPSLGVEHRAAGDDLDGKAEVLLDPNTLSKDGTVALSTYSISEDGNYIAYGLSESGSDWVSIHVMSITNKQPMPDKLSWVKFSSISWTHDGKGFFYGRYPAPRGGEVDAGTETNINLNHQIYYHVLGSDQSEDILCWKDPEHPKYSFGASVTEDGKYIILGIYEGCDPVNKLYYCEISSLPQGIEGFRGTQDLLPFVKLIDNFDAQYQVVANDGDEFTFLTNKSAPKNKLVRVNIKNPELWTDVLSEHEKDVLESADAVNNNQLLVNYMSDVKHILQIRDLRTGNFIHQLPLEIGSVSEISCRREDKEVFIGFTSFLSPGIIFRCNLASTIPEMKMFREISVPGFDRTSFQVKQVFVPSKDGTKIPMFIMSKKDIDLNGSHPTLLYGYGGFNISITPSFSVGRVVLCKNMGFVVCVANIRGGGEYGEEWHKAGALAMKQNCFDDFAACAEFLISNGYTSSRRLCIEGGSNGGLLVAASINQRPDLFGCALAHVGVMDMLRFHKFTIGSHMLNCY

SEQ ID NO: 55285 - protein, 1000 aa, Zea Mays
MYHAMRLRCLLLHPPMWSNSSSLGISASGVSRGSFVRRFSALGAPRPPGPARRLCRFYGSKGGVGSAEARGAAASPAAAGSSGRCFEQEHARLGERDQQEWLSGERFLTGCKRRESTFLTRRERFRREFLRRVVPWEKGSLSWQNFPYYVNDNARQLLSECVASHLRHKSVTSEYGSRLESSGGRILLQSSPGTELYRERFVRALAHELQVPLLVLDSSVLAPYDYGEDYSESEEEDEHAESEDEGSESEMEDDGDEDWTSNNGKSGESDDEDALKSVEDLKKSVDDLKKLVPCTIEEFAKRIAGAEESTASESSETPESPEEEKRPFQRGDRVKYVGTSAVVEADQRKVKHKVKMNHWMRIILGKIPTQDGSRSAYTFISGRGLSNGQRGEVYEVNGDQVAVIFDPSIEKSHNAHEDVTNKEENGSATVYWVDSQDIAHDHDTESDDWHIALEALCEVLPSLQPIIVYFPDSSQWLSRAVSKSDRREFVQRVEKMFDRLTGPVVLICGQNLLAAAPKDKEQPALMFHNLSRLSSLPSPLKRLVGGLKGERYSRSSDISKLFTNSLTVPLPEEDEQLQLFNNQIEEDRKIMISRHNLVKLHKVLEEHDLSCVELLDVKLDGIVLTKQKAEKAVGWARNHYLSSTTLPSIKGDRLIIPRESLDISIERLKEQGITAKKSSQNLKVLAKDEYERNFISAVVPPNEIGVKFDDIGALEDVKRTLDELVTLPMRRPELFSRGNLLRPCKGVLLFGPPGTGKTLLAKALATEAGANFISITGSTLTSKWFGDAEKLTKALFSFATRLAPVIIFVDEVDSLLGARGGAFEHEATRRMRNEFMAAWDGLRSKENQRILILGATNRPFDLDDAVIRRLPRRIYVDLPDAQNRMKILKILLAKEKLESDFKFDELANATEGYSGSDLKNLCVAAAYRPVHELLEEEKKGRVSNENSYLRPLCLDDFIQAKAKVSSSVSYDATSMNELRKWNEQYGEGGSRTKSPFGFGN

SEQ ID NO: 55286 - protein, 108 aa, Zea Mays
MLLEWCLQRQVTDGGFQGRRNKLSDTCYAFWVGGVLKILGAYHLIDSCALRSFLLTCQSPYGGFTKFPDDRIPDIYHSYYGLAALSLLEEEGLEPLCVELGILSAAAL

SEQ ID NO: 55287 - protein, 1029 aa, Zea Mays
MDMAGRSRCRCSSHGRLLWLLLACSWVAAARGQQTARTDPAEAAALSTILGRWGLKASPGWNISGELCSGVAVDDTDVDNSPTINPSIKCDCSYDDNTVCHITKLRVYGLNVVGQIPAELENLTYLSNLNLMQNYLTGPVPSFIGKFPMQYLSLAINPLSGTLPKELGNLTDLISLGISLNNFTGELPPELGNLSKLEQIYFDSSGFSGPFPSTFSKLKNLKILWASDNDFTGKIPDFIGNLTQLEVLRFQGNSFEGPIPKSLSNLTKLTTLRIGDVVNGSSSLSFISNLTSLDVLILRNCRISDTLATVNFSNLAGLTLLDLSFNNLTGQIPQSILNLDNLGFLFLGNNSLSGSLPDIKSPSLNNLDFSYNQLSGSFPSWATQNNLQLNLVANNFILGSSNNSILPSGLNCLQQDIPCFRGSPEYSSIAVDCGSNKSFRGLDNTFYEMDPTNIGAASYYVTGQTRWGVSNVGKFNEAPNGSYTIDSSEQFQNALDSQLFQTARMSPSSLRYYGIGLENGNYTVELQFAEFAYPESPTWQSTGRRVFDIYIQGGLKEKNFDIRKTAGGKSYVAVYKKYNATVSKNFLEIHLFWAGKGTCCIPTQGYYGPMISALSVTPNFTPTVRNGVPKKKSKAGAIVGIVIGASVLGLAALAGIFMLVQKRRRAAQQQEELYNMVGRPNIFSNAELKLATDNFSSQNILGEGGYGPVYKGKLPDERVIAVKQLSQTSHQGKSQFVTEVATISAVQHRNLVKLYGCCIDSSTPLLVYEYHENGSLDRALFGDSGTILDWPTRFEIILGIARGLTYLHEESSVRIVHRDIKASNVLLDTDLTPKISDFGLAKLFDEKKTHVSTKIAGTFGYLAPEYAMRGHLTEKADVFAFGVLAMETVAGRPNTDNSLEEHRIYLFEWAWELYERDQALGILDARIEESDGEEAVIRVINVALLCTQGSPHQRPPMSRVVKMLTGDIEVPEVVTKPSYITEWQRRGGNSSYVTSGYSGDTTGEFSVQRETTAPLTPSPAMTGVIDDGR

SEQ ID NO: 55288 - protein, 191 aa, Zea Mays
MRNFFVCLMVSQGVPMFYMGDEYGHTKGGNNNTYCHDHYVNYFRWDKKEEQSSDLYRFCRLMTKFRKECESLGLEDFPTSERLKWHGHQPGKPDWSEASRFVAFTMKDETKGEIYVAFNTSHLPVVVGLPERSGFRWEPVVDTGKEAPYDFLTDGLPDRAVTVYQFSHFLNSNLYPMLSYSSIILVLRPDV

SEQ ID NO: 55289 - protein, 193 aa, Zea Mays
MATAVLRRPFLAALLLPAAGGASGTSSWFRPRRRRSSPSVRAVSSDSPKPVASTSSPTGGDSPDEEPPVLPLLQELADCLILPPKLLAQLPSDLRLDLNDAAFDLSNGPVLDECGQEVGDLLLNLAKAWELADTSTSNSIAKQLPLMEPYLTRSAKSAFGKRLVSAGRRFQSMGQYNQGELKKRLKWFHVPSQ

SEQ ID NO: 55290 - protein, 383 aa, Zea Mays
MMAPLSPRLVVPVDVKKLPREQKVPLHNRWHPDIPPVADVTEGELFRVEMVDWSGGRVRDDNSADDLKFMDFTIAHYLSGPLRIVDSEGVPASPGDLLAVEICNLGPLPGDEWGYTAILERENGGGFLTDHFPSARKAIWYFEGIYACSPQIPGVRFPGLTHPGVVGTAPSLELLNIWNEREKSLSETSLETIKLCEVLHQRPLAHLPTPENCLLGKVQEGTAEWHIIANEAARTIAGRENGGNCDIKNLSRGSRIYLPVFVEGANLSTGDMHFSQGDGEISLCGAIEMSGFLELKCEIIRGGMKEYLTPVGPTPLHVSPIFEIGPVEPRFSEWLVFEGISVDESGKQHFLDASVAYKRAVLNAIEYLSKFGYSKEQEQSGLG

SEQ ID NO: 55291 - protein, 69 aa, Zea Mays
MPYRIPLRIKFIYGKKSFGGIFKLVFRGCNIQATVATSLRASLRTLFSQKIFIFQRKISSFFLEKIGIP

SEQ ID NO: 55292 - protein, 280 aa, Zea Mays
MLSYGMKSSTSQKDLQKPNASELPSQGKAASELTLDGWDSIALEYSIDWPLQLFFTPDVLSKYRKVFQYLIRLKRTQMELEKSWAAVMHKDHADFSDYCKDRKNNSATQLRRQRSKPLWRVREHMAFLIRNLQFYIQVDVIESQWNVLQSHVQDSHDFTELVSFHQEYLSALVSQSFLDIGSVSRILDSIMKLCLQFCWSIEQYETRPNISEIDHITEEFNKKSNSLYTILRSSRLAGSQRAPFLRQFLMRLNFNSFFETTARGVMNSGRLRPITAGAQL

SEQ ID NO: 55293 - protein, 99 aa, Zea Mays
MSWLRLAMLLVLTCLGMYQYFMANLISQVFYMLNRPHLKKSYISLRKNSKLKKWKLLGSRKSCNLFDAFSRTYLWLELCQNYVQSVSMLQTFVVEPLYV

SEQ ID NO: 55294 - protein, 114 aa, Zea Mays
MAPEVVNPKKTYGPAADIWSLGCTVLEMLTRQIPYPGLEWTQALYRIGKGESPAIPSSLSKDARDFISQCVKPNPEDRPSAIKLLEHPFVNKPIRSVWSLRTSSRSNSSTRGIN

SEQ ID NO: 55295 - protein, 52 aa, Zea Mays
MTFNFWHCLKRNLIRRDSDVSYGLDVTVEIEKNRRLQIFRPKFETLVSLFSS

SEQ ID NO: 55296 - protein, 344 aa, Zea Mays
MFIQPGRYLSEKAISLATGVINELVKELKIKIVPIVLASFSGGSKGCMYKVIQLLDGICEGDAIMKDYRLVRNCICGQIYDSSPVDFVSDVGAQFVQKPADGNSSQPTILHSWMAKALASVMDTLFPSRIEAQRAEYWHTLYSAAGLGPVLLFCSEADNLAPCYIICGFARRLIELGTEVKLMKWNSSQHVGHYNSHETEYRTAVDDMLKKALLTFCHRSQLYDSNMAGDREYKIAHSVCSLHNAAANSNESLRGVPNSPSDHFFLPSSKDHDESQEPGSHMSHPPCMEPKGVLGQILFDVCVPRNVEGWDIKPTVSPNGRPTFASARQLGPFNPIRYFRRSRL

SEQ ID NO: 55297 - protein, 132 aa, Zea Mays
MVFNMNIIFMVLPLAIRLKHRPCFLAFVYTAIVAILKSYPSAGDSALYLGLLGLFVNELAEMQFTFFLFFGYIGVSLLSPVMHNLWIWRGTGNANFYFATGLAYTCLQTVLLVESVSSMIKHDRKLRLLVTS

SEQ ID NO: 55298 - protein, 649 aa, Zea Mays
MDYDFGGTSPDPYGGGSIHLVCDHCGTSDNYTTDDADDGQFTCRTCSAVHTTQATAADPHDFPATGNISVRRVATQPTPKLGARTPAPYLRTPQAAPVPATAAFDDFTELSEPRDFVSGSGTCGEPEDLAVQVRWRYVRGLQVILQRQLEVLVERHQVGAFVCAVAGIVWVRWVAASRVFDGIWARQVLEDHKAVGRQKCYDDKKPDEMKYEWDDDMSLQRKDRHKLEFAFLRSLRMMLPVYSTLAVCFLACHIAREAILPSDIYRWAMEGNIPYVAAFTEVDRFLGSSFQDCPLDARQLFRPVRVIGAWQLEAAAGSIAQRVALRLPSVNFYAIAQRCLKDLLLPIDRILPHACQIYEWAMPAELWLSSNPARVPTRVCVMAILIVALRLLYNINGQGIWEKICEEGRNPSESHYDANSSTSRKLEASNSEEFGTRELLCAISVAYDKINTSHDYSSDLRSYLKYCKEVVFAGITSSDEQTHLIEIFWDMYKAREDDNIEDHVKSQSHSMADIPITNGVRKHYRDGAFVKASSFSASSGHDAMQMLKSEMQDHGFHYMPPRKPRKSDGYLRYRRRRLSGGFIFVAHADYYLLLRAFAKLAEIDIRIMHISVLKLEKRLACIEERIERSLNTLHNFSTGTVDELRSVSD

SEQ ID NO: 55299 - protein, 804 aa, Zea Mays
MRRWWPAALLGCAVAVSVLVAAVECAVTYDKKAVLIDGQRRILFSGSIHYPRSTPDMWEGLIQKAKDGGLDVIQTYVFWNGHEPTPGNYYFEERYDLVRFIKTVQKAGLFVHLRIGPYICGEWNFGGFPVWLKYVPGISFRTDNEPFKTAMQGFTEKIVGMMKSENLFASQGGPIILSQASIIFSLDLIENEYGPEGREFGAAGQAYINWAAKMAVGLGTGVPWVMCKEEDAPDPVINACNGFYCDAFSPNKPYKPTMWTEAWSGWFTEFGGTIRQRPVEDLAFAVARFVQKGGSFINYYMYHGGTNFGRTAGGPFITTSYDYDAPIDEYGLVREPKHSHLKELHRAVKLCEQALVSVDPAITTLGTMQEARVFQSPSGCAAFLANYNSNSYAKVVFNNEQYSLPPWSISILPDCKNVVFNSATVGVQTSQMQMWGDGASSMTWERYDEEVDSLAAAPLLTTTGLLEQLNVTRDSSDYLWYITSVDISSSENFLQGGGKPLSLSVQSAGHALHVFVNGQLQGSAYGTREDRRIKYNGNASLRAGTNKIALLSVACGLPNVGVHYETWNTGVGGPVVLHGLDEGSRDLTWQTWSYQVGLKGEQMNLNSIEGSSSVEWMQGSLIAQNQQPLAWYRAYFETPSGDEPLALDMGSMGKGQIWINGQSIGRYWTAYADGDCKECSYTGTFRAPKCQSGCGQPTQRWYHVPKSWLQPTRNLLVVFEELGGDSSKIALVKRSVSSVCADVSEDHPNIKNWQIESYGEREYHRAQSALKMCTWAVHFRNQIRKLWDTYGNLWRFPARRLPLS

SEQ ID NO: 55300 - protein, 159 aa, Zea Mays
MANYIKYQADNGAQAVQIFDSWATELSPADFEEFSLPYLKQIVDSVRETHPNLPLILYASGSGGLLERLPLTGVDVVSLDWTVDMAEGRKRLGSNTAVQGNVDPGVLFGSKEFISRRIYDTVQKAGNVGHVLNLGHGIKVGTPEENVAHFFEVAKGIRY

SEQ ID NO: 55301 - protein, 1024 aa, Zea Mays
MDLLPPPTDAPDAGGPSAGGSGRGLRRGIGFRSLKLVSVAMDETLPVDPVGATYGRLANGLTYYVRSNPKPRMRAALSLAVKVGSVVEEEDERGVAHIVEHLAFSATARYTNHDIVKFLESIGAEFGACQNALTSSDETIYELLVPVDKPGLLSQAISVLAEFSSEVRVSAEDLEKERGAVLEEYRGGRNAAGRMQDSHWALLFDGSKYAERLPIGTEKVIRTVTHETVKRFYQKWYHLSNMAVFAVGDFPDTQAVVELINEHFGHKAPAPHPPPVIPEFSVPSHEEPRFSCFVESEAAGSAVVISCKMPAGGIKTVKDYKDSLAESMFHCALNQRLFKISRRKDPPYFSCSSAADALVCPVKAYIMTSSCRERGTVEALESMLLEVARVRLHGFSDREISIVRALMMSEMESAYLERDQMQSTSLRDEFLQHFLREEPVVGIEYEAQLQKTLLPHISSAEVAKFAENFSTASSCVIKIVEPRAHASLEDLKAVVLKVNSMEEDKSIFPWDEEQIPEEIVAQAPEPGTIIAKVEHPGIGATEMILSNGMRICYKYTDFLDDQVVFTGFAYGGLSELSEAEYTSCSMGSTIAGEIGTFGYRPSVLMDMLAGKRAEVGTKVGAYMRTFSGDCSPSDLETALQLVYQLFTTNVEPREEEVKIVMQMAEEAIYAQERDPYTAFANRVREINYGNSYFFKPIRISDLKKVDPIRACEYFNNCFKDPSAFTVVIVGKIDPAISLPLVLQYLGGIPRVQDATQPLSRDDLRGLPFKFPATIIREVVRSPMVEAQCFVQLAFPVVLKNTMMTEDIHYVGFLSKLLETKIMQVLRFKYGQIYSVNVAVFLGGNKPSRTGDVRGDISVNFSCDPDISSKLVDFVLEEISCLQTEGPSEEDVLSILEIEQRAHENGLQENYFWLDRILRSYQSRLFSGDIGSTFAFQEEGRIKVRDALTPQSMQSALQRVIPFPCRKQYTVVILMPKSSCWASVKSMLSWSSNGVSRDAKILAGMAGALVLAVSLWRYSRSSLKS

SEQ ID NO: 55302 - protein, 127 aa, Zea Mays
MALASRAAAAAVACVLLALAASAAGAGSNSPAPAPAVDCISQAASLIDCIDYVQKGSSARRPSAACCGEVKTAVASPVIVGCLCSLAGSNSSNLGFPIDMKRVLALPGACGASNAAFSKCNIPLFCL

SEQ ID NO: 55303 - protein, 493 aa, Zea Mays
MYFMGPNTFREPWHLPYSPPDAIIGIVYEDAFNRFIDEINLVAAYEWWEGSIHSILSVLAYPCAWSWKQWRRRKKNHRLQEYVKSEYDHSCLRSCRSRALYKGLKVGSTPDLMVAYIDFFLGGDEKRLDVASTIQKRFPMCLIFGGDGSYMSPYYLHSDTLLSNLLGQYVSTAIWNRLVAGLNAQLRTVRQGSVRSTLGPVVSWINSHGNPQLERHGVRVELGWFQSTASAYYQLGIIVAVNENFYKNLRHHEHATEFCERSRKNVAVPLQDFNQANLDQPCTSYAVSRKRLTGGVNGGIINEGTLKSLHYKRDYLFPFSLLLRNSRPLGYAETLQLLICIVLLGDFSITLLMLVQYYWISVGAFLAILLIPPLALLSPFLAGLNALFSRGLKRSSVTRIFALWNITSVVNIIVAIIYGSLYFWLSSLAVSSVHQVYNTKSFKSREDNEWWILPTILFLIKSLQAGLVNWHVANLEIQDYSLFSPDPDRFWAM

SEQ ID NO: 55304 - protein, 426 aa, Zea Mays
MVSGHIFHCRKNSWPAEEYVGRTALQLLDFDGGAPPEQAWRRRLNSHANILKEFSVTFMEAMRMMSLGLRLWSYVREEASHGRKAPIDPFTKERCKPSASQGVPLGGMGSGSISRGFRGEFKNWHIIPGLCESSPVMENQFSIFVSRDGGNKKYSSVLAPGHHEGLKKNSDSGISSWDWNLSGQHSTYHALFPRAWTVYDGEPDPDLKISCRQISPFIPHDYKDSSLPTSVFVYTLVNTGRDRAKVSLLMTWANSIGGFSHNSGGHYNEPFIAEDGVSGVLLHHKTAKDNPPVTFAVAACETQNVNVTVLPVFGLSGENHVSAKEMWNTMLQNGHFDRENFSAGPSMPSSPGQKLCAAVSASTWVEPHGRCTVVFALAWSSPKVKFQKGCTYNRRYTQFYGTSEKSAVNLVHDALTRGRGADPVLE

SEQ ID NO: 55305 - protein, 564 aa, Zea Mays
MMFCARVDHRKQISHWTGQPNFDLQNVSSGRKDGPHLLGRSKEITHMKLRRVAVRKKMEVVQQDDEALVKLENAGIERSKAVDSAVLGKYSIWRRENENEKADSRVRLMRDQMIMARIYSVLAKSRDKLDLYQELLARLKESQRSLGEATADAELPKSASDRTKAMGQVLSKARDLLYDCKEITQRLRAMLQSADEQVRSLKKQSTFLSQLAAKTIPNGIHCLSMRLTIDYYLLSPEKRKFPNSENLENPDLYHYALFSDNVLAASVVVNSTIMNAKEPEKHVFHLVTDKLNFGAMNMWFLLNPPGDATIHVENVDDFKWLNSSYCPVLKQLESAAMKEYYFKADRPKTLSAGSSNLKYRNPKYLSMLNHLRFYLPQVYPKLNKILFLDDDIVVQRDLTGLWEVDLNGNVNGAVETCGESFHRFDKYLNFSNPNIAQNFDPNACGWAYGMNMFDLEEWKKKDITGIYHKWQNMNENRLLWKLGTLPPGLLTFYKLTHPLDKSWHVLGLGYNPTIERSEIDNAAVIHYNGNMKPWLEIAMIKYRPYWTKYINYQHSYIHGCKISQ

SEQ ID NO: 55306 - protein, 1346 aa, Zea Mays
MNNFHVYEAIGRGKHSTVYKGRKKKTIEYFAVKSVDKLQSSKVLNEVRMLHSLDHANVLKFYSWYETTVHFWLVLEYCVGGDLKGLLEQDKKLPENSIHDLAYDLVKALQFLHSQGIVYCDLKPSNILLDEFGCMKLCDFGLARRLKDIEKTNPGDVPQPMRGTPCYMAPELFRDGGVHSYASDFWALGCVLYECYTGRPPFVGREFTQLVKSVISDPTPPLPDNPSRSLQNLIDCLLMKDPAERLQWSELCEHNFWRTSILMIPLPPQPAFDNMIELSATPYLAERNGDKPSRQLTPPKHRENIGLRKKDENSTKPSMTPVKNVQSGKKNSAKPKAVGFKGVNILRMSRIAKLNLQRERDKENYRRPPTETTENETEVNIENNDMELDFGENPEGDAPDDTDGSDNPGSAGNENPQSTDANEENYMENQVDMLTDEGSVKPDIMVETEQNSCSDNLDVAASPPSSMRKAHRAKVTPCPATGSEPSNIFEAFWHPTDLAVKPVMPIRKADKAVDMIPTLPFEALTAGDYTKLPKEQMNAFNSQILQSLSGTYQVSQKQNTIRYLEMLSMNSDAANKITNGPIMLLLIKMLRLSKTSVLRVQIASLMGLLIRYSTALDVELASSGIFNALSDGLRDKHDKLRRFCMATLGELLFYISTQSDQDNKEINTQESPLKGNRPATSWQVPSAVIALVSSILRKGEDDLDQLYALRTIDNICSQGTEWTSRFASQDVIGHLCYIYKATGKQESTRLIAGSCLARLSRFSPSCIHLILEKISFRDIASTLIKGNGREQQINLNILNSALVNSHTVTSMNRYILSLSDDKQLVPGLISLIEQGTDVLRGKAFLFVALLCKNSRRWLPHFFCNAKLISAVDRFGKEKEGFIHQCTEAFVQLVASLVPGILETVSSDIQQIMCGKRHGPVTALAGRAHPKSTIHLFPVILRLLGSASFKHRVVTGHVLLQLANLIKILEAPFQARDDFQMTLLRVLEAATEEPSVILDEHTIFTSRIIPSLSVLYNGNKDGDARFLCLKILSDVMIVIFSDSSLTSDEQILTDLKSISQRHFLPLYPSFAEDEDPIPIFAQKLLVMLMEHGYIKVSDILHKATVSQCFDFLLGDLSNANVSNVKLCFALASAPEMNTHILSQLQVVRRIGNLLEFVAAKDMDDFLEPTLEFCRAFIIRGTGSNRSGVALSENPALLVDSAFSMSIAVDQQTCVTDICDFGGNMGTFLELVGNSDPQISNLASDCVVLLSKAAPREATVGLLTNLPKLSTAMDLLKHESSLRLIRLLYGLAFSCRQYLAQGMILSISVSALMRVEALVSVFKGSNDSLLADAASYLSAELQRLPRCG

SEQ ID NO: 55307 - protein, 374 aa, Zea Mays
MSGAIGGAEVHGFRGAAAQLPRSRVLGRPIRVAPPAAARPGGASAGSIRAVSAVGGGMGRTHRVETTFPRLADPLGYVPKEDILYAIKAIVVTQRENGRRDDRKYSRMKYLIDRWGIDRFRAEVEKYYGKKFESFRPLPEWQFNSYLGWQEQGDGKLFYGVHVDNGRVGGQAKKTLREIIEKYNLDVSITPNQNLILCGIDQAWREPITTALAQAGLLEPKDVDPLNLTAMACPALPLCPLAQTEAERGILPILKRIRAVFNKVGIKDSESVVVRITGCPNGCARPYMAELGFVGDGPKSYQIWLGGTPNQSTLAESFMDKVKLDDIEKVLEPLFTYWNGTRQEGESFGSFTNRTGFDKLKEVVNKWAESPSAA

SEQ ID NO: 55308 - protein, 609 aa, Zea Mays
MEGEGDASGSDEVVQLEDAVELLVEHLVVPVLPRGQVDREEALSPEAQEAVARQVHATVLLYNYYHRKQFPQLEFANPERFSMSASLSVTNKNLLMYLNQAQNRLGNGVGAGLSVTDKAIVDACDIAEALDPTKDSPEMTTWPISKVAVLLLNRTKKECVLEHGSETKGVWSMFEKEITTALGGSLSSDMPVQGSSNKSVGLPSEPYVLQQIAYSEVELKTGMKHTNLRFIEEHRVYSLSKKGTATMLFLLHYDQTVDSKLKEMPLDALIERDWPLCSSLSVPKEQVFQNGKSSFPSEIEESLKEQEANSNSKTKMKKMPTDVSTPKKNKQVVKAVRDSGTNESSTSKNKKGSNTNCKRTSEACKTKVATYAEHGDGQSPTKDLQASAQMDKSRTEKNTKSRNVPQNIFLTPDVGPVNNDHALKSQKEKVTDKSGGITGNMNVQKYATLQLLWKMRDDTLHEHFMLGDRCAEYEMDIQTILTETEMTPKVMSILKKYENSWKAMKVANPISSGEGCQTMNIKRKKLKEAILLRNRCQELDDICRESNWILPRYRVLPSVTGDMYQASVHLMGPDFNLSVDGDVRVTPHEARDSAASNMLSQLQQKAREG

SEQ ID NO: 55309 - protein, 874 aa, Zea Mays
MEGINGTVFAYGVTSSGKTHTMHGEHNCPGIIPLAIKDVFSMIQDSPGREFLLRVSYLEIYNEVINDLLDPTGQNLRVREDAQGTYVEGIKEEVVLSPGHALSFIAAGEEHRHVGSNNFNLFSSRSHTIFTLMIESSARGDEYDGVMYSQLNLIDLAGSESSKTETTGLRRREGSYINKSLLTLGTVIGKLSEGRATHIPYRDSKLTRLLQSSLSGHGHVSLICTITPASSNMEETHNTLKFASRAKRVEIYASRNRIIDEKSLIKKYQKEISSLKQELDQLRRGIVGGASQEEIMSLRQQLEEGQVKMQSRLEEEEEAKAALMSRIQRLTKLILVSTKNNIPALTDGHQRHNSVSEQDKLSTSQDSSTLVQNEGTTKDHLPDSLDEINQLRSGSGEHSSATCSATDSMQAGFTASDHMDLLIEQIKMLAGEVAFGTSSLKRLIEQSIDDPEGSKDQIENLEREIQQKRRHMRALEKQIMESGEASVANASMVDMQQTITKLTAQCSEKAFELELKSADNRVLQEQLQQKNAEVNDLQEKVFHLEQQLSAKVGISPEQETDCAQQEAIDLKSKLQSKEAEFEKLKFEHLKITEEQCDLINQNHKLSEEAAYAKELASSAAVELKNLAEEVTKLSVLNVKQAKELLVAQEMAHSRVHGRKGRTTSRGRDEVGTWSLDLEDMKIELQARRQREAALEAALAEKELLEEEYKKKFDEAKKKELSLENDLAGMWVLVAKLKRGALGISDFNVDDRTVNLADITNGTKENKGEKNFALVEKQVSEDSVKSLSTEEHRSPEFEPLLVRLKAKIQEMKEKDTDPLSDKDGNSHVCKVCFESATAAVLLPCRHFCLCKPCSLACSECPLCRTRIADRIITFT

SEQ ID NO: 55310 - protein, 379 aa, Zea Mays
MTVGGTKDRATTTRDKMEKGYTDRRSCRSVMNVDEHVDGDEDRLAIAKVVDNDIDRHKKNLESESSPSKNANTTEEKVPASGGNSDAQDLELILRQKALENFRKFRAAATMGGKTDSGAAGKEASIDDSVHNAGMEVADATHSQSQETSLGARYSAGSPRSQNFGNGANRSWKQDNGAGMSCGGSPGLLEPAETGGPTQLKGRAEESTRLASQFLSPRDARNGRSVMQRLAPPPGSSASVNQMLGSSAGLNHVDGAPRVRSVVSIPARERLDGSTHTTPLSPSEDSSPVESGGKVGLPLNDTNKAEGTNGENRKTSEASASDGSVLSPTEDKSQASIEGKDSFQKKTFSRMHDGETVEVSYKVYIPKRTPALARRKLQR

SEQ ID NO: 55311 - protein, 419 aa, Zea Mays
MVPTSPVEIMYHCPEEEIAFGPSCWLWDYLRRSQASGFLLPLSGGADSSSVAAIVGCMCQLVIKDIEKGDEQVKADALRIGQYKDGAIPMDSRELAKRLFYTVYMGTENSSEDTRSRAKRLAEEIGSFHLNVPIDSIVSAFLSLFETLTGKRPRYKVDGGSNTENLGLQNIQARIRMVLAFMMASLMPWVHNKSGFYLVLGSSNVDEGLRGYLTKYDCSSADVNPIGSVSKQDLRAFLRWAAIHLKYSSLAEVEAAPPTAELEPIRANYNQLDEIDMGMTYEELSIYGRLRKIFRCGPVSMFQNLCHSWCGRLSPSEVADKVKHFFKYYAINRHKMTVLTPSYHAESYSPEDNRFDLRQFLYNSRWPYQFRKINELVQEMDKDGKWGTSAEGKLGAQTGAQGTGMGVVAAGSANPSAGF

SEQ ID NO: 55312 - protein, 145 aa, Zea Mays
MKSYQQRKKTKINLKTKLKKRVEESPSWVKALLGCFEVPSMDIISRRLFFFAFIAGWSIATSAENGPAFQLAISLFSCIYFLNEKMKNLLRASTTGFGILVGGWIIGSLLVPLVPTFIIPPSWSLELLTSLVAYIFLFLGSTFLK

SEQ ID NO: 55313 - protein, 85 aa, Zea Mays
MISMMKGGEFYSWFKLELASEVRSGVCMCCPFLFHFMRKDCYLFLELYLVVLVNKYFSMVVRLLIMFIRHQFMILVLRDILSYEF

SEQ ID NO: 55314 - protein, 73 aa, Zea Mays
MCVLFVLIFPPVEGGLFIVSSCCHTASLTLLFINRVKCCELKVNLSVKGSLYQYNILRFWWRIFCLSIQGACL

SEQ ID NO: 55315 - protein, 330 aa, Zea Mays
MRFISKDPEGYVPISVVAGFKKIKALVQSNSMLASALRTSSKLVVSDDGARVKREQPFTESDLEELQARIVVAENLPDDHCYQNLMRLFSVVGSVRTIRTCYPQTPNGTGPATNRSAKLDMLFANKLHAFVEYDTIEDAARAIVELNDERNWRSGLRVRLLSTCMGGKGKKGGHESDGYGDEENVSTSDQPYDKYLEETPQMSDVPGEHMTEDSAGDMGRGRVRGRGRGGRGRGRGYHQQNNNQHHQHYQNSSHHSNSSSTRPVGTPPPSGHPVMIEQQQQQQAAQPQPLTAANKQPPGPRMPDGSRGFSMGRGKPQTLTPKVSESEPEQ

SEQ ID NO: 55316 - protein, 535 aa, Zea Mays
MASAVERRREEHARRSRSPARGRERRGTPPRRRSSPERRKGSPARARSPAAKSSASHRDRERSPPREKVKERVRSPESPAKVSLLHKGRERSSPREKAKDQRVRSPKRKQEQSRSPSPARRHFSRSPSPRSKRTRGAQGEREAVQFTGSDRRKASHREEQDTLRHREHDEGRDASRDRKVDREAVHVTNGDRRKPSHGEERDSWGKHREHDEGRVASIDRKSDREDTRGTAKDKKYVRDDEKDHSRERGAGRDDKYGASKVALPVWDDDRHGRPNRGDWKSASSREQRLDSGDRRDSTRVKPTDHDGSNGGSGRSFRHGRSMSPEEHRHRGRHESHPSSRVSRSAAHIEDINSRGGEASRNGDPDALATMNATAEALEAKEKVQKPSFELSGKLAEETNRVAGVNLLYSEPPEARKSEIRWRLYVFKDGEPLNEPLYVHRMTCYLFGRERKVADVPTDHPSCSKQHAVLQYRLVEKEQLDGMMTKKIRPYLMDLDSTNGTFINGNRIEPRRYYELFEKDTIKFGNSSGGIKYGGE

SEQ ID NO: 55317 - protein, 470 aa, Zea Mays
MKVHSGHGVTISNSLFPCFVEQFQDLGSPETLNDEDQNTRGRTCLKLSSVTAGGMMSLAIDSLGSLWMWGSCPQQTDAGEFCISSSSIPLPVWDFHGHTVVKVACGNEHVVAAVSAGETYTGGDLVCYAWGNNNHGQLGLGDKESRSRPVLISAFSEGSSWEVYEIACGASHTAVLANKKSTDQIESRCWTFGLGDKGQLGHGTTATICSPQPVDGLPTGSFLISLDCGLFHTTVVSSDGEVWCWGMERGLGLCPDASFSGVDEGDALYPIRVQSPETNGFKFLGPVQIACGAAHTVLVAGDGYRMWAWGRGRSGVLGRGQTADSYIPCVVMWPPLDENFHEDQMGGSTSRVNDHTSTELEQKLSAASEELQFLRSKLTLMERYANILHISIFRKPLDERALPRSLQESSVFDIRKEFENILDAADTDELNRLEIFYRSMLSGVKDKLLKRRVREMVQQCIISLSREAKP

SEQ ID NO: 55318 - protein, 241 aa, Zea Mays
MAEPEVGVAADTAMETEAPEAAGQKRERDEVGDPAAEGGEAAVEEAAAAKKPKLEEETKEVEEASEEKAEETAEGKTEEANEKTVEAERKPVKLGPKEFSSSVEMFDYFFGLLHYWTPQIEFNKYEQMVLEDLLKKGHAEPAKKIGAGVEAFEIRNHPVWQSRCFFIRRIDGSSDDFSFRKCVDNILPLPEDMKVGNGKKSGGHHKGGGGGGGGRGGGRGRGGWRGGRGRGRRGGCSCTLL

SEQ ID NO: 55319 - protein, 369 aa, Zea Mays
MYTGASLWNWSNQKICFCKSEVSAIVYKAGECMQELLKSWKEFDVTQDATIAESLQHGPTLEIRIPAEFVTSTNRQVKGAQLWGTDIYTNDSDLVAVLMHTGYCSPTSSPPPSAIQELRATVRVLPPQESYTSTLRNNVRSRAWGAGIGCSFRIERCCIFKKGGGTIGLEPRLSHVSAVEPTLAPVAVERTMTTRAAASNALRQQRFVREVTIQYNLCNEPWLKYSINIVADKGLKKSLYTSARLKKGEVIYLETHINRYELCFSGDKPCIIGSSSNASESETEKHQSGSHHSQNGDRGCVEHELRDVFRWSRCKKAMPESAMRSIGIPLPADQLEDNLEWEDVQWSQTGVWVSGKEYPLARVHFLSAN

SEQ ID NO: 55320 - protein, 459 aa, Zea Mays
MDKIKYEIREGEQEWVNEGRSRLGLKDKDTKNGPWVAHIRLMKSNHTWHSAPVNNQELLSEMGVFDVRRNSAVRHTEEQLVKSLGVKKCISNSKEGKTSPIQELQGKVSIGTKRGSSTKVLACKKLAKRRRSKELCNLNSSLDVTRTDQQRGRKEAAEPMKDHPLALECSKSDAQGQLDRTLEDAQNITELSNQENLLPTVSPGFISTSNGKGTNIHDTQFEEEPTATLPIDGSSQCIIDISPLRSCSALERSLPSPPQASFVKRSPVWRVVDAKHVFKELPQQPHFLPLQKYPPTLREGIALGMMVSFSELVKFTMEASIDDSMEWFEDKVRTVSLLEANGFSVQSIQSVLTELIEIKSERARIHGEIGKLSSKLAENTASSSRVGALLDEKDGAAAQLEQELGRIRQESQKMAQEKEKIDAEGVSIKTACSGYEDLCSDAERKFKEVLAQLRRKGAR

SEQ ID NO: 55321 - protein, 635 aa, Zea Mays
MMGKTNRFSKGHQLGFVPDYRHGVEAMGESKGLGSPPRIDSGSSCAPPKRKCVSVNSEEGEGASGFSMPRAREVFSLPRMTRLDKKDLEMKLRHELAQVRDVQSRLFLRGSAVSMNGAAVASVPAGDVQPKKKVEKLKRSDSVQTDRGAPPPAATVVAAPVASSVNYTSSFKQCANLLKSIMSHVWAGPFLVPVDIVKLNIPDYFQIVKQPMDLGTIQKKLKAGMYSTPREFAADVRLTFSNAMNYNPVNNDVHLMAKTLSKNFETRWKLIEKKLPKPDDKPQPVEKPPVREPTEKNSTKGVAVEKEDITKKKPSKKSVPKQDIFQEGYSADNPVLQPKKRKTSPLIQDASLVEDVVPTGKRMMTSEQKYDISARLQSFGAFIPDHVVEFIRSRVDDCDADEEEMELDIDVLGDDTLFELQQLLDDYDRVNPSRNLTKEDPHEAESRSQYELINPSVCNDGNELIDEDVDIGENDPPILALPPVVLEDETADRNSKHSTSSSSSSDSESSSSDSDSSSSSGSDADAKAPQQNSGSKEKVLPVDGVDQEKDSLSTLNLPEQSTNPISVSADGEGGNVSEKQVSPDKQIRAALLRSRFADTILKAREKALDQTTKKDPEKLRREREELERVQREEEE

SEQ ID NO: 55322 - protein, 389 aa, Zea Mays
MVTATTTPPQCWRGLPALARAPPPLSSPLRPRAVAAAAPIYPLRRRIAITTTRGRRGTLDCSPRCTLETAGPGFYPLGLYEEGSNSLSRSPLSTFFGIMAPVFGSSSGGGASREKASGRGAAAAIEDSSIDIGDFFKGPLPGKFLKLLGFLALSRLGVYIPLGGVNREAFAGNLDQNSLLGTLDSFSGGGIGRLGICSLGIVPFINAQIVFQLLAQLYPKLQDLQRKEGEAGRKKVLQYTRYASVGFAIVQAIGQVLYLRPYVNDFSTEWVLTSVTLLTLGSVFTTFIGERISDLKLGNGTSLLIFTSIISYLPASFGRTVAQAFQDGNYVGLLTIILSFLLLVLGIVYVQEAERKIPLNYASRYSSRTGELQRSAYLPFKMLPLKLTP

SEQ ID NO: 55323 - protein, 552 aa, Zea Mays
MEKRKGSLTRMVHLCPLQGAKRERHPLLRKQKIKVLQRVACLKNLLRKLLGLGLFLMKHKALRTTELRLPGLAGVCEPKEDGVCLGHLYRMLLRISIATSDFSDTIPYAVYKQFCTLIKIPISRNPNNGYKKLQAVLKPVMLRRTKATMLDGEPIISLPPKTVSLKTVDFTSEERGFYNTLEVESREQFKEYAAAGTVKQNYVNILLMLLRLRQACDHPHLVRGYDSCSSWMSSLEMVKKLPMERQHKLLICLQSCSAFCALCNDAPEDPVVTLCGHVFCNQCILEQLTGDDSVCPVSNCRVRLNTSSLFSRGTLECSLSKLASDFKSDDTCMEMIHAEKRPGMDSSYASSKLRAALDILLSLPKIDPTIDSKCSIGIESEKFDGKGISEQTDTKLTEKAIVFSQWTRMLDLLEVHLKASHVTYRRLDGTMSVAARDKAVNDFNMVPEVTVMIMSLKAASLGLNMVAACHVLMLDLWWNPTTEDQAVDRAHRIGQKRPVTVSRLTIKDTVEDRILALQEKKREMVASAFGEDKSGSRQTRLTVEDLNYLFMV

SEQ ID NO: 55324 - protein, 675 aa, Zea Mays
MGVVYYQYKSEKEICSMPVLHAFISVSELKQLILTSGKHGHGRTHGRAREDIIIFNAHSGEEYADERASIPQNTTVLVRRISIAGQLSEKIVLSPTRKVTEEFSVPCKSVVTDSSSKSCSSTVVQDEDAAIAAVIDAAELKSEQLPSKKGQGSGRFTSGRNYGSLEGEAPPPGYVCRSCGVPGHFIQHCSQENKIPPPGYICYRCRIPGHFIHRCPSIGDPKCDNNKMLCSLVPVVTPVNGILDSLVPASPVSAVDDLPAELHCRLCKKVMRDAVLTSKCCFDSFCDRCIRDYIITESKCICGVKTLADDLIPNQTLRSTISNMLGTQTISGGSGTTRHRSSSGSNPDPKIQSHTASTREVKQSRDHQLPAASALDDVLQVATEGALVNQPREKLVPSAKILGKDGGNFAQVSAEKTVANAEALKVKDGTESTSKATTVSGAREHNVTRTDQPKKWKKAVLTKNFQPNNVGYGYNVPFDPAYCNPFINGYPWATEPYMYSSMGVPYPGYPMDPYCVNSFTCIPSQALAMQGYATSYQRPETEPMHRGGTAAAPSKRPERSDRPKDTRHQPQSREHERQLGSSHVSESRTRNRTRSSSEGRDRGHSDRASVDHHEDHSTRKRTRDSSPKYGDRQSDRRSSHGSRSMMTPEEDASDDECNFKRRWGRRSSGGVDTRH

SEQ ID NO: 55325 - protein, 191 aa, Zea Mays
MDESSCFLSSFQNSQQGSKFVKTGLDSSGNIGSSSIAPPKKVHPGSNGMLPQEEADMPSHLSISTKMLPPPLKSMLPLPPRSMPPPPPKSMPPPPPKFPSDEFLSRNENKFFPLKEPTAPPRSFDAISVLPSERRPREPKEEKTKGTPVSDTLLKLIDYGDDDDDGDIDVTDNTPKGNPTPGSEQKPFWAV

SEQ ID NO: 55326 - protein, 482 aa, Zea Mays
MDRAVTRHGVPLFQVLLVFTAVIEIQWSTVSSIYCKDMPPNVYRPHSVTITEFGAVGDGVTLNTKAFQNAIFYLNSFADKGGAQLFVPAGRWLTGSFHLISHLTLSLDKDAIIIGSPDSSHWPVIDPLPSYGRGRDLPGKRHQSLIFGLNLTDVIITGANGSIDGQGAIWWGWFHNHTLNYTRPHLVELMYSTNVVISNLTFKNSPFWNIHPVYCSQVLVRHVTILAPLNSPNTDGVTPDSSTNVCINHCYVRNGGDVIVIKSGWDEYGISFAQPSSNISISDITGETRGGSGIAFGSEMSGGISEVRAVGLRIVNSLHGIRIKTAPGRGGYVENVYIADVSMDNVSMAIRITGNYGEHPDDKYDSTALPVISNITIKDVVGVNIGVAGILEGIQGDNFSNICLSNVSLSVQSAHPWNCSLIEGYSNSVIPESCEQLRSNCRQTSICYDGSSSSVMSVQQPRHTSPTSRLLDLFTGVGFILV

SEQ ID NO: 55327 - protein, 122 aa, Zea Mays
MAAAPSPRPRMAHRKGGAAPISLFLDTDLGTHLALLVAPDTGIRGLKSQVAAEHAAAFPDIGPVITKSFQVFHLQPMMKVRLPMMMGPYHYLRRVSKVVCTLAPSSVVPVAIRRQERSWRSC

SEQ ID NO: 55328 - protein, 370 aa, Zea Mays
MNRVSLHQVSYLVLDEADRMLDMGFEPQIRKIVKQIPPKRQTLMYTATWPREVRKIASDLLANPVQVNIGNTDQLVANKSITQHVEVIPHMEKSRRLDQILRSQDPGSKSIIFCSTKRMCDQLARNLSRQYRASAIHGDKSQAERDSVLNDFRSGRCPVLVATDVAARGLDIKDIRVVVNYDFPTGVEDYVHRIGRTGRAGATGSAYTFFGDQDSKYASDLVKILEGANQSVPPQLKEMALRGGYGGRSRRWASSDDSYGGQGYGAKRSTDSFNNNNFGNQAGGGSSFHSSSSGGQFGDTTSFHGSVRNNQTGDNASFPPSSSNNQAGDGLSFHERFYGSRGRDQSRTSNDGFRARSRSPPGKPVEVSNW

SEQ ID NO: 55329 - protein, 127 aa, Zea Mays
MSYLEAWSHIEKHHSSALSAAIKALKASTLRLPVVDGAKADAQAVKEAVNSAVDVMHTMTSSICNLLSKVEGTSSVVSELAKVATQEQMLLDQSKDLLSTVAAIHVKNCSLQTHMLQRNQKQSPTQL

SEQ ID NO: 55330 - protein, 119 aa, Zea Mays
MHSFGHRANAVATFAVTILAAMCFAASFSDNFNTLTPTASVKILNINWFQKEANGNDEVSMTLNISADLSSLFTWNTKQVSLWDGIIPAKEHAKFLIHTTNKYRFIDQVEPYWCNGHPL

SEQ ID NO: 55331 - protein, 344 aa, Zea Mays
MAESLGTELLEMLLKMAPSREEEIRLKEYREDAVSKLGPAESFLKAVLAIPFAFKRVEAMLYIANFDLEVDYLKASYKTLEAACEELQGSRLFHKILDAVLKTGNRMNTGTNRGNAHAFKLDALLKLVDVKGADGRTTLLHFVLEEIVKSEGGNVVAIATGQTSDQASALADDGLQRKKLVGLKTVASLGGELSSVKKAAAMDPDALASCAAKLSSGVRKVGEVLRLNRQVLGPEDGFRASVGAFLSKAEAEIAGAQAQERRALALVRETTGFFHGDSAKEEGHPLRIFVVVRDFLAALDRACNDVAKMNDGRAAAAGGSGSWRRARNAPVFDAVRPSGSSASS

SEQ ID NO: 55332 - protein, 666 aa, Zea Mays
MNEDQSLSSTLFLLLKQLSGLESGSSSEQINHPNSLVNLLKNLAAIASTHAYQDVLKNATSISSNDGNNAANGSIMHEQTIRSIPVRRESLAEEPAVKRRVQDFDLNDSCIEEAESRTDKIVFKLFGKEPKDFPVDLREQILNWLSHYPTDMESYIRPGCVILTIYLHLPNWMWDEFNDDPASWIENLISLSNDGFWRTGWLYARVQDCLTLSCNGSLMFASPWQPVIGDKHQRLCVTPIAVDCSSSVKFSVKGFNIVQPTTKLLCVFDEKYLIQEETQMLLEDSTMQQGPQCLTFSCSFPCTSGRGFIEIEDYDQSSLSVPFVVTDKDVCSEIRMLEHGLDLVSFDQTSKRIDDLMIYRSRALHFLHEIGWLLQRSHVRATSEQRQYCPDRFPVARFRWLLSFAVDQEWCAVLRKLLNTMFQGDIDVLSPIEFALGENLLHTAVKKRSKPLVEFLLRYTTTNIAPVGGGDGAPVQFLFTPAMTELSNITPLHIAATISDAIGVLDALTDDPQQLGIKAWKNARDATGFTPEEYAAKRGNISYIQMVQDKIDRRVTRAHVSVTIPSTIDTVGKHGSRMKPADQITFGVEKKQLSINQTLSCRQCVQQAQQLAFHPRTNRFLSNRTAMLSLVSIAAVCVCVGLIMKSLPQVGCMKPFLWDNIRWGPN

SEQ ID NO: 55333 - protein, 63 aa, Zea Mays
MEDVSLLRRPNCRAKGVAPGFKVMILGAATCTIDEDGPLVSVLHLYDVVNAPGVIAKWLTSAT

SEQ ID NO: 55334 - protein, 173 aa, Zea Mays
MVYIGICSLVGSLSVMSVKALGIALKVTFSGMNQLVYSQTWVFSFVVILCIVTQMNYLNKALDTFNTAVVSPIYYTMFTSLTILASVIMFKDWDRQNPTQIVTEMCGFVTILSGTFLLHKTKDMVDGLPPNLPIRLPKHADEDGYADDIIPLRSAADGIPLRSPRATDSFRSS

SEQ ID NO: 55335 - protein, 243 aa, Zea Mays
MSEQKWGRPSNSRLDCCFLWVDADLQVLDSYVNKRVDCMMDGGLLDEVCSIYDADAVYTQGLRQAIGVREFDEFFRAYLPRKESGEGSCASLLGMHDDQLKSLLDEAVSQLKANTRRLVRRQRRRLHRLSKDFGWNLHRVDATEAFFCATDDSWQKKVVKPCVDVVRRFLSDNSTVLPSTSASDPSSRELWTQYVCEACGNRVLRGAHEWEQHRQGRGHRKRVQRLKQKSLRPWPSLLPQDRS

SEQ ID NO: 55336 - protein, 236 aa, Zea Mays
MPGVNGADYTMRIFNSDGSEPEMCGNGVRCFARFIAEIENLQGTNRFTIHTGAGKIVPEIQSDGQVKVDMGEPILSGLDIPTKLLATKNKAVVQAELAVEGLTWHVTCVSMGNPHCVTFGANELKVLQVDDLKLSEIGPKFEHHEMFPARTNTEFVQVLSRSHLKMRVWERGAGATLACGTGACAVVVAAVLEGRAERKCVVDLPGGPLEIEWREDDNHVYMTGPAEVVFYGSVVH

SEQ ID NO: 55337 - protein, 1447 aa, Zea Mays
MAAAPSPRPRMAHRKGGAAPISLFLDTDLGTHLALLVAPDTGIRGLKSQVAAEHAAAFPDIGPVITKSFQVRRKGVLYRLSDSMTVMSSFTKIEGGCFLHVNMAEATEATYCCQDAPAIDDKRLSDVSLGIHVKNHIKELPVMASDVACDLLPRDLEGGNDDTTLNNVQAHDALPNCTLVPSSSQLNTEILKNKAVGMDSDAEAGIDQVIDKAKSYSGQIKHANQAEGTYISSTSMACVDKSSNESNMSHAVAELHASRDHGVGDDVSDKKQVRVEQQLLEEIQSKDTLSQVKEHKKSRTGFFDASCTSLLKTGTTLVESLNTSNHQEVHETFNVESIQLENPSTVGKKKKRKRRQLSPSKSASAQETIEPSATAVDLLKPTGEGLPNNSLGIQIHNILAMDNLSQEKEHKKSRTSSPDTSSRHLLETDPASLREPLNTSNHQVHDTLHQESIQLENPSAAGKKKKRKRQLSPSKSVSTQITTEPSPGAAPADLSRSTGDEAYNVELNGKDETIVEESGCRLSSSELNDANQGGKSVQFVSDALASIDLICKQEKFGHSLKGCKDPSIANAIYSTSENVAIEGKTTKESCVPLDRGDKHEEKKQHNEGCHNEAVPEISHMEKGGRSTDVSNKRHTNQITSQVKKGKKSKVGSVGMPTVDATGEKDHMYSENAAKQDTVSTKKEIAHEPSVQQMSNIVYQGDSNVVENPSGDGKKKKKRRRHSESLKGMNPSQDLTSSSGFVTNKNSIQCTDAAPIDAKQTTQGIIEGETVNEHMKLSRSLDVAATNIVDGVLADLRPKDSLSKDLDEDLLPGQTHLGSNQNGLEVPESIAVKVGSVTAALPPKCPAAVHFASPVSSPRQKKSKGKKSKVLSTMTDSSHQSSGVSEEDANRELTESDSLRFADKTSDPEDIVTGNVVAQADDKRKTTKRQRKKGSVKQVCDTLALKETNDAEENLVQGGYVVDTPLSTVGEVEQKGTPTLHEVQKYAMVLKSANTNSQKQRKTSSNSELQSQDCALEHGFTADLVNGRTEREVSTTSSASAVKPDYHTVFHRANDGINFLDHFSCSNMNDDPSIAAESKQNNEDEPLREMKNKKKKWKQGTSSIEPNDILESFPSEKASLTGHFGTSKAIVSSVAKESMNIENENVNDGKEKKRKGKANMEVPTAEKDNSNCDNQGIDISTQESLISFVQNERTGQDNGKESNSKVTQNASIMQHGREDPTWNHTPEKNLHQSVDDDQNKLLTEKDHAHISKEVGKFTSQPKPHAKIRKPDEFTIKGKVAPNPKPVSNLMKDFSTSPGASSDSTEGMPQSANRYKVSVQKVPSKMYQETSGNSKKASRKIVSGAISNDSIREGCGDELDTTTVMEGSSDSSSTSADSGISSTAYDESEASDDDGAISLSQKSLKGGLHISSILRGSRSYKKARKKLEELLDDDDTIVPDSQPTDGLRG

SEQ ID NO: 55338 - protein, 347 aa, Zea Mays
MPSTDHGVPSTYPPLGYLHHSSAQLERTKRTHLGPLLLCFCFPTESPQPQALALCPLPSSPPMPPPPPLLEPRDYLGAGATSSCCSSCCSSGREGAGPHLALRLGLPGSDDSPGRGADTEHARAHVDAALTLGPGPGPAPPRGSAKRGFADSLDRSAKLDGVAADDAAGGVTRVAGAAAGAPPAANAMDRAQVVGWPPVRSYRKNTLAASATKTNGGDEGRSEAGCCYVKVSMDGAPYLRKVDLKTYSSYEDLSLGLEKMFSCFITGQNSSCKTSRRDRLTDGSRVDALQDQEYVLTYEDKDADWMLVGDLPWDLFTTFCRKLRIMRGSDAAGMAPPRPPEQTVRNK

SEQ ID NO: 55339 - protein, 453 aa, Zea Mays
MDDLPGDEGRSQTHPSDRNWPSHLEQKFQSLPLTKQERNFDSAYSSLDSREVGHSLQAAQTLWSSGSLSGPIPNGFYSIIPEKRLKEHFDTIPSPDDLYSLGIEGFKAEIILVDIERDKKLSALKQLCTALVKGLNSNPAAMIKKIAGLVFDFYNRPNPHLSPARTSSEDLSNLLENRGVQLLGQIRHGSCRPKAILFKVLADSVGIDSKLLVGIPNEEPHGYDNSSKHMSVVVILKSAEFLVDLMRFPGQLVPFSSKAVVTSHMSATGESDSADYDSCDSPLEPNSPLCAQRQEQDDGNRSFKVLSLRNIMLKSTNSMEGKMSCSSHSEPNVANAFCGRSRDKVVDEHQRTASSSPEHPLSRVRGRSMLGDKQYGGAVAVSRSDGASTSNTHRARRSTNITPEISDDIVRAVRAMSESMRQNRLSREQKDGSLGSSNDSMKHIMIYYHPTNQ

SEQ ID NO: 55340 - protein, 97 aa, Zea Mays
MPIPLHDSKGSVCQYDHMTVSPDGKILAVTSGSTLQWLLVETGAVLDTADKAHEGDITGIAWAPRTIPNGGVHVFILATAGVDKKVKLWTAPDVGST

SEQ ID NO: 55341 - protein, 167 aa, Zea Mays
MAPRGDEMPGLFYNLESTLTTWYQNNHVKVGSVQPLRLPSSQSAVKQSTTYTIARAFQEIALPFRRLHINSASAIFGLAVSPLPTSLAAALLSVPIASSFIVGLATWAATLPFRLLLFFSSSLFFVLELGKPTLRPLRGRIQEIYYLVQSMKSNLLDLETIVQVEAA

SEQ ID NO: 55342 - protein, 120 aa, Zea Mays
MFYWLLRVGSHPYNSWNSVVAAVDELVVDCEVAGLEALAVGVDGLERRVVVQVQAACGQCLLVTNTATGASITVRIVDQCSNGGLDLDYDTAFKPIDTNGQGFQAGHLTVNYQFVNCGDN

SEQ ID NO: 55343 - protein, 87 aa, Zea Mays
MVYWESVSNLVEPGGIVVITSCNHTKDELLHEVEDFTKRKFGKENVDEGARDASEIFRYIDHVRTYPTIMFGGIEGSQVCTVAFQRV

SEQ ID NO: 55344 - protein, 245 aa, Zea Mays
MNPSHGNGLAEIENIINQRYFSRDETLRLIEIMRSRTSDFTVEDQRPPVSTAKGFETKFFTPAKLIEAQPSWRTDIVPSSNVHDIGSSPVEIAKAFMEAQTSASVHESKKRKFRALSHGVAVDNSTSEVFPTITTDSSVRWPDSVVQGGPNYLTPQSNKGRTLSQPLSRTPYNSSVIRRYIKNSRHGDMHNNGQTQFPTPFSIGSKVLASCLSIATDFHYELLKILLIIYPQRNHVGTRWNWKTI

SEQ ID NO: 55345 - protein, 616 aa, Zea Mays
MVTKSRFSPFANSRARRRRDETDEKLVYSTSSVSAPHLQNKSSRWYSLIDDAMREKKLQVNKLKDARILNRELHQTLYGFIIFEVDWADVRGINYLNELQTDTSMVVESKIMKRWEFDSVKQASTLIASWFSGNPFECQLLQDYLTNISSNGDIFYDAQNDFLTPEWDSENLPSDSDDSSHVQIIRESSGFTDSSYTTPPCSGPYKRRKITKSDDGSSSTEESYTEIVASPKHSSSSCSSCDSDNENAKPLLEPSTYKDVLICFRFDDHDLPFGLKEVILSDVRLLTLLEYGLPSWVIFLQSYPVFCKIYRPWMCPLARALYVLMSLITVLIGFYDLYKNVPMLKATASRLFGPLFDWIETWEMISRLKYLGTMLFLHNFQQAFTWSLKIVGAAKSALSVLTKPIAGPILEVFELTMPIWNLCAETVGYLSSVVMLSVEVSWSVVIDTVEMIVWPFWFVFSTMVSIVNSILYPIIWLLGEILAAPFRLVIGLSSFVVDLFVDIINFLRGSWSTLSALYQVGSVPRSPVLTSDNNIWASLWKDLLYQIFRALRSILYGFVAFFSTCNRHRLSIYNHIQVFLRRISHVPAGARFTAYLDGTRKYSSQNHHKRRKAKTR

SEQ ID NO: 55346 - protein, 59 aa, Zea Mays
MTLPRPWTSHTPSSYRTDQSCTRPGCSSRVADEKFNSLNVCLIYIYRSIILLGLLKLFS

SEQ ID NO: 55347 - protein, 653 aa, Zea Mays
MQPGGAASSTATGGRRRVSVQSTRSAGATPASSVWEARMKMDEVRGGVKVFSAGAADEPADEEGVRVYRRLRRNQSEGGGAGAADTAAKKRRSWKASKPVTAIGDLRKSRSDAAAAVTTATTTATAVVARRAVARVSMPEKKVAPAPAAAAGEVKEVVVVEVHKAAAADAKNVARGPDEELDDDDDDHDDGAEGELLDEEQETDEEEEKEMLDLQDHMAIDDDEQTAPHQVDDDDEQDLEPPTKAGIKPTLSVEEERATNPEPVKPPPPGKKLASVVDLRAVNPEPMTPAPPPVEKKATPIVVHRMTNFELAQSFPEKKALPAVGPRIPKTEPASSPPGGEEYEEIQGRPSQPSRSQARMQNIVNLVMWTDVSKSALVFGLGTFLLVSSSYAKDLNFNTITAASYAGLIYLGLRFLRKSILSRGESVECDDDGGVGGDRCCYLVGEEDAVWLLRLVLPYVNEVLLNLRSLFSGEPATTMKLALILFAMARCGNFVTLWTLAKLVFFGVFIIPKVCSSYSTQLARYGRFWLERLRDAWESCTHKKAVVAAAFTLVWNVSSTASRVWAVFMLAVAVKCYHQRVGEFGWSSSSAGAQEQPADDDDEPPPPPPKHRAQDESSSPRQEFGAPPRHRRAPVSGEFARERLRARGGIQPR

SEQ ID NO: 55348 - protein, 238 aa, Zea Mays
MISMLKCPILVWQNRRRKVGRTIFLLVLWELSGNLNVLLHLAMGPWPSNLFSEFTFTLYFWPFCRYVAPEYAMTGHLLVKSDVYSYGVVLLELLTGRRPVDMSQPSGQENLVTWARPILRDQDRLGELADPRLGGQYPKDDFVRVCTIAAACVSPEANQRPTMGEVVQSLKMVQRSVEFQESVPTPPARPNVRQSSTTYESDGTSSMFSSGPFSGLSPFETETIPRTAVFSEDLHEGR

SEQ ID NO: 55349 - protein, 229 aa, Zea Mays
MGTEADAAAVDSLRSQIPFQTDGELILPPRDVGLVLVDLCNGFCTVGAGNLAPVAPNKQISKMVEEAARLSKLFCDRNLPIFAFLDTHYPDKPEPPYPPHCIIGTGEENFVPDLEWLEKEPNVTIKRKSCIDGYISCIEEDGSSVFVDWVGKYQIKTVLVLGICTDICVLDFASSTLAARNIDRVPPLRDVVIYSEGCATYDLPVEIAMNIKGALAHPQVQSTCLLSIN

SEQ ID NO: 55350 - protein, 222 aa, Zea Mays
MGACSAGANFTPHIITVAPGEDVMTKVISFSQQGPRAICVLSANGVISTVTLCQPDSSGGTLTYEGRFELLSLSGSFMPTENGGTRSRSGGMSVSLASPDGRVVGGGVAGLLVAASPVQIVVGSFLPSYQMEQKNKKPRVDAAPAAAVPQTPPAVPISSTDTRSSEQGQQSSASQRGVNMTVPGGTYGADQSWVLSPAPQQPMAEVSRTPSSGDLKMTTSGS

SEQ ID NO: 55351 - protein, 58 aa, Zea Mays
MLIVYPLTKRKHVLWHVRRRKEKRIYHFALLNTKSVHRSRSRPQGVDWQTVGPFSVQI

SEQ ID NO: 55352 - protein, 336 aa, Zea Mays
MSMFMNELYGFQLDNHRWYPLELRKDKPAKIKARNIKRKESTNDVEANIIDDEGDEVMVDVEEAIEGQPEVNGVSNQLIKTLNITKDGSSRSIDVLSDSTAQESFLEAVKPSGRINACLAVGKDMLYLYGGMMEVKDREITLDDLYSLNLSKLDEWKCIISASESEWLEISEEEDDDDDDETDDDENEEGDASQTDEDEEESDEDAAKNVSSAVSLLKGESKTMRRKEKRARIEQIRVILGLSDSQRTPVPGESLRDFYKRTNMYWQMAAYEHTQHTGKELRKDGFDLAETRFKELKPILDELAVLEAEQKAEEEASASTSSKRDTKKPKQKSARR

SEQ ID NO: 55353 - protein, 177 aa, Zea Mays
MYKNEEIQNLILALGLGVKGEDFKKEALRYHKIVILTDADVDGAHIRTLLLTFFFRYQRALFDEGCIYVGVPPLYKVERGKLAHYCYDDADLKEIVNTFPANASYHIQRFKGLGEMMPAQLWETTMDPERRLLKQLRVEDAAEANVVFSSLMGTRVEYRKELIQKAASMINIDQLDI

SEQ ID NO: 55354 - protein, 592 aa, Zea Mays
MAASALASRALRPPHGRHPPAPSPRPRPRSATAAAPRTRCRAVAADERPADPAFPERQNRGISGAVERPEADVVVIGSGLGGLCCAGLLARYGQDVLVLESHDRPGGAAHSFDIKGFNFDSGPSLFSGFQSRGPQANPLAQVLDALGESVPCASYDSWMVYVPEGQFLSRIGPTEFLKDLEMFVGVDAVQEWKKLLDAVIPMSAAAMALPPLSIRGDLGIISTAVGRYTPSLLKSFIQMGPQGALGATKLLRPFKEIVDSLELKNPFVRNWIDLLCFLLAGVKSDGALSAEMVYMFAEWYKPGCLLEYPLGGTGAIIDALVSGIEKFGGRLALRSHVEKILIENGRAVGVKLQSGQVIRAKKAVVSNASMWDTLDLLPPDAVPKSYEDRVKATPQCESFMHLHLGFDAENAREDLGIHHIVVDDWNKGVDGEQNVVLISVPSVLSKDLAPPGKHILHAYTPGTEPFSLWEGLDRKSAEYRRLKEERSEVMWKAVELALGPKFSREKCDVKLVGTPLTHRRFLRRNRGTYGPAIKAGEATFPGQATPIPQLFCCGDSTFPGIGVPAVAASGAIVANTLVPVSQHSELLDAVGI

SEQ ID NO: 55355 - protein, 771 aa, Zea Mays
MFQKVDGSKMVHGRILQKGSQTILGNAANEREVFLTNDCLEFKLDDIKELVMVDIQSRPWGHKYRKENSEADKVEQVKAEERKKKGQPMVYFCKSLYWPEKGAFFALSRDKMGLGSGLCSSCDNIEPDSDELKIFSKTSFVYRKVTYNVNEFLYIRPDFFAEDEDRATFKAGRNVGLKPYAVCQILSIPEGAGSKKLNPASANISARRFYRPDDISSAKAYASDIREVYYSEDVIDVPVDMIEGKCEVRKKNDLASSDLPVMFEHVFFCELIYDRASGALKQLPPNVRFMSMVQRTSALKKNKGKQICEPDQIDSGKWLDVPKENRLATLDIFAGCGGLSEGLQQAGVSFTKWAIEYEEPAGEAFNKNHPEAVVFVDNCNVILKAIMDKCGDTDDCVSTSEAAEQAAKLPEVNINNLPVPGEVEFINGGPPCQGFSGMNRFNQSPWSKVQCEMILAFLSFAEYFRPRFFLLENVRNFVSFNKGQTFRLAVASLLEMGYQVRFGILEAGAFGVAQSRKRAFIWAAAPGEMLPDWPEPMHVFASPELKITLPDGQYYAAARSTAGGAPFRAITVRDTIGDLPKVGNGASKLTLEYGGEPVSWFQKKIRGNMMVLNDHISKEMNELNLIRCQHIPKRPGCDWHDLPDEKVKLSNGQMADLIPWCLPNTAKRHNQWKGLYGRLDWEGNFPTSVTDPQPMGKVGMCFHPDQDRIITVRECARSQGFPDSYEFAGNIQNKHRQIGNAVPPPLAYALGRKLKEAVDKRQEASAGVPAP

SEQ ID NO: 55356 - protein, 191 aa, Zea Mays
MPRRKAVQRRGSAGGADRLPQEQPYGLPARRAGVRGPGQARDGPAVEQARRPLRRVQKDSLRVQGEEPVDPGGRSGRQEPGQAGGEAAVPGRADRRTGGGGGPRGVVVGVAVHDKGVRAGVEHGPGPRRPAAVPRGRHGRLRRQVGVGRAGGAAGRLAPRPGLRHRRPHRRRRPGRIPRLHRRRHGRLEVK

SEQ ID NO: 55357 - protein, 73 aa, Zea Mays
MDIVIKDGVWVGHLLSGYSLPMDMSSQVNVKSSEEVAGMWKHSIKVSYEATKAAFPGGEVIAHLDHKRWRTRQ

SEQ ID NO: 55358 - protein, 262 aa, Zea Mays
MFFSGDPSARRRVDLGGRSSKERDRKVLLEQTREERRRRQGLRLQNTSATKIQKFFRGKKALELARSEVRKNFCSTFGEHCERIEWNNFGTNSDFLRQLLFFFNANEDNDIAILCQICNLLLQYVKQGGDVVTLFTGVNGSSLQPLVAHRVKKITLICVQAVYQKRHDWGSQLLTTPGSTSVPSVSLLETVGCLINPKFPWNCKVVGYLQQRKIYCLFRGIVISVPQKVRNSGHFDGTSVLEQVLMLVASHVGHHPCCCLKV

SEQ ID NO: 55359 - protein, 140 aa, Zea Mays
MFPDDLAGTDGASAMPADNPEKHQNVETDSDRSAAVVADAPPQQEMVAANGTGQPQLVVDGHKTILEEVPGEENGTLSAANYAGNGSIDDDDDDDTTLYQGGDVLPNRPTSIFENDLAWAGKAMQQLLRVLGFQIGTTRT

SEQ ID NO: 55360 - protein, 503 aa, Zea Mays
MSAVVHAIDSQQGGRQTLGRHWRNWRDTLEGVLQSTAGKQGSGGIQSCIRAALRFSGCPPTEHGNLAHDGGAGRDDPVGAVHSEENSGALVQLEDGTAAPLEANKTMCHNALFDILISEKFAMLCDLLAATFHVSKPDDVIGLQIIDAKMRNGDYAQNHALLDHDIKQIWKKFEHVGQEMAGLASSLSVISQASHQKQASGVSEIDVAEHKIEETSLVGVARKALRELTPQCDSGYSTIPKRAGRSGSDGICKDCGRKADSKGRIICDRCEAAYHVSCLKLAIDEEAPAKWYCPSCVEPDVALKHKNHGRSHEGCDVCEWLVVKPEEPAEDVSEPELAVKTQESSVSSMGEDSEPDLSTTALANLCKNCGTCEDEDRKFMVCGHGLCSFKFYHVLCLKERQIASEKQKNLKCWYCPSCLCRRCFKDKDDEKIVLCDGCDEAYHIYCMDPPCESVPRGKWFCTRCSARRSVQGMQRYEKSILEKVKRAPGANGPKVQASAGPEK

SEQ ID NO: 55361 - protein, 1170 aa, Zea Mays
MARFEVNGKSVQGVDLLRRRHWPSRLDFWPFLALYALWLLLAVPALDFTDALIILAALSAAHILTFLFTAWFVDFRAFVGYSKVKDIHAANTCKVTPAKFSGSKEIVPLHKQKNVASTSAAGETEEIYFDFRKQRFIYSAEKDNFLKLRYPTKELIGHYGKGTGYGTEAKISTAVDKWGRNVFEYPQPTFQKLMKEQIMEPFFVFQVFCVALWCLDAYWYYSLFTLFMLFLFESTMAKNRLKTLTELRRVKVDSQIVLTYRCGKWVKVPGTELLPGDIVSIGRSTSGEDRSVPADMLLLAGSAIVNEAILTGESTPQWKVSIAGRGPDDMLSIRRDKNHILFGGTKVLQHTADKSVNLRSPDGGCLAFVLRTGFETSQGKLMRTILFSTERVTANNKESGLFILFLLFFAIIASGYVLVKGLEDPTRSRYKLLLSCSLIITSVIPPELPMELSIAVNTSLIALARHGIFCTEPFRIPFAGKVDICCFDKTGTLTSDDMEFQGIVTSEGDDLISDANKLPLRTQEVLSSCHALVFVDNKLVGDPLEKAAIKGIDWIYTSDEKAMSKKPGGQPVQIVHRYHFASHLKRMSVIVRIQQKFYAFIKGAPETIQEKLVDLPAAYVETYKKYTRQGSRVLALAYKLLPEMPVSEVRSLERDQVESDLTFAGFAVFNCPIRSDSGAVLQELGQSSHDLVMITGDQALTACHVASQVHISSKPVLILTRIKTGGFEWVSPDETDRAPYSAVEVAVLSESHDLCINGDCFEMLQSTEAVLQVIPYVKVFSRVAPEQKELVLTTFKSVGRVTLMCGDGTNDVGALKQAHVGVALLNAEPVQKVDSKSKAENKSGKLKNKKPANEASSQVTPVANSSGKASSSLSLTAAERQREKLQKMLDEMNDESDGRSAPIVKLGDASMASPFTAKHASVTPTLDIIRQGRSTLVTTLQMFKILGLNCLATAYVLSVMYLDGVKLGDVQATISGVFTAAFFLFISNARPLQTLSAERPQPNIFCAYVLLSILGQFAMHIFFLITAVNEASKHMPEECIEPDSDFHPNLVNTVSYMVNMMIQVATFAVNYMGHPFNQSISENKPFKYALYGAVAFFTVITSDMFRGLNDYMKLEPLPEGMRGKLMLWAILMFCGCYGWERLLRWVFPGKIPAWEKRQKQAVASLEKKHH

SEQ ID NO: 55362 - protein, 91 aa, Zea Mays
MWSTENDEKYSCSETGYRLPLKCVQAQNATKEGNMSKQRKILDDASTSGGTKSASGGPKHYITYRSCVPLVGEENLSVLGFEERSVLMAVA

SEQ ID NO: 55363 - protein, 567 aa, Zea Mays
MSGFRFMTISVAPRPTISGRPPPAASMAVGQFFSPEEGASSFSIGTIIRSSFAPKEIFLLEDHPLALNLSFSASLGLLPVTLSLKTAGCGIKNPGDQMEAERNNLCKLRCFPPVALAWDSVSGLHIIPNIYSETVVVDSSPAFWDSPEGTDKTTVLILADPHCSYEVTSRASLSDAASRFFLLYSSEILGFMVAIMFFGIMRQTSAWECDSSMPSILSAIESNLGLPKAFMFLCFMPILVFCAFFIFTAEQKPPFGTFLLVTLICYIVANGFTILLILSSKLLLYVVAILHVFTKRRWQSWGNGVQSAFLGQFLSFSSFQSVKIVQMLRNNPNIIVAVATLPLVCLVHPAIGLGLLLLSHAFHAHSNLCSFLAASFRSITQKKDLYKSKMGDGSVLLSKSKSDGLQQLLPMDDSPTASKSFTDSQLELFDYRHGVMILHLLSTLMFVPSLVAWLQRIGMGQNFPWFIDSAICVGVILHGLFGSQPNVSCCIFFKLPGRRGREIGLSFLYLVGGYYSFVSSMALAPYRALYAMATIGYICFISRILERRNMVRGDINSRRTRKHSHRH

SEQ ID NO: 55364 - protein, 601 aa, Zea Mays
MVFHPDGKTLFCGLDQSLKVFSWEPVRCHDVVDMGWSNLADLSIYEGKLLGCSYHECRVGLWAADISLIGPYALGVLPKANFFAELVQSMEDNPVKPVDSTANSRPASAMAHSRSSYKIKESGIAQSRVRGSHLTPASTDKTKKDRSSTIPRRPDSSLKSSVQSTTLMRRMKLVDSPSTNTKNVERNVGQRDISLASRAVMANNSATAKKSNLTESALVKDIYTTSQAVSAPIVVPRDILEDKTVSNVRRGTGETAAVPDDFRIPVHRRKPSLSGSAADSDSSSRSVFTEPDVCSEGLSSLKFSFGLTPYHKKEEFGDVDNEGIAQIAEKMERTVSLDHSQQLNDDKSFESPCSTTETAKVKYVRGVAVPLGKTKSLVERWEKRETSSTDYSPQTGSCGDRASRNDNHPFHLAEPSTTFEKDLSTVDEAMAPVNLVRNHDEFLNAVKLRLTKLEMMRHVFEQSGIKGAIAAVAKLPDNAVQADVVSALKGKLDLFNLEFFSNFLPVLAGLLCSKTERHAMVSLEMLLDLIKIFGPVIHSALSANLGVGVDIQAEQRLQRCSRCFNHLQKIQQSLNPLILRGGQTAQLAQELSLSLQDLVVI

SEQ ID NO: 55365 - protein, 659 aa, Zea Mays
MTYLSHSFPQHRQYLCAGAWMLMNGHLEINSANLARVLREFSPEEVTANIYTVVDVLLHHIQCEVQRGHLAQDLLSKAITNLSFFIWTHELLPLDILLLALIDRDDDPYALRLVISLLEKPELQQRVKNFCNTRSPEHWLKNQHPKRAELQKALGSHLSWKDRYPPFFDDIAARLLPVIPLIIYRLIENDATDIADRVLAFYSSLLAFHPLRFTFVRDILAYFYGHLPIKLIGRILNLLGVSTKTPFSESFAKYLVSSNSSICPPPEYFANLLLNLVNNVIPPLSSKSKSNPADTTRSTFNKHHASSQPGGVGNTDGQRAFYQNQDPGSYTQLVLETAAIEILSLPVPAAQIVSSLVQIIAHVQAILIQSNSGQGMSGGLGQSSGLPTSPSGAAESSGPNQANSAATGINATNFVSRSGYSCQQLSVLMIQACGLLLAQLPPEFHMQLYSEAARVIKDCWWLADGSRPVKELDSAVGYALLDPTWASQDNTSTAIGNIVALLHSFFSNLPQEWLESTHTVIKHLRPVNSVAMLRIAFRILGPLLPRLAFARPLFMKTLALLFNVLGDVFGKNPQVSNPNPVEASEIADIIDFLHHAVMYEGQGGPVQSTSKPKLEILTLCGKVIEILRPDVQHLLSHLKIDPTSSIYAATHPKLVQNPS

SEQ ID NO: 55366 - protein, 698 aa, Zea Mays
MNPYFLGFILPFVASLLLTKRKSEKKRGVPVNVGGEPGCAIRNHRFERPVKTRWEGISTLAELFEQSCKQFASTPLFGTRKLIAREMVVAADGRSFEKLHLGNYEWRSYADAFKTVCNFASGLLRIGHLKDERVAIFADTRAEWQIALQACFRQNIAVVTIYASLGEGALCHSLNETEVTTVVCGRKEFKKLIDISGQLDTVKHVIYIDEEGISVEVSLAENCTSWTVKSFEEVESIGLQRPVEANLPLPSDTAVIMYTSGSTGMPKGVMMSHQNVLAVVSAVMTIVPGLGKKDVYLAYLPLAHILELAAEAIITGVGASIGYGSPLTLTDTSNKIKKGTQGDASVLKPTLMTAVPAILDRVRDGVRKNVDAKGGLAKRLFDIAYSRRLAAVNGSWLGAWGLEKLLWDMLVFRKVRAILGGRIRFILAGGAPLSGETQRFINICLGAPISQGYGLTETCAGGTFSEYDETSVGRVGPPLPCSYIKLIDWAEGGYLTTDSPMPRGEIVIGGPNVTKGYFKNEAKTNEVYKVDERGMRWFYSGDIGRLHPDGCLEIIDRKKDIVKLQHGEYVSLGKVEATLSVCSYVDQIMIHADPFHSYCVALVVTAQSELKSWASKQGMTYSDFSDLCHKQGTVKEVLQSLVKAGKQARLEKFEIPAKIKLIPEPWTPESGLVTAALKLKREVIKKAYEMDLAQLYSQ

SEQ ID NO: 55367 - protein, 107 aa, Zea Mays
MDGSKGSVGGGDGTGPEKPSADSNPSLDPPQPTAAAVEATDDGAAAAAAEAARRPFTALSQEEADLALARVLQEQGEQWRWSMRRIMRMIHRRHGKRSIQMNTLMRS

SEQ ID NO: 55368 - protein, 630 aa, Zea Mays
MRSSSRSSVRRRSRRGSLTPQRPSALASTTATMTSAASVEEVPWVAAVVVVVAASGAQDLASRPLPVVSSAPQYSYGGHQGTSKKIEIPNGRVGVIIGKAGETIRYIQLQSGAKIQVTRDHEAEPGALTRQVELSGNPEQISKAEQLIKEVIAEADAGSSGAVSGGRKYNAPQPGAETFQMKIANNKVGLIIGKGGETIKSMQAKSGARIQVIPLHLPAGDTSTERTVHIDGTQEQIEHAKQLVAEVTSENRARNPMSGGYSQQGYHPPRPQSNWGPPSAPPQQSGYGYMQPGAYPGAPPQYGAPQQPYGSYPPTSGGYQTGWDQSQNQQSHTTPPGTGYDYYSQQQQPQQQQSAPGTAASTDATSYNYGQPSTYASQGYDSTYTQHSGGQQAYGHDGYSGYQTQGQQQGYSQQTGYDQQGYGASAYGSAANSTQDGSSYGGPGGATQASPGQQTSTPAAGSHPGYASQPPTSAAASYPVQGSAPSGYGAPPPQPGYGTQPPQQGGYGPGAYGQPSPHGEKPPASSPYGQAPPPGSAQGGYVQYGYSQPAYGAPPAYPGAPTASHPGYGQQQSYGDAYGSGSYGQPTAYTTEAAAPAASQDHSAAPAAAPGTTAAPAPDNNGGAKTSAET

SEQ ID NO: 55369 - protein, 60 aa, Zea Mays
MAIGRRSGAAIIGERTVRWPLPRGDEGCEARGGGGGGGGGGGGQGQVFFCACVVYARAWL

SEQ ID NO: 55370 - protein, 334 aa, Zea Mays
MVSLSVLMETIARTKTSRAEADADSDMSPEAHEFKQIVDEIVPHLGTANLWDYLPVLRWLDVFGVRNKITAAVGRRDAFLRRLIDAERRRLDDGGGDSDSDKKSMIAVLLSLQKSEPEVYTDTMIMALCGNLFGAGTETTSTTTEWAMSLLLNHPEALKKAQAEIDAVVGTSRLLAAEDVPRLGYLHRVISETLRMYPAAPLLLPHESSADCKVGGYDVARGTLLIVNAYAIHRDPLVWEDPDEFRPERFEDGKAEGRLLMPFGMGRRKCPGETLALRTISLVLGTLIQCFDWDRVDGLEIDMAAGGGLTLPRAVPLEATCKPRAAVRHLLLEL

SEQ ID NO: 55371 - protein, 181 aa, Zea Mays
MLEIRLVKILKKYDKRTGGVLSLPFTQRVRHQPFFTTEPLTRLVRECEANLELLFPVEAEVLEPSSSSNLEPHDVARCDPTSSRDVETVDVYRSTLAAMKAIQGLRRASSTYNPLSLSRFFHGEDGEPCSGAITSESSLSDSSTDSQIQDAGKDDKEVQSNSRDQNAAQGEQNAQGEPTDE

SEQ ID NO: 55372 - protein, 805 aa, Zea Mays
MMEDSSVCSKVLSGETTKQLLKLLGPGNETSIRAEAAGALKFLSAQSKEARRQIANSNGIPALINATIAPSKEFMQGESAQSLQENAMCALANISGGLSYVISSLGESLESCSSPAQIADTLGALASALMIYDTNAESISASDPVDIEKTLLKQFKPKVPFLVQERIIEALASLYSNPVLCKTLADSDAKRLLVGLITMAATEVQDDLTKSLFALCKKDCDLWQALQGREGVQLLISLLGLSSEQQQECAVALLALLSKENDESKWAITAAGGIPPLVQILETGSPKAKEDSATILGNLCNHSEDIRACVESADAVPALLWLLKNGSDNGKEIASKTLNHLIHKSDTGTISQLSALLTSEQPESKVYVLDALKSLLSVAPLDDILHEGSAANDAVETMIKILSSPKEETQATSATALAGLFHCRKDLRETHIAVKTLWSLMKLLHMQSNKILMGASCCLAAIFLSIKQNKEVAAIARDALTPLVSLANSSVIEVAEQATRALANLFLDQELSLQVSFEENLFRVTRVLREGTIDGRTHAAAAIARLLQCRTVNQPLSDTINRSGSVLALAELLEVANGEAAATSEVLDALVLLSRSKASSGHTKAPWAILAENPHTILPLVSCIADAAASLQDKAIEVVSRLCSDQHDVIGGLVSETPGCISSIAWRIIGSNTLKVKVGGCALLVCAAKEHCQKQIEVLNDASLYIQLIHSLIDMIHMANTPAENVSSESISDIRISRHSKENYSDGETVCRTAVISGNMIPLWLLAVFSRHDSKTRAELLEAGAVEMLTEKISQNAFQYVQACY

SEQ ID NO: 55373 - protein, 357 aa, Zea Mays
MNNLGSLVELDMSQNNLGGGGQIQYNLPNMKLEKLNLAGNQFGGNLPYSISTMPNLKYLNLNHNQLQGNISDVFSNLYSLSELDLSFNSLTGDLPQSFTGLSSLKKVYLQNNQFTGNINVLANLPLETLNVANNHFTGWIPSQLKKINSLQTDGNSWSTGPAPPPPPYTAPPPPPNHWNADGSSSSSSSGGRSGIGGGGVAGIIISLLVVGSVVAFLVIKRRKRKAAMKEHFEQHQPFTSFPSNEVKDMKPVYEATTVDIESLASPASVNLKPPPKIERNKSFDDDDDFSNKLVAKKSNITPINATVYSVADLQMATDSFSFDNLVGEGTFGRVYRAQFNDGKLQHCSLAWHRQLLL

SEQ ID NO: 55374 - protein, 125 aa, Zea Mays
MSRGRSPEPLDFFIWTVQDVGLWLEEINLGSYRQAFEENGVNGEYLESLSVFTTEQILRFIRRCHMKWGDFITLCKELRRIKVACLKGEQEVRRPWWAPSCLSVVFTRVARHNRQSRVVSLKLEA

SEQ ID NO: 55375 - protein, 655 aa, Zea Mays
MQGQRNSVEHFADVFGFDIASSSGNPVMDQQSYWNNVLGSVESQNLQGYQMNHSDAAMPYGNETQQDGTFLGFWESGEASASGSSNNAKTEHLSIGGGLRIGERRLVADNGISLDVDINLNANVNDLCGQSSNVNCTSQGPEHYGGGDRSVVNSQPTDLRLHPYRTFLLDAEQADSFTLNPSENPLCDFSLMQESIDQRPGSSLDGRRLACKRKNVEGPNGQSSAGASTSFSHRNDNAFHNIASSSYNPAPIRNPSSPNCLPVPSSIDDQLPRYGTNAGLSAGTYDLNGGVNNAGNSQRSFRARITTSQQIAPCSVWPSSNAIRLPNSWNHQPPHFQSAFDDTQEVIPVVSSLNLQYQHPVNVSSVPPAANRFTGHGASSSRAGSLENRILGSQEAPTRNVVPANYSDLVPPSVVDPRRLLPEPSNWSSDVRGTAISGSIPPVSRANNSATVNPPAGFSHQNLTRRHPRNLSEEIGRLSGALRGHQPPRLRPGFLLERQGDGVWGVPLSTRGREGRRLMEIRNALEMIHRGENVRLESIFYGGVDIHDRHRDMRLDIDNMSYEELLALEERIGNVGTGLSEEAVIRLLKQRKFSSWTLKASLDPEPCCICQEEYADGDDLGKLDCGHDFHAGCIKQWLVVKNVCPICKSTALKKT

SEQ ID NO: 55376 - protein, 219 aa, Zea Mays
MLQSLRLVASAVKRRRGAVVVAADAAAAAGSAEFGDEENPYELLGIRPLDSFDHMKMAYKKKRKDAEETGDDEFLAKLDRAYDTVMMQQLQYRKKGVTYGSVQVSKDIKYADNQPVVPWGPRFSRSTMKDMRINMAVSAAFVVWIAIMGNADWKPLQFLCFAFFYRILQKLRATEPPITPIYNEYGEVEGRGIRMAKRVVRALGLIFGCVFAASLQLLT

SEQ ID NO: 55377 - protein, 419 aa, Zea Mays
MSALLDLLMGIFRQQTLGGAALELAALAAPLSLAALVGLLIGWAWRPRWAGVVTVDNAQQMAQLPAAAPPPDRATATAVVSRNEAAAVVPRTVVAHAAAEDEQQQLAVNTGDLLHLWRLVDEKDGGPSWIHMMDRTLPTMRYQAWRRDPPSGPPQYRSSTIFEDASPEVVRDFFWDDEFRMKNSWDDMLLQHETLEECTETGTMVVRWVRKFPFFCSDREYIIGRRIWASGKTFYCVTKGVPRPSVPRQNKPRRVDLYYSSWCIRPVESRKGDGAMSACEVLLFHHEDMGIPWEIAKLGVRQGMWGCVKRIEPGLRAYQVGRTAGEAVSKCAAMAQVTTRFSADELVIAGPGNTEASSSSSGDGAEVGKVTKHWANSIPKVLMVGGAVALACCTFDGGLLTKAVIFGTARRFAGGPGRR

SEQ ID NO: 55378 - protein, 387 aa, Zea Mays
MIPSVRISPGYAAFSGSSLRLKLHSIPSISSLKPSKYVVSSLKPLYLAPLDGPHTSELKSWRQPLEFRCAASAADDKESKTQVVPVQLEGAQRLKISIYFATWWALNVIFNIYNKKVLNAFPYPWLTSTLSLACGSAMMLFSWATRLVEAPKTDLDFWKVLFPVAVAHTIGHVAATVSMSKVAVSFTHIIKSAEPAFTVLVSKFLLGETFPVPVYLSLLPIIGGCALAAVTELNFNMVGFMGAMISNLAFVFRNIFSKRGMKGKFVSGMNYYACLSIMSLVILTPFAIAMEGPQMWAAGWQKAVAEVGPNVVWWIAAQSVFYHLYNQVSYMSLDQISPLTFSIGNTMKRISVIVSSIIIFHTPVRPVNALGAAIAILGTFLYSQAKA

SEQ ID NO: 55379 - protein, 221 aa, Zea Mays
MALYALALFYAACRDLLRPYNPVPKFIMIKSVVFLTYWQGVLVFLAAKSRFIKNADKAADLQNFVLCVEMLIAAIGHLFAFPYKEYAGPNARPSGGFRESLLHALKFNDFYHDTVHQFAPTYNEYVLYNHNEGDNAETKFPSGSTATSGQGVELAGITVVASNSPVTSSVSCNQADQEETMTTPIKDKVDPGGLYDLTELLDVDLSSYPDKVPAITDVRKQ

SEQ ID NO: 55380 - protein, 801 aa, Zea Mays
MISPGWAAAFASPPVAMALAMMAAGASGTETRTPPRNTLNRRDKALPERKAAAKLQTFSSFQMPMETASNKPGSTLKDKAAAKAAALAAARDLERTAKIGSRRGLSAVAMATSGQRRSSGDIERAKRWNTSEAMSAAWVECLQSDDSKSVVGRDFSALSYKYVAVLVSCLALARNLQRAEMERQTLVDVLIRHRASTGLRAWRHLLHCLTEMGRLYGPFEHLCTPDRVFWKLDFTESSSRMRRFVKRNYKGCDHLGAAADYEDRKLLNTSAQSNEHNSEDANSSLTSTLPSSASVIMADAMSMNDRNVENEQLETDTTRSSVDDDQLQHSSAADQQSVKGSIGSRTSDICADRNLVRSTVLAPSYVPSEADERIIVELPSLMVRPLKVVRGTFQVTSKRINFIIDERSNDSNIDDAASTSGQCDQQDKDRSWLVSSLYQIYSRRYLLRRSALELFMVDRSNFFFDFADIDARKNAYRAIVHTKPPNLNDIFLATQRAEQILKRTQLMERWANWEINNFEYLMELNTLAGRSYNDITQYPVFPWVVADYKSRVLNLDDPLSYRDLSKPIGALNPERLKKFQERYSTFEDPIIPKFHYGSHYSSAGTVLYYLFRVEPFTTLSIQLQDGKFDHADRMFSDLSGTWDSVLEDMSDVKELVPEMFYLPEVFTNINGIDFGTTQLGGKLDSVELPPWAENHVDFVHKHRKALESEHVSAHLHEWIDLIFGYKQRGKEAIMANNVFFYITYEGTVDIDKITNPVDRRATQDQIAYFGQTPSQLLTVPHMKRKPLAEVLQLQVATLMVH

SEQ ID NO: 55381 - protein, 85 aa, Zea Mays
MMVDYLLFMVRDVKLDPNPEEVADVKYMNRHQLKELLRKADAGEDGVKLSPWFRLVVDNFLMGWWDHVEQGTLQGAADMKTIHKL

SEQ ID NO: 55382 - protein, 224 aa, Zea Mays
MKKLRHPNILLFMGAVMSPQRLCIVSEFLPRGSLFRLLQRSATKLDVRRRVHMALDIVRGMNYLHHSSPPIIHRDLKSSNLLVDKNWIVKVADFGLSRLKRETFLTTKTGKGTPQWMAPEVLRNEPSDEKSDVYSYGVILWELVTQKIPWENLNSMQVIGAVGFMNQRLDIPSEVDPQWKSIILSCWESDPQQRPSFQELLERLRELQRHYAIQHRNTKNSIEE

SEQ ID NO: 55383 - protein, 214 aa, Zea Mays
MSCWRCSRKVLVDMIRVPDWAFEAVGLEMRVGQDTAYHPGLYLTDAQREAVEALIQELPKFRLKAVPTDCSECPICLEEFHVGNEVRGLPCAHNFHVECIDQWLRLNVKCPRCRCSVFPNLDLSALNNLRSTSEPDHPSASASNVTTATAATRYVRSQPAGQSYLVRLQGLLLRPVRHDSVESDGEPAVGNSRLVGTEELPSILVDDGHQLPDR

SEQ ID NO: 55384 - protein, 492 aa, Zea Mays
MAAMNGKVLGKCGRNMNSLKRKRENPAAYDADIFHNSELHQHPVNDSAVRFHVDKDRKAKIVCHFNKQVLQSYKNFMSSAPPKRILLRIGAVWKDFPEKIVKLAQADFRAKKTITETGYQNQLFLLDFAHMTFIDTKTGLQRPIAWIDENGNRYFPESFVQDQKIFMKKDFGNGYHDYISVESNGTREMNDQLGTSESSAESSNFGSSTEDVSSPKRARAENNSIIKKYCDMGEAIGENEPCTLLPTACNLLPRQANLGEVSRAQRTIEAVEKLLLQGMGSVIESKDIIGIYRTPLLDDHGQVRYHNHEKHVQVTRCHRGNANVRYAWLPCSKSTVHEMMLNSSLQVHKPPIKCAAYGEGTFLTPANRSDACVKFSAVDENGIVHMMLCRVIMGNVEIVHPGSKQHQPSSDYFDSGVDDLKNPQHYIVWDMNLNRHIYPEFVVTVKLPSKTKDYFVSQEDCQNSSDLSLVLNSSSPDCISEVRCINKIVLQH

SEQ ID NO: 55385 - protein, 395 aa, Zea Mays
MSAKNAHGIVSRFSAGIAVQKLCSTAIQRADEWLSSPDLHLRDSLPVACRFKFVDITSSSLIVILKETSSSDTIKGYKLWYWKSREQPSMEKPVIVSKDERKILLYDLTPCTEYSFRVISFTDDGVLGHSESRCRTESREIFVMRAPKNAVGGGATHAQKKDRNQSCKSTGFKIRDIWKNFQEALDAEGCFEGFSEDVHEGSCSRSVTETELSGACRKLHFNSSSVPDLNAEVPVPVDYTENHYYSKKGLVRSNDSGDSETCAVGQTAEPPAVESRQVSKVNSVPVNKCEQNGASAICHEKMLSGSTRQLDGDYEHCVKVVRQLECDGHIENGFRMKFLTWYSLRSTDQERKAVSTFVRTLSNEPSSLAEQLVDSFGEILNSKKAKTGFCSKLWH

SEQ ID NO: 55386 - protein, 89 aa, Zea Mays
MDVLTDFLRSFLLDEVPSALDDHHLLKHGHVPLEPALVDVPLHSRVMVRQVTVPNDELGWNLHLCSCPSSDSNLLHQQIQFLSTHLQGN

SEQ ID NO: 55387 - protein, 119 aa, Zea Mays
MDSIVETMMQQLLSKEILHEPMKDIVEKYPKWLEDNKNKISKEEYERYNNQLELMVKLIEVYENDPENMTKIFDIMQNMQECGQPPSDLVQDTVPDLDLSKLGQLSPEMLESAPNCCVM

SEQ ID NO: 55388 - protein, 317 aa, Zea Mays
MFVDNGLAAGMGLDLGWQQRYARFCGRIIVLSVLVLLLYPFLWVWTVIGTLWFSTARGCLPEEGQKWGFLIWLLFSYCGLACIACVAIGKWLHRRHALQQRAQQGIPVSEHGVLVDMIRVPDWAFEAVGLEMRVGQDTAYHPGLYLTDAQREAVEALIQELPKFRLKAVPTDCSECPICLEEFHVGNEVRGLPCAHNFHVECIDQWLRLNVKCPRCRCSVFPNLDLSALNNLRSTSEPDHPSASASNVTTATAATRYVRSQPAGQSYLVRLQGLLLRPVRHDSVESDGEPAVGNSRLVGTEELPSILVDDGHQLPDR

SEQ ID NO: 55389 - protein, 60 aa, Zea Mays
MATNENLPPNVIKQLAKELKNLDESPPEGINVIVNDDDFTTIFADIEGPVRLKILIWTWC

SEQ ID NO: 55390 - protein, 463 aa, Zea Mays
MDYTLIHYNVMAWEGRAYDYGMDNLKSMGFPVDDLKFDPDLVIRGLVIDKEKGNLVKADRFGYIKRAMHGTQMLSTRAVSEIYGRELVDLRKEIRWEFLNTLFSVSEAVMFMQMVDKLDQGLVPAELGPLDYKGLYNAVSKALFRAHVEGQLKREIMAEPDRFVEPDPELPLALLDQKEAGKKLLLITNSDFHYTNKMMNHAFNRFLPNDVGWRDLFEMVIVSARKPEFFQLSHPLYEVVTDDGLMRPCFKVNSGGLYSGGSAQMVEKSLDIHGDEILYVGDHIYTDVSQSKVHLRWRTALICRELEDEFNALVKSHDQKEKLVTLIQQKEIVGDLFNQLRLALQRRSNSRPAQTLAATCMDDQELTESMQKLLIVMQRLDEKIGPMLEADGELFNKRWGWLSRAGLWDKSHLTRQIEKYADIYTSRVSNFLHYTPFMYFQSQEQTLAHDAHSYSGGKDIKVH

SEQ ID NO: 55391 - protein, 724 aa, Zea Mays
MASHSPSVFHPYIKALSAPILSAIRDRYYKVTAEALRVCGELVRVLRPNLETTSVDFKPYIGPIYNAILGRLANQDQDQEVKECAISCMSLVVSTFGDGLERELPACLPILVDRMGNEITRLTAVKAFSVIANSPLRIDLSCVLDHVVSELTAFLRKANRALRQATLGTLNSLVVTYGGQIGSSSYETIIAELSTLISDMDLHMTALALELCCTIMVDRKSIQNVGLAVRDKVLPQALVLIRSALLQGQALQALQRFFASLVQSANTSFDALLESLISAAKPSHSGSLAKQALSSIAKCVAVLCLAAGDQKCASTIEMLKGILKDDSTTNSAKQHMALLCLGEIGRRKDLSNHVQIENIVIESFQSPFEEIKSAASYALGNIAVGNLSKYLPFILDQIDNQQKKQYLLLHSLKEVIVRQSVDHTGQSELQDSNIEKILALLFNHCESEEEGVRNVVAECLGKISLIEPKKLVPALEVRTSSPAANTRATVAIAIKYSIVERPEKIDEIMYSKISTFLMLIKDSDRHVRRAAVLALSTAAHNKPNLIKGLLPEILPLLYDQTVIKQELIRTVDLGPFKHVVDDGLELRKAAFECVDTLLDSCLDQVNPSSFIVPFLLSGLGDHYDVKMPCHLILSKLADKCPSAVLAVLDSIVEPIEKTISHKPKGDAVKQEVDRNEDMIRSALRAISSLSRISGSDYSIRFKNLMNKITATPALAEKYNSVRGE

SEQ ID NO: 55392 - protein, 337 aa, Zea Mays
MRPAVLAALLLVAAAASTAAALYSSGSPVLQLNSNNFKSKVLNSNRVVLVEFFAPWCGHCKQLAPTWEKAAGVLKGVATVAALDADAQQALAQEYGIKGFPTIKVFSPGKSPVDYQGARDVKPIVEFALSQVKALLRDRLSGKASAGSNGKTSGGSSEKNEPSASVELNSRNFDELVVKSKDIWIVEFFAPWCGHCKKLAPEWKKAAKNLKGQVKLGHVDCDAEKSLMSKYKVEGFPTILVFGADKESPFPYQGARVASAIESFALEQLEANSGPVEVSELTGPDVMEEKCASAAICFVSFLPDILDSKAEGRNKYLELLLSVAEKYKKSPYRQVSA

SEQ ID NO: 55393 - protein, 97 aa, Zea Mays
MRLPEIQQLLQSLAVENESLREEMRDLQRACKALSKENDKLETRLGQSISQNEVTLKEQKGKQQLDQQSVMQSARDSFVLPDLNLPPQDSADVSTVH

SEQ ID NO: 55394 - protein, 134 aa, Zea Mays
MPPPNVTGSLHMGHAMFVTLEDIMVRYFRMKGRPALWIPGTDHAGIATQLVVEKMLAAEGVKRTDMTREEFTKKVWEWKEKYGGTITNQIKRLGASCDWSRERFTLDEQLSRAVAEAFVRLHDKGLIYQGSRIL

SEQ ID NO: 55395 - protein, 260 aa, Zea Mays
MMACSVQSSEQSRRRQPRTRRVRARRPKKRARPPAVRRDRGGKREAIDGRPGLELEGGGEVHRLRRDRDGVGEPLQRLAHPRVGAARDGLGGGDPLPAARGHLGPPVQLRGDAQREHEALVRGVVAAAAVAPAAQRGARLAEHAGLLRGLAPGRLVHGLVQLPPALGDQHAPRGALLLRADHQDLHLAVAPAHAVRDAAHHHAPARARAVPLQLPALARHHNCCHLCRSLPQITRSLWEKGDSLNGREEDEWARHGHHAT

SEQ ID NO: 55396 - protein, 294 aa, Zea Mays
MDKFLVPAPPHCGEEPAPPPRRHRWRRIIAELDGRIDSRFQHRDSRLLLDSFTEVGAFDHKYYIHGEERCRTYVDRIISASTINFHPVREGVSAIEFDRKGIYIASVTLSGCLTVHDFETLYCSKYGPPCSMPDESSNYVLHISNRIPLNAVRWNPGNQDEIACTSNQSDNVFLFDIGYVSSTPTEVLHKGKSKFPSLYSESCKSLTDITFTSDDKSRIFASGLDGAVYMWDRRSSKTHCLELVASPEAQFNTVKLTVDNRTVFGATKNGTIHVGISVEGGHQLLFKATTRFSN

SEQ ID NO: 55397 - protein, 1217 aa, Zea Mays
MAPRLDDRSPTPTNDEMDNKSDCSDGMFNRSVRSSSENHLVGTYQDESGNRETSFSAPGSHRSSNSGDSTADRTNFSPRDNSSGGLYVGRQDSASSYASYVSAGRGDDGLRSNNSSFSSRASGPNLLQGNTPKIFSNGLSQLSMGASDSSKDLLEAAEETIEELRDEAKMWERHSRKLKADLEMLKKECSEKSKQHAELAGELSAAQAERDSYRHEIEELKSSLQDVNTRQTITGTPKRSDWIDLQKELEGEVKFLRESNADLTIQLNRTQESNIELLSILQELEETIEEQRVEISKISKVKQTADPENGLLVKEDKEWAKKLSMKDDEITVLREKLDRALNIGNAGGAGSNAIYLELEKENEILRAKIQELEKDCSELTDENLELIYKLKENGLTKGQVPRISNNNELQFEKLTSRIRQLEEELRNKEMLRDDSFSESSTSNADELQRKCADLELKLLNFRSQTCELEEKFQKSQEELEQRNLELSELRRKLNGLHSTELEVFESGATWKYQSRTADLEDTEPETDTLKARFELQLQENDDLRSSKVEMENFISEIQAEKSQLEERLSVSLKESSITSKCLDEVRKDILVLSSSIDSHVSANKVLERNIIELESCKAELELHVSELEQENIELSERISGLEAQLTYLTNEKESSELQIHDSRSLIINLKDKVERQQSEMETQRLEFKQKQQESQRRLSETQDDSEVLRRSNSKLQSTVESLIEECSSLQNLTADLKRQKLEMHGHLTQKEQELDESKKRNFEFSKTVEFLEAKLSSLHKDVSSKEQSLLSELESIFQEHMEQEERINRAHFMLNKIEKEKTLEVENLKREVVSLTAQVSSTHEERESATLDAIREVSVLRADKAKLEANLQDVSTQLRHYESQLEDLRKESKNKIKGLVDSLNASKQSEEMLTSDAEHMKKLMEAARSNEDTLRKTSNELELKLKSSDYEKQQMLEEISGLKLQVQKIMNLQDEVFKLQSSLDEAKFGKGKLEEILRSVTEECEELKAQKAMLTDKVSDMQETLRNGEEEKRNRIAMQAKLVRLESDLSASEASHVHEAELKNELSRIKRSNSEYQRKIQSLEQENEDLTRRVQTMEKGFEQMSHVKENLGKQELGGDNQAAIQSKIELLETKLAEALEENKMYRAQQKSPMPEGQPSAGAGDGKEGNTDRILQLEGELRDMKERLLNMSLQYAEVEAQRERLVMELKAMKKGRWF

SEQ ID NO: 55398 - protein, 393 aa, Zea Mays
MGTSSGANFHQQPPPTQGMLPPRHGPRPSGLQTSLSLASSEQVGSPDMQEPGSNSEPGHDSATESASSKDTWPAEPNQSNGGVAASDVVSKAAEKEVANGVSKPQVIHGPSSRMSGMLLREVARERVDLVAEKMKMMSDEHLEEVKNELRSILEGTGGSHHIEEFLYLQKLVQDRHDLTPSMLSVAHHVQLEILVAIKTGIQAFLHPSVTIPHNRLVEVFLYKRCRNIACQSALPAEECRCNVCASRNGFCNLCMCVICNKFDFEVNTCRWIGCDFCSHWTHTDCAIHNGQIGMGQSVKSSIGHAEMLFRCRACQRTSELLGWVKDVFQQCAPGWDRDALLRELEFVCKIFRLSEDAKGRVLFRKCLDLIERLRNTPADSINPRMILQALQAF

SEQ ID NO: 55399 - protein, 167 aa, Zea Mays
MDNVSAVVSCVGGFGSNSFMYKINGTANINAIRAAAEKGVKRFVYVSAADFGLVNYLLQGYYEGKRASEAELLSKFTYGGVILRPGFIHGTRRVGSVKIPLGLVGSPMQMVLQNIKPLTRLPLIGPLLTPPVSAASVGKVAVRAATDPVFPPGIVDVYGIMRYSEQN

SEQ ID NO: 55400 - protein, 747 aa, Zea Mays
MVRSGSIRRSAVPAPMPAPAFTVSPADYRLLEEVGYGANAVVYRAEFIPTGRTVAVKCLDLDRVNSNLDDVRKETQTMSLIDHPNVIRSYCSFVVGHNLWVVMPFMSEGSCLHLMKVAYPDGFEEPIIASILKETLKALDYLHRQGHIHRDVKAGNILIDNPGVVKLGDFGVSACMFDRGDRQRARNTFVGTPCWMAPEVLQPGTGYNFKADIWSFGITALELAHGHAPFSKYPPMKVLLMTLQNAPPGLDYDRDKRFSKSFKEMVAMCLVKDQTKRPTAEKLLKHSFFKNAKPPELTVKNILTDLPPLWDRVKALQLKDAAQLALKRMPSSEQEALSMSEYQRGVSAWNFDIEDLKAQASLICDDDPPEIKEDDDTGRITDIDKDTSSDDYFGKTAPSNGNNCSDRSSVPANPGQNGPEINEILSSNNGNAYSERKPDGRKNPESENDSLPSTSKHDADGKDYRCDFRQKQRTYSGPVLQSGPNNSSMTERGHIIERDAGVQSVSDKQKNGTRRANNLSGPLSLPTRASANSLSRANNLSGPLSLPTRASANSLSAPIRSSAGYVGSLGDKPKRTMVEIKGRFSVTSENVDLAKVQEIPGSSASRKLQEGPSLRKSASVGDWSANDKTTSTNHQRKELCNSSVSTSILIPHLQNLVKQTAFQQDLITNLLSSLQQNERVDAAQSRVQSTTSDTVVEAATAEREHSLLVKIFELQSRMISLTDELIAAKLKHVQKHAFKTIINDRLR

SEQ ID NO: 55401 - protein, 287 aa, Zea Mays
MFGSNIGPNTTLEVFLHILSAASEFDELPVRHNEDNLNRILSGNVPYPVDQHHLDDPHVKANLLFQAHFSRAELPISDYVTDLKSVLDQSIRIIQAMIDVCANSGWLTSALTCMHLLQMIIQGLWFERDYESLWMLPSMNDDILDHLKSRGVSTVPSLLDLSREELRRVLQPFSASELYQDLQHFPHVDVKVKLHNEQERSKPPTLNIRLQLKNSRRSASRAFAPRFPKAKQEAWWLVLGNATSSELYGLKRISFADRVINTRMELPQTFNVQIVQLRLRHLLLHSW

SEQ ID NO: 55402 - protein, 1126 aa, Zea Mays
MACIKSAQRAALTALAPDAPYLAAGTMTGAVDLSFSASANIEIFRLDFQSDSPDLPLLAAAPSPDRFNRLSWSRPGAVEGDSFSLGLLAGGLSDGSVAVWNPLSLISSEGKAEDAMVARLEKHTGPVCGLEFSELTPNRLASGAEQGELCIWDLKNPVEPIVYPPLKSVGSHAQAEISCLSWNPKFQHIVASTSSNGMTVVWDLRNQKPLTSFSDSNRRKCSVLQWNPDMSTQLIVASDDDSSPSLRVWDVRKTISPVREFVGHSKGVIAMSWCPYDSSFLLTCSKDNRTICWDTVSGEIISELPASANWNFDLHWYRKIPGVIAASSFDGKIGIYNLEFSGIYAAGDAVGAPARQRAPVPKWLKCSTGASFGFGGKLVSFHPVAPTQGAQASTSEVHVHNLVIEQSLVSRSAEFEDAILNGDKSSLRALCEKKSQESLSDEERETWGFLMIMFEDGDFVRTKLLAHLGFEPPQAPPASSPDELSQTLADTLNLDHATITDYADAQFLTDNGDDFFNNPQPSEASLAEDLVSTNGQQTEQEMSGDVVPSDPSIDKSIQHALVVGDYKGAVNQCLSANRIADALVIAHAGGSALWESTRNHYLKNSISPYLKVVSAMVGNDLMSFVSTWPLSSWKETLALLCTFAQKEEWHVLCDTLASRLLNIGDTLAATLCYICAGNIDKAVEIWSRTLKSEDGGKIYVDLLQDLMEKTITLALATGHKRFSSSLSKLVENYAELLASQGLLKTAMEYLKLLGSDEHSNELAILRDRIACSMEENDNARSYVSESTATPSLYGTNQSYTAPDHSQNVYQPYNVPSNTYSEAYPQQPTGAYGYNNTYQPQQPTHMFVPPSAPASSQQQPGPSPVPVPQQTVKAFTPANPAGLKNPGQYQQPNTLGSQLYTGTANQQYPSGPSASYPSGPPTTFHQPVSPVQYQPVAPPVSSFGPSAPVPATVPNQMFPHSAAANSTSRFMPSNNQSFAPRPGLSPAQPSSPTQVQAQPAPPAPPPTVQTADTTKVSAELRPVIGTLTRLFDETSKALGGSQATQAKKREIEDNSRKIGALFSKLNSDDISPNVASKLRQLCSAIDASDFATAMHLQVLLTTSDWDECNFWLAALKRMIKTRQNFRM

SEQ ID NO: 55403 - protein, 699 aa, Zea Mays
MDMLMDREVIRNEALLLLTYLTRDAEEIQKIVVFEGVFEKIFSIIREEGYSDGGVVVQMLLKETMGFDPLISILKIRRGSAFNFTQQKTVNLLGALNTVELLLMGGPSGEAGKDANKNANQTALAQALRCIGNLVLRNPQNLDSLARKQVGEEPHVQPALNAIFSIILRTSVAQEFVAADYVFKCFCERNPNGQALLASTIVPHPNQGNMHEPAIDMPFGSVLLQALVSSDVNGDMEACCRASSVLSHIVKDNMQSKDRVLQIQLETLTPSLGRTEPVLHRIVTCLSIAASTEGENNQNNQPEEPYIQPVILRLLIIWLVDCSNAVNCLLESAVHLNYIIELASSKRYTACVRGLAAVVLGACILYNASHEKGRDAFAVADAISQKIGLTTYFLRFDELRRSLAHPLPEQHHRKELSRSSANSMSDFQEIEEDETNKDDQHPVLSEIFDSQFVNFLSKLEADIRENIMDIFSRTKTATALLPTELEQKNGEVDGEYIKRLKSFVEKQCNEMQDLLARNAMLAEELVRTGGGTTTDTSQRPNNGRERVQIEALRQELEGARRQIEALETDKSQIEAEANNQRNLAVKLESDLKSLSEAYNSIEQANYRLDAEVKTLRQGGSVPYPDVEAIKAQAKEEAEKDSEAELNDLLVCLGQEQTKVEKLSTRLAELGEDVDALLQGIGDDTAIPDDDDDDDEDSEE

SEQ ID NO: 55404 - protein, 331 aa, Zea Mays
MEPQVERELMLIKVNAEREKLPEIMGLVRIFKAEVVDLSDYTLTIEVTGDPGKMVAIQKTLSKYGIREIARTGKIALRREKMGETAPFWRFSAASYPDLEVAIPSNFQQNTGVKAINQNPEESSGGDVYPVESYESFSSTSQILDAHWGVMTDGDPTGFCSHTLSILVNDVPGVLNLVTGVFSRRGYNIQSLAVGPAEKEGTSRITTVVPGTDESIAKLVHQLYKLIDVYEVQDFTHLPFAARELMIIKVAANATARRDVLDIAQIFEAQKVDISDHTITLLLTGDIDRMVRLQKMLEQYGICEVARTGRIALLRESGVDSKYLRGFSLPL

SEQ ID NO: 55405 - protein, 357 aa, Zea Mays
MEYGAVLAAAPLVARPNWLLLSPPPLAPSIQIQNRLYSISSFPLKAGPVRACRALASNYTQTSETVDLDWENLGFGIVQTDYMYIAKCGTDGNFSEGEMVPFGPIALSPSSGVLNYGQGLFEGLKAYKKTDGSILLFRPEENAERMRTGAERMCMPAPSVEQFIDAVKQTVLANKRWEGLAPINLIVEDKFHRATPGGTGGVKTIGNYASVLMAQKIAKEKGYSDVLYLDAVHKKYLEEVSSCNVFVVKDNVISTPAIKGTILPGITRKSIIDVALSKGFQVEERLVSVDELLDADEVFCTGTAVVVSPVGSITYQGKRVEYGHQGVGVVSQQLYTSLTSLQMGQTEDWMGWTVQLN

SEQ ID NO: 55406 - protein, 369 aa, Zea Mays
MNLEKAIEEKSKAITSMLDEIASLQAKGSVAAEEQANKANAKVVELEKQVDKIKKDIEAQSSQKAALEYRANDAEKKVEVLNEKLNTIQKESDEKKRKIKKTERALKVAEEELMRLQLEVTAKSKQLSEVHGAWLPPWLMAQYACYAEVVSGHWDQHGKPAVQNFLHKASEKSAQAKKWAEPHIETAKMKWIPVKQKLVALKKNAEPYVQKVSTRSVEFYESSRDAVTPHAVKVKVFVHSYYQKAKKFSKPYIDQIAEITKPHVEKIRTTLKPYTKRAVHAYGSFLKSATTYHRQAQASIMDYLHQHDITKSLATKELVWFLASALLALPVFIIYRLLVGTFCSKKNKRPRSSNGNHGHKRYKRRHADK

SEQ ID NO: 55407 - protein, 571 aa, Zea Mays
MEDFDAERKSGMLHMFCKTLTASDTSTHGGFSVPRRAAEDCFPPLDYNQLRPSQELVAKDLHGAKWKFRHIYRGQPRRHLLTTGWSSFVNKKKLVSGDAVLFLRGDDGELRLGVRRAIQLKNEALFEDFNSDSTKRHSLTAVADSLKNRSVFHISYNPRATASEYIIPYAKFLKSLNHPVCIGARINFQCHNEDVSERRSGVVVRISEIDPMKWPGSKWRSLLVRWEDGAECNGQDRVSPWEIEIAGGSVSVSHSLSASSSKRTKLCPQGNLDVPAMWNGCTDSMETGKLPRVLQGQELMSFRTCHVPCAPQTAEAAKLQSSDASRFLSNAHGCALGGPTSRLAVHSSGFTYQCVGFNESIGFSEVLQGQEISRAVPKFQGMMSEACSLKDRYGLHSYMRAPVAVNGLSATTQECSLALSTPPGAQVPSLYPGNVVNRTVVPQLGLARKFGGGGTNGQQSGPFDRPRELWTRPQHETPDQMNLDQFETRRPSVPVDAAKLGSGGGEVRKTSCRLFGFSLTEKILPADDDDVKEVSYETECQNPRMLDLFGYNCSTPSAALPALCAAAPFGM

SEQ ID NO: 55408 - protein, 749 aa, Zea Mays
MAFLARALRQSNWRLSSRCPAVAASCRWISPTAAAGSPEAGAAVAPADLELPPPREPVGGARVELPPNPEDALEVFVDGHAVRIPKGFTVLQACEVAGVDIPRFCYHSRLSIAGNCRMCLVEVEKSPKPVASCAMPALPGMKIKTNTPVAKKAREGVMEFLLMNHPLDCPICDQGGECDLQDQSMAFGADRGRFTEMKRSVVDKNLGPLVKTVMTRCIQCTRCVRFATEVAGVQDLGMLGRGSGEEIGTYVEKLMTSELSGNVIDICPVGALTSKPFAFKARNWELKGTETIDVTDAVGSNIRIDSRGPEVMRVVPRLNEDINEEWISDKTRFCYDGLKRQRLNDPMIRGPDGRFKAVTWRDALAVIAEVLHQVKPEEITGVAGKLSDAESMMALKDFVNRMGSDKVLCEGNGPNPPADLRSNYLMNTSIAGLEKADVFLLVGTQPRVEAAMVNARIRKTVKATQAKVGYIGPPADFNYDHEHLGTGPQTLVEIAEGSHPFCSVLQSAKNPVIIAGAGLFEREDQVALFSTIETVAKKFNVMRPDWNGLNVLLLHAAQAAALDLGLVANPAESIKSAKFLYLMGADDISLEKLPDDAFVVYQGHHGDKGVYRANVILPSSAFSEKEGTYENTEGCTQWTIPAVPTVGDARDDWKIIRALSEVAGAQLPYDSLSAVRDRISTVAPNLVHVDERETPTISAEVKPPVKQQVSSTPFKAVVENFYMTDAITRASKIMAQCSATLLKKASRQT

SEQ ID NO: 55409 - protein, 134 aa, Zea Mays
MPCHMSHGHPPTCFHFLSIVLGRRFRFIRTYDDRAPERDAGGDRRISGLARACLVLRCCQSISSSSSSSLTNPAYLIQHRLLGRASEWRTHSALVPRGPPRQPFGTRSACLGRWAARHYRATLSTAARLPANLG

SEQ ID NO: 55410 - protein, 1184 aa, Zea Mays
MLTKFETKSNRVKGLAFHPRRPWILSSLHSGVVQMWDYRMGTLLNRFDEHDGPVRGVHFHATQPLFVSGGDDYKIKVWNYKTQRCLFTLHGHLDYIRTVQFHHECPWIVSASDDQTIRIWNWQSRTCVAVLTGHNHYVMCASFHPKEDLVVSASLDQTVRVWDIGALRKKSASPADDILRLTQMNTDLFGDDRQVKIWRMNDTKAWEVDTLRGHMNNVSCVMFHAKQDIIVSNSEDKSIRVWDATKRTGIQTFRREHDRFWILAAHPEMNLLAAGHDSGMIVFKLERERPAFCVSGDTVFYVKDRFLKFFEYSTQKEVQLAPIRRPGSVSLNQSPRTLSYSPTENAVLICFDADGGSYELYIAPKDSAGKADYLQEAKKGAGGSAVFVARNRFAVLERSSNQVLVKNLKNEIMKKSPLPIATDAIYYAGTGNLLCKAEDRVAIFDLQQRLVLGELQTPAVKYIVWSSDMESVAFLSKHVVVIASKKLVHQCTLHETTRVKSGAWDENGVFIYTTLNHMKYCLPNGDSGIIKTLDVPIYITRVIGNNIFCLDRDGKNKLIAVDATEYIFKLALLRKRYDHVMSMIKNSQLCGQAVISYLQQKGFPEVALHFVKDEKTRFNLALESGNIQIAVASAKEIDDKDHWYRLGIEALRQGNVGIVEYAYQRTKSFERLAFLYLITGYLDKVGFMYKIAGQNNNLMGQFHNALYLGHVNKRVEILENAGQLPLAYVLAVTHGLTEIAERIAAELGEHVPLLPEGKSHSLLIPPAPLTACGDWPLLRVVRGIFEGGLDSTGRAELEEDDEASGADWGDEDLDIVDASEVVANGGDYFDAEGEPNEEEGEEGGWDLEDLELPPDTETPKSAGNARSPVFVTPTAGIPVSQIWTQKSSLAGEHAAAGNFDTAMRLLSRQLGIKNFAPLKPLFLDLHMGSHSYLRALAAAPVISVAVEKGWNESASPNVRGPPALIFSFSQMEDRLKAAYKATTEGRFPEALRQFLSILHTIPVIVVDSRREVDEVKELIEIVREYILGLKMELKRKELRDDVTRQQELAAYFTNCKLQRIHMRLVLSSAMALCFKQKNYATAAHFARMLLENSPQEAQARKARQVLQACQDKDDSHQLNYDFRNPFIVCGATYVPIYRGQKDISCPYCGSRFAPSIEGQLCTICELAIVGADASGLVCSPTQMK

SEQ ID NO: 55411 - protein, 314 aa, Zea Mays
MPSMTVHGASLPPFPWSHSQAGGCRQGVDCGKHGSSRSNSQWQWVRVGSNLTSLDHEDTSVHRIDDLLQEMDAAKLCILDPCDGQHNLCGTESTSGSLVQNIHSRKIGGEHGSQQLQPQDHLDSLDGFQKHDIDYSLLKTSQVSPKIQCAAEILCDMRRSTESWIGQGYSNGTIKWPKSPPEKAMKARKPSSQFGTTESSSGSRNNEATWNGSSHSTKKIVDRNNDSARLNNPGKGTIRWPVPVEDNASPVRSERGLMVDMRQPHGNGGRHLVQVSSQTRLEKEYENQQKLRKATLTSSLGSAGDWNREKNRRM

SEQ ID NO: 55412 - protein, 737 aa, Zea Mays
MVAAAHSQSGFSFDDNHATCAPNCTMKLEPALRDDSREVKEAKYRRIRLEEKGEAKQPARASDRSPRPVVSNIPSNAYPLEGPSECHKKPGFIYASGEKGHLSDKNLDVPSTRAGGLEKDRTELLRMLDELRDQVQRSYEIADKSSVNASTNRMVDPASSYNPHERLSRLRYGSPQLQRNGSQCSPSLNGQAPVVPPAYPSVSVQQDLHGYGQSVAHMGAPIYPAAPYPWRNFDNYFHGQYDPDPLISYHHDGFYHQPACSCLHCYHRELLPVHGAPLGFNHRRAPYLMNNPVEGPVVFGAQNYNPRGINGLMRHNHLRDTLSKKPAQTCEPIANGAPFTICYNCYEVLHLPKNSLMLGKDEYKLRCGSCSHAIVVRLDGNRLDVSAPTPVSHLSPGSKNYSNNGQGSNGQNADERLLPSYSFSAGSHFSQEKDLPSNSSEADKMQCISSSASISEDDNSRASSNSQKNSGSRDLPPDAEVVIRVPSLPLRDHFGYSPSEMVVDGSGKGSRSTRSEHEKGVLTESFKPNKVKDVPVASVLDPSDDEFDDPEYNQDPGDGAQCVDHPRATKSGDSFFSSLIKKSFKINGGMGNGRAKVFINGYPISDRAVRKAEKIAGPIYPGEYWYDYRAGFWGVIGQPCLGMIPPYIAEFNYPMPKNCAGGNTGVFINSRELHQKDLDLLVGRGLPDSPDRSYRVEISGKVSDEVSGEELYCLGKLAPTVEKMKRGFGMRVPRTIQ

SEQ ID NO: 55413 - protein, 821 aa, Zea Mays
MASNMQSSGLPQPPRPPMMGSSAQPQNLGPPMPMQFRPVMPSQHPPQFMPPAAQQFRPVGEPMAGANVGMPGQMPHFPQPGQHLPHSNQVPPVSQGVPMVYQPARPMSSAPMQQQQQTAYAGGHLPTMGAPMQPLTYTYQPTSIPPVAQPWSTGPGQSVHHVPPLVPSGHQPVSAPTTLPPVNLSEPSSSDWQEHTAAEGKKYYYNKKTRQSSWEKPVELMTPLERADASTEWKEFTTPEGRKYYFNKVTKQSKWTIPDELKVARELAENASNQQPDRESGIATSALVRSAAFEPSTAPANQSSSAVGIIASSAHDGSSNSVLSGPPLPHNVENTSSSIVGMQNGGSSTAVVPVAASTEVPLVATDAGSSRNNDENSSLTTGADAEDGTSAEDLVEAKKTMPVAGKINVTPVEEKTSEEEPVVYATKMEAKNAFKSLLESVNVESDWTWDQTMRVIINDKRYGALKTLGERKQAFNEYLNQRKKFEAEEKRIKQRKARDDFLAMLEESKELTSSTRWSKAILMFEDDERFKAVERPREREDLFENYLVELHKKEKAKAAEEHKRYVAEYRAFLESCDFIKASTQWRKVQERLEDDERYSRLEKFDRLDIFQEYIRHLEKEEEEQKRVQKDQVRRQERKNRDGFRKMLEEHVADGTLNARTRWRDYCAQIKDSQSYLAVASNTSGSTPKELFDDVIEELGKQYQEDKIQIKEVVKSGKIPMTTSWTLEEFQTATLEDDALKGISTINIKLVYDDQLERLKEKEQKDAKKRQRLGENFSDLLYSIKLLQHGMILNSFSRIAKSSGPWTVRLMLESFLKSALST

SEQ ID NO: 55414 - protein, 957 aa, Zea Mays
MYLDVADSGVLPYGWTRYAQFSLSVVNQIHNKFTIRKETQHQFSARESDWGFTSFMPLGELYNHSRGYLVNDTCIVEAEVAVCKVVDYWSYDSKKETGYVGLKNQGATCYMNSLLQTLYHIPYFRKAVYHMPTTENDMPSGSIPLALQSLFYKLQYNDSSVSTKELTKSFGWDMHDSFMQHDVQELNRVLSEKLEDKMKGTVVEGTIQQLFEGHHMNYIECINVDFKSTRKESFYDLQLDVKGCQDVYASFDKYVEVEQLEGDNKYHADKHGLQDAKKGVLFIDFPPVLQLQLKRFEYDFMRDTMVKINDRYEFPLQLDLDRDDGKYLSPDADRNVRNLYTLHSVLVHSGGVHGGHYYAFIRPTLSDQWFKFDDERVTKEDAKRALEEQYGGEEELPQTNPGLNNTPFKFTKYSNAYMLVYIRESDKDKIICNVDEKDIAEHLRIRLEKDREEKERRKKEKAEAHLYTIIKVARDDDLKTQIGKDIYFDLVDHDKVPSFRIQKQMAFAQFKEEVAKEFGIPTQFQRFWLWAKRQNHTYRPNRPLCPQDEAHTVGQLKELVNKAHNAELKLFLEVELGLDLKPLPLPDKTREDIFLLFKLYEPEKEQLRYVGRLFVKASGRPQDILPKLKMLAGFSQDDDIELYEEIKFEPNVMCEYIDNRLLFRSCQLEDGDIICFQKSSKADSADRYRFPDVPSFLTYIRNRQVVHFRSLEKPKEDDFFLEMSKIFTYDQVVEKVAEKLGVDDPSKIRLTSHNCYSQQPKPQPIKYRGVERLLDMLIHYNQTSDILYYEVLDIPLPELQALKTLKVTYHHATKDEVSVHSIRLPKNSTVGDVLNDIKTKVELSHPNAELRLLEVFYHKIYKVFAPNEKIENINDQYWTLRAEEVPDEEKNLGPFDRLIHVYHFTKDTQNQTQVQNFGEPFFMVIREDETLSSIKERIQRKLKVPDEDFSKALPCFT

SEQ ID NO: 55415 - protein, 432 aa, Zea Mays
MPGTIMAMGRLNRPSIMIYGGTIKPGHFQGNSYDIVSAFQCYGEYVSGSITDEQRKNVLRNSCPGAGACGGMYTANTMASAIETLGMSLPYSSSTPAEDPLKLEECRLAGKYLLELLKMDLKPKDIITEKSLRNAMVIVMALGGSTNAVLHLIAIARSVGLHLTLDDFQKVSDQVPFLADLKPSGKYVMEDLHKIGGTPAVIHYLLEQGLLDGDCMTVTAKTLAENAKIFPPLSEGQQIIRPLDNPIKPTGHIQILYGNLAPEGSVAKITGKEGLYFSGPALVFEGEESMITAISENPANFKGKVVVIRGEGPKGGPGMPEMLTPTSAIMGAGLGKECALLTDGRFSGGSHGFVVGHICPEAQEGGPIGLVQSGDIITIDVSKRVIDVDLTEQQLEERRRKWTPPPYKSTSGALWKYIKLVAPASRGCVTDE

SEQ ID NO: 55416 - protein, 758 aa, Zea Mays
MGDACFSTQLIDGDGIFNVSGLENFMKDVRLGECGLSYAVVSIMGPQSSGHRLPKDDTAFEKQSALFALAVSDIVLINMWCHDIGREQAANKPLLKTVFQVMMRLFSPRKTTLLFVIRDKSRTPLENLEPILREDIQKIWDAVPKPHAHKETPISEFFDVQVVALSSYEEKEELFKQQVSDLRDRFQHSIAPGGLAGDRRGVVPASGFSFSSQQFWKVIKENKDLDLPAHKVMVATVRCEEIGNEKVTSFIADEEWQQFEEAVQHDFVTGFGKKLSSLLDRCLSEYDMEAIYFDEGVRSSKRQQLESKLLQLVNPAYQSLLGHLHTRTLEAFKEYFGKALEKEGFAVAACNCTETFLEKFDRGSEDAAIQQVNWDTSKVRDKLRRDIEAHVASVRAAKLSELCAKYEAQLTKALVEPVESLLDSASEDTWPAIRKLLQRETKTAVLGLESAVSAFELDEATEKELLAKLEKHGRSVVESKAKEEAGRVLIRMKDRFSTLFSRDADSMPRVWTGKEDIKAITKTARSASVKLLSTMAAIRLEEDGDNIENTLSLALVDTSRHGTTDRSIQLSDPLASSSWERVAEEKTLITPVQCKNLWRQFKAETEYTVTQAIAAQEANKRNNNWLPPPWALAAMAILGFNEFMTLLRNPLYLFAIFVIYLVGKALWVQSEIGREFQHGFLPAILSLSTKFVPTVMNILKRLADAGQEPAAAPERQREMELQPKSTRNGSLYSNVTSAGSSSVTTSEIGPEYSSPVVQ

SEQ ID NO: 55417 - protein, 91 aa, Zea Mays
MAAQEQEHEKQQAKTSTTSSLPSSSERSSSSAPNNLREGDSEEHDGAREQEERRRRQGWRRRQEAPLRQELMRIEGLREGAGSCSARARLT

SEQ ID NO: 55418 - protein, 611 aa, Zea Mays
MKPDTESYNWVIQAFTRATSYDRAADVAELLGMMVEDHKRIQPNARTYALLVECFTKYCMVNESIRHFRALQRIPGGTEVLYNEGNCGDPLSLYLRSLCLDGRPVELLEALEAMANDNQSIAPRAMILNRKYRTLVSSWIEPLQEEADVGFEIDYVARYIEEGGLTGERKRWVPRRGKTPLDPDEFGFAYSNPIETSFKQRCFEELKLYHRKLLITLRNEGPGILGDVSEEDVRRVIERLKKLVVGPKKNVVKPKAASKMVVSELKTELEAQGLPTDGTRQVLYQRVQKARRINRSRGVPLWVPPVEDEEEVDEDLDELISRIKPEDGNTEFWKRRFLGETRNYLCEEDSKEDGQDLDDELEDDDDNDDDEDDDESVKEAEEDEIDDEEVVEQTENQVGDDTKDKPAKEPNHHLQMIGVQLLKDIERTPVSSKKLKRMPEIDDDEDWFPEDPIEAFKVMREERMFDVSDMYTTADAWGWTWEREIKNKMPRKWSQEWEVELAIKIMHKVIELGGTPTIGDCAIILRAAMRAPLPSAFIPILQTTHSLGYKFGSPLYDEVVLLCLDLEEIDAAIAVVAEMETCGVKVPDETLDKVLASKRSGNSALPPPTEE

SEQ ID NO: 55419 - protein, 706 aa, Zea Mays
MEQSAGDESRETEAENAVEYNKKVDQEDTINRQGTAKEDSGVEPQEENVVDPDQGVDDFSVLDEGNVVAQCTSDQLRTTMEDNAAEMQEVVEQEGAIFEKGVTSDGITVEDQDKEMEQSAGDESRVTKGENAVKDKKVYQEDAIDKQGAAEDGSGVKSQEDNMVVPGQCTDGLPVLDEGNVVPQYTSDQLRTTTDNNAAVDPELVEQEGVDSIVGAAKVGIAVEESREDIMVEKQVEGVLLQDQDEAVEQCTSDQLRTITDGRCSYGSSCHFNHPRLKAKLEVSSFPSEQRNHEAEFLELNRVGLPIREGARKCIYYMRNGTCRYGKKCCFNHPEQVLDVQRHTATGWDDTNLQSSPHSKKSPEHKTMDDISSGSEVLPPNILRMLLPPQNVPPSTKEKEIRIKKDPDWASASDDSDGCCSADSSDGPLCKQEHEDYPERPECPFLLRFGNCKFASSCQYYHPKDKFPSTYHPEDKFQSRYHQKEKSSRHHPKKEPALSGELMVYPDRPSEPDCPFYVKTGSCKFGANCKFHHPKDITPNMQGPASPKRSVAAKEHHAAARATLQDQMYQQQKFPERPGQPDCRYYMQFGKCKFQSACIFNHSKDILSSGWHPAECPFYMKTRTCQFGSACEFYHPKDRCSGRGGVIDGTDYGHDFATKSRNVLQELAIYPERPDELECSHYMKHGYCKYKMNCKFHHPRDRLPKK

SEQ ID NO: 55420 - protein, 293 aa, Zea Mays
MCCCVLCRVSGFNITLEYQMVADIKRLNGLSTDLQMFAHKTLRIPLPGRHPPSSYQQNGSYESDDRECTPRRIHDDILESILKTPNSKVSPAMSLLQGYYGLEPPPKRDQTSEGTEMAVHSKGKSAFLDVEPWLEPPNSDPFPLQNRKNRSLMIGSFLDGGTDENGDSERFIRRRQKADGELLPREENGGDFLASVGKGLALRPKSSNRPDMNKSQQNLFAMAEPLFGNGLQTVRKSSSTPEFQEPETNTSSSIWSASKWSINTDAFALPLPIPRFDNIPKPIAAWRNKPARD

SEQ ID NO: 55421 - protein, 137 aa, Zea Mays
MARWRARRLLPLATFVTLGMILGSLLQLALLHRLDGYSVHADSDPEAVLLRLGYVKPEVISWTPRIIVFHNFLSSEECDYLMAIARPRLQISTVVDVATGKGVKSDVRTSSGMFVNSEERKSPVVQLSFYASDTKEC

SEQ ID NO: 55422 - protein, 119 aa, Zea Mays
MPLSEMANLFMSLHLAVAPGLDNNPNNLVACTTFFSEATRAMLCLIRLETDPQDRTQLRLTVASGDQHLTFELKEFVKEHLIDIPRTQAAPPMAMVQPQLLTAAPATYNDPGAMLAGLL

SEQ ID NO: 55423 - protein, 182 aa, Zea Mays
MDTSKDLKWQLLSGKRATEDGSILLSAAVPIFHQSFDPIREALTGRDLIPEMVNGRGPKEGMPGQDYSGMYCALLTVGSTVVSAALLRVMGGDVAELPLVATSQDVQGLGYFQALFSCIERVLVSLKIKHFVLPAAHEAEGIWMNKFGFSRISPEELEAYLNGAHLTIFHGTSYMYKAVPVS

SEQ ID NO: 55424 - protein, 441 aa, Zea Mays
MELSCAIKQIGLIQRVIDWVSLCKELIEKKTSPEATKALELISNALHICPYSDSLKEMKAEALLMLRRYEEVIQLCQESVNPTERKPALFKDNGEPKNSSLFEQTHFSGRYWRPYLICKSYFLSGKLDEAVELLKKHEQVTPVKESDVNTYQENFSSLSAIIRELLSLKAAGNESFQAGRYSDAVKQYSAALACNSESRAFSAVCFCNRAAAYQALGQVTDAIADCSLAMVLDTNYPKAISRRATLYEMIRDYGHAANDLRKLISLLEKKVNVSGISPKAFNKHKDIKQAHARLSHIHAEAKNDTPLNLYLILGVEPSCSSADIKKAYRKAALRHHPDKAAQLLVRNENAEDGFWRDVIKEVYADADHLFKTIGEAYNVLSDPDKRQEYDFEENLRNARRVSSSRSMRRSPEHNYSDRGFNPRQWQSSRASRWYSKSDDYW

SEQ ID NO: 55425 - protein, 153 aa, Zea Mays
MENFTADRVVLAASGVDHEHLLGYADLLLKDWHKGTPMEKPKSTYVGGDSRHRADSDMTHVALAFEVPGGWLQERDATIMTVIQTLMGGGGSFSSGGPGKGMHSRLYRRVLNKYHLVDSFSAFNNVYDSSGLFGIYLTTSSHQILWQRLSTSQ

SEQ ID NO: 55426 - protein, 582 aa, Zea Mays
MPSGASFVHDDHGRGASSRNRSSGRDRDRSSQQSSSRRGSSSSGSRRNDRDGTGKSRGYGNFGKHSKDRIQEKDLDFRERESRLVQPDDPLRDGFESFSSCRSEKDRLNRTRSKVAIPNRAGVSLDNGNVSKKDNGVISFEREFPHLGSEDKNGKQDIEVPALVDPNINSVSSSSSPAGSSKPIEVSNSGSALSMAETVMQSPLNICTTPQLSIDAQKIEERTMRQCILRPLTPSSNKISASISLDKLLKSKGARAGESNGPIKVAPQLSIQPSSNSVRTPVKTELVKQSQSGSLQVLSREQNGTVNTAAKDITSNNPVSPVLGRSSSMEPMRKSIVNPKLKVGTNGRSLHPLQGSFADRKASAKDKYKFFELLRSKSVNGSSAAIESPSSLTDDQQNSSPELPFKFIENGNSSCEEANSCEGSQRHLSDNEEIIPPSESHDVLDEGSLGIQVDDKGSSSSPVLGTQDISSKKPQEDNVDIVVPVYVNDGSVMPNSVDNEARLLLEEANPAQVLQHIDAREENPCPAQEFESIGAGGEEELNLLRSMGWDENEEVQPLQQEEIADCVRQNVRLQQKLQECRG

SEQ ID NO: 55427 - protein, 93 aa, Zea Mays
MTPSAFIFLYENNLFLTFRNRTVAVWNFRGDLVTSFEDHLLWHHDCSTNNIYITSDQDLIISYCKSEAVAEDGTAMARMTEWLTLRSSRREGV

SEQ ID NO: 55428 - protein, 99 aa, Zea Mays
MLSTSSHLAQSIQELTTHWMILQGYFMTQVEPSNTISRLFRLSTNICQRKYCQQISILSRSIFFPFAQLRGPGQRCTSCMISHQLQSPSKRKEGTSFIL

SEQ ID NO: 55429 - protein, 100 aa, Zea Mays
MFLAGFIASVLFMCYFNIFGFVEKSWTMVAAFGVISLAAAVVESLPISTRLDDNLTVSVASVLVGALVFYSIGARNLCCMSSEVRRSIPATVGMVFAGSS

SEQ ID NO: 55430 - protein, 174 aa, Zea Mays
MSEESPTLLQSSQTTTVFSNQINGNSDGTYHLSFSSGNVTDSLPDWPVDEFFSNSEYVPNLGFSEHGSSKGDNAKLESAGGSLQCRLAEGSIAEELLGQVPGLITDDYMSRVPENSWTVPEVPSPPTASGLNWHGNLCFPAYDSTMFVPEITSLQNSQNQFTVPSSFKRRRREY

SEQ ID NO: 55431 - protein, 340 aa, Zea Mays
MGKHVWAAALMALAVIVGLGVPPGRIAEARTLEKDDLLGGGGDFGAGEGGGFGGGAGGGLGGGFGGGGGLGGGGGAGGGFGGGAGHGGGLGGGFGGGKGGGAGGGGGFGGGKGGGLGGGGGLGGGGGAGEGGGLGVGAGGGGGLGGGAGGGFGGGAGGGVGGGGGLGDGAGGGAGAGSGLGGGAGGGGGLGGGAGGGFGGGAGGGVGGGAGGGAGGGAGAGGGLGGGAGSGVGGGFGGGKGGGFGGGIGGGGGAGGGAGGGFGGGKGGGFGGGKGGGFGGGAGGGFGGGKGGGFGGGKGGGFGGGAGGGFGGGKGGGFGGGAGGGFGGGGGSGGGIGGGL

SEQ ID NO: 55432 - protein, 402 aa, Zea Mays
MPRWTENSASTKSAELVKQQDRLEFDDPDEVDEEEEVEYEEVEEEVEYEETEDEYGQTEAVRQVDAKHDSKMVDADTDEGGKGSHDELLALPPHGSEVYVGGIASDVSSDDLKKLCESVGEVVEVRMPGKSGRLYAFVNFRTKELASKAIQKLNNKDLKGKKIRVSSSQAKNRLFIGNIPYNWTENEFKKAAEEVGPGVLKVNLVKAPHSDTNKGYGFIEYYNQACAEYAKKMMSTPEFKLDKNAPNVSWADTKNGGESASTAQVKSLYVKNLPKAVTQEQLKKLFEHLGEVTKVVIPPAKAGHENRYGFVHFKERSMAMKALEDTERFELDGQLLDCSLAKPLADKKDDTSAPKGGPLLPSYTPVGYGLMGAYNPLGNGLAVAGAYNPYGNGLADTYTGVS

SEQ ID NO: 55433 - protein, 919 aa, Zea Mays
MQTNVASIDWLGGKQASRVDSSSQVAAHAYHPSHSFDAAGTAMDSAPSCRPWERGDLLRRLATFKPSTWASKPKAASSLACAQRGWVNVDMDKIECESCGTHLIFNALTSWSPVEVANAGESFAEQLDAAHQNSCPWRGNNCADSLVQLHLTQSALIGGFKDRCDGLLQFTSLPVIAPSAIENMKLTRSVQIDHLLSQSITFLSGILGCRAESTAGIDIHQDFSCSYSQAQKLISLCGWEPRWLPNVQDCEENSTHSAKNLPSVGPDERLYPHFVEHNKNSFSASAKKDKGKGKLPVGDSGCSMRSPLLDCNLCGATVRMRDFRPVLCPSRFSPNNIVVPGTGRKLTLTHGVSAASGINEWVTDGVERGQDEGRDEAATNEGKPLSLVGVDLNLTMAGGLPSPQSAMPAMSERFNNGGMGRDLMIGQPTGSEVGDCETSYESRGPSSRKRNLEEGGSTADNPQDRLQHADSIQGNFIDRDGEEVDDAAQDSDVPNKKSRGFDLFDAYRPSSGAGPSRNLSFGPHEDAGMFSHSRAIDLAAVERPTARDSLRASSVIAMHTIHTSEEDSMESVEYYPGDGNDIDMPSSSTQRNIEMNDALDLNYSNQAQQSANAHAGAGSDAREIGGSSTNEGEEVINAETVPPFGRDQLSLGISGGSVGMGASHEAEIHGNAGSLHRTESVVGDAEPIAELTETMGQTGESAPGPGLMDEFVPEVDRDEPHGDSQDTVSRSVGQADSGSKIYGYTKADSVESGEKIGHATGNGSSMRPSLSCNAGMCAGFDLSKDDVTHTGKILTTDDALMGLDYDPGNGLGATNGENDYESGLLEFDPVKHHNTYCPWVNGNVAAACCNNIGSSSSSSAPSGWQLTIDAVDTYQSLGQAQNQIMQSDSAASLYMQDDQITHNRKVGRRPSVSRSFGKC

SEQ ID NO: 55434 - protein, 880 aa, Zea Mays
MAISTASGPLLLEAGLELATRVMTSSIIGGDRLALSRLFSLITRPLSDIEGLLYPSFADWVVCKIKVRLLTAHAAVKCNTYQFLRMRENAPNEYQQLAPSLVNSSTLLGKYWIRALKDYVSISFGLHSKINYKPFLDGIQSLLVLSKVQRYLDEVWLLILKATALDAAPLDFDENNPKNLLEQTFISGHCMVKLDRTEFQFLWGLSILVLFHSCQSMKNNSLKINLDFKQDKNFGEFIVHGLDDKRPCDQVLRVLSSLTTEVFFSNNFISVDICQQLLQALTYADCSSAPIIHLFTQIIRFCPDNFFEVEAFVFSAIELLSQYLGLILQCRDGSSQNNSSNTLISELSIASETMAYRIKGEYLWKLVMLVVSTSHQSFQQVSTNLCFSNIICFLQNIFPFMRKIFRERVESDGECTSPKVVFGAMVGLVGYFYVECDKKISLLENKISDSYKLLNKILLFCLGEATALAKLVPEIIYRSENVSNNDVLLWGSFRLCVQVIQGSFRSTNIQVHMLGLQVLRSYAQKELTEGSETKLDSFMMLLTELLGDLFLVMETTLKECSNKKSVSVVDECLKLVFLFHTLAQSKKYRQDATTLLLEALLMVFSLSSDTVSQELAEVNTISRKLFSHFIQIPSVAIQIKDIMLSAPAERRLQLQDMVRASVSQGQITVPVATSAHSEQNIQDSCSKNPGSTSEASDCVATHGNNDNEVVDDDWDDDWDAFQSLPAIANDGVDSGEISLTTRYNEQIPQENSSYGSCNADITARAMEDITCVDKELEEPSDLQFSSTEQQPKHDLPGSSHEGCAKLERHPSVDCKEQLADDETADELQQQVHEDTDHVNKDSEVLSAEIHGVKLDILDEDVEDDSPMNSNNLSDIAEEES

SEQ ID NO: 55435 - protein, 133 aa, Zea Mays
MPCSLAAAKIGEGILLDHGTGLVIGETAVVGNWVSLMQGVTLGGTGKEHGDRHPKIGQGALIGASATILGNINVGEGAMIAAGSLVLKDVPPHSMAVGNPAKVVGYTEKEDPSLTMKHDARRDYFEHAAIRLR

SEQ ID NO: 55436 - protein, 76 aa, Zea Mays
MFTILTIVANMIMYKDWASQTATQIATQLCGFVTIVAGTFLLHKTRDMGNPPPPPPDQMCLQEAGECAPRSMTSSS

SEQ ID NO: 55437 - protein, 134 aa, Zea Mays
MSNSTVTHWSSLSHKLSEVLDFSGHIAPVEKHPGSLLEGFSGVQVSTLAVNEGLLVAGGFQGELIGKDLEGCNIKFCARTTLSDNAITNAIDIHRSTSGSLRITVSNNDCGVREYDMERFQLLNHYRYNWPVNA

SEQ ID NO: 55438 - protein, 398 aa, Zea Mays
MPKRHRDSEGRQRSSSSRRRRSPSPSDSDAASSDYSGSPRRSRGRHRHRSRRRRDTPSTSSDASGSGSEDSRSDSGRRGRSGGRRRRNVTEEQIIEYMAKKAQKKAEKVAKKLKANSVSGYSNDSNPFGDPNLTEKFVWRKKIEHDVSQGQKVDFSVKSEKKKQLERMAEIEKVKKRREERAIEKAQHEEEMALIARERARAEFQDWEKKEEEFHFDQSKVRSEIRLREGRTKPIDVLLKNLSFSDEFDIELNEPYLVFKGLTVKEMEELCDDIKMHLDLDRESQTNVKYWEALMVVCEWELGEARKRDALDRARVRGEEPPPEVLAEERGLHASIEGDVKSLLDGKTSTELEDMQSQIESQMRSGTAKVVEYWEAILKRLHIYKAKACYIDPLYSRA

SEQ ID NO: 55439 - protein, 838 aa, Zea Mays
MALTSQGITLRSPPAGPRGHGGRRSSSVPTAATPRVLGQPHAGQALSISPVRYEPAARPPRGGSAAAAIRAAASAGAQPGSDPVSAEPRIELPTIFSVFSETAKTGAAFFIASSGAAFLLGSFGGFGGGAGGLFGGGGGGGGGWGAGGGGAGGGGGGDFWYRLISSGAAHADDKSSGDWDAHGLPVNMTVPLTKLSGLKRYKLSELKFFDRAAASGGAYTGPEDSFFEMVTLQPGGVYTKSQLLKELETLVSCGMFERVDLEVKPKPDNTIGLTVSFVESVWSSAKQFKCINVGLMSQSGQVDFDQDMTEREKMDYLRKQERDYQQRVRGANPCILPENVRGEVLGMMKKQEKVSARMLQKIRDHVQKWYHNEGFVCAQVVNFGNLNTNEVVCEVVEGDITKVEYQFQDKLGNIVEGNTQLAIIDRELPQQLRPGHIFNIGAGKQALKNINSLALFSNIEVNPRPDETKEGGIVVEIKLKELEPKSAEVSTEWSIVPGREGRPTLASIQPGGTVSFEHRNIYGLNRSIVGSVTSSNLLNPQDDLSFKLEYVHPYLDGVDDRSKNRTFKTSCFNTRKLSPVFVAGPNMDEAPPVWIDRVGFKANITESFTRQSKFTYGLVVEEITTRDETNTVCTHGSRAMPSGGLNMDGPPTTLSGTGVDRMAFLQANITRDNTEFVNGAIVGDRYIFQLDQGLGIGSKNPFFNRHQLTLTKFINLNKQEKGVGKPLPAVLVLHGHYAGCVGDLPSYDAFALGGPYSVRGFSNGELGASRNILEVATELRVPVRNTHVYAFVEHGTDLGSSKDVKGNPTEFFRRVGHGSSYGVGVKLGLVRGEYIVDL

SEQ ID NO: 55440 - protein, 839 aa, Zea Mays
MSTRDGGGGRRGGNAAAGRGGDGQGRGRGGGGRGGAGGRGGGGQWRAQGGAELGGGRGGAVGAARGGRGGVERGGHQSFHGARPVGGDRGGRGHYHHGVPAQVQPQWQVAAPPSTSRPTPAEVEELRGEVERKAAVAVPDAEAHEGPSSGTAHEPSAAPARVEAEQGTSLVVEADQAAQGRLPPSSSKALVFPARPGYGTLGRRCRVRANHFFVQVADKEIYHYDVVISPESQSRKRNRWILNELVKLHKNYLNGRLPVYDGRKGLFTAGPLPFKTKEFVLELTNPERANQGAKEYSVTIKDAAKLDLYSLRQFLAGRQRELPQDTVQALDIAMRECPTEKYVSISRSFFSQSFGHGGDIGSGVECWRGYYQSLRATQMGLSLNIDISATAFYKAQPILEFALEYLNIRDTSRRLSDQDRLKLKKVLKGVRVVATHRRDIAIHYKITGITSLPLNSLTFNQDGASVSVVQYFKHQYNYSLKHIHWPCLQSGNDSRPTYLPMEVCSILGGQRYSRKLNEYQVTSILKKACERPPQREGSILEVVNRNDYGNDHCAKEFGIKVTNELALVDARVLPAPTLKYHDSGREKVCSPSVGQWNMNNKRLIDGVSIQYWACVTFASRLHPNDVRMFCNNLVGACNDMGMQINGRPCVDVGQARPDNLEAALRNTHRQSAQMLAQQGVTRQLDLLIVVLPDANASVFYGRIKRLCETELGLVTQCCQPKNVFKGGRQYLQNLALKINVKVGGRNTVLEDALNRRIHLLTDLPTIIFGADVTHPAPGEDASPSIAAVCIFSFFLFSTCQNFEETICYFTLTSCCIGMSCLLDRGLCVFLVSNKSCKSL

SEQ ID NO: 55441 - protein, 330 aa, Zea Mays
MVAIENQSQAAVAAEAVAAPASRIPREARRLLHELAAAWADVADCRALEVVPLKGAMTNEVYQARWLTAGPAGQKEEPRAEREVRKVLVRIYGDGVDLFFDREDETLSAADLRDPEISALVASKLREFHNLDMPGPKSVLIWDRLRNWLRTAKSLCPPEEAKEFRLDSLENQITALENECSGDYQWIGFCHNDLQYGNIMIDEETNVLTIIDYEYASFNPVAYDIANHFCEMAADYHSSKPHILDYSRYPDVDEQKRFVKTYLNISGEEPDAEVVENLLQSIEKHTLASHLVWGLWGIISDHVNDIDFDYKEYARQRFEQYWHKSAILTS

SEQ ID NO: 55442 - protein, 238 aa, Zea Mays
MDRVHDELLKLNGNGLDSKEGMVVSSSADDAWETVGRKNKSAIVRTHSFVPSELSAIFGGQLQSVVKAAGNKASATVQPFLLLHLDIFPDAVQTLNDALRLFSTPESLEGYRTTAGKAGLVTARKSFKIHALPKIMILHLKRFSYGNNGSTKIYKPLGFTSELVLSRDLLSSPSQEGRKYELVATITHHGRDPYRGHYTAHAKHADGQWLRFDDDAVVPVGENDVLHDQAYVLFYKQV

SEQ ID NO: 55443 - protein, 395 aa, Zea Mays
MTNKHYAGIPKVKKSDRQQKHGDTLQDGSASDVKWGERNRYGDGSFRELHAENAAEVFADDFEGIVGRVVVVRDVGGVAGEEGLAAARLLLVGEGVVGLDGADGGNEGVSRGRGSGDGGGVQGAVGAAPAGGVGQGGSLGEARGVPGRGAGGAMEEVDLRRGGDAADHADAIAVAGEVRHGGGGSGLRVRFRGPSGGMMAEWWGEEVEREAEVGCRSTFTSAKGMDHMTMLGAGAPHQLSRAEPMPDRRSRFWQTDVQPVPRIDIICPLPCRPSRSLLLNRPSPKPNGALPLYGANPTYDIVDLILSKNDPDVDTDSSSQAAFFCGSPPARTNNPVIHDPQFGKKAPSFSPLGSSSGKMAAGRAEVGSPSCRSSSPKMRIEGFACGNKEPPHCFA

SEQ ID NO: 55444 - protein, 816 aa, Zea Mays
MPIGVIFQYIWYQMRSNYDYVCYCCFILVFMWNFSLLSMAYLGALFLYALCVNYGPSYLFWVIILIYTESSITAKDGEWVPVTEFSFLSARNNIEEKHCVAYSWREKLKSLPLPVFDLIRMIVRGLSRYWMSLTHGAESPPYFVQVTMEVSHWPEDGIQPERIESAINRVLAIAHEERCQANLPSSCHCCSKVRIQSIEKSKENCNMALAVLEVVYAAPVECQSKGWHKSLTPAADVEREIHESQKAGFFEEINFPYPIVSVIGGGKREIDLYAYYFGADLAVFFLVAMFYQSILKNKSEFLEVYQLEDQFPKEFVFILMVLFFLIVVDRIIYLWSFATGKVVFYLFNLVLFTYSVTEYAWGTELAHRDIGGLVLRAIYLTKSISLALQALQIRYGIPNKSNLYRQFLTSKVTQVNYLGFRLYRALPFLYELRCVLDWSCTTTSLTMYDWLKLEDIYASLFLVKCDTLLNRANHRQGEKQTKTTKFCSGICLFFVLICVIWAPMLIYSSGNPTNIANPIVDVSVKIDIKALGGRLNLFKTTACEKIPWKYLKAYDDVDPLDYLGAYNVDDIQLICCQPDASTMWLIPPPVQNRFIQSLEEREMLFGKMELILNWDFLRARPKGKELVRYESPIEHCPSVDDVKRVLNGTANSFSIIDAYPRYFRVTGSGEVRRLEAAIDSVSGELLLNNGTPWWSFYDTNPSDLAGCQGLNGPMAIVVSEETPQGIIGETLSKFSIWSLYITFVLAVARFIRLQCSDLRMRIPYENLPSCDRLLDICEGIYAARAEGELEVEEVLYWTLVNIYRSPHMLLEYTKPD

SEQ ID NO: 55445 - protein, 148 aa, Zea Mays
MVRRRVPQSPQACRPLGVPGVQGAPGEGGEQVRGGARHRPRHRLPRPHRGRRAGPDRPHQRPQLPLSSIRRRSRVRRAGRHRERHRVPAAGPRRRRLPRRAVRRRGGRGRGEVRLLRPQHDRRRARAFPGGQVPAVRRQNEPALRRAA

SEQ ID NO: 55446 - protein, 300 aa, Zea Mays
MRSMSGKLLLKLFLLALIGNTFSLNTYNLTLKLTSATVGSALANSVPVFTFCLVLVLRMETVNLRTAAGVAKAAGVALCVAGVLVLAFYAGPAMSPVNHHRAFAAPRQHAASTGGPPSRSRWITGTLLMVLANVTWALWIVLQSALLKEYPNRMLVTATQCVFSMMQSFVVAVVAERGDMSKWKLRCDITLVAVLYVGFVVTGLSHYLQAWCMELKGPVFLAMTNPLCFVFTIFSSSFFLGEIVHLGSILGGALLVAGLYSVHWGKLKEDRRSEAAEQEKTKPQEEPAAVAGVPSVLDQA

SEQ ID NO: 55447 - protein, 786 aa, Zea Mays
MCYVVSMCFTSLVYLLMWLHRCCLSVSAGMPRYPAPYPMVRPGFVPRPMPPPGVVTIQRPPIISGIRAIPPLVALTARPPPPAVMLADKPPTAVYVGKIAPTVDNGFLLSLLQLCGPVKSWKRAEDPSNGKPKGFGFCEFESAEGILRATRLLNKLSLDGQELVININDATKEYLKKHVEEKKRAQVKSKDASGDGTTAVAENESSKSVPDESDKETGDAGDKDSDESTKKFGIVTDEDSQADKDVAEKISSMIEQWLKTRPPPPPPPVQPSADSSGVDKAKNDSADKTDADTVKRAVNETERSETASPDRRKDREHDKDKRDKDIERHDRERERERIRRDREKDHKHREVDRLYRDRLKEWESREREKEYQRYSEKEKEKDREHNRRREILKQEDESDEEDNRKRKRRSSSSLEDRKRRRQREKEEDLADKIREEEEIAEARRRAVELQQQADEAAAAAAAAAEESATLMEVDADDEKETDAQNEPSVVEADNIPSFANSVGAGGLGKENNSEEISMVPSHTKQNNNVPVKKLGFGLIGLGKRTSVPSVFAEEDDENNVDKSIRPLVPIDYNEELQAVQANSSTGANVAAAAEFAKRISVSNSKEEKADTEKDRNRRSSEGRPSDERREKLHDREKDKSKSENKKILDAKQLIDMIPRTKEELFAYDINWVIYDKNELHERMRPWISKKIIEFLGEEESTLVDYIVSCTKDHVQAEKMLELLQSILDVEAEMFVLKMWRMLIFEIKKVESGLSGRANSHASTAYSCSLVNDEECRRLAVVASINP

SEQ ID NO: 55448 - protein, 503 aa, Zea Mays
MVVTHVEGRSYLPAEVRNGLETLKRRRLERVRLSAQNEAGDNPAVAARSGGDALRSPANCGVRLHSNNSTGLPGNVHDKSPFAKRKVEKFDMSNLEWIDKIPECPVYCPTKEEFEDPIAYIQKISPEAAKYGICKIVSPVCASVPAGVVLMKEHPNFKFMTRVQPLRLAEWAEDDTVTFFMSGRKYTFRDYEKMANKVFSKKYSSSSCLPARYVEEEFWREIAFGKMDFVEYACDVDGSAFSSSPHDQLGKSNWNLKNFSWLPNSVLRLLQTPIPGVTDPMLYIGMLFSMFAWHVEDHYLYSINYHHCGAFKTWYGIPGDAAPGFERVASQYVYNKDILIGDGEDAAFDVLLGKTTMFPPNVLLDHNVPVYKAVQRPGEFVITFPRSYHAGFSHGFNCGEAVNFAIGDWFPLGSLASKRYALLNRTPLLAHEELLCRSAVLLSQKLLNCDPRSLDKLEHPYSQNCVKSCFVRLIRFQRRARGLLAKMGSEICYKPKTFPKSVL

SEQ ID NO: 55449 - protein, 592 aa, Zea Mays
MRQQTGKRPSQHREYEREERKDQHKRPFPRAQESSNNDGLVLYRILCPDSLIGSVIGKHGNVINAIRHQTSAKVKVVDPYPGADKRVILVYCYVKHRDLDAEGDDNEPVCAAQDALLRVHNAIVDALQTLHKNHKDSDKKSTEEANILVPASQASNVIGKSGAVIKHLRSTSRAFIKVSPKDPSDPTHSCAMSFDNFVQITGGAEAVKKALFGVSTIIYKHPSKENIPLETSIPDPTPSIIIPSELPVYPASNFYSAPDAAIPSVHPSMSVLGSTRHVPELAVPADDHGRLPIYQSILPVIPTYSAPKCSGELEFRVLCPGGKIGLVIGRGGATIKNIRQESGARIDVDDAKNDKEESIITIISTESTDDVKSAAVEAVLLLQAKINDSEDDRMNLRLLVPNKVIGCLIGRGGSIVNDMRKKTKANILISKGDKPRRASSSDELVEVSGEADKLRDALVQIILRLREAVLKESVESQNSDRDGQLTVAASDSLYGSSLPLPALLPHNQQIAPLGYDRRGEPERALEVFPRTSSYGYSSMQVTDDGYGGLPSYASKAYEEHVPRLEMTVPASGISKVMGKHGTNLDNIRKSVR

SEQ ID NO: 55450 - protein, 78 aa, Zea Mays
MMRRGPDGPRTLCNACGLMWANKGLLRDVTKSPVPLQATQSAPHLDGGNGSAMSAPGSELENAAAAMTNGHESSSSGV

SEQ ID NO: 55451 - protein, 128 aa, Zea Mays
MRWRCHDRAAARVQKYSRPGTVHLQLFVPVLVVIPFSPLPSLVAYSWTPPPFLSSRCCCWLLACCLPRLRPLVASTSTSSVTERERERERERERGRERGNPETATKCEAEEEHGGAAVEVPGRLRPPD

SEQ ID NO: 55452 - protein, 476 aa, Zea Mays
MAGAVVNCVNIRLNAATVAFLLEHSSAEVVMVDQEFFTLAEDSLRIIADKKKGTFEQPLLIVIGDATCDPTTLQDALRKGAIDYEAFLESGDPEFAWRPPQDEWKSIALGYTSGTTSNPKGVVLHHRGAYLMSLSGALIWGMNEGAVYLWTLPMFHCNGWCYTWTLAALCGTSICLRQVSAKAIFSAIANEGVTHFCGAPVVLNTIINAPPADTILPLPRVVNVMTAGAAPPPSVLAAMSKLGFRITHTYGLSETYGPSTVCAWKPEWDRLPADERARLHARQGVRYVGLEGLDVVDPKTMTPVPADGTTMGEIVMRGNGVMKGYLKNPEANAEAFENGWFHSGDLGVRHGDGYVEVRDRAKDIIISGGENISSLEVEKAVYLHPAVLEASVVARADERWGESPCAFVTLKDAVDRSDEAALARDIMRFCREKLPGYWVPKSVVFGPLPKTATGKIKKHELRAKAKELGPVGKSRM

SEQ ID NO: 55453 - protein, 173 aa, Zea Mays
MVVLSGAHTVGRSFCASFFKRVWNTSTNPATAIVDAGLSPSYAQLLRALCPSNTTQTTPITTAMDPGTPNVLDNNYYKLLPRGMGLFFSDNQLRVNPQMAALVSSFASNETLWKEKFAAAMVKMGRIQVQTGTCGEVRLNCGVVNPSSYSSSSAVELGSSAPAAVGEEGYAAS

SEQ ID NO: 55454 - protein, 480 aa, Zea Mays
MAAEGAGGRGRAMRYPPLSALVVSAIAAFSAVIVLAVVHSAYDDAMSRTRTLLGHNLEPTPWHPFPHDKGRPPARAALRCAPSIACLPPLSSSSSSPQPQGNKKKKQKQCPAYFAAIHRDLAPWRGQGRGVTRALLDEARRRASMRVTITGGGRRLHVDLYYACVQSRALFTVWSLLQLMRRYPGRVPDVDLMFDCMDRPAINRTEHGDGALPPPPLFRYCTTRDHFDIPFPDWSFWGWPETNIEPWNHEFKNIRAGARATRWADRVPTAYWKGNPDVASPLREALLGCNDTALWRAEIMRQNWDDEARSGYQHSRLSAQCTHRYKIYAEGFAWSVSLKYILSCGSMALLIEPRYQDFFSRGLEPRVNYWPVAALGMCESIRDAVDWGNANPDEAERVGRRGQRLVQDLRMHAVYDYMLHLLTEYARLLIDQDHGLSPPPHAQEACEASLLCLADDKQRRFLHASKADPAPGDPCVLPPP

SEQ ID NO: 55455 - protein, 132 aa, Zea Mays
MAAPNSNDAASASGTGPAGEEDISIEALARRVQEHMTLSSNPAARRHKFWETQPVGQFRDVADTSLPDGPIEPPTPLSEKNYDVFNALDVMENESFLKELKFGPGDGQLHYYLYNYRIRNGIKPSELGLVLL

SEQ ID NO: 55456 - protein, 324 aa, Zea Mays
MPLGMLVCSNVAIVTVALTAQWPWAADIIAVCTSLLDTLPAVTTPTERADDDDEMPMDVNIKINLDVDLERQITAAIDSKLLQHLVNALFRGTLSTNDSDLSGPSDAEVDAVGSICAFLHVTFNTFPLERIMTVLAYRTEIVPALWKFIKRCHASRRWPFFLKFASSLPADSPGWLLPMSVFCPIYKHMLKIIDTGEFYEQEKPLSLKDLKSLVLILKQALWQLLWVIPSSSTQKVSPNPSGLKKLSVENVKTRARVGLSELLTQLQDWNSRLPFTAASDFYSQEATSENFVSQAILGNTRASEIIKLAPFLAPFTSRVKIFTC

SEQ ID NO: 55457 - protein, 382 aa, Zea Mays
MLTSVFFFSLSPLHGIPYGLKDIIAVPHYKTTWGSRTFKNQVLDSEAYVYRRLKSAGAVLVAKLVTGSLAYDDIWFGGRTRNPWNIEEFSTGSSAGPAASTSAETAGSIAYPAARCGVTALRPTFGTVARTDVMSISESLDKLGPFCRSAVDCAVVLDTIRGTDAGDPSSREVALGDPFHVDITKLTVGYLDDAEMEVVDVLSSKGVKLVPFKLNYTVESVQSILNITMDTDMLAHFDNWQREGHDDDYEAQDQWPVELRRARLIPAVDYIQAQRARGKLIREIKDSFTVDAFVGNVTDWERVCLGNLVGMPVVVVPTGLKSIENPPKGGTKRRTTVTTGIYAPPDHDHIALALAMAYQSVTDHNKQRPPIDDLGPNDVIQR

SEQ ID NO: 55458 - protein, 292 aa, Zea Mays
MTQQATRHARRVYVGGLPPTANEQTVAIFFNGVMAAIGGNTAGPGDAVLNVYINHDKKFAFVEMRSVEEASNAMVLDGIMFEGAPVKIRRPTDYNPSLAAALGPSQPNPNLNLSAVGLTPGSAGGLEGPDRIFVGGLQYYFTEAQVRELLESFGPLRGFDLVKDRETGNSKGYAFCVYQDLNVTDIACAALNGIKMGDKTLTVRRANQGASQPRPEQESILLQAQQQVQMQKFVYQVGGALPTKVVCLTQVVTEDELRDDEEYDDIVEDMREEGHKYGKPHETHRLLLPSLF

SEQ ID NO: 55459 - protein, 199 aa, Zea Mays
MGFDIAMEEHSWSHVGFIFFSIIFIVVARAANVFSCAYLVNMSRPEHRRIPVKHQKALWFSGLRGAMAFALALQSVHELPEGHGKTIFTTTTAIVVLTVLLIGGSTGTMLESLDVVGDENTSRENYEDNNGYMPPSYEEGTSSGGGLRMKLKQFHKSTTSFTALDKNYLTPFFTSQTDDDNDDDFSQQPQNRRLAFYDQ

SEQ ID NO: 55460 - protein, 322 aa, Zea Mays
MTCAAYSIRGPLMLAARRSSDVFASSKSCNGKSSVSYPVIQWWSSNCSSFTMRHVASHHHLIVKASATWHSKASATDAATASDERITVLVIGGGGREHALCYALNRSPSCAAVLCAPGNAGIAQSGDATCISDLDISSSDDVISFCRKREVGMVVVGPEAPLVAGLVNDLVKVGIPTFGPSSEAAALEGSKDFMKKLCDKYNIPTAKYRTFTDAVEAKKYVKNEGAPIVVKADGLAAGKGVVVAMTLDEAFEAIDSMLVEGSFGSAGSLVIIEEFLEGEEASFFALVDGTNALPLESAQDHKRVGDGDVGPNTGGMGAYSPA

SEQ ID NO: 55461 - protein, 225 aa, Zea Mays
MAHAAAAAAVPLRRPLLFLKEARLLSTLATPLPGLRHPRALRPTGPLPSDAEDTDDPDAGDGAAVSFKKSRNELKREARRAVKWGMDLAKFSPPQIKRILSAASLEREVFDALMLVKKFGPDVREGRRRQFNYIGSLLRDAQPELMDTLIQASKDGDERKLYTLLSEGKLLVEEEEEEEEDLPDGEEENQEYMKIADRWFDGLLCKDISVTNEVYSVHSVEFDRQ

SEQ ID NO: 55462 - protein, 355 aa, Zea Mays
MDAAAKEALILDLHAVEAVKLGTFVLKSGITSPIYLDLRVLVSHPRLLASVASLLGALPATRPYDLLCGVPYTALPFAAALSVAASVPMLLSRYDTKRVEGAFRAAQTVLIVEDLVTSGASVLETVAPLRAEGLVVADAVVVIDREQGGRENLAASGVALHSLMTLTEMLAVLARHGKVGEEKIAEVRRFLQANRKVAVPGVPAGPPKPSATARRKSFAERAGLATNPMGRRLFEVMEAKQSNLCVAADVGTAKELLELADKVGPEICMLKTHVDILSDFTPDFGANLRTIAGKHNFLIFEDRKFADIGNTVTMQSEGGIFRILDWADIINAHIVPGPGIVDGLKLKSLLSSGIE

SEQ ID NO: 55463 - protein, 89 aa, Zea Mays
MLALSTCAYLPIPSRPAPTKARRRRRYERAEREKARSGRRGGGGPCCGVCLLLRLLADSLASAAPQSGCVGVRCRGPWGGGSGKPRPRG

SEQ ID NO: 55464 - protein, 187 aa, Zea Mays
MPNLPSSHGGTGGFQALGFRVGERGTGHPGEGRYKVLHLLQGVDPLGDAAASDSVCDRRRFRHVQRVLPVQDVCLRQRHSTGPSAGRRGAVLGTGGRGGEGVVRGAFFLEAGARPGDAVLPVCAAEAEAFRAAVGTGARQACVHLLFQAEAVVELCGDALHRECCMYSPFEFYSDMAWFGGAGAWVG

SEQ ID NO: 55465 - protein, 72 aa, Zea Mays
MLSLGLFVLSSFHPSVLVGSISGHHCVCHLHQERRSALGLCEKHRKKANSYGSDVYYFGICTWRSSSARVHW

SEQ ID NO: 55466 - protein, 107 aa, Zea Mays
MKFLVGHPWVVFYTECPLKVVAANLCLPNKVIAPKIPWDRHKSECDSVSDASQRSEDQDECGIVDALAAAITRVRISEPKRSRLCSPAITIQQECSSNLKNNLCTAF

SEQ ID NO: 55467 - protein, 106 aa, Zea Mays
MSYPLQYQGEDGWKPKNYTGLCEKILAKSQTVAGFFLVQYAHLWQDHLNKLFDLYASGKLKVSLDPKQFLGVASVVDAVEYLHSGKSVGKVVVCIDPSYGQIVAKL

SEQ ID NO: 55468 - protein, 75 aa, Zea Mays
MVLNSPPNRTGARVVMFLDQGRQNFEQQRREHPDVVTSDLPSIAFLEKAASGNKYEITEFVDEPSFYLAVLQFQG

SEQ ID NO: 55469 - protein, 704 aa, Zea Mays
MRCHAPGLLVRLGNGDGCNGRGRSGGDRAPVRSPGLDSIGRGRGSFGLGKFEDMPALYAYYGDGGCLVSAPAELAGLFCRGAVQQRKRTLVTASAVAAAAAEFVRAAKKQRQLPLPSLDALPDECLFEILRRVPGGRGRGASACVSRRWLALLGSIRASELGQAAAAAADTPSLPDLNEEFVMEEDNEESPADRCVDRVLEGKEATDVRLAAMAVVAGSRGGLEKLAVRGSHPTRGVTDQGLSAVARGSPNLSSLALWDVPLITDAGLAEIAAGCPSLERLDICRCPLITDKGLVAVAQGCPNLVSLTIEACPGVANEGLRAIGRSCVKLQAVNIKNCPLVGDQGISSLVCSATAALTKIRLQGLNITDASLAVIGYYGKAITDLTLTRLAAVGERGFWVMANAAGLQNLRCMSVTSCPGVTDLALASIAKFCPNLKQLYLRKCGYVSDAGLKAFTESAKVFENLHLEECNRVSLVGILAFLLNCREKFRALSLVKCMGIKDICSAPAQLPLCRSLRFLTIKDCPGFTDASLAAVGMICPQLEQVDLSGLGEVTDNGLLPLIQSSEAGLVKVDLSGCKNITDVAVSSLVKGHGKSLKKINLEGCSKITDAILFTMSESCTELAELNLSNCMVSDYGVAILASARHLKLRVLSLSGCSKVTQKSVLFLGNLGQSIEGLNLQFCDMIGNHNIASLEKKLWWCDILA

SEQ ID NO: 55470 - protein, 564 aa, Zea Mays
MRGYVYETNEVEDEYGDEYYDQDEYEEEGSGAGDGYAEEEEPTEGQKEILELRERLKEQIRRKAKAAAACTAGRSSSSQIPQARDKFGSFFGPSKPVISRRVIEERKSLKELHSTVAREPRPSGVHKDIPSSSKVQSRVNGHQHKQKIVNQVKKKAEALKDNRDYSFLLSDDADLSSSPKEKPAARSSLTQRADREVTQSTVKRKAPTSQPARLSNGYGPKNTMSTQRHAEGKVNSMRREDFSNTERVVSRDNERMYERVVSRDNERMHSIARNGSNQASTSKTTIQKHPSRGPIANKQPSKDSNDATLRKSSVASKHHPLEIDRPKSSQSQRMQSAGQRPQHSSHGQTPHQSMQHRTQQSLQSRRPQQMTQGQKPQQSLQSQRTQQSLQNRRPQQSSHIQKSQSSQAHRPQSLSNRSQALQGQRPLSSQGQYPEQRRVHASDRVKQAERQIRPPSKSMPSRPVSSNGIRDDHAKRKQVAKRRFDEDDEDPLAMIRNMFGYDPSRYAGRDEDVSDMEADFATIEMEEKRSARIARQEDEEQLRLIEEEERREQERKRRKMARGR

SEQ ID NO: 55471 - protein, 111 aa, Zea Mays
MRPWGTRGHSRPTTRVLCTAAGSVQREGKELLVQHLLVGEKDVRLLVDLEKNIIAGGVDLSDLAVEHSLCPSKANGGMLGGFEGDRWYNINFVAMMMCFHMLACVLFSLIY

SEQ ID NO: 55472 - protein, 671 aa, Zea Mays
MARRRRPLPPPLLVWLAVLFSAVAPAVAKTDKSDVAALNVMFNSMNKPSQLSGWKSSGGDPCDDDDEWKGIECSGSSVTEINLSGLELSGSLGYQLSSLKSVTKFDLSNNNLNGDLPYQLPPNVVELNLYGNSLTGGVPYSISQMGDLETLNLGKNHLSGQLTDMFSELPKLSTLDLSFNRFSGSLPKSFQHLKDLKTLNVESNQFSGHIDVLAKLPLEDLNLQNNKFTGWIPSKLKDISNLQIGGNQWSSGSAPPGMEKGSALEGSSGGGGRSGVNGIAIAAVVIAVLVAALILLSVLKRNRSSSSSHYLMDESAINMKPLEHSSSISSTTPSAMPIKPISDNEFENKLNYSRRSTDPVNLVAYSSSDLQAATGSFHSSRLLGQGTIGGVYKAKYADGTVLAVKKFDPLSFSGSSDFMDLVNSISKLHHPNISVLVGYCSEPGHYMLVYDYNMNGSLYDFLHLSDDYSKPLTWDTRVRIAVGTACALEYLHDACSPPVIHKNIKASNVLLDADLNPHLTDCGLAYFYEDPSQSLGPGYDPPECTRPSGYVMKSDVYCFGVVMLQLLTGRKPYDSSKPRAEQSLVKFVGPQLHDTNALEALADPGLRGLYPPKALSRFADVLSRCVQSDPELRPSMSEVVQLLLQCVQRTTSNRRLGGHRTVSQRSDDSDW

SEQ ID NO: 55473 - protein, 410 aa, Zea Mays
MHSIQAKSSFAHHGVKFSNLEVDLPAMMAQKDKAVAGLTKGIEGLFKKNKVTYVKGFGKLSSPSEVSVDLIDGGSTVVKGKNIIIATGSDVKSLPGITIDEKKVVSSTGALCLSEIPKKLVVIGAGYIGLEMGSVWNRLGSEVTVVEFAPDIVPSMDGEVRKQFQRMLEKQKFKFMLKTKVVGCDTSGDGVKLTLEPAAGGEQNILEADVVLVSAGRTPFTSGIGLETLGVETDKAGRILVDKRFMTNVKGVYAIGDAIPGPMLAHKAEEDGVACVEFIAGKEGHVDYDTVPGVVYTHPEVASVGKTEEQVTALGIPYRVGKFPLLANSRAKAIDDAEGVVKVIAEKETDKILGVHIMAPNAGEIIHEAVIALQYGASSEDVARTCHAHPTVSEALKEACLQTFDKAIHI

SEQ ID NO: 55474 - protein, 1136 aa, Zea Mays
MGGEAEPDNAVLFVGVSLVLGIASRHLLRGTRVPYTVALLVLGVALGSLEYGTQHGLGKLGAGIRIWANINPDLLLAVFLPALLFESSFSMEVHQIKRCMAQMVLLAGPGVLISTVLLGVAVKLTFPYNWSWKTSLLLGGLLSATDPVAVVALLKELGASKKLSTIIEGESLMNDGTAIVAYQLFYRMVLGRTFDAGSIIKFLSEVSLGAVALGLAFGIMSILWLGFIFNDTIIEIALTLAVSYIAFFTAQDSLEVSGVLTVMTLGMFYAAFAKTAFKGESQQSLHHFWEMVAYIANTLIFILSGVVIADGVLQNNGHFERHGSSWGFLLLLYVFVQISRVIVVGVLYPMLRHFGYGLDLKEAMILVWSGLRGAVALSLSLSVKRTSDSVQPYLKPEVGTMFVFFTGGIVFLTLIFNGSTTQFLLHILGMDKLLPTKLRILKYTRYEMLKKALEAFGELRDDEELGPADWVTVKKYITCLNDLDYEPEHPHDVGDEDDCMHIMNLTDIRVRLLNGVQAAYWGMLEEGRITQVTANILMRSVDEAMDLVSGQTLCDWKGLKSNVQFPNYYRFLQRSRLPRKLVTYFTVERLESGCYICAAFLRAHRIARRQLHDFLGDSEVARTVIDESNAEGEEARKFLEDVRVTFPQVLRVLKTRQVTYSVLTHLSEYIQNLQKTGLLEEKEMVHLDDALQTDLKKLQRNPPIVKMPRVSDLLNTHPLVGALPAAVRDTLLSNTKETLRGQGTTLYREGSRPTGIWLVSIGVVKWTSQRLSRRHSLDPILSHGSTLGLYEVLIGKPYICDMTTDSMVQCFFIETEKIEELLHSDPSIEIFLWQESALVLARLLVPHRFEKMGMHEMRVLVAERSTMNIYIKGEDLEVEQNCIGILLEGFLKIENLTLITPPALLLPWNADLSLFGLESSDYCHTARRYQVEARARIIFFDEAEAAHLHVQTSASLPQGEPARSMSKEHSGLLSWPESFRRSRGSLGLAAEMLPGGLSSRALQLSMYGGSVVSLSSGQQGHRRQRPRHRVQAATTMTNQKKHSSSYPRMPSISKERHLLSVQSEGSNMKRVAALPEVAATAPAPAGAAQGQRRAMNLQEEYNSSEDSAGEEVIVRVDSPSMLSFRESTAVPPPQEQ

SEQ ID NO: 55475 - protein, 315 aa, Zea Mays
MGFGAHRKWRESGLRSRLLPPVPVAAPLPPLVLPCLAFVRLLLVGGSKVADPRPARVVDLSPVGDRSRASSKKNRRRHKKADAASSISPMQRLFDTSREVFANSYPGFVPPPDAVARLSGLLNELKPRDVRVAPSMSVFKHADPTSPPPVTYLHFYGSSEFSFGIFCLPKSAIIPLHNHPGMTVFSKILFGSMHLKSYDWAKSLPAGSNDNALENSDGAGARLAKVNTDAVFDASSETVVLYPENGGNLHCFTALTPCAVLDVMGPPYNRAQGRDCAYYSESPYSCAGDAQYSWLKEVHSTFEMEGIKMEPNFIV

SEQ ID NO: 55476 - protein, 307 aa, Zea Mays
MAPEVLKRNYGPEVDVWSAGVILYILLCGVPPFWAETEQGVAQAIIRSVVDFKREPWPRVSEPAKDLVRRMLDPNPLTRFTAAQVLEHPWLHDSKNTPDVSLGDTVRARLQQFAAMNKLKKKALRVIAEHLSAEEVADIKQMFDKMDVNKNGKLTFEEFKAGLRKLGNQMHDSDLQILMDAADVDRNGTLDYEEFVTVSVHVRKIGNDEHIQKAFAYFDRNKSGYIEIEELREALADELDGSDEDIIGGIIRDVDTDKDGKIGYDEFAAMMKAGTDWRKASRQYSRQRFSNLSLKLQKDGSLGADTR

SEQ ID NO: 55477 - protein, 92 aa, Zea Mays
MEGRDLKRAAVTNAPRANAELMLSLLGLTDFFPVLVIGSECDRAKPFPDPYLKALQLIGASPQHTFIFEVRMKLSLSHRNSVKKLCCLFHRR

SEQ ID NO: 55478 - protein, 923 aa, Zea Mays
MVVPLGVVQRVAEAILVPSLYEKNGFSRVILKALKGLALFHQRVIALPLPHRPLFPGFYMPIYVKDQKLLQALIENRKRSAPYAGAFLVKDEEGTDPNIVTGSDSEKSIGDLKGKDLLKRLHEVGTLAQITSIQGDQVVLLGHRRLQITEMVEEDPLTVKVDHLKEKPYNKDDDVIKATSFEVISTLREVLRTSSLWKDHVQTYTQHIGDFNYQRLADFGAAISGANKLLCQEVLEELDVYKRLKFTLELVKKEMEISKLQQSIAKAIEEKISGDQRRYLLNEQLKAIKKELGLETDDKTALSAKFRERIESKKDRCPSHVLQVIEEELTKLQLLEASSSEFSVTRNYLDWLTVLPWGNYSDENFDVHRAQKILDEDHYGLSDVKERILEFIAVGKLRGTSQGKIICLSGPPGVGKTSIGRSIARALNRQFYRFSVGGLADVAEIKGHRRTYVGAMPGKMVQCLKSVGTANPLVLIDEIDKLGKGHSGDPASALLELLDPEQNVNFLDHYLDVPIDLSKVLFVCTANVIETIPNPLLDRMEIIAIAGYITDEKMHIARDYLEKNTRQACGIKPEQVEVTDAALLALIENYCREAGVRNLQKHIEKIYRKIALQLVRQGVSNEPDQESLGVTVNEESNSGDSITAKDEIVKDPAVEDASVANNVTNPASEEANEVNLTTEAPKEDSTSKGNKKTDGVAEDAADKATEKVVVDSSNLGDFVGKPVFQAERIYEQTPVGVVMGLAWTAMGGSTLYIETTKVEEREGKGDLVLTGQLGDVMKESAQIAHTVGRTVLLEKEPDNHFFANSKVHLHVPAGSTPKDGPSAGCTMITSMLSLAMGKPVKKDLAMTGEVTLTGRILPIGGVKEKTIAARRSAIKTLIFPAANKRDFDELASNVKEGLEVHFVDTYSEIYDLAFQSDAGTEMI

SEQ ID NO: 55479 - protein, 135 aa, Zea Mays
MSVLGQIIPPTINSSMSVLLRLLQGCTEEYKDIWMGVVHVEDVALAHLLVFENPSASGRHICAESISHLSDFAAKLAELYPNNKVPKFPKDTQPGLVRAEAGVASKKLVELGLQFSPLEKIIRDAVESLKTKGCN

SEQ ID NO: 55480 - protein, 365 aa, Zea Mays
MEAIRKQASKFREQVARQQQAVMKQFGGGYGADGVFANEAEAQQHSKLEKLYISTRAAKHFQRDIVRGVEGYIVTGSKQVEIGNKLCEDGKKYGTENTCSSGSTLSKAALSFAKARSMMEKERGNLLKALGTQVAEPLRAMVMGAPLEDARHLAQRYDRMRQEAEAQAIEVSKRQMKLREASGNSDMVSRLEAAESKLQELKSNMGVLGKEAVAAMTAVEAQQQRLTLQRLIALVESERNYHQKVLQILDQLEREMVSERQRIEGAPPVVESSMPPPPAYEEVNGIFMRNTVAELVETVEYFLAESYQAESDTELNLSTGDYIVVRKVSNNGWAEGECRGKAGWFPYDYIEKRERVLASKVAQVF

SEQ ID NO: 55481 - protein, 308 aa, Zea Mays
MLAALEMLKVSVKEDNGNESSVTVRLYGPNTDLVIDRKRELQAIPYLSAAGFGARLLGIFENGVVQSFIYARTLSPADMKEPKIAAEIAKELRKFHQVDIPGSKEPQLWNDIFKFLKKAAALKFEDNMKQKRYEKISFREIQDEVQELKDLLDILRAPVVYAHNDLLSGNLMLNDLEGKLYFIDFEYGSYSYRGYDIANHFNEYAGFDCDYNLYPDKDAQYHFFRNYLHTDRPSEVDAQDMEVLYVETNTFRLASHIYWALWALIQAKVSPIDFDYLGYFFLRYGEYKKQRESCFSLAQSFLSELKNG

SEQ ID NO: 55482 - protein, 506 aa, Zea Mays
MVMIGTWNVAGRVPSDDLRLDEWLCTQEPADLYVLGFQEVVPLSAGNVLGAEDSRPIRKWEALIRQTLNSSQQTRTICKSYSAPLSPLLRPVASGDGKSKPEDRVTGSLTQLRDWQTSKSELHCSWFDGTSSLDWPEYPLDTPSKVLVSGTGLRRVMSLGLFSSNFVGNPRGLELQDVDLHAGMRRQYHSSGNLSMLWSEQQEKLDVLNSLDRLSDLASEEDSTFEDTVEGCATLGKRESSVHRANYVRIVSKQMVGIHVSVWVSRKLRRHVNNLEVSPVGVGLLGYMGNKGSISISMSLFQTRLCFVCSHLASGHKSGDQQKRNADVYEILQRTRFSSLFAAGRPQKIPSHDRIFWFGDLNYRIDLPDSEVRYLVGMKKWDDLLKSDQLTKELVSGNTFVGWKEGLINFPPTYKYERNTTRYVGELHNEEEKKRSPAWCDRVLWFGKGTKQLSYWSSGLNLSDHRPVSAVFLVEVEVFNQQKLERVLNFNPGFVSNGDYYMMADP

SEQ ID NO: 55483 - protein, 99 aa, Zea Mays
MQIESAGQVFRVLYEPIKKRDTLLREEIDYSGLSSNFLSPSMIAALTVLYMDKHQNTACRNLVVESEAKKSLVLPTWSGFHACCSCTTGVTRQQATGYV

SEQ ID NO: 55484 - protein, 169 aa, Zea Mays
MNPVDGTEEPADVCVIELGGTIGDIESMPFIEALGQFSYRVGPGNFCLVHVSLVPVLNVVGEQKTKPTQHSVRGLRGLGLMPDILACRSTQPLEEHVKVKLAQFCHVPISNIINLRDVTNIWHIPLLLRDQKAHEAILKVLDIQCVGKVAREPQLSEWTERASRCDRLK

SEQ ID NO: 55485 - protein, 94 aa, Zea Mays
MAAPKKTMRALRYDKYGGGAEGLKHVEVPVPSPSKGEVLLKLEAASINPIDWKIQKGMVRPFLPRKFPFIPVGDMSGEVVELGSGVTDFKPAAT

SEQ ID NO: 55486 - protein, 457 aa, Zea Mays
MASYRPYAPPPPQGSYPPQMNPYAPPQAPYNRMPAPPYHAGPPPPPPPGPPPPHQPQFNFGPGPPQQHPPPPMYYQPPPPPYGGNSNPPPPPPSAPPPPPSPPPAAPPPPPPAQAPSAQALLPSKEQQPKATLPREETEEERRARKKREFEKQRVEERKQQQMMRQTQATILQKTQQVRASQQQPQSRHHHHQPPSIFRAAAIGSRAVATGSRPASAPNAERFENRLKKPTTFLCKHKFRNELPDPSAQLKWLPLNKDKDRYTKYRITSLEKNYIPKMIVPEDLGIPLDLLDMSVYNPRDVQSRMAPEDEELLRDDEVLTPIKQEGTRKRERPTDKGVSWLVKTQYISPLSTDATKMSLTEKQAKERRETREGRNAFLDNLNDREKQIKAIEESFRAAKSRPVHQTKRGMQAEYEEPFVMVNFDGDPTADSEQYNKLERPVRDECESRCCRDLHVFH

SEQ ID NO: 55487 - protein, 1609 aa, Zea Mays
MNDSTVEANVQSLCDGGLLMQLDGNSHVIYAEEEAGGTRLQINGKTCLLQNDHDPSKLLAETPCKLLRFLVADGAHVGADVPYAEVEVMKMCMPLLSPASGVIHCMMSEGQALQAGDLIARLDLDDPSAVKRAEPFDGMFPLMDLPVAASSQVHKRYAASLNAARMVLAGYEHNINEVVQDLVCCLDNPELPFLQWDELMSVLATRLPRNLKSELEDKYKEYKLNFYHGKNKDFPSKLLRDIVEENLAYGSEKEKATNERLVEPLMNLLKSYEGGRESHAHFVVKSLFEEYLTVEELFSDGIQSDVIETLRHQHSKDLQKVVDIVLSHQGVRNKAKLVTALMEKLVYPNPGAYRDLLVRFSSLNHKRYYKLALKASELLEQTKLSELCSSIARSLSDLGMHKGEMTIKDSMEDLVSAPLPVEDALISLFDYSDPTVQQKVIVTYISRLYQPHLVKDSIQMKFKESGAIVFWEFSEGHVDTRNGQGAILGGKRWGAMVVLRSLESASTAIMAALKDSVQYNNSEVNTMHIVLLNAETESNISGTSDDQAQHRMEKLTKILKDSSVASDLQAAGLKVISCIVQRDAGRMPMRHTFLWFDEKNCYEEEHILRHVEPPLSALLELGKLKVKGYNEMKYTPSRDRQWHIYTLRNTENPKMLHRVFFRTIVRQPNAGNKFTSAQVSDTGLGCPEESLSFTSNSILRSLMTAIEELELHAIRTGHSHMFLCILKEQKLLDLVPFSGSTIVDVGQDEATACSLLRSMALKIHELVGARMHHLSVCQWEVKLKLDCDGPASGTWRVVTTNVTSHTCTIDIYREVEDTESQKLLYHSATSSAGPMHGVALNNPYQPLSVIDLKRCSARNNRTTYCYDFPLAFETALQKSWQSNCSSVPEGSENSKSYVKSTELVFAEKHGSWGTPIIPMERPAGLNDIGMVAWILEMSTPEFPNGRQIIVVANDITFRAGSFGPREDAFFEAVTNLACERKLPLIYLAANSGARIGIADEVKSCFRVGWSDERSPERGFQYIYLTEEDYARISSSVIAHKLQLDNGEIRWIIDSVVGKEDGLGVENIHGSAAIASAYSRAYEETFTLTFVTGRTVGIGAYLARLGIRCIQRLDQPIILTGFSALNKLLGREVYSSHMQLGGPKIMATNGVVHLTVSDDLEGVSNILRWLSYVPANIGGPLPITKPLDPPDRPVAYIPENTCDPRAAIRGVDDSQGKWLGGMFDKDSFVETFEGWAKTVVTGRAKLGGIPVGVIAVETQTMMQLIPADPGQLDSHERSVPRAGQVWFPDSATKTAQALLDFNREGLPLFILANWRGFSGGQRDLFEGILQAGSAIVENLRTYNQPAFVYIPMAGELRGGAWVVIDSKINPDRIECYAERTAKGNVLEPQGLIEIKFRSEELQDCMGRLDPELINLKAKLQDAKHGNGSLPDIESLQKSIEARTKQLLPLYTQIAVRFAELHDTSLRMAAKGVIKKVVDWEESRSFFYKRLRRRISEDLLAKEIRRIIGDNFTHQSAMELINEWYLASQATTGSTAGWDDDDAFVAWKDSPENYKGYIQELRAQKVSQSLSDLADSSSDLQAFSQGLSTLLDKMDPSQRVKFVQEVKKVLG

SEQ ID NO: 55488 - protein, 704 aa, Zea Mays
MSTMGLYESAYWLSWFTWEAFLTTLSALFTVLFGMMFQFDFFLHNNFGILFLLFFLFQLNMLSFAFMISTFVAKAASATTVGFAIFIIGFLTQLVTTFGFPYSSDYKKLYRTLWSLFPPDLFAKALNILGKATATPEDKGFSWNQRGECPSFETDCVITIDDIYKWLISTFFLWFVLAIYFDNILPNVNGVRKSVFYFLMPSYWTGKGGKMEEGGLFSFFGSSRPADDATPTDEDVLAEQNLVKEQAANNAVDPNVAVQIHGLRKTYPGTFSIGCCCKCSKSKPFHSVKGLWVNLEKDQLFCLLGPNGAGKTTTISCLTGITPITGGDAFIYGHSVRSTVGMSNIRRMIGVCPQFDILWDALTAKEHMELFASIKGLHPAAITSVAEESLAKVKLSQVTNARAGSYSGGMKRRLSVAIALIGDPKLVFLDEPTTGMDPITRRHVWDIIEEAKKGRAIVLTTHSMEEADILGDRIAIMAKGKLRCIGTSIRLKSKFGTGYIANVNFSGNGHMQSPNINSNTEAPVNPNIEAVKWFFKERLDVNPKEESRTFLTFVIPHHKEPLLTRFFGELQDREGEFGISDIQLGLTTLEEVFLNIAKQAELETSTAEGTLVTLNLSSGTTIQIPKGARFVGIPGTETEEHPRGIMVEVYWDQDENGSLCISGHSDEMPVPVHAELRRPPSLSRRASMDRGRPVGYMIDLNQVP

SEQ ID NO: 55489 - protein, 111 aa, Zea Mays
MRRVEIIPMMMRGGRLTGLTSQVLRCFSTEIFVSRLSFYTTEEEFKDIFSPFGTVEEARLMRDHQTGRMKGFGFVKYSSQAEAEKAVKAMDGKILRGRLIFVEMAKGHESK

SEQ ID NO: 55490 - protein, 686 aa, Zea Mays
MASRVKEDERHEKILRGLLKLPANKRCINCNNLGPQYACTNFWTFVCTNCSGAHREFTHRVKSVSMAKFTAQEVTALQEGGNERAREVFFKEWDPQRNGYPDSSNADKLRNFIKHVYVERRYTGERSTDKPPRAKDDKDEYSENRRSDGNWGGSRSPPDGSYSDRRSYSGRSDDRNSRYSYGDRSPGYDQNDYKKSPRYFEVVDDRSGKTTPVQRFEDRWSSEPRKPDSGSPDFQKEADGSSPVVRPVRDILGDNTPQLRVGEPSKPATEPPKPSVVRPIDPPKPSVVRPIGPPKPNGTRAIDPPPLTKTISSASSIGSSEGTSEQTKVASAVSLIDFSADPEPASTAPPQPTPMPQQPPFNAAAPQPILEQGKSDPSVSGGDWASFDSFGQQQTPQTSSSVNPLESALAQLSFSEAPSAPNASAYPVSLDPTLKANDGGHSSVLDQSHSLFDAPFGISGNQASTVMSGQGSSVQQSPLAAPTAGPPSQATANPQGTSGIQGAASSTDSKFSSRKELPVDIFTALYPPSTQMMPGWQRAPHFGMGYAMQYPPGVGLQSYLHGAFPQPTYQQPVYSQHAYSHPQPVKASNPFDLGNESAHIQAHMPPSGPPGASAGSAPQTLIGHFMMQQVPNSMPMPEQQPNSMLATQQGLGSFNMGFDQEAPLGYPQANTSPSYGSVGGGSNPFG

SEQ ID NO: 55491 - protein, 684 aa, Zea Mays
MFKSMVYFVNISIGEVEVWPKGQASAGLAVAAWARDIRVDRLSPPSERCPPLAVMHTVAVAARCLVMESRPPVAADVASLPLVDMHAACLRDNKTAVVALGDEELHLVAMTSRRNLTNHACFWGYKLPFGLYNSCLTMLNLRCLGIVFDLDETLVVANTSRSFEDRIDALQRKLSNETDPQRRNGMLSEIKRYQDDKSILKQYIEGDQVYDDGKVYKAQPEIVPPLSDNQQTMTRPVIRLQEKDIILTRINPLIRDTSVLVRLRPAWEDLRSYLIARGRKRFEVYVCTMAERDYALEMWRLLDPDSRLINSVRLHDRMVCVKSGLKKSLLNVFHDGSCHPGMALVIDDRLKVWDEKDQLRVHVVPAFTPYYAPQAEANCSIPVLCVARNVACNVRGGFFKDFDEGLLPRISNVHYEDEVNDISSAPDVGNYLITEDENVALVNGNRDSLPFDGMSDAEIERRMKEANAQAFHQTATNFVMPVAPAQNFVSSSVAPLAPPLSMMPPPFSQPVVQPGFSDPLQGSPAREEGEVPESELDPDTRRRLLILQHGQDTRDPTPPHPAIPPVQVPVPPVQPHGNWFPTEDGINPSNLSRGSAGFTVESDSMPYEKKQPPHPSFFHGGDSPMSSDRFGYQNQRFPSQLPHTEDHHMLQNHAPPKYRSFSVFGSRKQLLLHAAAGGRPMQRG

SEQ ID NO: 55492 - protein, 195 aa, Zea Mays
MVLPPHRLPVLRLRPRRGRLGPGAEAGQRVRRRHLPAPPQHRHRHLLPGHPPGAGAAAQARQEEQVQALLEHLPPLRRLRRHRPQRRQHLQGAPHPRAGQRLQDRLHCHPGHARRHRALPRGHHVAHRHPEAQAERRQGVRRQRLAAGCVVGTRSPGLCLVLNAREGCDIDVLMSLFRGIVAACAFFLFLLLLPL

SEQ ID NO: 55493 - protein, 484 aa, Zea Mays
MLGEKMRKATDGREEPSDSGPTTPLPNKKLLLFILDRLQKKDTYGVFSEPVDPEELPDYHDIIKHPMDFSTIRKKLDKEAYFNLEQFEDDVFLITSNAMCYNSPDTIYYRQARGIQEIAKKDFENLRQDSDASEPEPEPEREPKPEPEPEEPKPQPRRGRPPNKNNAKQKVGKPPAERATADFSGATLATAANIGRHAQADVDLSRRVMDKAMIADVLRASFANLRNEHNWSGERKFERLEAYSGYGGTWSAKTGKRPILMEDSRRSTYYETQPSSSIYELPVSSSYNGTEKLLVPVGVQLPQSYSHSLARFAAQLGPVGWEIASRRLERSLAPGTKFGRGWVGDGETPPNPFQTPVLAAFSETMAPPSSIAASGEQPSMNAPPATEACAGSISHRVGSQPCASISTVQTINSEALASQQCGSVPQVSINRGERAVEMKGSTNNLHGHPAMPQTMNGFNAVPGRVLFPPAAQLVVSQMQTHTAD

SEQ ID NO: 55494 - protein, 261 aa, Zea Mays
MSIHLRRRELLSVTMASRDHTGLTRQLLDFQHDTIDEVGAGHDPFIDLKARFMDFKQRNYVEKFSNYQTLAEQQTPKFMVVACADSRVCPTAVLGFQPGEAFTVRNVANLVPPYEHGGTETSAALEFAVNTLQVENVLVIGHSRCGGIQALMSMKDDSTSGSFIKNWVSIGKSARLSTKAAAGNMSFDIQCKHCEKESINSSLLNLLTYPWIEKRVNEGTLNLHGGYYNFVDCTFEKWTLLYREGLEGGSKYAIKNRSTWC

SEQ ID NO: 55495 - protein, 644 aa, Zea Mays
MDSRPRETDAPGDPANGAAPPLAAAVTAATGDVEIIRPRNDKRGYRRVVLPNSLECLLISDPDTDKAAASMNVSVGYFCDPDGLEGLAHFLEHMLFYASEKYPEEDSYSKYIAEHGGSTNAFTSSEHTNFYFDVNSDSLHDALDRFAQFFIKPLMSPDATLREIKAVDSENQKNLLSDPWRMSQLQKHLCAENHPYHKFSTGNWNTLEVKAKEKGLDTRLELIKFYDSHYSANLMQLVVYGKDSLDNLQNLVENKFCDIRDVGRKPFSFPGHPCTPEHLQVLVKAVPIKQGHTLRILFPITPNIRCYKEGPCKYISHLIGHEGEGSLFYVLKKLGWAMSLEAGEGDWSHDFSFFCVVIQLTDVGQEHMEDTLGLLFRYIKLLQNSGTPKWIFDELQAICETGFHYRDKSPPINYVVNISSNMQIFPPKDWLIASSVPSKFSPDAIQNVLNELTPETVRIFWESKKFEGKTKLAEPWYGTSYSVEVVPPSIIQKWVGKAPEEDLHLPKRNIFIPSDLSLRSVEEKVSFPAMLRKTQFSRLWYKPDTMFFTPKAYIKMDFHCPLSQSSPESAVLTDVFTRLLMDYLNDYAYDAQVAGLYYVVKPNDTGFQVTMVGFNDKMRTLLETVIGKIAEFEVKADRFSVIKG

SEQ ID NO: 55496 - protein, 265 aa, Zea Mays
MADNPMNSIFIPTRSPPRQSLIETVGITEEGVFIEASSGFGQSSESVHCHHGIMSAEIGQLSTIPPKQRTLEAAQKYAHNKLNLPKEVFHGGFILEKIDGPMSTGHLVLTDTDVRNNPAVTFNYFSHPQDLNRCIYGIKTIERILKTNRFSELSADGAGLSMERVLNMSVQANVNLIPKHTNDTESLEQFCKDTVITIWHYHGGCHVGKVVDQHYRVLGVSGLRVVDGSIFSKSPGTNPQATVMMMGRYMGVKILRERLGRAAGV

SEQ ID NO: 55497 - protein, 2748 aa, Zea Mays
MAPINSGNMEQHSQRLLEPDLPVQVRLQLAMEVRDSLEMTHTPDYLNFLRCYFRAFSAILTAYTKPQATENAEHKLRNVVIEILNRLPHSEVLRPFVQDLLKLSLRVLTQDNEDNALLAIRIVFDLLRNFRPTVEAEVQPFLDFVVNIYHKFPTTVSYFFDNPNTSASMAASMPMQHLDPTADASVMMQVPGGGQLNPSARSFKIVTESPLVVMFLFQLYAKLVQTNIPHLLPLMVAAISIKGPDKVPPHLKTPFNDLKGAQVKTLSFLTYLLKSNADYIKSYEESICKSIVNLLVTCPPDSVSIRKELLVGLKQVLNTEYKRGLFPLIDTLLDERVLIGTGRVCIETLRPLAYTLLAELVHYVREDISLPQLSRIIYLFSRNMHDSSLTLIIHTTSARLMLNLVEPIYQKGVDQQSMDEARVLLGRILDAFVGKFRTLKRTIPQLLEEGEEGKEQPNLRMKLEVPLQTVLNLQQPLEYTKEINDYKSLIKTLAVGMKTIIWSITHAHWPRPQQQNQQSSNLSLQHFRGLREDEVRKTSGVLKSGVHCLALFKEKDDDREILQSFSQMLAIMEARDIMDMFSFCMSDLFDSMITNNQLLHIFSTLLQAPKVLRPFTDVLINFLVSSKLEALKQPDSPAAKLVLQLFRFLFIAAAKAPESCERTLQPHVPVIMEVCMRSATEVEKPLGYMHLLRNMFRALNSAKFDSLMRDLIPSLQPCLNMLLSMLDGPISEDMRDLILELCLILPARLSSLLPHIPRLMKPLVLALKGSDDLVSLALRTLEFWIDSLNPDFLEPSMANLMSEVILALWSHLRPPPYTWGTKSLELLGKLGGRNRRFLREPLALESKENPEHGLRLVLTFEPATPFLVPLDRCIHQAVGAVMQGNGLEAFYRKKALQFIRVCLDSLLNLRENVPGEGVSPGVLGTLLISNLDPSRRRNDASDMKGDLGVKTKTQLLAEKSVFKTLLVAIIAANADTSLHDEKDDYVVDICRHFAMLFHVDSPSSSQSGFMHPIGSSLPSIIMGSRSRCNTSSNLRELDPLIFLDALVEVLSSENRQHAKAALSALNIFAETLIFLARMKHTGMLRGGPSTPMLVSSPSLNPVYSPPPSVRVAVFEELLPRLLHCCYSSTWQAQMGGVMGLGALVGKVSVDTLCIFQVRVVRGLLFVLKRLPVHANKEQEETNHVLTQVLRVVNNADEANSEPRRQSFQGVVEFLAQELFNPNASMVVRKNVQACLSLLASRTGSEVSELLEPLYLPLLQPLISRPLRSKNIEQQVGTVTALNFCLALRPPLLKLSPELVNFLQEALQIAEADETIWVTRMMNAKVVLTWNKLRTACIELLCTAMAWGDLKAQNHTELRAKIISMFFKSLTCRTTEIVNVAKEGLRQVVQQQRMPKDLLQSSLRPILVNLANTKSLSMPLLQGLARLLELLSNWFNVTLGAKLLDHLKKWLEPEKLVQTQKSWKAGDEPKIAAAMIELFHLLPPAASKFLDDLVTLVIDLERALPEDQFYSEINSPYRAPLAKFLNRYVLEAVDYFLARLSHPKYFRRFMYIICSDTGDLRDALARSPQKILASAFSQFYSQSEASAAQLSSVKDEALTGAVSESITVQSSSNMVTTSESYFNGLELVSALVKLMPEWLRNNRVVFDTLLLAWKSPARLARLQNEQDLSLPQVMESKRLIKCFLNYLRHDRTEVGALFDMLSVFLYRSRIDYSFLKEFYVIEVAEGYSPNLKKTILNHFLNIFQSKQYGQDHLVVTMQILILPMLAHSFQNGQSWEVVDPTIIKTIVEKLLDPPEEVSAEYDEPLRIELLQLATLLLKYLQTDLVHHRKELIKFGWNHLKREDNSSKQWAFVNVCHFLEAYQAPEKIILQVFIALLRTCQPENKLLVKQALDILMPALPRRLPPEKNDSRMPIWIRYTKKVLVEEGHSIPNMIHIFQLIVRHADLFYSCRAHFVPQMVNSLSRLGLPYNTTAENRRLAIELAGLVVAWERQRQSEMKVAQESESQNQLGDMLNPSVIGGDPKRSSDVPSFADDLSLPDEEYKPNAAMEEMIITFLIRVSLVIEPKDKESSSMYKQALDLLTQALEVWPNANVKFNYLEKLLGNLSPTPQSKDPASALAQGLDVMNKVLEKQPRLFIRNNINHISQILEPCFGNKMLDAGKSLCSLLKMVFSAFPLEAATTPQDIKLLHQRVQELIHKNLAAVTTQQIALELNNAHSIISFSLFVLNALAEVQKNFIDPFIGLLFRVLQRLARDMGSSAGSHIRQGQRPELDSSVNSRSTIDSTVISNMKTVLKLISERVMSSSDHRKSMGQILQALLSEKGTDSSILLCMLDMIKTWIEEDCRLASSTGSVSSLNPKEIITYLHKLSLVDRKSFPPAAQEEWDAKYLQLLYSLCADSTKYPLSFRQEFFHKIERQYMLGLRAKDPEMRKRFFKLYHDTVGKTLFSRLQFIIQLQDWEAVSDVFWLKQGLDLVLAILVENEPITLAANSARVPTLMIAGPVPDRITMPQQVPDAQESMDGTTLSFDSLAARHAQFLNDANKLVVADIMAPLKELAFADPNVAYHLWVLVFPIVWVTLHKEEQVALAKPIIALLSKDYHKRQQGCRPNVAQALLEGLHLSHPQPRMPSELIKYIGKTCNVWYIAIALLESHIVHMNEAKCSESLAELYRLLNEDDMRCGLWKRKSITAETRAGLSLAQHGYWQQAQNLFYQAMIKATQGTYNNTVPKAEMCLWEEQWLSCASHLGQWEVLA

SEQ ID NO: 55498 - protein, 109 aa, Zea Mays
MVKRETSFTSQCTAQEIMTKIEDACGPLGFNVRKQNYKMKLKGDKSGRKGHLSVATEVFEVAPSLHMVELRKTGGDTLEFHSFYKNFSSELKDIVWKAESDANNKQTNK

SEQ ID NO: 55499 - protein, 265 aa, Zea Mays
MGNSLGCSASGERLVSAARDGDAIEARMLLELSPALARYSTFGGLNTPLHFAAAKGHLDIVTMLLEKGADVNARNYCGQTALMHACRHGHWEVVQMLLLFRCNVTRADYLSGRTALHFAAHDGFVRCIRLLVADFVPSVALEDIASSVVDGGDCQTNSGSSPNSSSGQKFNESARVRYINKPADGGVTALHMAALNGHLDCMQLLIDLGANVSAVSFPYGTTANLIGAGSTPLHYAAGGGKQECCELLISKGASRLTLNCNGLQS

SEQ ID NO: 55500 - protein, 54 aa, Zea Mays
MVKPADPLRISLSDLLSCKQGGTIASMLVDVRGFWAHDNRENLLQEEEEQVEET

SEQ ID NO: 55501 - protein, 217 aa, Zea Mays
MSAAGGDLPETVEVTLRAVGPSRPTTLRLPPLLSVAELRGCIARERRLAGTEEVRLRLILRGKTLPHQDDSHVTLRDGDTLIVAVAPKPPVNHLLDDDVEDEEEDELKFRIPQTTTLWKRKFFMFLRDKLRLPDIILMALFSLSMKAWIIIAMWFLLAPIAQKYDIGPLYIIGTGFLIILINLGRRQQGDVSSSLSGPVTSGGAKGWSVCPSPKPSK

SEQ ID NO: 55502 - protein, 98 aa, Zea Mays
MLVGNKTDLRHLRAVATDDARSFAEAEGLSYIETSALEATNVEEAFQLILGDIYRAVSKKPVASDEVGAGQGGVKEGKTIDVATGADAAAHKKQCCSA

SEQ ID NO: 55503 - protein, 74 aa, Zea Mays
MMKPSCVLLLSSLLVATLAATSSSSPPYSVGKHPGWLLVLGRKGRELGQSSGYHYYQHQSKQPETENLTQLSVH

SEQ ID NO: 55504 - protein, 84 aa, Zea Mays
MSSGEACNDIMAYSLILSCCCYTCCVRRKLRQKLDIAGGCCDDFLSHLLCCCCALVQEWREVEIRGAYSEKTKVTPPACQYMEH

SEQ ID NO: 55505 - protein, 295 aa, Zea Mays
MKVSLDDLYNGTTKKLSLSRSALCSKCKGKGSKSGASGTCHGCRGAGMRTITRQIGLGMIQQMNTVCPECKGSGEIISDKDKCPSCKGNKVVQEKKVLEVHVEKGMQHNQKIVFQGQADEAPDTVTGDIVFVLQLKDHPKFKRMYDDLYVEHTISLTEALCGFQFVLTHLDGRQLLIKSDPGEVIKPGQHKAINDEGMPQHGRPFMKGRLFVEFNVVFPEPGALSPAQCRSLEKILPPKPGSQLSDMELDQCEETTLHDVNIEEEMRRRQQQKKQEAYDEDEEEDAQPRVQCAQQ

SEQ ID NO: 55506 - protein, 411 aa, Zea Mays
MVGCKSRGYSFTRALLGLCSDELHVCGDPAAVPLIQRILEATGDVVTVQYYERLSPLVPLKSPLGSFSNIKAGDCLVSFSRRGIYKLKKRIEREGKHLCSVVYGSLPPETRTKQATMFNDDTSDLNVLVASDAIGMGLNLNISRIIFSTMMKFDGFCNRELTVAEIKQIAGRAGRYGSKFPVGEVTCLNPQDLPLLHSSLKSASSIIERAGLFPTFDLLSLYSRLHGTDFFHPILERFLEKAKLSPDYFITDCEDMLKVAAIVDDLPLGLYDKYLFCMSPVDVSDDISAQGLVQFAENYARKGIVRLKEIFTPGTLQVPKTDNQLKELESVHKVLELYVWLSFRMDDSFPDREVAASQKSICSMLIEEYLERFGWQPQDRRKVLGGAQKLLQEYDVSQMNKYFQEVNPGPK

SEQ ID NO: 55507 - protein, 690 aa, Zea Mays
MLFGALGPCPVCANGMYYYNGQYQCSGNVSEWSKCTYSATEPVRVKKKWQIPHGTKNDYLMKWFKSQKVKKPERVLPPMSPEKSGSKATQRTSLLSSKGLDKLRFSVVGQSKEAANEWIEKLKLAGANFYARVVKDIDCLIACGELDNENAEVRKARRLKIPIVREGYIGECVKKNKMLPFDLYKLENALESSKGSTVTVKVKGRSAVHESSGLQDTAHILEDGKSIYNATLNMSDLALGVNSYYVLQIIEQDDGSECYVFRKWGRVGSEKIGGQKLEEMSKTEAIKEFKRLFLEKTGNSWEAWECKTNFRKQPGRFYPLDVDYGVKKAPKRKDISEMKSSLAPQLLELMKMLFNVETYRAAMMEFEINMSEMPLGKLSKENIEKGFEALTEIQNLLKDTADQALAVRESLIVAASNRFFTLIPSIHPHIIRDEDDLMIKAKMLEALQDIEIASKIVGFDSDSDESLDDKYMKLHCDITPLAHDSEDYKLIEQYLLNTHAPTHKDWSLELEEVFSLDRDGELNKYSRYKNNLHNKMLLWHGSRLTNFVGILSQGLRIAPPEAPVTGYMFGKGLYFADLVSKSAQYCYVDRNNPVGLMLLSEVALGDMYELKKATSMDKPPRGKHSTKGLGKTVPLESEFVKWRDDVVVPCGKPVPSSIRSSELMYNEYIVYNTSQVKMQFLLKVRFHHKR

SEQ ID NO: 55508 - protein, 1158 aa, Zea Mays
MSYAAYKMMHLPTGIDHCAAGFITHSPADAAAFSTPAPAPTAAAGPDGDIDSTAARAPRRVGPTPNLVVSAANVLEVYAVRAEVATGAEDAGNSSSTGTILDGISGARLELVCHYRLHGNIESMAVLSDGTENRRDSIAVTFNDAKITCLEFDDSINGLRTSSMHCFEGPEWFHLKRGRESFAWGPIIKGDPQGRCGAVLVYGLQIIILKAAQVGQSLVGEDEPTRVLSSTAVRIESSYVIDLRDLEMNHIKDFTFVHGYIEPVLVILHEREPTWAGRISSKSQTCMLSAFSISMGLKQHPMIWSAAKLPHDAYQLLAVPPPISGILVICANSIHYHSQSTSCSLALNSFSSQPDGSPEILKTSFHVELDVAKATWLSHDIVMFSSKNGEILLLTVVYDGRAVQRLDLMKSKASVLSSGATTLGSSFIFLGSRLADSLLVQFSCGMPTSVLPDLTDEPADIESDLPFSKRLKRIPSDVLQDVTSVEELSFHNKAVPNIVDSAEKISFVVRDALINVGPLKDFAYGLRTNSDPNAAGIAKQSNYELVCCSGHGKNGTLSALQQSIRPDLITEVELPSCTGIWTVYYKSSRGNTTDNNEYHAYLIISLESRTMVLQTGDDLGEVTETVDYNVQGSTIAAGNLFGRCRVIQVYAKGARVLDGSFMTQELNFSMHTSESSLNSEPLAAASASIADPYVLLKMSDGSIRLLIGDPSTCTISINAPAIFASSSERISACTLYCDRGPEPWLRKTHTDAWLSTDVGEAIDDNDNSSHDLSDIYCIICYESGKLEIFEVPSFKRVFSVDNFVSGPAILFDVFSRNSTKDSGIGDRDASKVSVKKEEAANIKIVELAMHRWSGQFSRPFLFGLLNDGTLLCYHAYYFEGSESNVQCAPFSPHGGSPDIGNATDSRLRNLRFCRVSIDISSRDDISCLVRPRITIFNNVGGYEGLFLGGPRPTWVFVCRQRFRVHPQLCDGPIVAFTVLHNVNCCRGLIYVTSQGFLKICQLPSAYNYDNYWPVQKVPLHGTPHQVTYYGEQSLYPLIVSVPQVRPLNQVLSSMADQELGLHMENDVTSGGDLQEVYTVDEFEVRIMELGKSNGRWETRSTIPMQSFENALTVRIVTLQNTSTKENETLMAIGTAYVQGEDVAARGRVLLFSFSKSEN

SEQ ID NO: 55509 - protein, 328 aa, Zea Mays
MDELKELVKIFHEAGIKVLGDAVLNHRCAQFQNNNGVWNIFGGRMNWDDRAVVADDPHFQGRGNKSSGDNFHAAPNIDHSQEFVRNDLKEWLCWMRKEVGYDGWRLDFVRGFWGGYVKDYLEASEPYFAVGEYWDSLSYTYGEMDYNQDAHRQRIVDWINATNGTAGAFDVTTKGILHAALERSEYWRLSDEKGKPPGVLGWWPSRAVTFIENHDTGSTQGHWRFPYGMELQGYAYILTHPGTPAVFYDHIFSHLQPEIAKFISIRHRQKIHCRSKIKILKAERSLYAAEIDEKVTMKIGSEHFEPSGPQNWIVAAEGQDYKIWEASS

SEQ ID NO: 55510 - protein, 999 aa, Zea Mays
MMDLLIAQITTDLRSSDALRQSSALLQALQQCAAGRDVSALARTAATEILSAPSSAVCKRLALDLLRALPLPPDLLDPLLLSSLRSDLSFPDPDVAASSIASFPSLPSHLLPSLLSSAHAEIANALSSPAESLRLAAVTSLSSLLPRDDLTLMCSTNPSLMAHATTWWGRLAELALDSADAVSAGAFEALARLFQELEGRRMSRLAGDKLVDGEGALAVRAQWAADAIDFIWSRRNMLIARSMVMPVESFRVTVYPLVHAAKMVASGVVNTLRRVAKPGDTTIADSVESSAEKLVGVSDIVSHLLPFLSSLDPPLVFEVGINMLALADVPGGKPEWASAAIIAILTLWDRQEFSSMRETIVRAVVTNLHLLDLGMQVSLFKRLLQMVRNLRAESDRMHALACICRTALCVDLFAKESVRRGQKPVPGTDVISLFEDVRVKEDLNSVTSKNLFREELVASLVESCFQLSLPLPELKNSGTESRVIGALAYGTGYGALNWTEPALDVVEVCRPCVLWDCDGRTYAIDCYLKLLVRLCHIYDTRGGVKTIKAGASQDQILNETRLRNLQLQLIRDLREVHTPRISSRLIWAISEHFDLEGLDPLLADDPEDPLNIVISNMHKILFNTDSSATTSNRIQDVQAVLICAQRLGARNARAGQLLTKELEEFRASTSADSMTKHQSRYVLQVIKYVTNHPDNRWVGVGDATGDYPFSHHKLTVQFSEASAAQDRKLEGLVHKAIRELWRPNPSQLILLQTRGIGALHKELPKACALTGSSDPCYIEAYHLADPTDGRITLHLKILNLTELELNRVDIRVGLSGALYYMDGFSRTVRHLRNLVSQDPVQSSVTVGVSHFERCSLWVQVLYYPFYGSSGSTDYEGDYAEEDSQMMRQKRSHRPELGEPVVLRCQPYKFPLAELLLPLECSPVEYFRLWPSLPAMVECTGTYTYEGSGFKATAAQQYDSSPFLSGLKSISSKPFHQVCSHFIRTVAGFQQRHGLVDLWA

SEQ ID NO: 55511 - protein, 177 aa, Zea Mays
MASRLSGEGKIWALDINKGRLRILMDAAKLHGLDDMITDIHADLRLYAKETTVKYDKVLLDAPCSGLGVLSKRADLRWNRQFENLEELMCLQDELLDSASMLVKPGGILIYSTCSIDPEENEERITAFVQRHPEFALQSVCGYVPREFITDEGFYSSNPTKHSMDGAFAARLVRSTH

SEQ ID NO: 55512 - protein, 113 aa, Zea Mays
MRRKEKRARIEQIRVILGLSDSQRTPVPGESLRDFYKRTNMYWQMAAYEHTQHTGKELRKDGFDLAETRFKELKPILDELAVLEAEQKAEEEASASTSSKRDTKKPKQKSARR

SEQ ID NO: 55513 - protein, 312 aa, Zea Mays
MAKETGTNEIVALKKIRMDNEREGFLITAIREIKILKKLHHQNVIKLKEIVTSPGPERDEQGRSIDDNKYKGSIYMVFEYMDHDLTGLADRPGMRFIVPQIKCYMKQLLTGLHYCHVNQVLHRDIKGSNLLIDNEGNLKLADFGLARSFSSDHNGNLTNRVITLWYRPPELLLGSTKYNLAVDMWSVGCIFAELLNGKPILPGKNEPEQLTKIFELCGTPDDTIWPGVTKMPWYNNFKPHRPLKIRVKDFFKHFDRHALDLLEKMLTLDPSQRISAKDALDAEYFWTSRAMSAAVNTMRIRAPRWRRLCRRP

SEQ ID NO: 55514 - protein, 1047 aa, Zea Mays
MRSFHAKEGSGEDSCCVTLGYTEAEVEAMKLFLCKNCEYKQHQCFICGVLEPSDGEAAKVFLCNNATCGHFYHPKCVAQQLHPINIDEASELEKKITEGFSFTCPIHWCFHCKGLEDRTQEPLQFAVCRRCPKSYHRKCLPSEISFDENEEDDIIIRAWELSKRILIYCLDHEIDSELETPVRDHIKFPKIEKPLQFVKKGSSLLPKKKKRTYSETVLEQSPKDTVKRKSKVHMLEREQNKQDTREVSAKSFTQNLVDTPVKKKAKLKEKIQLPYVAKDHFISSPKSVKEQEQELVPLPLSAIRKSSFPKVDSETEKRVITILGNKVSSLTIKDVTRNCSLPSTHVYSGRLTDKIPLGKIERSVQAVEAALKKLENGGSVNDAKAVCEPEVLRQLARWHSKLRVYISPFIHGTRYSSFGRHFTKVEKLVEIVDRLHWYVETGDMIVDFCCGANDFSRLMKEKLDKVQKKCHFKNYDLIQPQNRFCFEKRDWMTVQPNELPHGSQLIMGLNPPFGVKASLANKFIDKALTFKPKLIVLIVPKETKRLDQRRTPYDLIWEDSECLSGKSFYLPGSVDLNDKIVEGWNASAPPLYLWSHPGWTKKHMQVAEEHGHTCMGKIACHVEESNLSDDLSVRKQSDATNKLNSRSGKETPFNDRMSNLLDDGSARKQARSEEEKRTLGKIEHHVKKANIPDNLPVKKEPEASSKVMSHSGKDRKIGRYNRRRHDNRSSKGTPDHTESLPPEKQVEVAYEETRVIPSKKIAHNEKKSAQYNYEQTAAGMPNMRSRGGDSDMSISPPVSCNARSKPMSYSLTRPIEHLDTNAHLLAEEPSDSVLNRVPNHDSYLAIKEEYCDGFKRKNDPIFSHIDDSSRMRGSSIEEVTKPYITAPNSDPWSKGDGSFYRHPSSEDLNANADVLMPGYSARYGQIGGDSNPQASMVPLATDSRLHGGTVADNYLSARYSLGSSGARVSQPAPTVPPFGLSGASSQRGSVMDRYSYGLSGPTGTQRSVIDRYAPSLDGTNTTRSRSSLPEQYPFGQPGSSGGGWPHH

SEQ ID NO: 55515 - protein, 670 aa, Zea Mays
MAVQGGEERVVLWALSTRAGTLLLCGRLSLGAGFPYVRRFADMAPERREAALRRWNRVRWLFPLRIAFAIVKILCHYVFYAMVNENSENPYWKAIGYSVDEPREDRARTATPSPSRPLDVGVVETRLLDDNKLLRSLVGRGLTVKPASSDANHHTVQCDAVIVGSGCGGGVAAAVLASAGYKVVVVEKGDYFTAEDYSSIEGPSMERLFERGGIFCTSNVTTMIFTGATVGGGSAVNWSASIRTPEEVTQEWAREHGLPVFASPGYAQAMDAVCARLGVTDGCQEEGFQNKVVRRGCEALGLCADAVPRNSSDAHFCGSCNFGCPTGDKRGTDTTWLVDAVARGAVILTGCKAEYFVLEKNHSSGSGSGRGKKCVGLVATCASNGVTKKLRIEAKVSIAACGALMTPPLLRRSGLKNRHIGSNLHLHPVSMAWGYFPENKQDPPLSGKCYEGGIITSMHRVTDRTIIETPALGPGAFAAMVPWESGRDMKERMRRYSRTAHAFALVRDRGVGFVDGEGRVRFTPSREDVDELRNGLRRVLRILVAAGAAEVGTHRSDGLRLRCKGLRDEDLEGFLDEVTIEKGPMHSRVDKWALHCSAHQMGSCRMGSSPKDGAVDGRGESWEAEGLYVCDGSLLPTAVGVNPMITIQSIAFCLSKGIAETMAQGQGKGQ

SEQ ID NO: 55516 - protein, 311 aa, Zea Mays
MENGSGAVVPSNSSDRSDRSDKPLDQKTMRRLAQNREAARKSRLRKKAYVQQLESSKLKLAQLEQELQKARQQGIFISSSGDQTHAMSGNGALTFDIEYARWLEDQNKQINELRTAVNAHASDSDLRLIVDGIMAHYDEIFKVKGVAAKADVFHILSGMWKTPAERCFLWLGGFRPSELLKLLANHLEPLTEQQMLGLTNLQQSSQQAEDALSQGMEALQQSLAETLAGSLGPAGSSGNVANYMGQMAMAMGKLGTLENFLRQADNLRQQTLHQMQRILTIRQASRALLAIHDYFSRLRALSSLWLARPRE

SEQ ID NO: 55517 - protein, 101 aa, Zea Mays
MSSLRTSSRRFPSRGRGPPTGRAKPRPRTLRRLLEPKQLPAPRQKRLLLLLRRRQRSPQPKLTPDRHAIIHSHVMLRLRLLNLKSRNSWGLGLHCIVFLPV

SEQ ID NO: 55518 - protein, 322 aa, Zea Mays
MYSPMHKSSLDREIPGSTKFSLPQIQKATKNFSPNFKIGQGGSGTVYKGQLADGTLVAVKRAKKNVYDKHMGREFWNEIETLQRIEHLNLVRFHGYLEFGGEQLIIVEYVPNGNLREHLDCINGKILEFSLRLEIAIDVAHAITYLHTYSDHPVIHRDIKSSNILLMNNCRAKVADFGFAKLAPTDSSHISTQVKGTAGYLDPEYLRTYQLNEKSDVYSFGVLLVELVTGRRPIEPKKAIIERVTTKWAMEKFVEGNAIQTLDPNLEATDAINLAVEKLYELALQCLAPTKRNRPSMKRCAEILWSIRKDYRELVVPTSAMN

SEQ ID NO: 55519 - protein, 213 aa, Zea Mays
MGPARYDFSGTMVFLKHRSYGAKVAFLDTPYTHSLTASAQDDITGAQPLQSRWKKPRKIICRTNCFVCKEASTSGQNPEDVADNSRTICENQKWVWSEGHFLSVGAAVISCRNERAPDGLVADAHLSDGFLHLLLIRDCPLPLYLWHLTQFTKKGSDPLSFKFVEHHKTQAFTFISSHDESVWNLDGEMFQACEVSVQACRGLVNFFASGPEL

SEQ ID NO: 55520 - protein, 484 aa, Zea Mays
MLSRLIQLSRLLPADPNGPKEFAYLEMQYWAASISCLSVLALFLWHLQKSPSNGISKHLEYGSLFIVLYLMTFFLSFLLKTDEGLMVTTNMAYMLCHGVAAVILIKHILEKFPSCASFGEALLVSGGLVLYFGDMLAHTLSKMEFSMSSKAFIHTPQTRSDMTAIIQGILLVLFLLPLLYKSSLKVWYCWTKERKQQTQTPEEHKRIRIDSAIFYISLAVVLIFLLPSWTHLVQGLKVHPFVWIVNYMFTDSHERLVLCAYWICVIYVSVRRFYSISKQSKTERILLRKYYHLVAVLIFSPAVIFQPAFLDLAFGAAFAVFLILEMLRIWEIYPLGRVVHQFMNAFTDHRDSEILIVSHFSLLLGCALPKWMSSGLNDRPLAPFAGILSLGIGDTMASMIGYKYGVLRWSKTGKKTIEGTAAGITSVLAACSILVSLLASSGYILSQNWLSLLIAVTLSGLLEAYTAQLDNAFIPLVFYSLLCL

SEQ ID NO: 55521 - protein, 274 aa, Zea Mays
MGTPPPFQESGHCDVCRCTFNTFRRRALPQYGIYTDVRVCYGCFNKSSSQGHADNPVSAGSISGAADSFSGLSLGKEDDSSPMKNSTVQSTAALIECKCGMPLCICEAPKPEPSPTPVKNINTVPPTTQSNPRPKKPANTQQKASATSSSNSSPFLNIGLMNNDSNDKGIVDYEVSGEGLREAIKGGDVKGVKKLLTQGVDSNYCDKQGFTLLHLAALFNQTEIALILMDHGANVESKNGQGETPLDCAPAMLQYKMRQRVEELAASASKGPLG

SEQ ID NO: 55522 - protein, 845 aa, Zea Mays
MSEDLFEGVKGEDVGDPSVAYGDSTAGNTPRISSFDKLYIVLISLHGLIRGENMELGRDSDTGGQVKYVVELAKALSSCPGVYRVDLLTRQIIAPNFDRGYGEPDEMLALTSFKNFKCERGENSGAHIIRIPFGPKEKHLAKENIWPFIQEFVDGALGHIVRMSKTLGEETGSVCPVWPAVIHGHYASAGVAAALLSGALNVPMVFTGHFLGKDKLEGLLKQGRQTREQINVTYKIMRRIEAEELSLDASEIVIASTRQEIEEQWNLYDGFEVMLARKLRALVKRGANCYGRYMPRMVIIPPGVEFGQLIHDFDIYGDEDNPSPASEDPSIWFEIMRFFTNPRKPMILAIARPYAEKNIATLVKAFGECHPLRELANLTLIMGNREAISKMNKISAAVLTSVLTLIDEYDLYGQVAYPKHHKHSEVPDIYRLAARTKGAFINVAYFEQFGVTLIEAAMHGLPVIATKNGAPVEIHQVLENGLLVDPHDQHAIADALYKMLSEKQFWSRCRENGLKNIHQFSWPEHCKNYLSRILTLGPRHPAFACKEDHKVPVKCRKHIFVIAVDSVNKEDLIQIIRNSVEATRSGTMSDLTGFVLSTSLTIAELQSVIVRTGMLPTDFDAFICNSGSDIYYPSQSSDVPSNSRVTFASDHNYRSHIEYRWGGEGLRKYLVKWASSVVERRGRTEKQVIFEDSEHSSTYCLAFKVINPSHLPPLKELQKLMRIQSLRCHALYNHGATRLSVIPIHASRSQALRYLSICWGIELPDAVVIVGETGDSDYEELFGGLHKTVILKGGFNTPANRIHTVRRYPLQDVVALDSSNIIAIEGFSTGDIRSAMQQKLGIPTR

SEQ ID NO: 55523 - protein, 181 aa, Zea Mays
MEAEKKPPAVSDVGAWAMNVVSSVSLIMANKQLMSSSGYAFAFATTLTGFHFTVTALVGWISNATGYSVSKHVPLWELVWFSLVANTSITGMNLSLMLNSVGFYQISKLSMIPVVCLMEWVLNSKHYTTKVISAVIVVAAGVGICTVTDVEGGMLDGEDVPLKARVSGVPAVDLEDGDVKG

SEQ ID NO: 55524 - protein, 306 aa, Zea Mays
MGWSPRPPPITRSTASLRLVPHFSHFRFSFHRAQESRGGGGSRRRTLRCCGGTAPAAAAGAAEGRMAAATAADMVWVRVLEDGVFRFDASEAARAAAGPSLSFADPRRREAPHDGADMPAVVPVCEVAAGGSQKVVIKLPPGTSFYGTGEASGPLERTGKRVFTWNTDAWGFGPGTTSLYQSHPWVLAVLPDGKALGVLADTTRRCEIDLRQESTIKFSALSAYPVITFGPFNTPADVMTSLSHAIGTVSMPPKWSLGYHQCRWSYDSSEKVLKVVRTFREKDIPCDVVWMDIDYMDGFRCFTFDS

SEQ ID NO: 55525 - protein, 125 aa, Zea Mays
MEPAASVSAAALWTLTVQRASGSGHAQFVGAPFLSSNRPPHPTEGTHITDACLGSRALRRIGLSTMERCTVHEHDCMLLATSYLVYLYSRRAYVRTYGQLIKLEWDDDGENFLYWMMTCICRWFI

SEQ ID NO: 55526 - protein, 771 aa, Zea Mays
MNSFTFSKSAIEALTCKRDAMYKLMMEKLQHFFSNVEVIAFDTASNFLHKRTDLVDASVSDAELFYGDSDAVLPCNMAADEKDDSSSNSQESSDKEDPLESSECSSYTSMDDTEVESSTACENLSSSMFSLYCTSTGEAKGSLVTSKLLSSQSSSVDHGINCAIPIECEKDDRLSCKHVLVHPQNTKHTAVPDGSELDYQYSQFSPFDRFMKRASCSFESMNSVGEFLYSDHKRSVGNAVYPLHSESGSTKLSNSKNYEKFVTINQPWNTSIPYNLSLNPILKNAACYHTESDMQQKSKNQSLASFDFESVMDPCEVYCARSPSLLVESVNGAATAGQPSTQPYEQPDCSTKLLQAQTRSQSSLTSSGEMSTGDSLQKNASGGAFWEISLLYNDKSKEKPAMDFSSQFDMPLDIVIDKCIIQEILLQYKYVSSFTMKLLEEGFDLCAHLLALRRYHFMEIADWADSFIASIYQKKWSFVKSEQKRSEIQGLMDLALQRSSCDSDPYKERLFIYMRESPVDSVDASPCGLDLLDDILLGYKAEWPMNIVITVDALKIYAEIFCYLLQVRFAVFSLTEVWRFLKELTQFIGRSSHSRSDVLKKLNFVMKLRHKLYHFLSTLQQYLHCHLSDISWRRFQHSLKNQVRDILDLEYVHICYITDALDICFLSDESKQVATIIKSMLQLALELRSCFQSGDTCDLSVNQLSNLQYLINFSQVDVIRTKFEDNIKDLYILHSKSSKYTELGLSRFWGYLNYNEYHSTKVSKDMDNFYF

SEQ ID NO: 55527 - protein, 75 aa, Zea Mays
MDPINERKMFQQLVRAASQINTPQCFLLTPKLLPDLEYSDACSILNIMNGPWIEEPAKAWSSGDCWRTVVSAAGH

SEQ ID NO: 55528 - protein, 360 aa, Zea Mays
MVPPLLTWYILLHFLHRTSSLSSMVMQSALVSNPFGMLPAMPQMSIGNGGSSPSVQYGISSLPVAEKPLPSRSLSMAVPRHLSQRRIKLLPRKYNPISDGKVPFFADDEESPATPKADAFFIPRENPRNLVIRPIEQWSSRRETGRQYTAKNVTDSNKYEDASIESERGKSAMSPSSRPPAVENDKQHEARAMAQHANGNGTSVERLLPKLPRADYFTEPSIEELAAKERAEPGYCGRVRDFVVGRHDYGSIKFFGETDVRCLDLESIVEFNDREVIVYKDDSKKPPVGEGLNKAAEVTLLNIKCVNKKTGEPCQGARVERYREMLVKKAEEQGAEFVSFDAVKGEWKFRVKHFSAYGLW

SEQ ID NO: 55529 - protein, 239 aa, Zea Mays
MASNGIAPRDVCVVGVARTPLGGFLGALSSLPATKLGSIAIEAALKRANVDPALVQEVFFGNVLSANLGQAPARQAALGAGIPNTVVCTTVNKVCASGMKATMFAAQSIQLGINDIVVAGGMESMSNAPKYIAEARKGSRFGHDTLVDAMLKDGLWDVYNDCAMGMCAELCADNHALTREDQDAFAIQSNQRGIAARDSGAFAWEIVPIEVPVGRGKPPVLIEKDESLDKASLHRDLCR

SEQ ID NO: 55530 - protein, 236 aa, Zea Mays
MTGLEAEKLAPKKWGLSGSSPYVLIGFLGGVSFLLTQGVDLRPKLSAVLGLAAADAMLLGGTCLAQISCFWPPYKRRILVHEAGHLLTAYLMGCPIRGVILDPFVALRMGIQGQAGTQFWDEKMEKELAEGHLSSTAFDRYCMIMFAGIAAEALVYGEAEGGENDENLFRSLCILLNPPPAVAQMANRARWSVMQSYNLLKWHKKAHRAAVKALEDGHSLSVVIRRIEEAIASDSK

SEQ ID NO: 55531 - protein, 251 aa, Zea Mays
MALLVLRAPAAVHAASRLLPPQPRRRRRLVAVASAASSAPSGEVSSQHGGGGGGGYGIVGGPNGNAVVPATKSTVVETTVERVIFDFRFLALLAVAGSLAGSLLCFLNGCVFIKEAYQVYWSSCVKGVHTGQMVLKVVEAIDVYLAGTVMLIFGMGLYGLFVSNASAGVGSESDRALSGSSLFGMFALKERPKWMKITSLDELKTIVGHVIVMILLVKMFERSKMVTIATGLDLLSYSICIFLSSASLYIL

SEQ ID NO: 55532 - protein, 394 aa, Zea Mays
METIVLRLSSQQATLLLSSIWRQALSPKNAPQNYEAIAHTYSLLLLFLGSKTPIFEVLAPSFQIAFSLMSHSLGGTDSLPPSRRRSLFTLATSMIVFASRAFNVAPLLPICKLMLNDGTMDPFLHLVHENKLQAVKDYTEDPSTSYGSPEDNQNALKSLSVVELTNSCSRESMILTIMNSIRDLPDLELENIRSQLLRDFSPDDVCPSSAHFLESPGKIAPPCSDDDTDYDYQEAELIDLRNDNNTYLEASATTLAAIAIPVPTTNLLSIDELLETVVNDVSSQTGGQCLVSMAGDIPFQEMTSHCEAFSMGKHHKMSLLMSFKQNKQAAMVVVPDNQVSHAEAAHTSDKQSTNPFLLQSISAGEAQVAGDVQQPFLRLPPSSPYDNFLKAAGC

SEQ ID NO: 55533 - protein, 356 aa, Zea Mays
MGAASQLRRRTRARTPPGPGPEAAAADDDVRCEACGSGDAAAELMLCDGCDCGFHIFCLRPILPRVPAGDWYCPSCRAPASSKSEPAAAGKKPKQFPLVQTKIVDFFKIQRSPTPLVEAAELKKRKRKHGGALVASKKKSRRLLPFVPSPDPAQRLRQMASLATALTATGAAFSNELTYQPGMAPRSANRAALEAGGMQVLGREDAETLARCQQMMARGEWPPLVVAYDPVEGFTVEADRPIRDLTIITEYVGDVDFLRNREHDDGDSMMTLLSAASPARSLVICPDRRSNIARFINGINNHTPEGRRKQNVKCVRFAVGGECRVLLLANRDISKGERLYYDYNGSEHEYPTHHFV

SEQ ID NO: 55534 - protein, 535 aa, Zea Mays
MTKRERKDPGRMTSLGSLTKQPNLSWVPPGGFCKAKKCNWRIHASQLPDGKTWQVKKMSKRHYCRSRSKMEKNCMANQYWVRDKVVPMLRENPNLGAGALVKKLQEKYLIQVSYCVAWKGKELALDELMGKWEDSFDHIYAFKAAIEKESPGSVVEIQTEKVGEKIRFCKMFVAFKACIDGFLQGCRPYLGIDSTVLTGRWKGQLASAVAIDGHNWMFPVALGLFESESKDSWKWFMEKLQTAIGSPHGLVISTDAGKGIDSALTNAFNNGVEHRECVRHLFKNFQKRFHGEVFERNLWPAARAYRRTVHDKHYNIMKIASPAAIKWLEDTHKHLWARCYFSTASKCDYVTNNIAETFNCWIKDEKSLPPVELIDRIRQKILEKFFVRKNLADKLTGTILPSVMKQLHDAGRGLVGYVVHKGPDHTAEVSGVHKDLTPWRHTIDLVNRECSCKKWQLTGLPCTHALSVIGCFRNLKLEDYVDSYYSVEKFKTAYVGKIPTLTDKTEWEQPEVGYKVWPPILKRAAGSQGQEGSLE

SEQ ID NO: 55535 - protein, 342 aa, Zea Mays
MCPAAATTSSAKPSKKRKQPVIAPPESDSEEESVYDTASDDDEEEEETQELESEDVDEEVEEGSEGGEENEIGDDSEVEEEEVKEKKEKEETVKEKKEKKDMKQEGKKAKKQEEKKAKKDKKEEEKKVMEDKKEEEKKAKKKSEGSGILSNKLFSELPLSELTAKAIREMNYTHLTQIQARSIPHLLEGNDVMGAAKTGSGKTLAFLIPAIEMLYHTHFSPRNGTGAIVVCPTRELAIQTHNVAKELMKYHSQTLRYVIGGNNRRSEADQLAKGINLLVATPGRLLDHLQNTKSFIYRRLKCLVIDEADRILEQNFEEDMKQIFKRLPQADCSFFCYTNSRG

SEQ ID NO: 55536 - protein, 285 aa, Zea Mays
MGICAIDEFDKMEESDRTAIHEVMEQQTVSIAKAGITTSLNARTAILAAANPAWGRYDMRRTPAENINLPPALLSRFDLLWLILDRADMETDLEMARHIVHVHQNLESPALGFTPLEPSVLRAYISAARRVIPSVPRELEEYIATAYSSIRQEEAKSNAPTSYTTIRTLLSILRISIALARLRFSETVAQSDVDEALRLMQMSKYSLYSDDRQRSGLDAISDIYSILRDEAARTSSMDVRYAHALNLISRKGYSEAQLKECLEEYASLNVWQIHPSTFDIHFIDA

SEQ ID NO: 55537 - protein, 186 aa, Zea Mays
MHFSQGDGEISLCGAIEMSGFLELKCEIIRGGMKEYLTPVGPTPLHVSPIFEIGPVEPRFSEWLVFEGISVDESGKQHFLDASVAYKRAVLNAIEYLSKFGYSKEQVYLLLSCCPCEGRISGIVDSPNAVTTLAIPTAIFDQDIKPKRVKGRPLGGPQLRRLPDLLSCSNHGRLPATQDRSGTSAP

SEQ ID NO: 55538 - protein, 137 aa, Zea Mays
MGMHQSLGIQLAQLGKDASAAGAARRVSAQRKAVEVESVAAAGKQEIREVVKKLFRAEFVEKRYEGLDEDIDLRALENGFISVTPLNVHGQVELEIGATASDWLSAAVSLDKEKVAASATADQQDVAAEEKEAPSAA

SEQ ID NO: 55539 - protein, 618 aa, Zea Mays
MAAVAAATSHLLRHHRNPHLLLLRAAISSSRALPQQPELSPDPTAGTPDLAGAAPLPPNPSTGSPFYTQNWRNPAAANPPSSLLPTVVAGSPFGAQHFMAAFYDAPDVTGLKETFAKYMAEQRWEDMKHLFDHWVRSLDAATGKPNHPDVDLFNHYLRANLMTRALPHEMLDLADHMLEFELQPNAASYNLVLKSMVASQETEGAEKLIERMLQTGTFPDDESYNLVVGLLIRQNLVDSSLKYLDLMLKSGYTLSLTVFTDYIRACMRSGRLDTLTSIIEKCKTTDKNKVLCPEWTWCIDIADAAFEANNSKLALFALEYLARWIARGENVKPPVQLSVNEGLVISALSAAGRTYNTDLLNAAWSLLRKSLRQKRAPTPETYLAKIYAHSSIGQLQRAFGTLREFENAYGNSEDIDLELFSPFTSLHPLVVACCKDGFSTLDSVYGQLENLIHADPPYKSLAALNCVVLGCANIWDINRAYETFVAIKEKFDLTPDIHSYNALLCAFGKLKQTGEACNVFQHVLTLGVKPNATTYSLLVDAHLANKDPKAALAIIDEMVDAGFTPSKDTLRKVRRRCSRESDFDSDEKVQSLAKQFNYRMGGENRREMLYSIEYNPVY

SEQ ID NO: 55540 - protein, 111 aa, Zea Mays
MVNELQSSKHGCQHWTELVAKFGCVILDQFDKKGRETICPFSSEAAMVMLKNVVCSSLPTLASKSIIPSVHHSIVHFHGKCLVLCAKGKPGLKNAFRLPDYIFLVLKDMAG

SEQ ID NO: 55541 - protein, 293 aa, Zea Mays
MNNAQAEAGNKPTPNGNKRKNPKTFPSQQATAHQSRRESPRTRGGISHPLGPPPPPLCSSSFPRSSSTRSAPIPPASADPDPAPAPMATRRRMLLKVIILGDSGVGKTSLMNQYVNNRFSNQYKATIGADFLTKEVQIDDRLFTLQIWDTAGQERFQSLGVAFYRGADCCVLVYDVNVSKSFEKLNNWREEFLIQASPSDPENFPFVVLGNKIDVDGGNSRTVSEKKAKAWCASKGNIPYFETSAKEGFNVEAAFECIARNAVKNEPEEDMYLPDTIDVGGAGRQQRSSGCEC

SEQ ID NO: 55542 - protein, 283 aa, Zea Mays
MFGLSNFVPILFGSKQLCSELERIHDALCGSYSENNVLGELLSASSDPHEHRKLCSSVMSGFLIDIGWLIRKPTPDEFKSVLSSTNIQRWICMLKFLIQNDFINVLEIIVKSMDSIMGSEVLSNLERGRLEDHVTAFLGYVSHARNIADRRANHDEKTQIETRGIIVTSPNQPNLGASVPFASENTDFGGDNKLNSTDEEEIMPLVTRDVSHRHCCQPDTTVRWLKPSLIVTYPGGATRMRLVTTVAVAAVLCFTACLVLFHPHGVGVLAAPVKRYLSSDSAS

SEQ ID NO: 55543 - protein, 111 aa, Zea Mays
MIQHRPYNQKVDVYSFAIVLWELVTGNVPFANMSAVQAAFAVVNKGVRPAIPHDCLPALAEIMTMCWDTNPEVRPPFAEIVRMLEQVEVEVLTTVRKARFRCCIAQPMTLD

SEQ ID NO: 55544 - protein, 171 aa, Zea Mays
MERHRKSAAETAEVQQTPSGDQPASEGRNADNSRTFRKGNKRKSHSLPSKPSDSVEGLAKDPLVPGVRNAKAAKRARKSNVGTILPDRGLTAATPNTAQNQVASSELDQAAAPKKRKNRKDGQAEQKRGKVTKRTRKEPSGEGGVDKSLVEQYRFKFLQHGVSKTKTKTKG

SEQ ID NO: 55545 - protein, 211 aa, Zea Mays
MQSRSRIWDFNLGRSRHHDEKSALEVGYGSNHGGFMIKSYSDMLKDISSGTTKDLEDIYDSRYCSTAEDIMSSNICQLSSKNVSTGSNKRKVRSCAASTMDGPTTSGNHNHVPASASGPGAALTREISFGDQTVSAPAAETERPAAVRIDSETLAQNRDSAMQRYREKKKNRRYEKHIRYESRKLRADTRKRVKGRFVKSTEALNAARYNG

SEQ ID NO: 55546 - protein, 273 aa, Zea Mays
MVRNGLQEQDLACLSNSHNVNYLKPSHLAEEYTEKLKHVFSLGKSLRPPKKKLLILDLNGLLVDINEDYHNAHMADAKVRRKLVFRRPYCDDFLNFCALNFELGIWSSRKKENVDSVVNIVMSEFKPHLLFCWDMSKCTFTGHKTLENKHKPLVLKELRKLWNVEEQDLPWEVGDYSPSNTLLVDDSPYKALRNPPHTAIFPHSYSYLNWNDDSLGPNGDLRVYLQNLAAADNVQHFVRDNPFGQPFITESDPHWNFYAQIADRGRAPLTCCA

SEQ ID NO: 55547 - protein, 305 aa, Zea Mays
MPISCRLAFGYAYPAYECYKTVELNKPQIEQLIFWCQYWLPFYSEAKVLFFVYLWYPKTKGTTYVYGTFFKPYISQHENEIDRNLLELRARATDMVVLYFHKAASVGQNTFFDVLKYVAAQSPSRKSRLHPHQEPQQQQPQVQVELQQPQPQKQAAPVMRRGASIAARQAAMAQQSLETIPVPSSPKIKRQTSGRPGSVASTKPAAAASTPKPGGSPKKGEVKPAVDPVQTPATSADSPKSEPSAPPLSETEEVDNMAIDEVSGDAAEGAEELDPALEETPMEETIRVTRAKLRRRTATEDSAGN

SEQ ID NO: 55548 - protein, 272 aa, Zea Mays
MRGQPSLLPSVRKQWPGKPLLYGIGTLLVMPLRTLYGVGRVFGAGRFLCNMTNVSSSLQIELVPCLRDNYAYILHDVDTGTVGVVDPSEAMPIINALEKRNQNLTYILNTHHHYDHTGGNLELKAKYGAKVIGSEKDKDRIPGIDITLKEGDTWMFAGHQVLVLETPGHTTGHVCYYFAGSGAIFTGDTLFNLSCGKLFEGTPQQMYASLQKITALPDDTKVYCGHEYTLSNAKFALSVEPGNKALQEYAANAAELRNKNIPTVMLSVFVTS

SEQ ID NO: 55549 - protein, 391 aa, Zea Mays
MEGFSRDLLCGIGKGDAPPPEKRPGQLREEMEEVELSLGLSLGGRFGLDRKGSKLPRSSSVAAMLTTPVEVPAPPSLSRASSLPVQAEASEVERKQGLDGWGSCREGGGLGVQHAARLPASGNPSSASSVGEGQILQGTLMRTSSLPAVIEASGNDDWKKRKEAQSLKRLEVKKKRIERRNSLACNTSKEAAGQSPKEMNANTDKLVSSDETIVSANESHSSGKHLVKGLPPKYQATITSEDSSSAMRKKPNSAFKAITEEQNSSSSVPSSGEAISSVTAPSLPLLSLVPITATLGSREDQSILGRAGARANGMGDVERRMMQEMPGVFTKGLSNGSRVEGFLYKYSKGEVRIVCICHGSFLTPSEFVEHAGAGKVDNPLRHIVVSATPNL

SEQ ID NO: 55550 - protein, 809 aa, Zea Mays
MEEEEYSSETSNEEDGEKEGNAAESDVFRPVDVDPACLPRVGMIFDSEEDAFQFYVTYGCHAGFGITRRSNNTFDGFRYRSTFICSKGGQSRLRSGVTKPARKRGVKTGCKAKMIVKDAHFQNRWEVIVLELEHNHPLDPNLLKFKRHLKNSPFTINPPQICESEGQQSNSALVHSSRVVDTGITSSSTQIEFKAKIDRNRKLKLAEGDLDALLDFLNKMQDQNPCFFYSLDMNEQGQLRNVFWSDAKSRSSYNYFGDVVAINVTNFSDQYDMQFVSFMGTNHHAQPVLLGCGLLAGRSLGAYVWLFGTWLRCMNAKPPHSIITNYCHDVAIAIKKVFPNARHRFCLSHILNVLPEKLEEIDNKDEIISTFTTLAYDYVTMTDFDREWQDTIQHFRLERNEWLSKLYEVRMQWAPVYVKDSFWAGMSVTDRSDSVTDYFDGWLMSGTSLKMFVEQYEEAVKGKLEKESYEDLRSAQMRPPMVTGLPVEDQAAKVYTAEIFQKFFNEIGHSFHCNYNILERNESVVTYIVSEHVDQTNKVDYKVAYDNVQGDIWCLCRLYQSKGILCRHALTVLRQELVLMIPQKYIIHRWCKDCKQTCASISQPVSAGNQELGSYDDLYKLGHLYFAEVVEFGSMNSESKEYALSIMREVRDKVISYEKSLRDQRVDSHVSTANFAYNPVNEDFTDDALPISLSTKGWDLTQGQSKRSRKKKLATPTVLDTLKKKTKRAYNKRRNATANTLNTSATATDGITDGTNVQQNPVNEGWQLASTSAPETFSYGVENISFDLSQYNNAPSFHWPESSSRSQLH

SEQ ID NO: 55551 - protein, 440 aa, Zea Mays
MVWDQLKSSSFQVNEEMIETLFICNPANAPAKEATRRPVLPTPRAENKVLDPKKAQNIAILLRALNVTKEEVCDALCEGNTENFGAELLETLLKMAPTKEEEIKLREFEEETSPVKLNPAEKFLKAVLDVPFAFKRVDAMLYIANFDSEVNYLKKSFETLEAACDELRSSRLFLKLLEAVLKTGNRMNVGTNRGDAHAFKLDTLLKLVDVKGTDGHTTLLHFVVQEIIRTEGSRQSASAQTTPRTQANPLREELECKKLGLQAVAGLANELSSVKKAAGMDSDVLSSYVTKLAGGIEKVTEVVLRLKNEGTESRDGAWRFHDRMQRFLKKADDEIIRIQCQESVALSLVKEITEYFHGDSAKEEAHPFRIFMVVRDFLAVLDQVCREVGRVNERTIASSVRHFPVPVNPTTPQLFPRLHALRAGFSDDDDESSAASVSSP

SEQ ID NO: 55552 - protein, 165 aa, Zea Mays
MEIITTNTLGLMICCREAINMMRNQPRGGHIFNLDGAGSDGRPTPRFAAYGATKRSVVHLTKSLQAELQMNEVNNVMVHNLSPGMVTTDLLMSGATTKQAKIFINILAEPPDVVADYLVPNVREIPTKQSMKPTYIRFLTGLKAYSRIFSRLAFGARRNKYVTED

SEQ ID NO: 55553 - protein, 94 aa, Zea Mays
MRALLLFMSLCNACGIRYRKKRRQELGLEHNKQQQQQQNNGEAKTGVKDSSSNSSSGSSNFHVVQKRRLLMEVEEAALLLMTLSSSPASTLLHG

SEQ ID NO: 55554 - protein, 1060 aa, Zea Mays
MSTNPDEPKSRARTDFLLNNELEVQKFWDENKVFQADPGNDSPSPGEKFFGNFPYPYMNGLLHLGHAFSLSKLEFGAAYHRLRGSNVLLPFAFHCTGMPIKASADKLAREIQQYGYPPVFPVAEGSSAAVADATQADQVDVVAPDKFKGKKSKATAKAGAQKYQWEIMKSFGLDDEEIARFQDPYHWLTHFPPLAKEVLKKFGLGCDWRRSFITTDMNPYYDAFVKWQMRKLKKLGKVVKDMRYTIYSPLDGQPCADHDRATGEGVQPQEYVLIKMEVISPFPPKLKSLEGRKVYLAAATLRPETMYGQTNCWVLPDGMYGAFEINDTDVFILTARSAFNLAYQHLSRVPEKPTCLCELSGSDLIGLPLKSPLAFNETIYALPMLTVLTDKGTGIVTSVPSDSPDDFMALQDLVTKPALRAKYGVKDEWVLPYEIIPIIHIPEFGDKSAEKVCHDLKIKSQNDKEKLAEAKRMTYLKGFTDGTMIVGEFSGRKVQEAKPLIKSKLLEEGTAVLYSEPEKKVMSRSGDECVVALTDQWYITYGEAEWKQKAVKCLDHMNTFSTETRNGFEHTLGWLNQWACSRSFGLGTRIPWDEQFLVESLSDSTLYMAYYTVAHLLQNGNMYGKEISSVRPEEMTDEVWDFVFCDGPAPKSEIPAALLNKMKHEFKYWYPFDIRVSGKDLIQNHLTFCIYNHTALLPEHHWPIGFRCNGHLMLNSEKMSKSTGNFLTLEDAIKKYSSDATRFALADAGDAAESKLRTGPPTTYADRVFSNEMNIAIKETEKSYNAFMFRDALKSGFYDLQLARDEYRLSCGAAGMNRDLLWRFMDVQTRLITPICPHYAEHVWQKIMKKEGFAIKAGWPAADTPDPTLRIANKYLQDSIVLMRKLLQKQESGSKKPKKGAAPAPPSEEKKMSIGLIYVNEHYSGWKEQCLKVLQSKFDSQSRSFSPDQEIAEALKECPIGQEMNLKQVQKLCMPFIKLKKDEAREVGPQALDLKLPFGEMDVLRENLELIKRQLGLEQVEVLSASDEAARAKAGEHASLLEKNPPSPGDPIAIFLSKQS

SEQ ID NO: 55555 - protein, 229 aa, Zea Mays
MLGRLDIFQKSHCVKVNPDTPQKQVRFLTLSGDKKLLTPQPRLRTGFFSVMDSQMIPVGCIPEACTSVGAAKYGRPIGLDESLKVDLIVIGSVAVDPSSGARLGKGEGFAELEYGMLRYMGAIDDSTMIVTTVHDKQLVDDIPVEKLLVHDVPVDIICTPTQVIFTKTTIPKPQGIYWEKLSPEKLGQIRILRELKQRIEQETGTMLPCGPSEKLPPTAQRKQRWQRRR

SEQ ID NO: 55556 - protein, 214 aa, Zea Mays
MKTGIVESDLVLTVSPHYVKELTYGPDKGVELDGVLRTKPLEIGIVNGMDVYEWDPSTDKYTSVKYDATTVTEAKALNKERLQAEVGLPVDSSIPVIVFVGRLEEQKGSDILIAAIPEFVGENVQIIVLGTGKKKMEEELMQLEVKYPNIARGIAKFNVPLAHMMFAGSDFIIVPSRFEPCGLIQLQGMRVSSSLCYSSDLSAHSHLFITWRTC

SEQ ID NO: 55557 - protein, 154 aa, Zea Mays
MKAFWLPSATPEATVKVDLPSTDTVCPEGQEKLKLKSLFPISFTEETADQKSSKAGNSCSYMCPSCKSTLTNTMSLVAVSTCGHVFCKKCSDKFLVKDKACLECSKPFRERNLVPLEKGGTGFAAHDERLEARDFKYLGSGSGLGLVKPAPKTY

SEQ ID NO: 55558 - protein, 101 aa, Zea Mays
MTQAKSAPGRKEMGRGRSPEPLDFFIWTVEDVGLWLEEINLGGYRQVFEENGVNGEYLESLSMFTTEQILRFIRRCHMKWGDFITLCKELRRIKVPLPRYR

SEQ ID NO: 55559 - protein, 309 aa, Zea Mays
MSRWRAAAYSISAAAASRNSAAEAGALSRALAKAPSPPSLPLQTLTRNFAKSAAAATATSPGPGASSPPAGPRPEIRLKSMFLSKPCSLALPPDSPHRAVDPQYKGIKRFLLTLLLFYSKQSKSIRGANVVYDRITSQVDAPTIYDVFQLEKTFKTTFSLLVLHMWLVLRRLKEEGKDGVKFGQYIYEMYNHDVELRVSKAGVNLLLTKWMKELEKIFYGNIVKYDAAISPEARQDDLVNVIWRNIYAEEGSEAMDVAAAPAVQALARYTRREATCLSLTGKDSMFSGNFKFTALLPATPSPSPKKPVR

SEQ ID NO: 55560 - protein, 694 aa, Zea Mays
MAVVNPTNLAIDDDDDDTPISFKRTSNSTKTARPTPSKHEGSSGGNGAPVRIPKPVSPNPQKNGATGASRPLHMKPPSSSPNHRPSGSGQPNSLAQHSSKANSIDMSKLKRPLVKDERSDDSDDEVPIGLRRKVEEKKLKGVDTRVQKTDDSDDDDKPLGLKINSSRMSSNRVNKPVLQRTVPKVEQPDEDSDDDKPLASRLPSNAGPKSGGDVSEDSEDEKPLAARFSKVAGSGNPKIASSSKGLTSDTNGQQSLGKRPLDNSNQTSSALKKAKPSNVSASAIVRREIKTDDNTPLAQRLKMGESSKGKSSAKSVFKKSPASVKKDIKKMKGKGKLKKNMKNSQFSKIMKVPPGSGGGKKWTTLEHNGVIFPPPYKPHGVKMLYNGKPIDLTPEQEEVATMFAVMKDTDYAAKPTFIDNFFTDWRKVLGKNHIIKNFELCDFTPIYEWHLREKERKKQMTTEEKKTLREDKLKQEEKYMWAVVDGVKEKVGNFRVEPPGLFRGRGEHPKMGKLKRRILPSDITINIGKGAPVPECPIPGESWKEVKHDNTVTWLAFWNDPINPKDFKYVFLAASSSLKGQSDKEKYEKSRKLKGHIQRIRENYTKDFKNKDVTRRQIAVATYLIDKLALRAGNEKDDDEADTVGCCTLKVDNVTCMPPNQIQRLKSLCTRQLRVSVLERSQDKIYLTRLIHLG

SEQ ID NO: 55561 - protein, 192 aa, Zea Mays
MLSRWTCIPRVDLWVIGDIAGSIIATNRTKIWIPRRGRLPSSQGCGRARARAYHGRAAAPALRRAQGPDRHTRSRTGVGAGSAAPASWLGLGTPHLRCRRAAPAHPRGLACCRGRGQRAGQATSLSRLWLRLDRARQHAGPLPRRDACAAVSATGPRQSAPSHRGAGGPRATAGGSPACTEGLRRPHRRGGR

SEQ ID NO: 55562 - protein, 141 aa, Zea Mays
MDALTNSNQKKVKDSWRIVNHRDIIPTVPRLMGYCHVEAPVYLKFGDAKDAPVNNSILDDEDQGDVIGEYTPDVLVTEFMKGEKQLVEKLLQTEINLLRSIRDGSALMQHMEDFYYVTLLENVRSSYQVADTANDEYQLTA

SEQ ID NO: 55563 - protein, 254 aa, Zea Mays
MPEDKEYAPVPLGQAAAEAAAPDSEDPAKSPPRPSSPGTSTRKAFFAVLQSWVSRKFMTGCVVLLPIAVTFFITWWFIQFVDGFFSPLYAKLGFDIFGLGFLTSLVFILLVGIFVSSWVGSTVFWVGEWFIKKMPFVRHIYSASKQVSTAVSPDQNTTAFKEVAIISHPRVGEYAFGFITSTMVLQTDKGDEELCSVYVPTNHLYIGDIFLVNSAEIIRPNLSIREGIGDHVTGTNTSEEPERPFGQSEDSMTV

SEQ ID NO: 55564 - protein, 72 aa, Zea Mays
MQGDQKLPAEQEQQRGGGAGGGVHKPGGVPDAGGAAAEQGRGRLPREHPVAEELLAARLTGPRGLPLLILIL

SEQ ID NO: 55565 - protein, 197 aa, Zea Mays
MAELMRNPDAMHKAQDEVRQAFEHSSPDEHEAQMDKLRYTKTVIKETLRLYPPLPLLLPRQCRETCDIGGFQVAKGSRVIVNAWAIARSPAHWDDADRFMPERFERDDSAAGYSRATTDGTTQFEYLPFGHGRRICPGMGFGLSTLEILVARLLYYFDWSLPEGMQVVDLDMDMTVGASARRTNKLHLVASPYQVPT

SEQ ID NO: 55566 - protein, 326 aa, Zea Mays
MYIEFYDVMSVPMAIALSGQPLLGQAVMVKPSEAEKNLVQSNATSGGAASGGARKLYVGNLHSNITEDQLRQVFEPFGQVELVQLPLDAMTGLCKGYGFIQFARLEDAKAAQSLNGQLDIAGRVIKVSAVTDHVGVQASGATTGDLDDDEGGGLALNASSRAALMLKLDRSGTATSLTGGIGAAGVAVPATSVIGAAGAASLLSPTVSAVGSVPGAPVLPITAQNVIMSTPTEFLLLKNMFDPSLETDPDFDLDIRDDVQDECSKFGAVKHIFVDKNTAGFVYLQFDSVTAAGKAQQALHGRWFAGKMITATFMSDQEYSTKFPNL

SEQ ID NO: 55567 - protein, 257 aa, Zea Mays
MMEIRSDLMDAHLYAFKRTILQDVLEQKEAYRSIRLEVLPYLVRSQLRSTPSGGSGTSVDEIESSAFQSSGNLQCLSQHRVIAPSAFKQDVLSRSSGGHRCCAYIASKSKYCHRLNSIQSYCDINRDVIGEVSHLSGYSFSAQNNIIHPSSVLGSKTTIGPHCILAEGSQLGDKCSVKRSVIGRHCRIGSNVKIVNSVVMNHVVIEDGCHIQGSVVCNNVQLQERAVLKDCQVGAGYIVTAGSEHKAESLARKYSEL

SEQ ID NO: 55568 - protein, 95 aa, Zea Mays
MKRFHLPEAEKLNGRAAMVGFFMAYFVDSLTGAGLVDQMGNFFCKTLLFAAVAGVLLVRKNEDVESLKKLVDETTFYDRQWQATWQDDSAGGPNN

SEQ ID NO: 55569 - protein, 55 aa, Zea Mays
MTVGEANRYAEDAVARFLEAGRIALRAGANESALVTMRPALTSRASMSSGLSSEL

SEQ ID NO: 55570 - protein, 96 aa, Zea Mays
MNYIIGAFKPPCDISITFSDARTRKQVSVKKDNGKTTMVPVFQSLETISGEVSIAPVPGKRIEHTGVKIELLGQIELYFDRGNFYDFTSLVDEFFW

SEQ ID NO: 55571 - protein, 233 aa, Zea Mays
MILQIDTTDILFICGGAFVDLEKTISERRQDSSIGFGAPIRTNMRSSGASCPMVTSSLLESVESGDLVRYGLIPEFIGRLPILVSLAALNEGQLVQVLTEPKNSLSKQYRKMFNLNKVKLHFTDGALRLLAKKAIAKSTGARGLRAILETVLLEAMYEVPDEKTGNERVDAVVVDEEAIGSVDRPGCGAKILRGDGALDQYITRTNVMNLQETNDGLAGELEEAYMLSRIVSL

SEQ ID NO: 55572 - protein, 154 aa, Zea Mays
MDVPVDDPVENLTGSPSTLGNEEEATTYANVQDQSKEEPEKLYEEPKDPMQDELGNQGHVSMNNEDVGGQNKVDQATPTEHGEEAGVKQHDATVPDDKKWPGWPGESVFRILVPTTKVGAVIGRKGDFIKKMCEESRARIKVLEGPPAVPERAT

SEQ ID NO: 55573 - protein, 59 aa, Zea Mays
MYPFTSVCSSCRGIGKVIKDYCLTCQGSGVVGGMKHVTLDMPAESHICTGSTGNFPPQL

SEQ ID NO: 55574 - protein, 991 aa, Zea Mays
MGVQESFVELVQEKVENPLEFSAALKIALQNRSVNSPKAMVSHLIITIHIHYRNYVTGEHLYSKLSLVDLPASECLLEEDANRDNVTDFLHVSKSLSVLGDAFASLSAKKEPVLYGNSRITQILADSLGSSSKILLIVHVSPSASNLSRTLSTLSFSARARNAELSLGNRDTIKKWKDVANDSRKQLHDKEKEVLDLRQEVIGLKHSLKEANDQCILLFNEVQKAWRVSSSLQADLKSENLMLAEKHKTEKEQNNQLRDQISHLLKVEQEQNLKMQERDLTIQSLQTKLKSIESQLNEALNASDARSTIGSESASVISSPKITESTADSSSVTKRLEEELAKRDALIEKLHEENEKLFDRLTEKSGLGSAPQASSPSANKPANGQGREIGRSDSSKSRSPDVFASPVSQDKTGNSGAIVKSSNELAKTTPAGEYLTSALMDFDPDQFEGFAAIADGANKLLMLVLAAVIKAGAAREHEILAEIRDAVFSFIRKMEPKKVMDTMLVSRVKILYIRSLLAKSPELQSIKVSPVERFLEKSNTGRSRSSSRGSSPGRSPVHHHGHGSRTALVDEHVHGFKVNIKQEKKSKFSSIVLKLRGIEEETWRQHVTGGKLREITEEAKAFSIGNKALAALFVHTPAGELQRQIRAWLAENFEFLSVTGADAAGGAAGQLELLSTAIMDGWMAGLGTAQPPTTDALGQLLSEYTKRVYTSQLQHLKDIAGTLATEEADDPAHVSKLRSALESVDHKRRKIMQQMRTDTALLTKEEGGSPIRNPLTAAEDARLASLISLDNILKQVKEVIRQSSTGPMRKSKRKALLELLDDLLTQMPSLLDIDHPCAQKQIMEARKVVESLQEDPDDPAPQSNALGEGEVSQWNVLQFNTGTTAPFIIKCGANSSGELVIKADLRVQEPKGGEVIRVVPRPTVLADLSFEEIKGVFEQLPEAVSLLALARTADGTRARYSRLYRTLASKVTALKETVAEMERGGVFKDVR

SEQ ID NO: 55575 - protein, 522 aa, Zea Mays
MAGAGQEEEKVEHEGEEMVAGRQQGSSRGAVEQCGGQAQPAVTAPCSSKTKELIAEIELLEEEIANREQHVLTLYRSIFDQCMSGPPSGQSSGISSPAHAKTITARTRRQPSIISSAFCSSKKLPLQPFHITESLSESGRTKNTLKAKIKHPSFSSETLDSSHSTSFPPDPKKLPYSGSGGSLARTLKDHLYQCPSKISEEMVRCMASIYYLLRTEAPAGKPEKARSPFLSRSSTNVILPRRVNGEENSAPNNRCTVEIASISVDKNQMPDVSYAITHYRLLVEQLERVDLSVSENSVKLAFWINVYNSLIMHAYLAYGIPNSSLKRMALFHKAAYNIGGHAITANAIEHALLCFRSPRIGRWFESILSTAMRKKCPDEKQLVQLKFGLQECQPLALFALCTGASSDPMLRVYTAKNVMEELERAKREFLQATVVVRKSTKKLFLPRLVERYAREACVGPDSVLPWAQREGAVAVVDDRPQQEAAQRGVGSRRKAVQAVEWLPYATRFRYAFARSMVDKPHC

SEQ ID NO: 55576 - protein, 231 aa, Zea Mays
MQEGRAKQLEEEIKDLRVKHKEELQEAAEHRELLEKDLEREKAARAEIEKTSSREAPKVPLPDQTRNAPLRKLPSSGSINSLEESHFLQASLDLSDNASLERRMSSESNMSYYLRTMTPSAFESALRQKDGELASYMSRLASLESIRNSLAEELVKLTEQCEKLRTEAAAVPGLRAELEALKQRHFQALELMGERDEELEELRNDIVDLKEMYREQVDLLVSQLQALGARV

SEQ ID NO: 55577 - protein, 134 aa, Zea Mays
MQEKEVHDYLKSLCPDLHITRGEHDEDARYPETKTLTIGQFKLGLCHGHQRQLDVDILVTGHTHQFKAYKHEGGVVINPGSATGAYSSITYDVNPSFVLMDIDGLRVVVYVYELIDGEVKVDKIDFKKTATMHG

SEQ ID NO: 55578 - protein, 160 aa, Zea Mays
METPLSSRRITRSLAAASAQRRRRAGLRRPLLPRQERRRWGDPASRRPARHHQRLPHRRARGGRPPRHRYHPRLHRRQDPPQGPASHARLRGGAPARPGQGAPPQGRRGAGLRRRGHRQARAHPGAARCIQVAGPASCADASQHAADRARPHSQGRSPPA

SEQ ID NO: 55579 - protein, 189 aa, Zea Mays
MLLRENDASNRCWKTQGRVSTSDVFGVKDSDLVPGKYEGGLKLWEGSLDLVKALNSDIKEDKFHLEGKRVLELGCGHGLPGIFAGLKGADLIHFQDFNAEVLRCLTIPNVKVNLFKDSPEGTCTCPIVGFFAGDWSEMDKLLLCGDAEQDKTASGDTEVLALPWGCGLHGREEALLWSRWWHKAVSALG

SEQ ID NO: 55580 - protein, 355 aa, Zea Mays
MARLFFLLLLFPLLYSSVTGLNRSDFPPSFLFGASTSSYQVEGAYLDDSKGLSNWDVFSHVPGNIDDGSNGDVAADHYHRYKDDIEMMHSIGLSSYRFSLSWSRILPKGRFGGVNQAGVKFYNSLINGLLEKGIQPFVTINHYDIPEELQERYNSWLNPEIQEDFTYFVELCFKMFGDRVKHWVTFNEPNLIVKLAYSIGAFPPNRCSEPYGKCDSGNSSTEPYIAAHNMILAHAKTVNIYRKNYKSKQGGFVGISLHLRWYEPLRNITEDHLAVSRALSFDAPWILDPLFFGDYPHQMRQILGPNLPKFTEGEKKLLKNQIDFIGNEMGYPLENRHLLQTPMSFQAPWRSWSCI

SEQ ID NO: 55581 - protein, 262 aa, Zea Mays
MAASSIPPCQVQEQDDEVVDRNILPYCSIDRKQKKTLGEMEQEFLQALQKAIMSNEEFDNLKEELMWEGSSVVMLNEDEQKLLEASLAYTSGNPIMSDAEFDELKLRLKTDGSVIVKEGPRCSLRTHKVYSDLNVDYLKMFLLNVPATTVALGLFFFIDELTGFEINVFQLPEPFGFIFTWFAALPLILFLAQSLTKAIVQDFLILKGPCPNCGTENLSFFGTILSVSSGGTTNKVKCANCSTELEYDSKSRVITLPEASNA

SEQ ID NO: 55582 - protein, 1013 aa, Zea Mays
MGSDRAELARLCSARNWSKAIRLLDSILARSPSSIHDLCNRAFCYSQLELHKHVVKDCDRALLLDPALLQAYILKGKALSSLDKKEDALAAWKQGYEIAVRDTTDLKQLLDLEELVSSVKICGTTQSADHVMDASTCDTKVVISEDRVADTSFAATTMADTKTVVCEEAIGSSKVSSNGDTKLTNYNKKADHNKVSSSSVKDITGTQAPKKAPKLDKKNKAKAVKEINGRAEGVTGRASTDESETISLDQALFATKISKSSKSISLDFRLSRGIAQVNEGRYDQAISIFDQILRETPTYPEALIGRGTAYAFQRELDSAISDFTKAIQSSPSAGEAWKRRGQARAALGEFKEAIEDLTKALEFEPNSPDILHERGIVNFKFKDYNSALEDLSTCVKHDKKNSSAHTYLGLTLSALGEYKRAEDEHVIGLKYDESFLDCWAHLAQLYLDLAYPEKLLNCLEKAIQIDSRFAKAYHLRGILYHGMGRHRSAIKELSVALTYESSSIECLYLRASSHHAIGEYKAAIKGYDDVLDLELDSMDKFVLQCLSFYQKEMALYIASKANLEFSQFNIDDDVDPLFKEYWCKRLHPKNVAEKVYRQPPLRISLRSGRLNKQDFKFTKHQTTLLLAADSIGKKIQYNCHGFLPNQRQYRMAGLAAIEIAQKVSKAWRFLRNPKNIAKLVRKRDKLNMSQNRGGYCSTSTLAGSPTSSPNEDRVSSGISLSWQDVYNIAVKWRQISEPCDPVVWVNKLSEEFNSGFGSHTPMLLGQAKVIRYYPYYQRVLETAKTIMLDLKYVNNAEDRAIFLTDIDKLKKIEIASSCSDLYHVVGETYWVATRCDSMAFRGRRLEGTRITTQNIGKTGFDFAIRTPCTPSRWEEYDEEMTAAWEAICEAYCNDTNPTRDPGVLDAVKDAILRMTYYWYNFMPLSRGSAVVGYVVLLGLFLAANMDITASIPPGVQVDWEAILSPDPGTFVDAVKPWLYPSTKISRCLKDYTDVSCAFSTTGSVVAALTSVDP

SEQ ID NO: 55583 - protein, 139 aa, Zea Mays
MAAFPSAKPPLGVFFAAIAPRLQPRYYSISSSPNRMAPSRIHVTCALVYGPSPTGRIHQGVCSTWMKNTIPLEYSEECSWAPIFVRQSNFKLPADPSTPIIMIGPGTGLAPFRGFLQVSIETIWGRIGHFNPFLWMQEP

SEQ ID NO: 55584 - protein, 341 aa, Zea Mays
MQAVIWFISKMVCMVGNFKMSSVLKLVMMENHATPDDVIHEMTAAQVLQKQLFDAHEPNLLDENDMHIFGSKPMADPLDLVCCSTCKKPVKASQYAIHTGQCSSGKVNTNGSVGVDHANPTKPLKKGRKIKLISNGNQKVHIKVKAKSQTESNNIANSFELDNGHVTKVQPIDSTGLGLSADSSATINVPKNHPRDAPVPLATKMYHSQGNYRLRFELGQLYRESCVQHLSGHTTPNVSHENGLMASSRFSSCGNSALPTQKSLVPQTKPLADPQQLAASRPNQSQGTKTDRASAQASAIKNEGSRSRCNKATIPHSRNKGSKKTQQQPNGRVHAIKFPVE

SEQ ID NO: 55585 - protein, 52 aa, Zea Mays
MTLMWILIQAARRAFSVARLLHALTTLLSMTHSLERKHHPFLLYLVEALPGK

SEQ ID NO: 55586 - protein, 707 aa, Zea Mays
MPSSTAGSSGGVILPGVGASLGEICRDYMNGRCTKVETDCKFTHPPQQLLMSLLAATTSVSALGHAPLAPSAAAMAAAQAIMAAQALQAHAAQAKAAGGTSGSTNKADEADALKRTVQISNLSPLLTVDYIKQLFGFCGKVVDCVMTDTKQIVYVEYSKPEEATAALELNSKSVGGRPLNVEMAKALPPKANNNLPMMMQQAVQLQQIQFQQALMMQQSIAAQQAAARAATMKSATEAAAARAAEISRKLKAEGFGGDNMEEKDAKGKSGSPSSPTRRSKSRSRSPIKYRRSRRSRSYSPPVGRSREHRSRSPSRSRHSKHGSDRSHRDDKDMYSRSGRRESERSRDHHSSRSRRNRSKSRSPRHKKPSRVDSRSPKKQRLESLSPSKSRSARAGSRSPRHHKGSKSSPTSDRHSRHSRHSRSRSLDRKHHHSDKKDSRKSEIQDDRRSHRGSRRDKDESSVKDDGERSHRGSRRDKDESSVKDDGERSHRGSRRNKDESSVKDDGERSHRGSRRDKDESSVKDDGERSHRGSRRGKDESSVKDDGERSHRGSRLDKDESSVKDDGERSHRGSRRDKDESSVKDDGERSHRGSRRDKDENSVKDDGERSHRSSRGDNDGRSVKDPVEDKRVDSNAVAHKRSSEDEILNNNSSNHKKHRHEVGLEVDEGNDVCPAVADPNGKHETGGMKIFGELECCSERSSDILKCL

SEQ ID NO: 55587 - protein, 84 aa, Zea Mays
MPPPSASASRLATHWIADALADDESLDFSVLKAWKFWRIGGFAFHLSVKTSRKIYVQRNLHYQKLLSSWHPRIPCVQHLIQPSR

SEQ ID NO: 55588 - protein, 910 aa, Zea Mays
MPSDKAKAPKKKGEEDPGIPPAPCEGEISHEPHRQRSLNGRTTGPTRRSTKGNWTPEEDAILSRAVQTYQGKNWKKIAESFPDRTDVQCLHRWQKVLNPELVKGPWSKEEDEIIVQMVNKYGPKKWSAIAQALPGRIGKQCRERWHNHLNPAINKEAWTQEEEITLIHAHRMYGNKWAELTKFLPGRTDNAIKNHWNSSVKKKVDSYISSGLLSQVPCLSLIECPAQCDSLSAMDQQNNGGTDCNDQNTSVVLSSDLQVNVDANKKEAHDSHSSLCQGVCYPSTETVGSVLPDDLEMDMDEGSGNSIFADDQTLCSTSNQEQSMVPFVVAQEMPVSVLSSVSSAEQKRHLISDAKSLKSELWKDVCLQTLITGDTDDPDASSRLNNPDSSKMDTNFLKEAYPLHTPNPSSVIETVYEPMALVTISPPFICSDGLSFAPENRSKPGEMSDCEAEMVTCSNNFFGNAEQSAKLASSDDRPEAFTMTESTTNCGGEQLTDAKEPVASTAKERLSKDIETMPDKKKGEGALFYEPPRFPGLDVPFISCDLVTSADLQEFSPLGIRQWMRSTMNVPTPLRLWGSPTHDESPDALKTAAESFPCTSSIMKKRQRSLLSPTPDERIEKKSGIAKGVTDISYMITATCSMNATNDEDIVTESAVCAKQPSLKHLDKKLEFSDINKENSDGASEQAKDAQNTQLVDEQHSSPNVVNPNTDLQDNIQPVQILVEQSSNNLISSDHGAKPSCKEVISSKSKPTKLLVEKSSPCINVDYEYVNLLADTPGIKRGLESPSAWKSPWYIDMHMHFQGFVSPADRTYDALGLVNRLSKHSAAAAVEACEMLASGNTTSDKENKDNTDGKELVTRKSQIKIMAEARVLDFDESPAPARTADKKLGSCHRRSVSSPILPSPNLRSFR

SEQ ID NO: 55589 - protein, 1072 aa, Zea Mays
MYGKSLLHEGSCEPRIQEVEAEVQEPSVHPWGGLSTTKDGILTLLDCFINAKSLHVIQNVFDNARAREREREMLYPDACGGGGRGWISPVIPNYGRGHGTRDTCALHTAHLSCDTLVDFWSALGEETRSSLLRMKEEDFIERLMHRFDSKRFCRDCRRNVIREFKELKELKRMRREPRCTSWFCVADTTFKCEVFEDAILVDWHQSLLEQDGIYHHFEWAIGTDEGKSDILNFENVGMNGQVHRKGLDLDHFEDYFVTLRAWRLDGRCTEFCVKAHALKGQSCVHRRLIVGDGFVTITKGESIRSFFEYAEEAEEEDEDDVVDRDSNDPDGDIAHPQKHAKSPELAREFLLDAAAVIFKEQIEKAFREGTARQNAHSVFVSLALKLLEERVHVACKEIITLEKQTKLLEEEEKEKREEEERRERRRTKEREKKNRRKERLKGKDRDKEKTLVRSKKPDLSPFSLCSQATPSNNESQDVLDLRYSDSEEEDNVVVGEHYPDSSADQSSSKDSDERSNGHECSVTIEFVPSDCDSSFLCDEPKSSRNLRFRRDFPEEKDASYWHEGCCDDSGDTQWQSRERTRNNTRNYNSVFNTNNRTRDRYNPCSCSHQEDYRYFTTATRSSRETKMPRKTVAEKPRLQYRRCYPPDSFAVSNGGRVGGTPNKNPGPKQVWEPMDARKKTGNGNSATGAADGSDQVECSNNISECEKLEAVCDSLVEICSEISAETCKSDTDQPWRQGEKNQSACSDESKCVDKPNCSKDTGRTTNLTTSDSSSCLSEGDRDSSMTSLSVQNVESSSASDSEESSDRNNSSPGDIPAKNVSRTLLEMCAGNGFREYQPKGLNPPNGNQFGFMVAPSQEQMLYQQKVHAPPYSSPFMGFHNHPLAVPTNGYLPYTQPGHFYPASMTPVGYGVAGDQCVDFSMQYRNNIHPYSGPEFGFLPSQPVHKTSVNFHAVPVTPLTPLCSRGMPVATNQERQQSPALFPKLKQAVLVPETVCAGDNTFKQKGDDVDSTPFSLFQFNLPIAPPTLATSKERSGELAPAQIARVQPCSREETNVKEYNIFSGCDGVMFQLN

SEQ ID NO: 55590 - protein, 55 aa, Zea Mays
MLLHRSRLVPFCTSILLIWKIIYSSVGLFNIRFHLLQTKNAIQCSCDFCVKLLHF

SEQ ID NO: 55591 - protein, 259 aa, Zea Mays
MSGEAAAVGGGEGEANGIPPNVTIYINNLNEKIKLEELKKSLTAVFSQFGKILDVLAFKTLKHKGQAWVVFEDVASATEALKRMQGFPFYDKTMRIQYAKTKSDIIAKADGTFVPRERRKRTDEKSEKKQKREHHHDAGASQIGMGVTAYPGVYGAPQLTQIPIAGGQRVMMPEIIVPNNILFVQNLPHETTPMMLQMLFCQYPGFKEVRMIEAKPGIAFVEYGDETQATAAMNNLQSFKITKENQMVITYAKKTFCST

SEQ ID NO: 55592 - protein, 54 aa, Zea Mays
MLDVLMFLCFLDTALLPCSVECSGALLLLVEFDESSPCPCSRVCVELRYLVQLA

SEQ ID NO: 55593 - protein, 1932 aa, Zea Mays
MEEDHSVILISEGAIKSIKLSLSTGEEICTYSINECPVTHPSQLGNPFLGLPLEAGKCESCGASENDKCEGHFGYIELPVPIYHPCHVTELRQLLSLICLKCLRIKKGKVKQSNGKGNAAPTLCSYCRDIPALSLKEIKTTDGAIRLELRAPHNKHMTERSWNFLDKYGFHHGGCSHHRTLLPEEALNILKKVPDDTRRKLAARGYIVQTGYVMKYLPVPPNCLYIPEFTDGQSIMSYDISIALLKKVLQKIEQIKRSRSGSPNFESHDAESCDLQLAIGQYIRLRGTTRGPQDNTKRFTVGSADSAALSTKQWLEKMRTLFISKGSGFSSRSVLTGDPYIGLGVVGLPSEVAKRMTFEEQVTDININRLQDVVDKGLCLTYRDGQATYAITVGSKGYTTLKVGQTISRRIVDGDVVFLNRPPSTHKHSLQAFYAYVHDDHTVKINPLMCGPFSADFDGDCVHIYYPQSLAAKAEALELFSVERQLISSHSGKVNLQLGNDSLVAMKAMSHTTMLHKELANQLAMFVPFSLLAPAVIKPVPSWTISQIVQGAFPANLTCQGDTHLVRDSTIIRLDLGKESVQDSFPDLVSSILREKGPKEALQFLNVLEPLLMEFLLLDGLSISLRDFNVPKALLEEAQKDIRNQSLILEQSRCSTSQFVEFRVENNLKNVKQQISDSVGKFSDLGLLIDPKKEASMSKVVQQVGFVGLQLYREGKLYSRRLVEDCFTNFVNKHLAIGDEYPPEAYGLVQSSYFHGLNPYEELIHAISTREAMIRSSRGLSEPGTLFKNLMAILRDVVICYDGTVRNICSNSIIQLKYGEDDETDSSSVVPPGEPVGVLAATAISNPAYKAVLDSSQSNNASWESMKEILQTRTSYKNDVKDRKVVLFLNDCSCAKKFCKERAALAVQSCLKRVTLGDCATDICIEHQKQINLDGTSEAAPTLVGHIHLDKGHLERINISTQDILQKCQEVSGRFGKKKGHLCHIFKKITFATCDCSFTQMPIDGKLHKVPCVQFAFSDDIVLSESIERAVNVIADSVCSVLLDTIIKGDPRIQAAKVIWVESDAASWVKHTRKVSKGESALEIIVEKDDAVSNGDAWRTAIDACLPVLNLIDTRRSIPYGIQQVRELIGISCAFDQVVQRLSTTVKMVNKGVLKDHLILVANSMTCTGNLIGFNIAGYKATFRSLKVQVPFTESTLFTPMKCFEKAAEKCDSDSLGCVVSSSAWGKHAAVGTGSSFQILWNENQLKSNKEYGDGLYDFLALVRTDQEKTDYMFLDDVDYLVEENAADDMCLSPEPDGTLGKPTFEDNFEEQNIQKGSSWEIGITTNSSWEQNASVANDSGDWGGWSSGGGAAAKPADQDNSWEVHAKVQDNSTTDWGGWSVEKPTGEATVSGEPAETDTWADKGAKMESDAGDGNWEKSSTPEASKKNDSSENTWDKRKGDGGDGAWGNRSDDGHGNWEHPSNWNGQSLDVDQDTWGNARGKKKADGNYCQWEEQPSNYKQKKTNADHDSSYNNVMPSSEIAWNAGDGTGRPNAKSNAESSWGEEDKMESDDHPKVPKESDTWNTGRSNESPWDNTDALQDSWVKSAARNNNTQDGSWDKVVSMKDLDSLQDSWSKATIQTNDAQNDSWDNVAKNAPDSAAEDSWGAATPAETTDSGNKEWKSDGWGAKSGNWSSQRNNPGRPPRRPDERGPPPPRQRFELTVAEKNILLEVEPIKLRVRSIFREACDGVRLNPEDEKFILEKVLEHHPEKQSKVSGEIDYLTVNKHQTFQDTRCFFVVSTDGSQADFSYLKCLENFVRKSYTEDADTFCMKYLRPRRRQAPPADVGTASGAPDEVPPSTAAETEQGTPPAPQAEVPQETWGSPAVPLEGGTHIAGPDSTGDAVILGEQHDLTPASPAVAPQVASEPDTTDGTGLLGKAPQADWGPRFDAD

SEQ ID NO: 55594 - protein, 264 aa, Zea Mays
MTSAVLAGRNEVHQAHQHHRQWAGARVPLMPKPSSNPNPRRHRAGPNPIPSGSPPEPRAAPAVAAEPSPSPSGHLNFRPSEMTPAEARHLRARLTSELCRVRAFLSRIDSWQDGQRRRRGPEPPARGPSPPPALVEAMRKRCADILMRLRRSKKSVWFNSPVDVEGLKLHDYRAIIRSPMDLGTVKQNLTAGRYPSHEAFAGDVRLTFNNALRYNPPDHHVHRLCRRGTAIQRSLGRLSSSISTSWIWRPSGSSIGSWSIGGRL

SEQ ID NO: 55595 - protein, 334 aa, Zea Mays
MAPLLAAAMNHAAHPVLRSHLGPNNESFSRHHLSSSPQSSKRRFNLSFTPRSARVGNQNGVQLLSPSEIPRRDWFPSDFIFGAATSAYQIEGAWNEDGKGESNWDHFCHNFPERIMDGSNADIGANSYHMYKTDVRLLKEMGMDAYRFSISWPRILPKGTVEGGINQDGIDYYKRLINLLLENAYGPDGKPIGPPMGNPWIYLYPEGLKDILMIMKNKYGNPPIYITENGIGDVDTKEKPLPMEAALNDYKRLDYIQRHISTLKESIDLGANVHGYFAWSLLDNFEWYAGYTERYGIVYVDRKNNYTRYMKESAKWLKEFNTAKKPSKKIITPA

SEQ ID NO: 55596 - protein, 753 aa, Zea Mays
MESTMEKPAVMDAARGGGGVGRAKSDHLAPSLSLSRTASAETVLGTAADAAKPAGFGRKRRSASVGGGNNNSHIRKSRSAQLKLDVEDLVSSGAALSRASSASLGFSFTFTGFTPPLQHMCSADPPSFSDDENPVDIEAGTRRKKLVTEPTLPIYLKFAEVKYRVAGKGSPREILGGISGSASPGEVLALMGPSGSGKTTLLSILGGRAAAGGAVDGCISYNDEPFSKSLKRRIGFVTQDDVLFAHLTVKETLTYAALLRLPRTMTQQQKKERAMDIIHELGLERCQDTMIGGSFVRGVSGGERKRVCIGNEILINPSLLFLDEPTSGLDSTTALRIVQLLHDIAEDGKTVITTIHQPSSRLFHKFDKLILLGKGSLLYFGKASEAMPYFQSIGCAPLIAMNPAEFLLDLANGNTTDVSVPSELDDKVHMENHNLENNNSKIDYRPSAQDVHEYLVDAYETRVAFKEKKKLLAPLPISDDLKATITSSKREWGTSWWQQYSILFCRGIKERRHDYLSWMRITQVIATSVILGLLWWHSDPSTLKGLEDQAGLLFFIAVFWGFFPVFTAIFTFPQERAMLNKERAVDMYKLSAYFLARTTSDLPLDLFLPIIFMVIVYFMAGLKATATHFFLSMLTVFLSIIAAQGLGLAIGATLLDIKKATTLASVTVMTFMLAGGFFVKSVPPFISWLRYLSFNYHTYRLLLKVQYDPVPDILTTTRHMDSGGTEVAALVAMVIGYRVLAYLSLRRAKALGS

SEQ ID NO: 55597 - protein, 158 aa, Zea Mays
MYIYREPNALAYAIKRSCENKAEVVAQDEKESGLRATLNLGHTFGHAIETGTGYGAWLHGEAVAAGTVMATDMSHRLGWIDDSIRKRVVDILKQAKLPIAPPETMTVEKFKNIMAVDKKVADGLLRLILLKGPLGCCVFTGDYEGNALDETLHAFCDN

SEQ ID NO: 55598 - protein, 488 aa, Zea Mays
MAMLLRRRLPLLRLLRPLHTGSMASISSSSTPPPPPPPPLQKPHAAFVGPRSRRLRFPNAAPVESGRGAGKSSPAAAYLAMGAAAALASLPVAYADSNEQGAVDTVASADPAVGEDLARKERKRILELVQSRGMQRGSYPKFDVAVKGQKVVVKFNMPSNCNVSHLIVDLVTHIGLEAEQHGGGSEVLVRAWDSPAARQITLNPPKKTSTGDHNEDGLCVLIFEPLIGSDYSEIEFIKPGSFSLKELEALISALKIASEKGSSGKNTPRKGNGQRSKHLPSLEKVVSDLEAMGVRVYGFDETSSVPMDGTVIWENLAGYEPQKREIEDTVLLALQSPEVYDDIARGTRCKFETNRPRAVLFEGPPGTGKTSSARVIAKQAGIPLLYVPLEVVMSKYYGESERLLGSVFSLANDLPEGGIIFLDEVDSFAIARDSEIHEATRRILSVILRQIDGFEQDRRVVVIAATNRKEDLDPALIRRHISQMFKLL

SEQ ID NO: 55599 - protein, 77 aa, Zea Mays
MGEDLSGLNVKELQSLENQLETSLRGVRTKKDHLLIDEIHELNRKASLFHQENTDLYNKINLIHQENAELHKKSMRL

SEQ ID NO: 55600 - protein, 226 aa, Zea Mays
MAMYWLVQGCQPGDSLVFHYSGHGAQQRNYNGDEVDGFDETLCPLDFETQGMIVDDDINTALVRPLPRGVKLHAFIDACHSGTALDLPYLCRMNRSGQYVWEDHRPPSGVWKGTSGGEAISFSGCDDDQTSADTSALSKVTSTGAMTFGFIQAIERGQGTTYGSILNSMRSTIRNTDDSAGVGGGAVTSLITMLLTGGSLSAGGLRQEPQLTACEPFDVYAKPFSL

SEQ ID NO: 55601 - protein, 136 aa, Zea Mays
MTGEQIQAPSSPRDGEDVAITIGRPKESGPKFGTMMGVFVPCLQNILGIIYYIRFTWIVGMSGVWQSLVLVSFCGACTFLTSISLSAIATNGAMKGGGPYYLIGRALGPEVGVSIGLCFFLGNAVAGSMYHRELLF

SEQ ID NO: 55602 - protein, 288 aa, Zea Mays
MDRMVNLPRGYGYIEFKKRADAEKALLYMDGGQIDGNVVKLRFTLQPRQRAVSPMKAPPPPPKRDVAQIEKGLSSAEKDAQQRPRESSPRRKPASPPRKRSPNRRAESPRRPPDPSPRRRPDSPPIRRRPDPSPVRRGGTPPRRRPLSPVRRRSPSPPRRHRSPMRPSPRRGRGSPSPRRRSPGPLRRRSPPPRRLRSPPRRPPPPRRYSRSPPRRPLRSRSISPRRGRGPLLRRGRSGSSYSRSPTPPPRKGPRRVSRSRSPRRPPRGRSISSDSRSSSSPSPRRGR

SEQ ID NO: 55603 - protein, 352 aa, Zea Mays
MAAAMDAPNPGAAAGPGMPSDALYQELWHACAGPLVTVPRQGERVYYFPQGHMEQLEASAHHQQLDQYLPMFDLPPKILCRVVNVELRAEADSDEVYAQIMLQPEADQNELTSLDAEPQEREKCTAHSFCKTLTASDTSTHGGFSVLRRHAEECLPQLDMSQNPPCQELVAKDLHGTEWHFRHIFRGQPKRHLLTTGWSVFVSSKRLVSGDAFIFMRGENGELRVGVRRLMRQVNSMPSSVISSHSMHLGVLATASHAISTGTLFSVFYKPRTSRSDFIVSVNKYLEAKKQKISVGMRFKMRFEGDDAPERRFSGTIIGIGSLPAMSKSLWADSDWRSLKNLTMGSGATGCS

SEQ ID NO: 55604 - protein, 236 aa, Zea Mays
MTVGAGIAVQDGSLLALGAKLPGRPTRDCLFSDPARDGKSVLKIWNLNEHSGVVGAFNCQGAGWCRVAKKNLIHDQQPGTVSGVIRAQDVEHLGRVADHGWNGDVVVYLHVGGEVVYLPKNALLPVTLRSREYEVFTVVPLKHLPNGTSFAAIGLLGMFNSGGAVRELRFGGEDADVELRVRGSGTVGAYSSTKPTCVAVDSKAVGFSYDATCGLISFELGIPDQEMYLWTVTVEY

SEQ ID NO: 55605 - protein, 93 aa, Zea Mays
MPWFAGKRVAGHLTLRLQQQDVPCETKTKDNVFVNVMASIQYHALADKASDAFYKLSSTRSHLHFNTERRPFSSSSTPGRQKFAITGGGSKRR

SEQ ID NO: 55606 - protein, 970 aa, Zea Mays
MERSCLTRVSHRANSKAQVNELLLVWRTATDAFAVPWKELKRYQPSAGLEKAWSRKREMVAWQYGMHSHAQCTTQCLDWIQFNGRGAASASLQMLRSRALLGSLPPPSRPDNSSQPPTTESVELVIQGQRAHAIASPRPAPAPPHRQHAQARPAPVVLRRRTYTIHIHTDTPNDANVATSARKMSQLPAPASRLWEASIRKLQTIRRATTATGPAADGADGGAALTPSLLSINSSSASSTIYQYHHEDGEDSDTSTDGGNDSEAGEDEDAGEPTHAEQLLPSGDFYQGDLRGDQPHGAGKFLWTDGSMYEGSWRRGRASGRGKFSWTSGATYEGDFAGGYMHGQGTYIGEFGDTFAGLWANNLRHGRGTQAYANGDVYDGHWRDGLQDGHGRYIWRHGHEYIGTWRAGDMHGCGTVIWADGDRYDGAWEDTRPKGQGTFRWADGGMYIGTWCEEAGAVHADGVYYPPSGGPAVPVPREPCDPITALLQELEVCEGKTASLMPSQKVLTWPGVEAVQKKPVWRPPKVSLDQGRRSSVSRRSSASLDLDMLQPAAAEGGETEEVRADRSCLRTSSCMRTPPRPGKKQGETISKGHRNYELMLNLQLGIRHAVGRQSAPNTLDLKSSAFDPKEKIWTRFPPEGSKHTPPHQSCDFRWKDYCPLVFRTLRKLFDVDPADYMISICGDEALRELSSPGKSGSFFYLTNDDKYMIKTMKKAEVKVLLRMLPAYYKHVRFFENTLITKFFGLHCVNVKLTGAIQKKVRFVIMGNLFCSSYAIHRRFDLKGSSHGRMTDKPIDQISEHTTLKDLDLNFIFRLPGTWFEEFCRQVDKDCELLEAERIMDYSLLVGIHFKDRCKDSSNGDNGTSQNAEDSEENRKGPLRLGICMPSRVENVVKNPESESPLIGEPTGEFQDVILFFGIIDILQDYDISKKLEHAYKSMQYDPNSISAVDPKQYCKRFRDFIFKAFADDVQ

SEQ ID NO: 55607 - protein, 780 aa, Zea Mays
MAQILLHGTLHATIFEAESLSNPHRATGGAPKFIRKLVEGIEDTVGIGKGTTKIYATVDLEKARVGRTRMVSNEPVNPRWYESFHIYCAHMAADVVFTVKIDNPIGASLIGRAYLPVEDILGGDEIDKWLEICDEKREPIGDSKIHVKLQYFDVGKDRNWARGVRSTKYPGVPYTFFSQRQGCKVTLYQDAHVPDNFVPRIPLADGKNYEPHRCWEDIFDAISKAQHLIYITGWSVYTEITLVRDTSRPKPGGDVTLGELLKRKASEGVRVLMLVWDDRTSVGLLKKDGLMATHDEETANYFHGTDVNCVLCPRNPDDSGSFVQDLQISTMFTHHQKIVVVDHELPNEGSQQRRIVSFVGGIDLCDGRYDTQYHSLFRTLDTVHHDDFHQPNFEGGSIKKGGPREPWHDIHSRLEGPIAWDVLYNFEQRDTWNVQLFRSIDGGAAFGFPETPDEAARAGLVSGKDQIIDRSIQDAYINAIRRAKNFIYIENQYFLGSSYDWKPEGIKPEDIDCLHLIPKELSLKIVSKIEAGERFTVYVVVPMWPEGVPESASVQAILDWQRRTMDMMYTDITQALEANGIQANPKDYLTFFCLGNREVKQEGEYQPEEHPEPGTDYIRAQEARRFMIYVHAKMMIVDDEYIIIGSANINQRSMDGARDSEIAMGAYQPYHLATRQPARGQIHGFRMSLWYEHLGMLDDVFQRPESVECVQKVNKIAEKYWDLYSSDDLEQDLPGHLLSYPIGVTADGTVTELPGMENFPDTRARVLGNKSDYLPPILTT

SEQ ID NO: 55608 - protein, 688 aa, Zea Mays
MFFSGDPSARRRVDLGGRSSKERDRKVLLEQTREERRRRQGLRLQNTSATKIQKFFRGKKALELARSEVRKNFCSTFGEHCERIEWNIFGTNSDFLRQLLFFFNANEDNDIAILCHVCNLLLQYVKQGGDVVTLFTGVNGSSLQPLVAHRVKKFALICVQAVYQKRHDWGSQLLTTPGTTSVPSVSLLETVGCLINPKFLWNCKVVGYLQQRKIYCLFRGIIVSVPQNVRNSGHFDSASVLEQVLMLVASHVGHHPCCCLKVDPRWSFSSQLLSIPFLWHRLPQLKKVFSVNGLNKYYIHQIACLLPSLVDVLPNDISANHPGYACVLANVLEAATWILSDAKLASDSAADIIAVCTSLLDTLPAVTTPTERADDDDEMPMDVNIKINLDVDLERQITAAIDSKLLQHLVNALFRGTLSTNDSDLSGPSDAEVDAVGSICAFLHVTFNTFPLERIMTVLAYRTEIVPALWKFIKRCHASRRWPFFLKFASSLPADSPGWLLPMSVFCPIYKHMLKIIDTGEFYEQEKPLSLKDLKSLVLILKQALWQLLWVIPSSSTQKVSPNPSGLKKLSVENVKTRARVGLSELLTQLQDWNSRLPFTAASDFYSQEATSENFVSQAILGNTRASEIIKLAPFLAPFTSRVKIFTSQLTCSRQSTSHSALTRQRFKIRRSRLLEDAFDQLSLLSEE

SEQ ID NO: 55609 - protein, 278 aa, Zea Mays
MGSKGVALALLLCLSGAAVGAWARPVATKDAAADEKFLWLKKHFGKGGGGLGGGGGGGGGLGGGVGHGFGKGGGLGGGIGHGLGGGYGKGGGLGGGIGHGIGGGYGKGGGFGGGIGHDIGGGIDHGISGGYGKGGGLGGGYGKGGGLGGDIGHGMGGGHGKGGGIGHGMGGGFGKGGGGLGGGSGYGAGGGGGLGGGSGHGMGAGFSKGGGLGGGDGLGGGSGHGMGAGFGKGGGLGGGGGGGGGGGFGKGFGFGFGKGSGFGGGGGGGGGGGIGDHH

SEQ ID NO: 55610 - protein, 71 aa, Zea Mays
MHLTLEFGGGLELLLENSTKVHKVEVTTPKDGQGKVTMKFLLSWVKENLIKERPEMFLKADSVYSIGSPGS

SEQ ID NO: 55611 - protein, 339 aa, Zea Mays
MTGEKCKPEVAKTGLGSSAAMTTSVVAALLHYLGAVNLSCSGQSSGDNASGRELDLVHAIAQSAHCLAQGKIGSGFDVSAAVYGSQRYVRFSPEILSSAQAIGGTVLPDVVSDVLTQRWDHENKQFSLPPLMTLLLGEPGTGGSSTPSMVGSVKRWLKSDPEKSRDTWSKLAIANSTLENQLRILKGLSENHHEAYESMVRSCSRLTYGKWAEVATNQHQELIIRSLLAARDACLEIRLHMREMGIAAGVPIEPDSQTRLLDATMNMEGVLLAGVPGAGGFDAVFSVVLGDASNAVAHAWSSVGVLPLPVREDCRGVSLEDADPRTREVSAAVWSIQIN

SEQ ID NO: 55612 - protein, 714 aa, Zea Mays
MGLPQIPVVKEEEPTEVSTPAGSSFSVDGPCDSGKLLEGSSSGSWFQNPSISDFKRKFAPGAASNGLNSQFRTRHAVDDPAGYQSLNPKPRDPNYRSCTKIKSTLHIPAMRVVGFDSGTDGSTGGPDIMVSHKMHSSLVIGNCDSSVVHHEVQARKRVLSPLTNALPAGQFYGNALNIGSGDEKVQNPRCVRQLSYSGFHDSKKANTGALDSFQPSTRSELRYSDWSTGQGFCKFSSNTFTDGPLLEGRELFSCSDQPGVEGIMNLAKVPARLSHSPPPTLSPLRPKWMHRMKAARAQRDLTGRIENDIIDLKEMGRSNFDDYSEYVGTIRMGDILEETSILHDGFDTMIPKRNFHRRYRCLGPESAPVSTHIECINSSNLLPVRRSLVGSFEESLLSGRYSCGKDNQSIDGFLAILNVTGGSFSPPTQKFPFTVSSIDEDSSLLYYSSIDLAGRLPTNNTKGPKLKRSLSSSDSRSTNSRLRIPVKGRIQLVVSNPEKTPLHTFFCTYDLSDMPAGTKTFMRQKITLSSASPSHPTREESKASDVKVESVQCGSELREFGALFSECSDNGHELEKGRSADMECFSMECDVREPNENGTSGNSENDANAEGCCCQINSCEGGKIYFNRSPKVNDIPAGGVLRYALHLRFLSPFSKKSSKSRYHCKLDMSSQPHSRSRTEEERRFYLYNDIRVVFPQRHSDSDEGEEAKNYKKHI

SEQ ID NO: 55613 - protein, 227 aa, Zea Mays
MDEFEERLFGGKDTDKGSLYEKLDRAENTGRRYNFGLSKGGFTRLSDSSSSGFPGFPASSDRSSSGWMDGYDSFNDGLNDTIANAARNIQMEEDEDVDGDWEDDFEFRPDVRFRRGSTYSVRDLDLRKPAAAKNPPRRQFETTTAEVLKKADFRTRISAKAQRKIAREIKTARAFGLMPFTTMGRRPFFFGRSAEEHYSDDGYFGFVKQKDGEPVENEDAEPNVEAV

SEQ ID NO: 55614 - protein, 171 aa, Zea Mays
MIMVEGISQFCNDLQLVISWHMKAATMCEFTRQEFIGGLQSIGVDSIEKFRGKLPSLRAELKDDNKFRDIYNFAFTWAREKGQKSLSLETAIGMWQLLFAERNWPLLDHWCQFLQVRHNKAISRDTWSQLLEFVKTTDPQLSNYDDEGAWPYLIDEFVEYLTENGLVQRKR

SEQ ID NO: 55615 - protein, 1100 aa, Zea Mays
MEEDDEFGDLYTDILIPTHTPASTSALSNPVLVETLHRPPPHPNPTPVAAAAEEVDDDWLLGGSEPIPGVDPTGDWADEDDDGGEPAPPAKRSTSADDIDPLMGGGAGDSGPVIPGLSSSSAAGAAGSDEWDSDSEDDIQIVLNETDGRPGLVEDEGDDEDGEDLVIVADGPAMEEQDWGEDPAAAGAEGERKDGCEPGKTVAAPTGRIGYSGGGPGFHQQHHSMFKYVRPGAPGASVGGVPGGPGQFRPPGPLGPFSGRGRGEWRPAAGRGMNKSFHSGYGITPWGGSGRNFGGGLDFALPPHKTIFDIDVETAFEEKPWKFPGADISDFFNFGLDEEKWKDFCKQLDQLRLESTMQSRIRVYESGRSEQDYDPDLPPELAAVTGHPDISADSRNKMVNGHTDFSAQGRGPANVRTPLMTGRPIQVETNYTDRFPSVDSRSHRMRESDSVIEIVCQGRDSMDDETVDQTEKDSQGGNKGAHCIEGKPYSSDKINNSDHNSNSVKKTQHKGQLPVSSESDMLSMDANTHSPPSYKTRGSPRGAWPLKGSSLGQNSIREIESSNEVIPRQSSSKRCHDSQKENLIEGSENKADSDSEGSLAANDDVADKLSTEDHFDDAGGGGGGDDDKLTLVGRVEMDVDDATSDPNMPSDANHDDNLVHSDTKQKHISVVEQPTEHNSSEPDELRNTENSKGRSGSSKDQQKHLESGEEVLQDKQLRRVNNVRMHHDAEEHKLRQKDEHSRDAKSDLERSRLPSRGREDIHQSYANRDRVDIQGRSYNKVRETEILPRRDDGVHSRRAKEEDLRLEYNVEGGARHRNKVRPIDRNDRDEDHSRKRLDDGDRRGSRQRERGDVVLNRRESDDSLIKRKKDDENLRRLKPENEDMVATHGYKARDDSNRRKKERDDGIDQKRRDDSGRLREKDDDRYHVKQKDGNWRQREREDRQRPKQENTLTVQREEGRGTGRGSRMMDDKLVSGGRKKDEPRSSLLSKDTQERTRQNEPSRRGQGVEENNMQNKGRFDDNSNSERNSRQEKQNNNRLSGSSDARHAGRDKHRESTRKGRGSELAEHDLHRSSKRRCEDHESHRSGKVCSCSLTLLHMN

SEQ ID NO: 55616 - protein, 57 aa, Zea Mays
MCFCWLAAFRDEGESSRDSSESNFAGFEEVRCHYKNNPMVFFPSTLRATRDGAFIGS

SEQ ID NO: 55617 - protein, 69 aa, Zea Mays
MIQDQQHNSELIYCRHGCSHSTSEKSQLHGSWRTLDMFILLPLLLQIWHSFILSVAWSKKEGCLFEWHE

SEQ ID NO: 55618 - protein, 279 aa, Zea Mays
MVNEMLHEDASAFAGRSDSASTAEEEFQNKVRETMEKAFWDMVTNSMRGERPDYSQLINLVKEVRDSLHDLAPKEWKEKILENIDLEILSQVLGSGSQDAQYLGQILEYSLDMVRKLSAAAKEDEMKKNHDKLLSELSTNSEVNGDGINSFVIAVIKGLRFILEEIKELKAEVSKARIQMMQQIIKESAGVEYLQKAFADRYGPPETAPASLPLTLQWILTSKNIAEEEWSEHSDCLSVMPAAGQAPALVPVLRSGHGAPVGQPSPSAGDTSGQPECKD

SEQ ID NO: 55619 - protein, 552 aa, Zea Mays
MDNLITLVNKLQRACTALGDHGEESALPTLWDSLPAIAVVGGQSSGKSSVLESVVGKDFLPRGSGIVTRRPLVLQLHRIDGDREYAEFMHLPRKRFTDFAAVRKEIADETDRETGRSKQISPVPIHLSIFSPYVVNLTLIDLPGLTKVAVEGQPENIVQDIENMVRSYIEKPNCIILAVSPANQDLATSDAIKISREVDPKGERTFGVLTKIDLMDKGTDAVDILEGRSYRLQTPWVGVVNRSQQDINKNVDMIAARRREREYFATTPEYKHMASRMGSEYLGKMLSKHLEQVIKSRIPGIQSLITKTIAELETELNRLGKPIANDAGGKLYTIMEICRMFDSIYKEHLDGVRPGGEKVYHVFDNQFPVAIKRLQFDKQLSMENVKKLITEADGYQPHLIAPEQGYRRLIESCLISIRGPAEAAVDAVHAILKDLVRKAINETHELKQFPTLRVEVGNAAFESLDRMRDESKKNTLKLVDMECSYLTVDFFRKLPQDVERGGNPSHSIFDRYNDSYLRRIGTPSQNLLFIAKCERPSARCSITSSLNWEQER

SEQ ID NO: 55620 - protein, 387 aa, Zea Mays
MESMSMVKRLIYTSSPSVVFDGVHGIFNADESMPYPDKFNDSYSETKADAEKLVMRANGREGLLTCCIRPSSIFGPGDKLMVPSLVAAARAGKSKYIIGDGNNYYDFTYVENVAYGHVCAEKTLSSEDGAKIAAGKTYFITNMEPIKFWEFMSLILEGLGYERPSVKIPVSVMMPVAHVVEWTYQKFAKYGMKVPQLTPSRIRLLSCNRTFSCSRAKEQLGYEPLVSLKDGVKRTVESYSHLQAQNHRSISKASIFLGNGNLAKTVLWEDAKQTVTVLLLLAVIYYHLFTCGYTFITAMAKLLSLTALFLFIHGMLPSNLFGHKVEKLEASNFHITQASKRMRNGRTALIVWWATPVPFFCTLVLPRNHLARNKRRCSLQTASYFVY

SEQ ID NO: 55621 - protein, 185 aa, Zea Mays
MSYAYLFKYIIIGDTGVGKSCLLLQFTDKRFQPVHDLTIGVEFGARMITIENKPIKLQIWDTAGQESFRSITRSYYRGAAGALLVYDITRRETFNHLASWLEDARQHANANMTVMLIGNKCDLSHRRAVSYEEGEQFAKEHGLVFMEASAKTAQNVEEAFIKTAGTIYKKIQDGIFDVSNEMMGG

SEQ ID NO: 55622 - protein, 119 aa, Zea Mays
MQTHDTESFQTGLSSKSKPCTKFFRVTGVKLSIRDHESNPNLKNIELEGNFDQIKQASDLLRDLIATISASMPAKNPSSAVAPAGGGQGSGPGGTSSNYKTKLCENFLKLCENFQHDYV

SEQ ID NO: 55623 - protein, 387 aa, Zea Mays
MTEGPVTAPQHRGRRLPCRAKRPQQSGQRGSPTPSRAHATMPFLLTPGARAVPSPSTLSRLLLPLHLQITNGRHNHQHGHVPASPLLYPRLRNRRSRFFAASSSSSSPQMAAPADAAGGSSDAFEVIRVHQAKAVRLSPVEEIRTIMDRSVRCVLATHSQDHAGYPSGSMVDFACDQDGYPILAVSSLAVHSKNLSGNPKCSLLVAKDPEDRTDTVITVYGDAVPVSDEEKDSVRSAYLRRHPDAFWVDFGDFSFLHIKPKAVRYVSGVATALLGSGASKSPEFNVAEYKEAKVDPISQFSTPITSHMNKDHANDTKLIVQHSTTVKVDFAYMLDVDSLGFNVKAGYDGSVLKLRIPFPRQAQDRKDVKTLIVEMLQAARASSSDPE

SEQ ID NO: 55624 - protein, 287 aa, Zea Mays
MRSSSRSSVRRRSRRGSLTPQRPSALASTTATMTSAASVEEVPWVAAVVVVVAASGAQDLASRPLPVVSSAPQYSYGGHQGTSKKIEIPNGRVGVIIGKAGETIRYIQLQSGAKIQVTRDHEAEPGALTRQVELSGNPEQISKAEQLIKEVIAEADAGSSGAVSGGRKYNAPQPGAETFQMKIANNKVGLIIGKGGETIKSMQAKSGARIQVIPLHLPAGDTSTERTVHIDGTQEQIEHAKQLVAEVTSEVCFLSLVVSDICDCFALLCFNLSFRLLLVRSVYYIVL

SEQ ID NO: 55625 - protein, 791 aa, Zea Mays
MDAELLELQRQLEAAQSARSSVRLSERNVVELVRKLQERGIIDFDLLHTVSGKEYITSDHLKHEIKMEIKKRGRASLVDLSDTLGVDLYHVERQSQKVVSDDPTLMLINGEIMSQSYWDTVTEEINEKLQERSQIALAEIAAQLHIGSELVISILEPRLGTIVKGRLEGGQLYTPAYVSRITAMVRGAARGITVPTNLPSVWNSLQQQLHEMHGASGVSVEGSFFQSIFNGLLKEGAVLGSVRAGGQWTPAVFAHAQKESVDAFFSQNSYIGYDVLQKLAIPQPKQFLEARYPDGIALDAVFVHTSVVDMLDTAVGDAIENGHWIDSLSVLPSYISGPDATKILSICPSLQKAIKSSKAVVFGESCVFSNMFIKGIFDRLEKDMDSFGIRLSVGQGRPVNTNLGSEHKTGSGQHSDTKDLGGNGTSSTGASSDRGSKKKRGKGTGSTKGGSLEKDDDNEESIPVKGKKSHRKNKDAGASGDIKHGGKKTSEKMIEENANIFPDELIEEKVLAVAPELEELGGSDDSNAPLKLLSSHLRPMLVDSWAKKRNTMLSGNAERRRRLLDNLQKQIDEAVLEIQLYEKALDVFEEDPTTSGILHKHLLRSMGTPIVDKVLITLDKDNKLKNGMEVEDSEDHVQLSTADRSSLAKDLPSALSLKAQALIEALEGKRFDSFMDALRDILEESGLTFKKLDKRLERTMLHSYRKDLTAQVSSENDPVAFLPKVVALLFLQAYNKAIQAPGRAVGAVITLLKDKLPAATYKVLTDYHSTTVKLLALQAAATDDCIMLKTL

SEQ ID NO: 55626 - protein, 477 aa, Zea Mays
MASSSGGGGGRRMTPGGDSSASAGGRRIYRTQTAGNLGDSIFDSEVVPSSLVDIAPILRVANEVEASNPRVAYLCRFYAFEKAHRLDPTSSGRGVRQFKTALLQRLERENDPTLKGRVKQSDAREMQSFYQLYYKKYIQALQKVADKADRAQLTKAYQTAAVLFEVLRAVNVSQKIEVDKSILETHNQVEEKKKLYLPYNILPLDPDSANQPIMLYPEIQAAFHALRNTRGLPWPKEHEKKRDAPKEHEKKRDADLLAWLQAMFGFQKDNVSNQREHLILLLANVHIRQIPKSDQQPKLDDRALDTVMKKLFKNYKRWCKYLGRKSSLWLPTIQQEVQQRKLLYMGLYLLIWGEAANLRFMPECLCYIYHHMAFELYGMLAGNVSPTTGENVKPAYGGEEEAFLKRVVTPIYKVIEKEVERSKTMKSKHSHWRNYDDLNEYFWSRDCFRLGWPMRSDADFFKTPNVPLHHVDGVCTL

SEQ ID NO: 55627 - protein, 206 aa, Zea Mays
MAEPDHIIVKPIPNLSRDGQAAAFPFFYIEPKKYENVLRKFFPEDKGPITKIDPIGNSPVIIEKESLGRIAPTWMNVSLAMKKDPDADKSFGWVLEMYAYAVASALHGVGNILRKDFMIQPPWDLEVGDSFIIHYTYGCDYDMTGKLTYGKIGEWRFDKRSYTDKPPPRNLPLPPHGVAQSVVTLVKMVNEATANIPNWDSYAAAF

SEQ ID NO: 55628 - protein, 1172 aa, Zea Mays
MCYTCTFSLCKACMKDAKFSCVRENKGFCDTCMNTVMLIENREEAADPMEVDFDDKGSWWYLFKDYWLNLKTNLSLTVEEISAAKSRKSGELPDTNDEVNSESSSGRNLESNTSKKRGRKRSKQAAINEGSEGKASTRKSAKRDLSGIHDVQTSSGKKVRKLSRRSLSSQHSSKDSESVGTSTSSAEEDSWASKELINFVAHVRNGDKSVISRYDVQPLLLDYIKRNKLRDPRRKSQIICDSLLQSLFAKERVGHFEMLKLLESHFFMSEVSPIDADENHGGVVDPDPSQDADGNSEASVVMSSEKRRKSRKYDLRHQPNLDDYAAIDNHNIGLMYLRRNLMEELIGDVDTFDEKVVGSFVRIKIPGTGQRQDIYRLVQIVGTGRSAEKYKYGKRTTDITLEILNLDKREAVTIDIISNQEFTEEECKRLRQSIKYGFIPRLTVGEVQEKARVLQTLKVNDWIESEKMRLGHLRDRASDMGYRKDLRECVEKLRLLSTPEERARRLNEELEIHADPAMDPYYESPEEQEQEIEKSSFNKSRGSFLRKDGNPVPPGKGDGRNAAQRDSKTNWESNRNTWAESSSHMESPLPRRSTFSSQGESAGYTSKSESPNTGAQTVKLEGTTRSAPQGSPGASSGILANNICSGAKTAPQSAINESEKIWLYMDPSNKIQGPFSIIQLRKWNSNGYFPPSLKIWKASEKQDDSILLTDALAGKFEKDLPPWEPPHVSLFQINKTPLEQSTIAGEQTPKSVVAKSFSSSNQRHGYSSTNLGTTMIHSGTQGYYGMQNSHAAYTSQHSLTGSWNATSSQFGVAVNPVTPTQPAMGSFSGQNIVSAENMGHLTPGTAPAAANAEMVNSDLTSQKQISYLPQTDGILADDIESKSGEDVSHGKVSSSAKAIGPLGAQLGQGQLNTQQHEDIKNQMSSTDVSNSTMPSQMMSTPSAASVQPSLSTIAGSDNQSSGWAVPTQVVNTSGQSQITGNLTWGNTPQGDASLGWGMMGQNNMNMPWVASAQGASGYNMGAAMPTQPNAVPNMGWLPNPGNTNMNMIWAATQGQGIPNAAAMMGGQMQGVAVAPWGGVAAGNANSYPAWGNQQVGNMNQNVRWSAPVQGNPSQENNNMNWNAPNGNPNNWNNQQRENEGRHSGHRGAFSAGDSGRKSWKPRSGADGGSWGT

SEQ ID NO: 55629 - protein, 126 aa, Zea Mays
MDGDLWDKVLQPENEYRRQLIDQVVSTALPESKSPEQVSAAVKAFMTADLPHELIELLEKIVLQNSAFSGNFNLQNLLISTAIKADPSRVMDYVNRLDNFDGPAVGEVAIDSMLPLYCLPNIAFMH

SEQ ID NO: 55630 - protein, 1342 aa, Zea Mays
MKCHSVAALWSPLPPSHHVTAAATTPVALFTGAADGTVLHWPLALASASPSPRPSSLLCAHAAAITSLCPLPSPASLLVACTAGVLSLFSTYAPLRCLRRRSLPLWVGSPSLIASLPSITSADPRVAILCHAPDDGHRHVSALVVVDARTLAVLYTVFHGILSVGTPNAIAVSGGGDDAVSVVLADAQGRVQVMPVAEGAAVEVDPPRRLIVSSVASVASAELADERVEAVALSHDGKNVALVLKTRCLLKCVTEGVVLGEVSLLGTSLCKDKNTVDKVCTAGAFFLSSDEWDAHVSDDGVVVRNLVLWSNNGAVTMYRIALGSSYFDSEIVCEIPSNLSMQGEGLEVKFCWSNQHLVRVECCSYKVAGSLLWKPTVAIWCMDQFELSKTVNTQKPPMRKMLGEGGLQGEEFRPEPSHSQYNINRGSEVISQMCSLERYRGTVSSSMLLSEDSYAPYAVVYGFHNGDIEVIRFLNLSPAAAKFGGRGLYPHISERLFLGHKGAILCLAAHYMHAHPDSRNFHRALISGSLDCTVRVWDLDAGTLLSVMHHHVGSVKQIVLPPPWTYHPWDDCFLSVGEDGLVALVSLQTMRVERMFPGHPDYASLVAWDGVKGYIACLCKNLHSCNDAGSGLYIWDLKTGARERVINGTASQLAFEHFCRGISKNTVTGSILGGTTSASSLLVPIFEDMSHIRSHADKNGHDISSVSTNLHNGCTDSVTVNAPTTYDFKGKTPAPDEAHEFHGDNSVYNSGKAVSSHSIHNKKIKCPIKCSCPYPGIASLRFDLTAIMSTQGMTNSNSDRHLKDHLHSENPKEMLQPGTLDSPSRVHEMDSPSRESLEGCLLRFSLCFLHLWDVDCELDKLLVDEMQVCKPEGCHIATGVVGDKGSFTLMFPGKEATLELWKSSAEFCAMRSLSIISLAQLMIKLSRSCTNSSSALAAFYTRHFAEKVPDIKPPSLQLLVSFWQHPSEHVRMAARSLFHCAAPRSIPQPLRVNKNKVVNAPLSSSDNMNVLICAVQTASVSNHGELKEDDENVDKDDIDTANMILWLESFENQEWLSWIGGTSQDAVASNIIVAAALVVWYPSVVKAKLSSLVVSQLIKLVMSMNDRYSSTAAELLAEGMENTWKACLGAEITHFMSDILFQIECLSTAPSSNAINKTAVAITMREALVGTLLPSLAMADVTGFFGVIESQIWATSSDSPVHVASIKTIIRVVRGAPKSLVPYLDKAINYILHTMDPSNLIMRKACIISSMMALREMARVFPMVALNESMTKLAVGDAIGEIYDGTIRVYDIESVTKIRILDASGPPGLPSLLAGSSNRTTTILISVLSFSPDGEDMPGAEI

SEQ ID NO: 55631 - protein, 197 aa, Zea Mays
MSSILVWDLDKEQLLNTIPSSADSAISALSASQVRSGYFAAGFADGSVRIYDVCSPDSRPVYVARPHAPRTEKVVGIGFQPGFDPYEIVSASQAGDIQFLDVRMAAEPYLTIEAHRGSLTALAVHRHAPVVASSAKQMIKVFSLEGEQLRIIRYLPSFMGQRTGSVNCLSFHPYKSLLAAGAGHNALVSIYAEENYK

SEQ ID NO: 55632 - protein, 406 aa, Zea Mays
MGISSGADFHQQPTPQAVLPPRPHGRAPTLQTSLSLAGSASPEQVGSPPDTQEPLSNSDAGHDSATESASSRETWPGEPGKSGGGDAPPVASAPITALRIADNKEKEVVGNGVAELQAFRSRIPSAGRMTLREVAWDRVDLVAEKMKGMSDELLDETKAELQSILEGTGGQHQIQEFMYLQKLLQGRVDLTLPILLMAHHVQLEILVAIKTGIQAFLHPSVDIPQIRLAEIFLYKRCRNIACQSAVPAEECKCNICSNRNGFCNLCMCVICNKFDFEVNTCRWVGCDICSHWTHTDCAIRDGKIGTGQTIKNGVGHAEMLFRCQACQRTSELFGWVRDVFQQCAPNWDRDALLRELDYVCKIFRLSEDSKGRKLFRKCAELVERLRGGSAESMTPRILLQALQGWT

SEQ ID NO: 55633 - protein, 165 aa, Zea Mays
MLGKLEGMKDVIEQVNRQFKDPDLTTFVCVCIPEFLSLYETERLVQELAKFEIDSHNIIINQVIFDEEAVESKLLKARMKMQQKYIDQFHMLYDDFNITKLPLLSEEVCGVQALQNFSQHFLTPYKSTLKRGTVEELEQRITILKSALQEAETELDRVRKGKQSV

SEQ ID NO: 55634 - protein, 1269 aa, Zea Mays
MDADEMDLDSPSSASPAPASGSLPTVLSELAALHRRASSSSVTSPPLSLPSITFLSSSPAAVASIFPRLAEAGVPASSLLPPLEASLSAHPLPAAVAYLRLLLAPASPLLTLFSPLPFLSLLLVIRKAASSFSGAGSAASNPSSVSGGAANPRKRKNQRQKPAAAPPAAPSLLPKALSLLADAAGRLPLGAHPDARRSLVDTAAELTAFDVLTAVLGSDYHAGAVQDVIRALAPVVLSAAKSAARVAAVQFIVRNLVPLGAEEGEEAVRKAVGYLPRYLAVKAPDKAEARALAVEAIVEVVRALEADGREGFAGYVVAMARGKAKGRLLAVDLVLALLPVLLPFEGDACDMEEGSWGLKCLRVLVEKCSDSVGGVRARALINAAQALDILSERGVEVDRLQEVMRIGDMKLGELLRRRCTDDKAAVRKAALVLITKAIGLIGRPIDDSLLCAMGAACSDPLVSIRKAALAAISEVFRKFPDEKVMKEWLQSVPPLVIDSETSIQEECENLFLELVLNRICQAANVSLDDDFITLEEVFPEGTLDLLKSICDGEVAPCIKKICASLGKKRKLKPLLASSLQNIITLSESLWLRRCKPIENWTAPIGSWWLLSEVSSFAPKSVNWKFLSHHWKLLDNVGKDERGKACSQVEPNSALWAVNRVSLLQTISNVSMELPVEPAAELAHSLLTRIEDFDMNLSEVDAHVKSLKTLCKRKAKTAKEGDALILKWAQQLIRSAFDILDQYIKEASESARGHSFITPMTGKCKGMKQTSASKSTSQAVVAVFTVGSLILACPIANVKDITPLLHTIVTSGNSEPRPKNLVGGTISFKELAPSLYIQSWDTLAKICLVDEKVAKRYIPIFVQELERSDMATLRNNIMIAMADFYVRYTALVDCYMPKITKSLRDPCEVVRRQTFILLSKLLQRDYVKWRGVLFLRFLPSLVDESEKIRHLADYLFGNILKAKAPLLAYNSFIEAIYVLNDCTGHGVYSDSQSQGSLDRRPALFAIRGTDESTRSKRMHIYVSLLKQMAPEHLLATSAKLCAEILAAVCDGLLSVDDAGGRAVLQDALQILACKEMRIHPNILSENSEMDEEGGEGGGTASALLAAKGRAVTQVAKKNLIQIAVPIFIELKRLLESKNSPLIGCLMECLRALLKDYKNEMEEILVADKQLQRELLYDMHKYEAGKGKGKAAAQAEAEAGAGAGLSGIGRSPAVRSVLKEVNRKTTPTQPLHSMSVPKVKSILGSAGPGSGRPDVLQSVRRLQPFESDDES

SEQ ID NO: 55635 - protein, 124 aa, Zea Mays
MNLAGKVILESAILTTVVVLSLTAYTFWAVNRGKDFSFLGPFLFAAIIVLLVFALIQILFPLGKLSQMIYGGLASLIFSGYIVYDTNNIIKRYTYDQYVWAAVSLYLDVINLFLSLMTLFRAAD

SEQ ID NO: 55636 - protein, 203 aa, Zea Mays
MLNNKDICRSIRLDAQAFKDRDPACAQYSWALLYLKGYQSLQSYRIANILWNQGRKVLALALQSRISEVFAVDIHPAAKIGEGILLDHGTGLVIGETAVVGNWVSLMQGVTLGGTGKEHGDRHPKIGQGALIGASATILGNINVGEGAMIAAGSLVLKDVPPHSMAVGNPAKVVGYTEKEDPSLTMKHDARRDYFEHAAIRLR

SEQ ID NO: 55637 - protein, 52 aa, Zea Mays
MGGGNAQKSKMARERNAEKNKGGKGSQLEANKKAMNIQKNCLYSSHCRRTAC

SEQ ID NO: 55638 - protein, 56 aa, Zea Mays
MQSGQEAFTVGKDSNRTPTSVHELVVPICSLETGVLGKRIKRSLTGGHEMQSTQDK

SEQ ID NO: 55639 - protein, 355 aa, Zea Mays
MASAAGAALCPCSFSTVLSSSPSTPFRPARTTPRPSLRPLPRRARLPLRPGHSVLRCLPKCDSGKPDGGGDAGLSGRKAARPAGQGGPRRPAQFGASSCGLAFTTVAGVIMLQASQQALAATQFAGLQPADVLGDLGDVSTGFASAFLLIFFSELGDRTFFIAALLAARSSGAVIFLGTFGALAVMTIISVVLGRAFHYVDGIIPFSFGGTDFPVDDIAAACLLVYYGVTTLLDAASGDDEKINEEQEEAELAVSKFSGNGAGVMSAAGTIASTFVLVFVAEWGDKSFFSTIALAAASSPLGVIAGSLAGHAIATLIAVLGGSLLGTFLSEKIIAYIGGSLFLAFAAITIVEIVT

SEQ ID NO: 55640 - protein, 872 aa, Zea Mays
MASRAPIPPAPPHLRLHAASLFSQRLPLPRARAPRCRGGRSRLLSALPSPPPSPASRSQGVSTAPIEREPPGLAPTPAPTPAQQPHQDPAIAAEVARLSAARERLRAAHTLHEKLRALDAEPRVAAFFGEESSRGVLGVLEPREVLLLKCLVAAGQEHVLGHELDWYGGDGGHHEHHHRNGVSGGSALRDALYSLAGLVGKWTSEGVVAAKERREEMEVLPRLLKFLDNVEEFYDCIGGIIGYQIMVLELLSASKDRMHRPSKDKFVDFHVPSGLNLLKDKEYASQAALWGIEGLPELGEIYPIGGAGDRLGLVDSDTGESLPAALLPYCGRSLLEGLIRDLQAREFLHFKIFGGQCITPVAIMTSSVKDNHEHIIAICERLDWFGRGRDNFRLFEQPLVPVVNAKDGKWLISKSLFPVGKPGGHGAIWKLAYDRGVLQWLQNCGRKGATVRQVSNVVAATDLTMMALAGIGLRCNKKLGFASCERRPGATEGVNVLIEKQNLEGLWSYGITCIEYTEFEKYGIPEPTLTNSSQVSFPANTNILYVDLQAVQEVGSRKNASCLPGMVLNLKKAVSYPNHLGFECSAAGGRLECTMQNIADDFMNTFNYRCSKGIESELNTFIVYNERKRVTSSAKRKLKSEDRSLHQTPEGSLLDIMRNAHDLLSSCGIDIPMVQDNSEYMHSGPPFLIFLHPALGPFWDIIRQKFVGGSVSKGSELQIEVAEFLWKDVELDGSFIILADNVMGSTKNSKNGEQILHYGSRCGRCRLQSVKIVNEGINWTSPNNVYWKHDVERSESVKIILHGNAEFEAKDVVLKGNHVFEVPDGHRMCIIQDRAGFVVKLDLIRDELMDSGTWHWKYAVDGVHVKLNMVEL

SEQ ID NO: 55641 - protein, 204 aa, Zea Mays
MLMRAAAALPRRSSRPSEPGSSSSRAPAPGASSSRAPAPGASFDPFDVDTDPPSRPELTPEQIGLCVDALAHFEYKGKRRDDLSDEFRSLSVSDIRHMKTISVAHYPVNREKNRYIDVLPFDDTRVQLKSSARPPNNDYINASFIKATENNRVATFISTQGPLVKTFGDFWEMVFEYQCPAIVMLTHFDSIKLSRVVQVSDVIR

SEQ ID NO: 55642 - protein, 559 aa, Zea Mays
MVKKYGTKNWRTIACAIPGRNANSCLSRWKYLLDPAINKEPWSQQEELRLIRAQQVYGNKWCKMVKHFPGRTNDALKEHWRSPMKRKLDSYLASGLLEHVPDLQDDVSFPQTQNNQSDIPKDCKAASDRNRFSSRLSTDPKLKQELTELDENGNTSARKSSDLFYAKAPDTHSAKISEMRMAKSQQCAGTRKKLAFLSTPVELKSVVPHETTKHCQDMEPEKTEGPLCKRNSHCIKDGSSLKIPESTKGKWLAEENEILIKMVTKHGKNWQTVAFAIPGREAKQCQIRWTRSLDPAIKKQDWSEQEDLKLIRAHQIYGSQWLKMVKHFPGRTNHALKEHWRNRIKGKLNFYLASGLLEQVPDLEEGGISVPESSQSEIPKDSQGSADRSGPPPVLRAQPKSKPELPENAGTSGEGTSDSIRLKGPNAHPTEVSEKVLAKSKQRARARRRLDFLSTPVELKLCTAAASCQRPPQKMDQPGPVAENISPSDACQDISQNVPPERADAITPLAASNHHSPATPVDPFSLEMHEANASDLLDMSYCDGLIIDSPRDPHDGSLM

SEQ ID NO: 55643 - protein, 425 aa, Zea Mays
MSGGSVSAVFYADKYHPIQAGSIDGTDVAPHDNAVLRALICSQAGLYDPFGDPKASGDPHRTVFVGRLSRQTDDDTLRKAMSRYGRVKSMRLVRDIVTGASRGYAFVEYETDREMHRAYEDAHHSVIEGSEVIVDYYRQQLMPGWIPRRLGGGLGGMKESGQLRFGGRERPFRAPLRPIPYDELKKLGIPPPPEGRYMTRYQVPPPPRRKSSNIDIEDSPPGRRSKDRAGVSTYRRQRSSNDDDETLLKRKSSRDGLEESQSRRSARSSITKEDNRYSSQRKSKEHDKGHRKHRRSQDPGEVSPPAEEDGSYERQRTLEEPDRSPDRYHHHWHHRDDTYESRHSRHRDHRKRRRSQEPGVSPLEEDSSYERERTSDELGRSPDWYHHHRHHREDTYESRHSHHRDRRRHGDRHRTKRSESRDYRD

SEQ ID NO: 55644 - protein, 210 aa, Zea Mays
MLGVLMQRSLEALAFHFLGDLPVLLVQLLAGLHFRAIPGSVLLRRCPPVVLLQCPPVPLFLPLFLIDMELLTGTITHHQPQHTTLVHFRLTVNLSVPQNHSSTLQGQWQHHTIQAPIKSLMVAQEHQSEAPIQVMPAHLGRLLPAAMQIIWDPYIALPSNHRFDSSLKKCCAGDARHGNQSLPSNSHGGDVNLSYFLVSSSTTVGFGGVY

SEQ ID NO: 55645 - protein, 661 aa, Zea Mays
MAPKAGRGKGRGGKGDKRKKEEKVVPSVVDVTVVTPDESQVTLKGISTDRVLDVRKLLGSNVETCHLTNYSLSHVARGHRLEDGAEVVALKPCALRIVEVIRRKEANGASQEGDHFEIEVKVCNGKLLHVVASVKGFYLSGKPHNVSHSLVDLLQQLSNAFANAYEALMKAFVDHNKFGNLPYGFRANTWLIPPIYVDSATRCPALPVEDENWGGNGGGCGRDGKYDRRRWSKEFSVLARMPCKTEEERVIRDRKAFLLHNLFVDTAIFRAASTIRRLIDQSMNSVGSHSGTHGSNVFEERIGDMNITVKKDGADASLKVEDKVDGVAFCQTGAMDIAQRNLLKGLTSDENVVAKDSSTLGVVIVKHCGYTATVKVSGRAKDSNDVKQTNDISGKFDGMLTIDVHDHPDGGSNALNVNSLRIPLPRVIHPETVVGNQHHSPKSHASNPAKKLARKILKDSLVKLDSMPSINSRIIRWELGSSWLQQLQKKDTPASENGKGNAMKTDKEPAVRGLGKHFEQLRKLKKKECNNEGSSSEKEECSNNYSSMNGTQVSDMIAADEANNGADISKLMSEDAFLSLKSLGAGLHEKSLEELTKMAHNFYDDTALPKLVADFASLELSPVDGRTMTDFMHARGLNMSSLGRVVELAEKLPHIQSICIH

SEQ ID NO: 55646 - protein, 241 aa, Zea Mays
MAAHGCKKLVFSSSAAVYGSPKNSPCTEDFPLTPHNPYGRTKLMAEEICRDIYHSDPEWNIILLRYFNPVGAHPSGYLGEDPCGTPNNLMPFVQQIAVGRRPSLTIFGNNYATKDGTGVRDYIHVVDLAEGHLFALKKLFESSSNIGCEAYNLGTGKGTSVLEIVNAFEKASGKKIPLIMGQRRPGDAEILFSSPAKAERELHWKAKYGITEMCGDLWNWASKSPYGYAASESPKLNGSSR

SEQ ID NO: 55647 - protein, 751 aa, Zea Mays
MSALFLETTRRSEELACASREQADSANGVGNSAHSGSRGSGALLPFSSTHNASTYGDEFDTTIITFNMAVILYHLHDYESALSVLDPLYRNIEPMDEPTALHVCFLLLDITLALQDATKAVDIVQYLERSFGVANTMNPNENASIAQQQLAQAKPPVKISMPPDSDSNAYAGGYENLSSGIFPDEQIEFESLCSSFDGHQNVGRRILNDFSRASADLAATAADLKVRLQIYKVRLLLLTRNLKVAKRELKVLMNMARGRDSSTELLLKSQLEYARGNYRKAVKLLSTPNNRTEPAMLAIFHNNMGCILHQQRSYHASIWCFSKALKYSLSFRSEKPMKLSTLSQDKSCLISYNCGIQHLMCGKPLLAASCFREAMPLFYKRPLFWLRFSECSLLALEKGLLCANGASSFNDEIEINVVGSGQWRQLIVNPVNSRSNLDSAGVTLGEHKNLVSLGFARQCLQNALLLLDATEKENWVIASDTEDWDQGTVHGYKSSGQKNTTSTDSKTPSGPTLANVNGEQKGTSLNATLQSSLAFYDEIRRKEYIKIRQAVLANLAFVELCLDNPLKTLTYAKSVLQVTDCSRMYAFLSHVYAAEALCTLNRTEDAAENLSVYIRDGNHVELPYSVENSEKALVEKDSDGEDLVAPAVTKLATEEPEQLRPEEARGVLYINLGMIAARQGEVEKANYMVSRGLAMLPNNPRAVLASVYVDLLQGKSQEAVVKLRRCRNVRFRPASIAASSQQSSLEKPPLS

SEQ ID NO: 55648 - protein, 146 aa, Zea Mays
MSSVFSGDETAPFFGFLGAAAALVFSCMGAAYGTAKSGVGVASMGVMRPELVMKSIVPVVMAGVLGIYGLIIAVIISTGINPKAKPYYLFDGYAHLSSGLACGLAGLAAGMAIGIVGDAGVRANAQQPKLFVGMILILIFAEALAL

SEQ ID NO: 55649 - protein, 465 aa, Zea Mays
MDLKQAFSGTIFCLLLLFCVGCRCRTLEIEATQTAALKVDASPQLARKIPETLFGIFFEEINHAGAGGIWAELVSNRGFEAGGSHTPSNIDPWSIIGDDSSVFVATDRTSCFSRNIVALRMEVLCDDCPAGGVGVYNPGFWGMNIEDGKAYNLVMYVQSPETKDLTVSLTSSDGLQNLASATITVSGTSNWTKVEQKLVAKGTNRTSRLQITTNKKGVVWLDQVSLMPEDTYKGHGFRTELISMLLDLKPRFLRFPGGCFVEGDWLRNAFRWRESIGPWEERPGHFGDVWHYWTDDGLGYYEFLQLAEDLGAAPIWVFNNGISHNDEVDTVAIAPFVKDVLDSLEFARGSADSTWGSVRAAMGHPEPFLVKHVAIGNEDCGKKFYRGNYLKFYNAIREAYPDIQMISNCDGSSRPLDHPADLYDFHVYTDSKTLFNMRSTFDRTSRSGPKGFLAFTWELGCSLGS

SEQ ID NO: 55650 - protein, 540 aa, Zea Mays
MLEILDLSNNNLSGEVPQEIAEMQSLRQLLLSNNCFQWPLTQHSYGNYDQENDFNIYDNLGRGNMNRRAENGLESGSSSQENKKDTSNLSGNPTQLPSQHEPRNTASHLTQRRLLQDSNLAAPSPANALVPAAVPVPSTGTGSFSAFSPNNAPVPAVNSPSSPPMVPRTTSEEDQETRSIKWLYVIVLPLVALLMFGIACMLLLCRTKSGTTIGPWKTGLSGQLQKAFVTGVPKLQRSELEGACEDFSNIVASYPQYTVYKGTLSSGVEIAVVSTMIISSKDWSKHSEGRFRKKIDSLSRINHKNYINLLGYCEEEEPFMRMMVMEYAPNGTLYEHLHVEGFDPIDWNGRMRVIMGVAYCTLHMHELSPPITHPDIKSSAILLSEDGAAKIVDMSVWHEVYSRENVPNDDDLVDHPERVAADPAGNIYSFGLLMLEIISGKPPYSKEKGSLLNLALECIRDNRNMSCLLDPNLKDHKEKDLEIICDLLYECIQSDPKKRPTMREVTTRLREVLSISPEAATPRLSPLWWAELEILSVEAS

SEQ ID NO: 55651 - protein, 77 aa, Zea Mays
MKPKYYGGDYNRMLEILLECKSIGTTFLVGGRKIEGDFKVLENLDIPEELREMFISIPEEKFRIDISSTEIRKSQGL

SEQ ID NO: 55652 - protein, 759 aa, Zea Mays
MNERQRQAVVRKGFFNILDMTIDALGSRTHLCWLMEKLDPKDMTLRIGPGKELKITKETVHLILGLPNTGGGKPLNIDEVNAAVNLRSSLGISKDEFGVAKLQERLRLGGDDDLSIRCFFLILFNRLLFPTASWSISNNEVLLTEQLDRFPHIDWCHLIFNDLCEAAHKWHNRSTTNVSATIYGCSIVVLVYYLDHLHHAVAPNNKSDTPRIKYFDKKTIKALSMADKRKPRQGGEPFGHCDFRSSSETCYAPTPEFHGQFEFQFSSDAFDVAQNAPCGHHTISIQVPLIKDMISSKIQQLPAYHHPKFEAKLRAYDSEVGKSFATINQRLSKIVKKQYDLADTFGELIDEVLRAEINSPDNKDDMIEPSNPSASEHCTQSTDQFISDPLMTATQLESQMIVTQVEAIYKRQQEMCRAFESSRDESVTPQNIRGDTTEDDALQLDSGLVLDQILSGNETYMMHKTRHDSVPLTQMDCVRALRQFLCAKVMDLNRNVIDFGEYVGTCRDIQRSFADGECLDNVFMQCFIDCVRDDATNHIPPLTAHQLILDAIVGAILNFEEQEQHSNTHRPYDPAILENYLSKTLPSFKQLDEYKSIMVPMLRAGHWTLYVINFQNRCIHILDSNPYGPELGETTWESYHYVQMDIGKRKLPWARLIMVRLNMALQHVRPRSNLPRFDNFPIDMAPNCPTMKAGSNDCGFFAMRYIQYYDYMDGAINVVIDSDNSGDLRALALYYLIFHRLNKNRSLSPELERFKFPHY

SEQ ID NO: 55653 - protein, 52 aa, Zea Mays
MWWWCFNRESTSSKKAKGPKLMFGKGDEVEGFDNSKSKFKDDEQDGNEDEDE

SEQ ID NO: 55654 - protein, 183 aa, Zea Mays
MFSMFKRINAKEHVVGWYSTGPKLRENDLDVHALFNSYVPNPVLVIIDVQPKELGIPTKAYYAVEEVKENATQKSQKVFVHVPSEIAAHEVEEIGVEHLLRDVKDTTISTLATEVTSKLAALKGLDARLREIRSYLDLVIEGKLPLNHEILYHLQDVFNLLPNLNVNELIKAFAGNLASFFLI

SEQ ID NO: 55655 - protein, 118 aa, Zea Mays
MVAGLEGKIELLENKQDVANTGIWYLCQVAGGLKDGINTRFFQETSEKLKLSHSAQPENKPVKGLEFFSESTMEQKVADSKPIAVTVDAEKPEKTAAVMGTTVHRSIRFSYRKAGLAL

SEQ ID NO: 55656 - protein, 91 aa, Zea Mays
MEPASRTALQVEEVCCHSLPRPSSNIQFNTFHSLSYTKRVMSCVVTTTYHLLLCENYVICMYYTILYHLIYLCILLLLVRDKCRKQTTEKN

SEQ ID NO: 55657 - protein, 246 aa, Zea Mays
MPPNARDTLYHSLPPTIKSAFRSKLQSFEVKEELTASRIKAEMEKTLRWLVPFASNTNRAHHGFGWVGEWANTGSELNCKISGQMDMSRMETLYHADKEKTEALILELVVWLHHLISKSGNASGGVRSPIKSPVSSPTQKGAAITLLSGKTNNLPPILTQEDQDMLRGVKYRKFVPGISKSQEFDTKSSHSKHSRLSKSNSHSPASGSRKDLLPVRRSSMLPVIDFEIDRTKALDLIDRLDNLKVQ

SEQ ID NO: 55658 - protein, 183 aa, Zea Mays
MEAKLPDARPLINVCDRFGFVPDLTHYLYTNNMLRYIEGYVQKVNPGNAPLVVGQLLDDECPEDFIKGLILSVRSLLPVEPLVDECEKRNRLRLLTQFLEHLVSEGSQDVHVHNALGKIIIDSNNNPEHFLTTNPFYDSRVVGKYCEKRDPTLAVVAYRRGQCDDELINVTNKNSLFKLQARL

SEQ ID NO: 55659 - protein, 498 aa, Zea Mays
MAIDEERYKDAAYIRDHAGAGLLGWWSGISGNLSDPYGLIIRISAEHGRYVARSYDTRQLASDSPGLPIFEIYFAEANGGYNLQAVHLKPDGSDSDQVPNMLREKLGIDSINISSSPLGSKHEEFDGSVNMDDKDSDDSNIAAGPGSKNLSSDLTAVPRIKILKVVPMQNVDHDYIINIFDQISEEDDDNDDHEVENESSEDVDNDDNSGVAETVSAEENGDESGDESDIETLVSFDFVSENNVYASRPSAEAFERMPARLEKRDRFSFSFYTEEYSKKLDAGKARQTSKETVGLHADQQDYDGFVQLDRVKLSGSNKKLSILQLGIKQNNKVQQKLHGVTHFSRIQMPIFSDPLTGLYVTTSGFDSEILSLQRKFGQWRDDGSSEEHSDLLFYEHVEAVKLTGDNLMPAGQVVFRAKVGERYQLPHKGIIPRELGVIARYKGQRKIADPGFQNPRWVDGELLIIDGKFIRDGPVIAFFYWTSNFHRFEFFRRLRLPE

SEQ ID NO: 55660 - protein, 527 aa, Zea Mays
MLSLALSFSWFSRVPCRSSAPSASLVATTGRPPPPPYARCPALHFRSLRRTRAPARGLEASRSSEESNFGNDLKDGSSVSSENFGSSCLPGESYQSATVDHEKRPLSDVKTCQIACKRPKQTDHCTWLYSFEEHPLTSEVGISSPALYDGLVEIKQPNDIPAINGATTCSGSSVIPCRNHDQSILVENLDIPDWATSFPGYFEDCGPVVTYSHVDDIGSPRKGVPIGPEHQADIPEWRPLNSMIVPGASEFCANLDCSSASTSESVPRGDDYVSDKWIRYCVVPVTCCSSPVDWAGDSKIDCNCSDEGSMRCSRQHIIEARDNLKMILGQDRFRELGLCEMGEDVALRWTDEEEKLFQRVVFLNPVSLGKNFWDHLPDAFPNKTSQEFVSYYFNVFMLRKRAQQNRSDVLAVDSDDDELHGEPLAERVEGDPAVESSTHEHSVSNSLPMDDDHKEFEGAQFDGSLCEKSVYNAVECRHLPNQMPADSNTVNTALDVCDQDNGAQCSEFHMSLPSDTSNSLGDQSASV

SEQ ID NO: 55661 - protein, 413 aa, Zea Mays
MLHHSNSRNQRNRGSRIKTLLQATLLSGVVFWLLYQVKHSYDKKNEYLDDAEDQLTHNDRSIFQARKQKAGSYSDSNVQMVVDNSDVTTKPEEGDVDHHSDTFDHNEKTVETVFDKDSTNLHEDDKRNTESSEAEGQVNSGDSNTEANNNKNEDETTSLVEGRKHDTESNSAAESKSEVNSTGDELSQNNHAQEENTREASGMSHDEVAHGDESTSASGTWNGSDGEGEKKEAVDTQTGSETLPDDAKTEATDDRGTNSLSDETGNIPSVHTDNSQNDASENQGDATSTTSDSSEHGISEAVHIETGLEHGSATTSSVTGSGDDRDNSSDSSSAGKNTETLSGDDKTNSSSTPHAAPDPYFAESSTLFISPAGSVSGSVKRTACTQTPHFHAFSLLSAALSRARVPAGGPQVS

SEQ ID NO: 55662 - protein, 1000 aa, Zea Mays
MASGGGGIRATTSGRMKSRGWGDSSDDFGTPAIALRRGGDCSGTASSDSSAVFFAVAFCAPSPGLSVTAAAAMVEMRQRRKPLVLASTQALLDSLPGDRPPPPPQKPVRLKAGVLRFPSGGGGAEFGELASFVGIPAPALRRLAVVTGTPVLVKNTDNNVGRIVKAVLFGNPSLDKSCSEHTDQVVSASLSGHAMGFLPCRTFPAIGFTSMDEDVGYVSPLLAFNLGLHVSCLKLLIQREGQPFKFCSRAEEIDATASSGSDLSLHLDLLPCPQVPKYALHLRVSVVRIPDCGVLASLKIYSSFGGSEYQDMVDQALNEYFKFDRFLARGDVFGIQNSWKCGSSCCLACNKQDNKLNPRNMIYFKVTGMEPSDEPILRVNCNETALVLGGAASAAIPPYSFFASSGNSVPLHSEVVEHLASVIAPALCPSDILPKIKFSTFLYGPPGCGKRTVVRHVANHLGLHVVECSCHDLMTSSESGAPAALATAFKEAQKYSPCIILLRHFDAIGNASSNEGPQSEQSGIASNIESVIKQYIGQRWVAKDSLPGKDVNGSSYLVEPECVSSLQIILVATADSSEGMQQSIRRCFRYEIDMKTMNEEQRNELISETLQGIPKVADESICDKFIKDLAAQTSGFMPRDILALVADAGVSFAHKIAAGKDSKAISKHTEVLPESSSATQNEEHHFSKEDIMSSLERAKKRNRAALGTPKVPNVKWEDVGGLEDVKKVILDTIQLPLMYKHLFSSKLRKRSGVLLYGPPGTGKTLLAKAVATECSLNFLSVKGPELINMYVGESEKNVRDIFEKARSARPCVIFFDELDSLAPARGSSADSGGVMDRVVSQLLVEIDGLSDNSQDLFIIGATNRPDLLDSALLRPGRFDKLLYVGVNTEASYRERILKAQTRKYKLHKNVSLLSVAQRCPPNFTGADIYALCADAWFHAAKRSVETFEIDPSRSNEASAEEVIVEIDDFITVLGDIAPSLSLDELQNYEQLRQKIEGPSR

SEQ ID NO: 55663 - protein, 512 aa, Zea Mays
MLVLRRVSFLLSSPSPRAPLAKPLLLLRPPQTLAPTARQLVAMAASVPSAGGAGTMSRDAFRAAVTNTLERRLFFVPSFKIYGGVAGLYDYGPPGCAVKANVLAFWRQISPRQGLLRVREFTLAEIEHFVDPEDKSHPKFGDVSDLEFWMFPREDQMAGRSATRLKLGNSISEGTVNNETLGYFIGRVYLFLTQLGIDKDRLRFRQHLPNEMAHYAADCWDAEIECSYGWIECVGIADRSAYDLRAHSDKSGEKLEAHEKFAEPREVEKLVITPSKKELGLAFKGNQKLVVESLEAMTETEALDMKAALESRGEVEFKVCTLGKNVTIKKNMVSINIEKKKEHQRKFTPSVIEPSFGIGRIIYCLFEHCFYQRPGKTEDEQLNVFRFPPLVAPIKCTVFPLVKLEKFEAVAKKISKALTAAGISHIIDMTGNTIGKRYARTDEIGVPLAITVDHTTSVTVRDRDSKDQIRVDVDEVASVVKEVTDGQSTWADIMWRYPAHTASAADEDGAQP

SEQ ID NO: 55664 - protein, 258 aa, Zea Mays
MVLGGGPLGAIIGRYPSSSAAAGDDEQGDPGPGGGVIRHDRKCRDWPFLVLFAAFWVAMIVNSSFGFNQGNPLRLTYGLDYKGNICGSRHADPDLYQLDVRYWVNPNQVYQSGLKTSHIELPDAKTICLMECPLPAEDGLNFVCDYPEGDIRLSVDDWIDRDYDYFEYLTPDMRNSSLQLQGPCYPVIFPSVNVYWSCQFIARASNASLKHWKDMGGVTIDENMLIDRTIHDAINSKSAVMKWWSSMLLWYLLQCSSI

SEQ ID NO: 55665 - protein, 91 aa, Zea Mays
MLEISLANTSLERSIGCCFDIHAGVCFLMVESYCLTASTTGRWWQPGHSSLWLYPLYSYASMIHCIARYNSITIQAYNTRYSYNAEPEPCE

SEQ ID NO: 55666 - protein, 793 aa, Zea Mays
MAFKGLPRDSRGSLEVFNPDAPVSDRATTSPFLLPPAAASHPSLLAAGDGGDADVGRATQRAAEWGLVLQTDEHTGRPQGVVARPSGSNRTSESGNSIDERAAAAGAGRALPRVSEELRAALSAFQQTFVVSDATRPDHPILYASAGFFNMTGYSSNEVVGRNCRFLQGSGTDPVEISKIRQALAAGSNYCGRILNYKKDGTPFWNLLTVAPIKDEDGRVLKFIGMQVEVSKYTEGNKDTALRPNGLPESLIKYDARQKDHARSSVSELLLALKDPRSLSESRNNTLKRKSQESAGSALVPGKRSSETGSRRNSHSGMRNSLQKISEVPEGGNKTRKSGLRSFMGLIGMGHGNVEKNILKPREDPLLDSDDERPDSFDDDFRKKEMRKGIDLATTLERIEKNFVITDPRLPDNPIIFASDSFLRLTEYCREEILGRNCRFLQGPETDRGTVKKIRDAIDNQTEVTVQLINYTKSGKKFWNLFHLQPMRDQKGDVQYFIGVQLDGTERVREAAAKDGAILVKKTADNIDEAAKELPDANLRPEDLWANHSKPVLPKPHMKDTASWRAIQKVLENGESIDLKHFRPVRPLGSGDTGSVHLVELLGTGEYFAMKAMDKSVMLNRNKVHRATAERQILDMLDHPFLPTLYASFQTKTHICLIVDYCAGGELFMLLDRQPMKVLKEDAVRFYAAEVVTALEYLHCQGIIYRDLKPENILLHRDGHISLTDFDLSCLTSCRPQVFLPHDIDKKKKRRKSRSNPIFFAEPMRASNSFVGDYYRSWPYECCRLVGARNSSI

SEQ ID NO: 55667 - protein, 280 aa, Zea Mays
MRYWYPFTEEAIDQIKKDKITKLVVLPLYPQYSISTSGSSIRVLQDIVKEDSYFSGLPISIIESWYQRDGYVKSMSDLIEKELSAFSNPEEVMIFFSAHGVPLTYVEDAGDPYRDQMEDCIALIMGELRSRGILNSHTLAYQSRVGPVQWLKPYTDEVLVELGQKGVKSLLAVPVSFVSEHIETLEEIDMEYKELALESGIKNWGRVPALGCTSTFISDLADAVVEALPSASALATRKPDDIDSSMDLTHYLTKMLFGSILAFVLLLSPRLVSAFRSTML

SEQ ID NO: 55668 - protein, 522 aa, Zea Mays
MGGFEDDEPPSKRARASSVESASLPDCFLFSKSANPLGSTMARPLPSQGKEAMVGSKGVIKKEEFVRIISKTLYSLGYEKSGAVLEEESGITLHNPMVNLFREQVIDGNWDNAVVTLNKIGLQDVNIMKSAAFLILEQKFFELLRNDNVMGAMKTLRREITPLGVNRKRVHELSTCMISCSPQQLFLGFSKLGIDSSSSRFKLLEELQKVLPPTVMVPERRLENLVEQALTVQRDACYFHNSVDGLSLYIDHHCGKDQLPSRTLQVLHAHHDEVWFVQFSNNGKYLASASNDKSAIIWEVNEDGELLLRHTLSGHQKSVMMVAWSSDDCQLLTCGQEEAIRRWDVKSGKCLHVYEHPGIGLRSCAWFRDGKQILSGLADQTFCIWDLDGKEVDCWKGQRSATTSDFAVAKDGNLIISLSRDNAILLFDRETKHERIIEEGSTITSFSLSEDGDFLLVNLVSEEIHLWNIRNDPVRVNRYNGHKHSRFVIRSCFGGSEQAFIASGSEDSQLLSFFSNLASTVV

SEQ ID NO: 55669 - protein, 471 aa, Zea Mays
MYSSALVQGAPNPRMHQKIEPTRMNLIPSSARMSVSSLLIALDEWCLTDRFDPNNAKHLTAKAEIELGDGLPDIRTTRQCVQAMKDAGFEVVFAKDLAQAFSLPMDPTLAVVAYRRGQCDDELINVTNKNSLFKLQARYVVERMDGDLWDKVLQPENEYRRQLIDQVVSTALPESKSPEQVQNLLILTAKAQLREGLVSEAIESFIRVDDAAHFLDVIRAAKEANVYNDLVKYLLMVRQKAREPKVDGELIFAYAKIDMLSDIEEFILMPNVANLQNVGDRLYDEELYEAAKIIYAFISNWAKLAVTLVKLKLFQGAVEAARKANSAKTWKEVCFACVDAEEFRLAQICGLNIIIQVDDLEEVSEYYQNRGCFNELIALMESGLGLERAHMGIFTELGVLYARYRSEKLMEHIKLFSTRLNIPKLIRACDEQQHWKELTYLYIQYDEFDNAATTIMNHSPDAWDHMQFKDR

SEQ ID NO: 55670 - protein, 237 aa, Zea Mays
MHKKRYVEATREFNKILLYILKYKQYHQKSPQYDQILKKNEQMYALLVICLSLCPQNKLIDENVSTQLKEKYNDKMTKMQRYDDEAYAAYDELFSYACPKFITPSPPVLDQPLTNYNQDAYRLQLKLFLYEVKQQQLLSGIRSYLKLYSTITISKLAQYMEVDEATLRSILMTYKHKMHAVDSDGKMVSSADFDFYIVEDVIHVVESKPTKRHGDYFLRQILKFEEMIGGLDKVQLD

SEQ ID NO: 55671 - protein, 132 aa, Zea Mays
MKLLAQQRDLQAKIPDIEKCLDIVSTLQAKNDLGEALIADFELSEGIYSCAKIEDTDSVCLWLGANVMLEYSCDEANALLKKNLENAKASLEVLVADLQFLRDQQTITQVTIARVFNWDVHHRRSKQAVKEP

SEQ ID NO: 55672 - protein, 516 aa, Zea Mays
MLYYYRKQNSRPSSGYSNQRTSIPSEHGSGLLSRWFSSHYHGGVHDEKSVARHTVNLLTSTIKVDADQSDLRFCFRIISPTKNYTLQAESAMDQMDWIEKITGVIASLLSSQSPERHLISSPKGSSHHRTASSSSSFSSSTELEHSISEDCMLEKNSGSGYFEHSARVAQHHRTSMMKPDKPIDLLRKVAGNNCCADCGASEPDWASLNLGILLCIECSGVHRNMGVHISKVRSLTLDVRVWEQSVINLFQSIGNTFANSVWEEMLPSSSCVDHGDISRADGLENMSHGFAPKKPKQSDSIAVKEKFIHAKYAEKDFVRKHNMDGIQLAEQMWDNVSSNNKKGVYSLIVGSNADVNFSYGHTSFNSALTLGKALLLQEQSASPSNGSSRCFDRNPLEKGCTGDSVSPASTSARIDGPDDYVEGLSLLHLACRAADLGMVELLLQYGANVNSTDSRGRTPLHHSIMKGRHVYAKLLLSRGADSQAADRDGRTALQYAIDSGTIEDEEILVLLEDPSR

SEQ ID NO: 55673 - protein, 204 aa, Zea Mays
MAPAARWSTSPVLFLLLLLAAATATTTTTAKDGHPSPTPWPERFHAVLFTNLTNYTEASTGPPLRVTDLYYDWPRRRNLNLVRHQLSADPLYDVEWNNGTGFYFDSKACRVEQFPVGVLPPWWLSGGGAEYVGRRVAGGIDCHVWGKAGFIFYYEEARTGRPVRWDFVDVRDELRTRSCAGGRRAVAGSCILLPGRRRCRKEQW

SEQ ID NO: 55674 - protein, 949 aa, Zea Mays
MAKVPDLGSDFAQKLLRDLRRRRERLGFDSTAAAPRARDAYSNAQKPPQVQKPQQQAAPRPRVATRSEAQTSVIHRQGSSSSSIARPGTPRRHDAPAIADSHATVPLQGGRGGKQTAPAANAGGVDVQMALALALSNSGKLQNVHLVARQGGSGGSAFFGEPCRMASQARRLLAPGAHVGKVAIGVQNLNDILVAYSSGGAAGARRGSVEIGKQLLRGAMDLEESLNMLMMLQDATDYMEMGSSGNDGKVLLLEGTESWKRSAPRSTSSASARLVEIVDDDSGTEQADDAKSSSDTFMQIVPHGMSQSYRRNHISPSQLAGAATNCKSNASSGEKDGSKVRMPGLIAKLMGLENLPSAKTAAERKETERFVKPEAVPRKSTAATVMAGTLPIRIIASERMPSRGQLKNFQTREWNISLTKSEEPVLSSRFSHLKVDKQTRQTMRQMLSKQEGTERRASVNQVADEKIVHQDTKLAEDSNQQKTTVSAGRKMSFLQRFRKTGKNKPATEEKVTVEENKQKLGKKQTTSTKQRDSEVKPRKTREKFNKENLANPGNKTLGNNGKTAKTDQTRRQAQSKPSDKQVMEKKVQSYRRMQSETAIQNLEQKRPLKPEPAHSNTKEKLQSVTPTEPQNGEGTKVDDTRSQKPSDNTPGDDGVCEQSAAEMEDSGTKALPYQSEKELTEETIDPITAAQATPESIAETNDDSTVSEAIQTPETFPEEEQQQQMKEVNDESTNGLDHLMNPSNPNDLRNHNMDVVSCDSFTENQLLLAEMLLKDPYLLETTKAITGFHVPASAAQVNTGKWLDEGNRVLSDIGREVIRRKGKRMEAMVDVSATRAANLKLRTLDDLVRELDSDIQSLHVPRKIQQRGDDHSTAENLRMVLRYDMESTHSDANSVWDFGWNRAWDLPVEKNEVVRDLEKNILGGIITDVARELIDVSMRQRHGPWVLCL

SEQ ID NO: 55675 - protein, 291 aa, Zea Mays
MQAEIHPVFGFCYLCRWIRWLTPDMAKTRGFDPQWLSITFSKAIFLGNGLIAIVSGLFANLLAENLGFGPVAPFDAAACFLAIGMAIIMSSWSENYGDPSESKDLMAQFKVAAKAIASDEKIALLGAIQSLFEGSMYTFVFLWTPALSPNEEDIPHGFIFATFMLSSMLGSSIASRLLARKLKVEGYMQIVFSISAVTLVLPVATNILVPTSSVKGGSVSIGGSLQLLGFCTFEACVGIFWPSIMKMRSQYIPEEARSTIMNFFRIPLNLFVCVVLYNARSHSLSQLLCSL

SEQ ID NO: 55676 - protein, 411 aa, Zea Mays
MHAAGPSSDDSLPPGFESLQPTSCLKIDISQIHVIRWRCPPKVLHNPVWLVAAGEESEEVALQNDRIFGALEAIYPRPSNIPPNPFVTPDVKDSQYDDSRTQLVPLLPVEEDDASDQLEEPPVGLSSSYQQSDKYDSATFRVPQASDAPFTTAQQQQPNGSINTTRSGAPVEPDTVAAASAAYTAIIQSNRMGNMIDKDLLVEMLSDPAQLERLMKEYGALKHEQSTNSSVAPMVQGPPPQMTASVPVSFPDHTTTFHNINSTLPPPPVLNRLPPPAIPSAVTINPPASSSQAISFPTGRTSGLNYYQTLIHQHGGERQEPQPLQQHGMHFPMHHRTVASQSSATDIVSSGTMPARDTKQRPTRPCAYFNSARGCRNGANCTFLHDVSAARKEQPKGSKRIKLDSRIAGRY

SEQ ID NO: 55677 - protein, 405 aa, Zea Mays
MILMNQMLSPSWLSFRTRTFLPSLTMHSMYHRSFVCFKMFYVPNNMVSKLLFCCSAFRNKAGDLYSSYHDYSVTQHDVLRDLALHMSGRDPLNKRRRLVMPRREETLPKDWQRNKDTPFEAQIVSIHTGEMKGSDWFQMNFPKAEVLILNFASSLYYLPPFIASMQNLKALVLINYGTSSAALDNLSAFTTLNGLRSLWLEKIRLPPLPKTTIPLKNLHKISLVLCELNSSLRGSTMDLSMTFPRLSNLTIDHCIDLKELPASICEIGSLETVSISNCHDLTELPYELGKLHCLSILRVYACPALWRLPASVCSLKRLKYLDISQCINLTDLPEELGHLTSLEKIDMRECSRLRSLPRSSSSLKSLGHVVCDEETALLWREAEQVIPDLRVQVAEECYNLDWLAD

SEQ ID NO: 55678 - protein, 1458 aa, Zea Mays
MESSGGDKPTATDATESVVGLDGEETLSERESVGARHGPALSNGGGKEAPSSSSSAGNKRKHGILGSNQMELNEPGMPSSSSGDSTWSLDSLDDRHQISLLRSKNEHSEHSVTSAGVTVIRQPRGVLRLRKRDQNVSTESWTGGHNIPQANGVPRSSQLLRRNKKGKSTVFEQNRIGGDEPVSCLRTENGTCDQDTGSKFCSETEFSAEKLSHLSGEAPKAVHVDKGGCDHVKDDDGVSLEENAAMMLCSLSDNICAGSPRKGMKSSDTSSKRCIPQHSNHFKSSNKKIKDVPSPARLLRKRDGKVPFRKRRPRRHFYEVSPSDVDPFCIVKERIRVFWPLDETWYFGLVKEYNPDTRLHHVRYDDKDEEWINLQNERIKLLFLPAEARNRSKCTNSRSVFDLKHEQGDREDMDGSEGNTESSESGPIGSWLARSNQAKSAALCNISKQDHSHSNIVPISFDQKQCRGSDAKESNDYIPCDSFGNGSAKVLKDRTTPEDRRFRFVYSRKRFCRKTNGFLSISEQHSNCQIRARFAMVLAACPGMESSSATGASVTYVIPALSLPLKPVYKLLCEACCVSFSNTFFLHCGTMVALWPVVHLDILFDNALGLKHFLLDTCLISAVSLLCLLAGSFKQCSRQRTTKEARIPCTSIRFQISGGHGRSEVVFMLFNFVGVEKSKWEHLQGKLQYHCSKSELSKDSTKCTGRRALSSMDLFSKGFDVQDFLPESNYSDREPIICCLDEHCRFTQSVLDMTTAPSLLPWHHKKMLTESNLTNGSQQSMSCTLDEDQQQLVTEHASDTVFHAPPQVCSLNLGSSPDSPLDMASASCANPSSSASRESNIAERNVSTECNGSSIGDANIIHRKCEDQNGPCAGPDKSFSSNLSVICSSQKSAESRLSINIDKANDKPLDNDEKEKQPISNLVQELNEHPIGCVTPTAPRTTSHRNRFTSISRAFGDGSKLLPEDHVLTGFAGGSKKPRSQVSYSVSPKSEELGIKNKGHFRKIQSHVSAKINDAKKLPDSSRSGHSSPESLTCVANVLVTVGDRGWREYDTQITMDSDGQSERRICVKLAEGTKYAHKVCQVLQPGATNRYTHAMMWKGGAEWCLEFPDRSQWLIFKQMHDECYSHNIRAASVRNIPIPGVHLVEIHDDNDVVSFVQSEAYLVHIGTDVEIALDQSRVLYDMDSDDEEWISSWRKSLVRDNTTTLQFAEDLFERVMDKLEKFAYSHNCNGLSIDQMKELETDDVPLHTIEVIHAYWQDKRQKRGMPLIRHFQSAMWKIYEQQLHEWESKVCRMQSSSNGYQEKKLPPKPALFAFCLRPRGLHVPYKGPKQRSHKKLMSTGCHSFSREHDGFYRQVSGRRYNECTGDGRISESYDTGSLYSPTGYSPRFSTRTDSPRAFESSERSSTPRFSRNNSSTKRSAALAFSDDHQPSPSCRPQRAKRSAHDHWNAAIHDWQNS

SEQ ID NO: 55679 - protein, 151 aa, Zea Mays
MEVELEHGGDEGGDRGSESSSSSSKRSFGASSDATVSSTPSKLQALRFAEDLSLPSVQVVVMSANMGCSHCRQRVANVVSKMNGLLDYMVDFGKKEVTVRGKVVHTKKKKKRHMRALLGAAGAGWDDARSAASLPGGHARTLSWFWGCYSS

SEQ ID NO: 55680 - protein, 233 aa, Zea Mays
MSLRTTLCVRFKSEVVACGVVYAAARRHRVPLPEDPPWWTVFDADEAGIQEVCRVLAHLYSLPKAQYIPVYKDNDSFTVKRISDLQASKESPARAVASDKGTPVPSSSSQEKDPVAKTILNKVKEKSDDEGKPLPAEFDGKENPVANSKNDKSDSGVDRSRERERSRGRERDARGRDSDRDSRGRESDRERDRRRCSRERSSDKEKSRRHSSRDRADYYNSHSSREKDRHRHH

SEQ ID NO: 55681 - protein, 654 aa, Zea Mays
MAGGQAPEASPGRYQRRRDEIDDDDCADVLGIDVRGPDADPFDIPAKRAPVERLRRWRQAALVLNASRRFRYTLDLKKEEEKEQIRRKIRAHAQVIRAALLFKEAGEKQTHETELPEILPRDFGIGEEQLTVMTRDHNYSALQEYGGVIGLANLLKTNLEKGIHGDEADLSCRANAFGPNRYPRKKGRSFWVFLWEACQDMTLVILIIAAVISLVLGIATEGTKEGWYDGTSIAFAVFLVIVVTAVSDYKQSLQFQHLNEEKQNIQVEVIRGGRRIQVSIFDIVVGDIVALKIGDQVSADGVVISGHSLAIDESSMTGESKIVMKDQKSPFLMAGSKVADGYGTMLVTAVGLNTEWGLLMASISEDNNEETPLQVRLNGVATFIGIAGLSVAAMVLVVLFARYFTGHTTDSDGSVQFVKRHTSVKSAIFGSIKILTVAVTIVVVAVPEGLPLAVTLTLAYSMRKMMADKALVRRLSACETMGSATTICSDKTGTLTLNQMTVMQSIVGEVKLQPPANVDKLSSTVASLLLEGIAQNTSGSVFEAQDGSVEVTGSPTEKAILSWGLDLRMKFAEERSRSSIIHVSPFNSEKKRAGVAVVARDSNVHVHWKGAAEIVLALCTSWLNVDGSTHEMTPDKDPVEEQQQGTHIEDYNFT

SEQ ID NO: 55682 - protein, 383 aa, Zea Mays
MAFPVDTNVGRICVRLGWVPLQPLPESLQLHLLEMYELHYQMITFGKVFCTKSKPNCNSCPLRAECKHFASAFASARLALPAPEEKRLATSEDPNVVEFCHQTYINSGAVGELEWSANYPKHAVCGNLQPFIEEPLSPEPEPENVEAKDGAIEDFFNEDPDEIPTINLNIEEFTQNLKNYMQANHVEIEYADMSKALVAITPEAASIPTPKLKNVSRLRTEHQVYELPDSHPLLEGFEQREPDDPCPYLLSIWTPGETAQSTNAPKTFCDSGETGQLCGSLTCFSCNSLREMQAQKVRGTLLIPCRTAMRGSFPLNGTYFQVNEVFADHCSSQNPIDVPRSWIWDLPRRTVYFGTSVPTIFRADRSNAAAIKTWQINDGKVMA

SEQ ID NO: 55683 - protein, 183 aa, Zea Mays
MALVLHSGAGNKNAFKALIAAEYSGIKVELTKDFEMGVSNKTPEFLKMNPLGKVPVLETPDGPVFESNAIARYVARLKDDNPLFGSSRIEQAHVEQWMDFAATEVDPGVAWYLYPKVVEAPAEEEAPKPKPKNPLDLLPPSKMVLDDWKRLYSNTKTNFREVAIKADGPVPQVRLWEDARDRL

SEQ ID NO: 55684 - protein, 50 aa, Zea Mays
MTIATTRPETIFGDVAIAVNPEDKRYAQYVGKLAIVPLTCGRHVPIIADR

SEQ ID NO: 55685 - protein, 122 aa, Zea Mays
MRNKMRIAQIQKMNMTTQSPLLAMMRIKTILTNQLMKMNMMITTMKMTRLTASGLELFLVMCRSELVILWTLYFCLWDISWYEKTKLLLVFTSPFLLVNLKGSRFSFQLSKLFQPVPSREGQ

SEQ ID NO: 55686 - protein, 593 aa, Zea Mays
MRLLRVATCNLNQWAMDFDTNLRNVKESIKRAKAAGAVIRVGPELELTGYGCEDHFLEQDTTAHAWECLKDILTGDYTDNILCSIGMPVIFNSVRYNCQVFCLNRKIIMIRPKMSLANDGNYREFRWFSAWTFKGEIVDFQLPVEVSEAISQDTVPFGYGYMRFIDVSLAAETCEELFTANAPRIDLALNGVEVFMNASGSHHQLRKLNLRIDSIRSATQTCGGVYMYANQQGCDGGRLYYDGCCCIAVNGDLVGQGSQFSLKDVEVLDALVDLDAVSSYRASVSSFREQASHKTNVPFVKVPYKLCQPFRSGMVPTSPVEIMYHCPEEEIAFGPSCWLWDYLRRSQASGFLLPLSGGADSSSVAAIVGCMCQLVIKDIEKGDEQVKADALRIGQYKDGAIPMDSRELAKRLFYTVYMGTENSSEDTRSRAKRLAEEIGSFHLNVPIDSIVSAFLSLFETLTGKRPRYKVDGGSNTENLGLQNIQARIRMVLAFMMASLMPWVHNKSGFYLVLGSSNVDEGLRGYLTKYDCSSADVNPIGSVSKQDLRAFLRWAAIHLKYSSLAEVEAAPPTAELEPIRANYNQIKIYRLLFS

SEQ ID NO: 55687 - protein, 223 aa, Zea Mays
MVDAEKRLLANALEDVDNQFFVLLSDSCVPVHTFDYIYNYLMGTNVSFIDCFLDPGPHGTGRYSMEMLPEIEQRDFRKGAQWFAITRRHALLILADNLYYNKFKLYCKPAEGRNCIADEHYLPTFFNMVDPGGIANWSVTHVDWSEGKWHPRSYRAADVTYELLKNITSVNENFRITSDDKKVVTRIPCMWNGTKRPCYLFARKFYPESLNNLLKLFSSYTSA

SEQ ID NO: 55688 - protein, 699 aa, Zea Mays
MTSLSHAIGTVSMPPKWSLGYHQCRWSYDSSEKVLKVVRTFREKDIPCDVVWMDIDYMDGFRCFTFDSIRFPDPISMVDDLHSIGCKAIWMLDPGIKKEEGYFVYDSGSKSDVWIQKADGSPFVGEVWPGDCVFPDYTSEKTRAWWASLVKDFISIGVDGIWNDMNEPAVFKTTTKTMPESNIHRGDADIGGVQNHSYYHNVYGMLMARSTYKGMEMGNAAKRPFVLTRAGFIGSQRYAATWTGDNLSNWEHLHMSLPMVLQLGLSGQPLSGPDIGGFAGNATPKLFGRWMGVGALFPFSRGHTETGSIDHEPWSFGKECEEVCRLALLRRYRLLPHIYTLFYHSHTKGIPVATPVFFADTQDPELRKVETSFLLGPLLVCASTLPNKGAHEYAHKLPKGIWLSFDFADSHPDLPVLYLQGGAILPVGLPIKHVSEASLEDDLSLIIALNENGKAEGVLFEDAGDGYAFTQGDYLLTYYIAELHSSVVTVKILKSEGSWKRPKRNLKINILLGGGAMISTDGVDGEVIHLTMPSESVVSSLVATSEFEHKKRMEMIQPIPDIEEPSGQEGAELSKIPVDLKSGDWFLKIVPWIGGRIISMAHIPSDSQWLHSRIEINGYEEYSGAEYRSAGCTEEYKVIRRHLEQSGEEESICMEGDIGGGLVLQRQISILKDNPKIVQIDSSIQARSVGAGSGGFSRN

SEQ ID NO: 55689 - protein, 520 aa, Zea Mays
MAAALLPETAPRLLTPETLRTAAKQSQGIHLVPLSLRRAIKRYLRDQDRAHMNRKVLLLSASFDRAKGTGAELAAAATRAALLDDPNAPSGAEQRSARWKVRSAYGDIGLRYREDETVAYVASRMPAIYAACHRVLREVRRRLPEFAPAKVLDFGAGPSSALWAMRAVWPKSIERVNLVEPSKEMQRAGQSLLDNLKGLPLIHSYDSIQELNRKIEKHERGHDLVVSSYALGEIPSLSDRITIVRQLWDLTSDVLVLLEPGTPQGAKIISQMRSYILWMEKRKCRKIEKSSSRPPSSMKSIVAQKVSLKNGSFVVAPCPHDGRCPLENSDKYCHFVQRLERTSSQRAFKRSKGVPLRGFEDEKFCYVALRRGKRPEEAWPLDDLNFETLKERNAKRKPEDLVIDYDDQFPSEEDEEVHVDGGDSLVPYASDEHELSLFHDSEEAEAEQTVRADLGGGWGRIIYSPMRRGRQVQMDVCRSTKRDASEGTFERVVVTRSKNPTLHFQALKQETCTPAPFNGS

SEQ ID NO: 55690 - protein, 232 aa, Zea Mays
MEGPAAAEAENGGAGKGSGSRFRRVCVFCGSSSGKRSSYRDAAVELGKELVSRKVDLVYGGGSLGLMGEVSEAVHRGGGHVIGIIPTSLMGKEITGETVGEVRAVAGMHQRKAEMARNSDAFIALPGGYGTLDELLEVIAWAQLGIHSKPVGLLNVDGYYDFLLAFIDKAVDDGFIKPSQRHIFVSAPDARELVQKLEGYEAVQDEDPATPKLRWEIEQVGYNASLLAEIAR

SEQ ID NO: 55691 - protein, 769 aa, Zea Mays
MCESPSSSMSPSPSPSPPQPSRPPPEYKHFCRVCNKGFTCGSALGGHMRAHGASDVDGFGVDDDDSLDEEPTAPARCTGADQWDVAGTSSATHAYALRANPNRLIRSCQVCKNCGKEFTSWDLFLQHGKCNSSEGGEGEEGEMDGSDSLRSSLPASEAGGGGEEDPAVAAAAWSKGKRSRRVVRTDDPSSTMVSAERCTSGDEDEELANFLVMLSSSKSNNNDDQTIVITADHHKEPVCASTGEGGGGGEPLPFQSQTISLFTQTQTQEPVVPLLPSTVAATVSQYIAPISRGVFECKACKKVFTSHQALGGHRASHKKVKGCFAARFDNNATETAINNPTIAADTNSKAVVVNNADASVDAATRVFAITSVDTDVGTSNEATSSSLSMAHAVPIRHNPASATTTTFTVAAHCKKNVKMHECSVCHRLFTSGQALGGHKRCHWLTSNTSDPCNPLAIPPLTEDLVVGEVKHHDDTLQPTVDATEPLLDLTIAANPAVALAASTMRPDIASTVHLKQLVVAAPSNNVSHRKKTAATGSHTTDAVVEEDEADSIIIKKAKISDLKDVVNMDGKAATRPLQPHAQATVKHPQATVKRNLCLLLICPKVLQVLVGGGTSASGTPCTAASSVASWPDSSYSTHSDKVQGSGSMPATLPPLIHIFQVIVLLFCRPSTRTKILLENHIVDSEISLTATVILVGADVHRDAREGVLEFERAFRERFSAYTLAAKRHIDSTTIFDVQGAHMDHPRAQANFEIALKACHPWNPSVGSNI

SEQ ID NO: 55692 - protein, 1041 aa, Zea Mays
MRASAVPMEASASARRSAAGPDPRAKKPRLAPPPRDPRSYAATASSNGNTSAAEQALVDELLGQYRTALGELTFNSKPIITNLTIIAGENLQAAKPIAALICANILEVPSEQKLPSLYLLDSIVKNIGKDYVKHFSARLPEVFCKAYKQVDPSIHHSMRHLFGTWKGVFPLPPLQMIEKELGFQSSANGSSSAAPSRTDSQSPRPSNSIHVNPKYLEARQQLNQPTKGILGSGAKTTVIADTGGDIERPNRLGTDRNAGRRLDASNARPNIQRTQRDPSSNSLHEKQAVRDVGGLGFSNISQQAVVGTGQVRSKPKAQDGIGGPYYASGVGSSEEQFDRRSNFYASKDARPSGSVRLESALLPTPSINADRVGKPSSNKSWKHSEEEEYVWDDVHSKAAEYGGSHNVIKGEWMSDDGNAKFANLQRAKWADAGPVERIDPNTHKLDNVSRFGLGAGQERRISEYMDQEEYLLGKREVEARIDKEIRSDGQQFPAARGSPLWVSQEKTLLDIGLEPRISRFSTQPAERSTIYTGTMSAGITSSVPVGLSGNYAGRSSLDTANGMPIRSTEAFGQQKHRYWSSSPPQADTSSSTAPFARQGSPNPAESDFYPSRSLSRQNPQEYSKRALPVLAKDSHVVVHNDGFTQGQPSLQATRQTQKYPILQSKSHIKPSDQLQASFSRENSPSLFRPSIELGEVSLPSDSTPISSDLTSASNLLASLVKSGFKPNNHSDAQALGPSGPLPVASLSLQNAAGENTTLQAHTPNTSRPPLPPPPSTQSAEKAAPLSSLLSSLVAKGLISSPAYDSSSAVISQPNKASSMNVKDATASAVPLLALRPSVGKASSNSDSSAPTNASLTKAIEIKMSDLIGLEFKPEKLRKYHEHVISSLFDDDQSHQCKTCGNRFRLEELSLHTSSCGQRKSETIYTGIAPKRWYPSKNIYIDGSHEIEDSTEASDGDLGSAEEVCEFMVPSDERQIICALCGEPFDDIYSFEKGDWMYKDAVFLDYPKGESSCRNSVEGEEHVPIVHVRCMPRGSNDGMEVD

SEQ ID NO: 55693 - protein, 151 aa, Zea Mays
MVNYVDEIRAQGFKLEYLNIGGGLGIDYHHTDAVLPTPMDLINTVRELVLSQDLTLIIEPGRSLIANTCCFVNRVTGVKSNGTKNFIVVDGSMAELIRPSLYGAYQHIELVSPPTPGAEVATFDIVGPVCESADFLGKDRELPTPDEVPTA

SEQ ID NO: 55694 - protein, 237 aa, Zea Mays
MQQSKLECIDEQSQDSTSTEGYGEAEETEEYDDFDPYSFIKDLPDLSMVVPKFRPVLLPKQTRSCPTMTLVLDLDVHFNFREHTIYVRCRPYLKEFLDRVASVFETIIFTASQSIYAEQLLNVLDPKRKLFRHRVYRESCVYVEGNYMKDLTVLGRDLTRVMIVDNSPQAFGFQLDNGIPIESWFDDPNDMELLKLLPFLESLVGVEDVRPYIARKFNLREKVPKVAVMINVGPELI

SEQ ID NO: 55695 - protein, 823 aa, Zea Mays
MFKFLKEVVAGSGSGLKDFPYTIGETYASAWGSWTHHRGTSKDDGSPVSIFSLSGSNPQDRHMVAGRNGVKRLRTVRHPNILSFLHSTEAEVADGPAIKHTIYIVTEPVMPLSEKLKELNLGGTQRDEYFAWGLHQISKAVSFLNNDCKLVHGNVCLASVVVTQTLDWKLHAFDVLSEFDANNEASGSPMLQFEWLVGMQYKPMELSKSDWASIRKSPPWAIDSWGLGCLIYELFSGAKLARTEDLRNTASIPKSLLPDYQRLLNSTPTRRLNPSKLIDNSEFFQNKLVETIQFMEILNLKDTFEKDSFFRKLPNIAEQLPREIVLKKLLPVLASSLEFGSAAAPALTVLLKMGSWLPTDQFSIKVLPTIVKLFASNDRAIRACLLHHIDQFGESMSAQTVDEQVFPHVATGFSDTDGTIRELTLKSMLILAPKLSQRTISGSLLKYLSKLQVDEEPGIRTNTTILLGNIASYMNDGTRKRVLINAFTVRALRDTFPPARAAGIMALSVTGSYYEMTEIATRILPNIVVLTFDPDSDVRTKAFQATDQFLQIAKQHHEKLNTGDNRVAESTGVKLKPGNAGLLGWAMSSVTQKGKPSDHAPISTANANNSQASTALTAAPETQASTPAYAQSTSSSLDQAAPASARSSEDGWGELEDDNIHEENSDKDGWDDVDPFEDKPSPSLLSNIQAAQKRPVAQPKQAVANSSKSNPLKAPKSEDDPLWGPIAAAPPKSAAKPADIKPSTSHNDEDDLWGSIAAPPPKSSGKPLKPAAANSDDLWGAIAAPPPGTKARPLASSGKGRGTKPAQPKLGAQRIGRTSSTGM

SEQ ID NO: 55696 - protein, 812 aa, Zea Mays
MAPRDPKEDGFGVGGAADPEADIEAPLLVSSGSSFLLDPALEDGGGGDEEQRRRRRRFLHGSHTHSNTTSQVALVGADVCPIESLDYELIENDVFKQDWRARGRGHILRYVALKWALCFLVGALAAAAGFVANLGVENVAGAKFVVTSDLMLDGRHGSAFAVFLASNFALTMLAAVLTVYVAPAAAGSGIPEVKAYLNGVDAPNIFSLKTLIVKIVGCIAAVSSSLHVGKAGPLVHTGACIASILGQGGSRKYRMTCRWLRYFKNDRDRRDLVTCGSAAGIAAAFRAPVGGVLFALETVSSWWRSALLWRAFFTTAMVAVVLRALIDFCQSGKCGLFGKGGLIMFDVTADYVTYHLIDLPPVITLGVFGGILGSLYNFFLDKVLRLYNLINEKGKAYKLLLAATVTVCTSCCLFGLPWIAACKPCPTDTREACPSIGRSGNFKKFQCATDEYNDLASLFFNTNDDTIRNLYSAGTDDEFHISSILVFFIASYFLGIFSYGLALPSGLFVPVILTGAAYGRLVGMLIGSQSTLDHGLFAVLGSAALLGGSMRMTVSVCVIILELTNNLRMLPLVMLVLLISKVVADAFNANVYDLLVRLKGFPHLEGYAEPYMRQLSVSDVVTGPLQTFNGIEKVGHIVHVLKTTGHNGFPVVDEPPFSDTPTLYGLILRDHLLVLLRKKDFIRSCTASTLNALNHFSHAEFAKRGSGKHDRIEDIELCPEELEMFVDLHPFTNTSPYTVLETMSLAKALILFREVGLRHLLVLPKSSKRAPVVGILTRHDFMPEHILGLHPFLFKSRWKKVRLGKVKVTNIF

SEQ ID NO: 55697 - protein, 392 aa, Zea Mays
MTVGINALSGPVPKELGNLTNLLSLALGSNNFNGTLPDELGKLTKLRQIYIDSNDFSGSLPSTLSQLKNLSILWASDNNFSGQIPDYLGSLTNLTQLRLQGNSFQGPIPTSLSNLVNLKKLRIGDIVNGSSSLSFIGNLTSLGELVLRNSIISDTLASVDFSNFVNLYLLDLSFNNITGQIPQSILNLTSLSYLFLGNNSLSGSLPATKSPLVTNIDFSYNHISGNFPSWATDKNLQLNLVANDFVMDSSNNSVLPWGLECLQHSTPCFLGSPKSASFAVDCGGSRAISGSDNSVYQADNANLSAASYYVAGAPTWAVSSVGLFLDADAPNASYIIYSSRQFENTLDSALFQTARMSPSSLRYYGIGLENGNYTVTLQFAEVDFPDMQSWRS

SEQ ID NO: 55698 - protein, 217 aa, Zea Mays
MPVRVVDTATPSSQPSPGQEANTGHPSPPRCSLLSAGRSFAGTQNVSSLQKDEAWKVNVRIHGCDLEQGYLCGTMEALNVPLADTPVVTFWEGEIVDAKNYTFFTGKWEASPEDDIRHWSKFPSFMPLLSQIETDGGKSLDFSNYPYIFMRWKEQYFVNVGVDCGLTIAGFYYVCFSCSDGSISGFYYDPNSSPFQKLELKCTNEKSSGFTFSSYEL

SEQ ID NO: 55699 - protein, 621 aa, Zea Mays
MLRRCMRDLRSPRSLARVSRPISVESPTFLKSRSNSTKASPKSSQNAAPGPQGQPSQSGSNVSKIVLGTLVVGAAAMGAHQLGYIDLQFRDKKFPFSLKKEDVVKVYEDLKIPSEQKVDQTQNVSGQNAEIVQENNNEAHTPKGVLNDGMGALEVPINEDQLVPAEEKKSQTLAHETHPVPDEHGSDTKMPSEDSLAVEIETVPIDANESSEVPHEQQTDRIDSTIPPTQSTPTTVSTYDHPTDPDAPKDLSGAGAVEQKSLAETYFLQDEPDVSKDATIKEKRSDEVIREKTSKDGKIVLDIIEAIHAAEKKQADVDAYMYSEERRKLKYEKELKDTRARELMYAEEAAILDKELKKEKLKNAAALKELQEKAEQKLQDELQRKDEETSQQIEKAQEIAKAELAAAVAKEKASQIEQIAEANLNIDALCMAFYARSEETRQSHSVHKLALGTLALEHALSSGSPIRSEVELLRKSVEGIDKDSLLELALSSLPEDVLDYGSDTMMGLKQKFNSLKETIRHFSLLPAGGGGILAHTVARVASSIKIKGDNSGDGIESLINKVERLIVDGDLITAADALEQGLHGTEAEEIATEWVKQARKRAIAEQTLALLQACASSTTFS

SEQ ID NO: 55700 - protein, 1205 aa, Zea Mays
MYIKKVVIEGFKSYKEEISTEPFSPKVNVVVGANGSGKSNFFHAIRFVLSDMFQNLRSEDRGALLHEGAGHSVVSAFVEIVFDNSDNRIPVDKEEVRLRRTIASKKDEYYLDGKHVSKTEVMNLLESAGFSRSNPYYVVQQGKIASLTLMKDSERLDLLKEIGGTRVYEDRRKESLKIMTETANKRKQIDQVVHYLEERLRELDEEKEELKKYQQLDKQRRSLEYTILDHELNDARNELASMDDNRRKISESMSLADNEVVDVREMIKSFDKEIKVSTKGINDTKAQKEGVEKRRTEALKVVAKIELDLRDIKDRIVNEKRAKDEAARDLQSVRRESEKSKSELAEISKVHQAKLKEEEDISKSIMDREKRLSILYQKQGRATQFANKAARDKWLQKEIEDLKPVLLSNKKQEGLLQEEIQKLKDEINDLTNYIESRKSESSKLEETLAKRHNDYNDLRKQRDVLQEERKSYWKEESEVTAELDRLQEDLIKAQKSLDQATPGDIRRGLNSVSRIIKDHGITGVFGPVLELVDCEEKFFTAVEVTAANSLFHVVVENDDISTKIIQILTREKGGRVTFIPLNRVKVPDLSCPQSPDFVPLLKKLKYRSDHRRAFEQVFGRTVICRDLETATKVARSNGLDCITLDGDQVGKKGAMTGGFYDSRRSKLKFVKIIRDNKTAIDRKTGHLESVVNKLKDILFWFNYNLVTKQQQMDAERDHAKSELEQFKADIARAMKQRGSLEKALVKKEKSLNNICNQIEQVQSSIAMKNDEMGTELIDQLTSEERDLLSRLNPEITDLKERFLMCKNSRIEIEARKEELETNLSTNLIRRQKELEAIISSADSRTLPLEAEAKEQELKSSKRNLDELTSLLKANVDAINNFTRKMDDLKRKRDDLKAREAILEQTVQDGAKDLEQLMNSRNTYLAKQEECTKKIRDLGLLPADAFEAYKRKNKKQLHKILYDCNEQLKQFSHVNQKALDQYVNFTEQREQLQRRRAELDAGDVKIMELISVLDQRKDESIERTFKGVARHFREVFSELVQGGHGYLVMMKKKDGDAVDDDEEEDGPRDPGPDGRIEKYIGVKVKVSFTGKGETQSMKQLSGGQKTVVALTLIFAIQRCDPAPFYLFDEIDAALDPQYRTAVGNMIRRLADMADTQFIATTFRPEIAKVADKIYAVRHKNRVSNIDVVSKEEALDFIERDQTYNAS

SEQ ID NO: 55701 - protein, 506 aa, Zea Mays
MNYSQALSYTSQALSQNLAGLRKKSPIRKISTTLSYYLEDNWKRLWVLALWIGIMAGLFTWKFMQYRNRYVFNVMGYCVTTAKGAAETLKLNMAIILLPVCRNTITWLRNTRAARALPFDDNINFHKTIAAAIVVGIILHAGNHLVCDFPRLINSSNEKYAPLGQYFGETKPTYFTLVKGVEGITGVIMVICMIIAFTLATRWFRRSLVKLPKPFDKLTGFNAFWYSHHLFIIVYLALIVHGQFLYLIHVWYRKTTWMYLAVPVCLYVGERVLRFFRSGSYSVRLLKVAIYPGNVLTLQMSKPPAFRYKSGQYMFVQCPAVSPFEWHPFSITSAPGDDYLSIHVRQLGDWTRELKRVFAAACEPPVGGKSGLLRADETTKKALPKLLIDGPYGSPAQDYSKYDVLLLVGLGIGATPFISILKDLLNNIIRMEEEEDASTDLYPPVGPNKPHIDLSTLMTVTSRPKRVLRTTNAYFYWVTREQGSFDWFKGVMNEIAELDQRVHSTN

SEQ ID NO: 55702 - protein, 917 aa, Zea Mays
MMEGNMWLNDTIGVIPKNSWSIDPFGYSSTMAYLLRRMGFHNMLIQRTHYEVKKELAMKKNLEYLWRQNWDIEETTDIFVHMMPFYSYDIPHTCGPEPAICCQFDFARMRGFSYESCPWRSDPVEINPDNVEERATTLLDQYRKKSTLYRTNTLLIPLGDDFRYVSMEEAEVQFRNYEKLFDYINSNPHLNAEVKFGTLEDYFSTLRDEAEKINYSRPGELGSAELQGFPTLSGDFFTYADRNQDYWSGYYVSRPFFKAVDRVLEQTLRAAEILGSFVLGYCQKFQCAKLPISFSHKLTAARRNLALFQHHDGVTGTAKDHVVVDYGTRMHTSLQDLQLFMSRAVEVLLGDFHDRSDPTLLSHFESVQERSKYDVQLVHKVLHPLEGKAQSVVFFNPLEQTRDEIVMVVVSSPDVSVLNSNGSCLPSQLSPEWQFVSDENISTGRHRLYWRAYVPPLGLETYYVVTGQDCEKAIPAAVKTYTTEQEFSCPQPYDCSKLEAKTVEMKNSNYTLSFDTSRGLLQTVTRHKDGQQTVIGEEIGMYKSHGSGAYLFKPVGDARSIVEEGGHFILTEGPLVQEAHSLPKTEWRKSPLSHSTRIYNCGDAIQDMLIEKEYHVELVGHAFNDRELIVRYKTDIDNQRIFYSDLNGFQMSKRQTYDKIPLQGNYYPMPSLAFLQDSHGNRFSVHSKQSLGAASLKNGWLEIMLDRRLVQDDGRGLGQGVMDNKPMNVIFHLLTESNVSALPKTHSLHTLQPSILSHRVGAHLNYPMHAFMSKKPHEKSFKRAQQSFAPLTASLPCDIHIVNLKVPRPLRFPHTESAEPKFAVLLQRRGWDASYCKRGGLQCTTVGEEPVNLFYMFKDLSAVNVKATSLNLLHDDPEMLGYLEQTGDVAQEGDVLISPMEILAYKLDLQPPSSQEE

SEQ ID NO: 55703 - protein, 479 aa, Zea Mays
MSGAAMYIKKDLRITDVQLEILIGILSLYSLFGSFAGARTSDRIGRRLTVVFAAVIFFAGSLLMGFAVNYGMLMAGRFVAGVGVGYGGMIAPVYTAEISPAASRGFLTTFPEVFINIGILLGYVSNFAFARLPLHLGWRVMLAIGAVPSALLALLVFCMPESPRWLVLKGRLADARVVLERTSATPEEAAARLADIKAAAGIPRDLDGDVVAVPNKGRDGGSSETQVWKQLILSPTPAVRRILLSAVGLHFFQQASGSDSVVQYSARLFKSAGITDDNKLLGVTCAVGVTKTFFILVATFLLDRAGRRPLLLASTGGMIVSLLSLGAGLTVAGHHPDGKVAWAVALCIASTLAYIAFFSIGLGPITGVYTSEIFPLRVRALGFAVGVASNRVTSAVISMTFLSLSKGITIGGSFFLYAGIAAVAWVFFFTCLPETRGRTLEEMGKLFGMPDTDDMAEAEDATAGKEKVAEVEMYMPSKM

SEQ ID NO: 55704 - protein, 215 aa, Zea Mays
MYGEFRSGKTQLCHTLCVTCQLPLDQGGGEGKALYIDAEGTFRPQRILQIADRFGLNGADVLENVAYARAYNTDHQSRLLLEAASMMVETRFALMVVDSATALYRTDFSGRGELSARQMHLAKFLRSLQKLADEFGVAVVITNQVVAQVDGAAMFAGPQIKPIGGNIMAHASTTRLFLRKGRGEERICKVISSPCLAEAEARFQISSEGVTDVKD

SEQ ID NO: 55705 - protein, 332 aa, Zea Mays
MESSLSSFGRKSWKTFGTPLVSSLPDTVTGSNIYNLFLKVMTPFRVSRGDAAVADQTLGESSLVDETEDINMSSDASEHTSINNNSVEDETGTEDVMQFFLTNERIPDQRMKIEMDLSITVNDPHKRLHVAVCWEDSGLDQYNFSSLNSLPEVYKAVLFSRRPQDTCSLYACLEAFIKEEPLGPEDMWYCPGCKEHRQASKKLDLWRLPEILIIHLKRFSYSRYTKNKLETFVDFPIHDLDLSKYIGHRCQDVPHNYRLYATSNHYGSLGGGHYTAYVYHEGKKGWYDFDDRHVGPITEDSIKTSAAYVLFYRRIQEDSLDTVTDIDSDIPT

SEQ ID NO: 55706 - protein, 204 aa, Zea Mays
MLRQVKKSGARVNFKREHDKKVCCLGLTSLIALPAAKIPADALDRIFKATLELLVAYKDQVAEAKKQNEEAADDMDGFDADEEDDDEVDSDKEMGLDDEDGDEVSSLQLQKLAAEARGFQPADDDDSDDDFSDDELHSPIDEVDPFIFFVETVQGLQASDPARFQNLMHTLDFSYQALASGIAQHAEQRKNEIEKEKSEKANAQ

SEQ ID NO: 55707 - protein, 154 aa, Zea Mays
MTVDEGINCEIVRSVLMERANCPYLAAQTATEMEAFSRTETFQKIVEAYSRPTRIIRGKEIESALEVDPHVFEKDEEKVLWSAYLEVADKIHPGVDIKTFVDASLILIQPLEDFFNSVFVMAEDERVRNNRLTLLRKIESLPKGIADLSVLPGF

SEQ ID NO: 55708 - protein, 68 aa, Zea Mays
MGAREKAVYTGAGWERGARSGEPAELGVSVREAACVAGTAAALPQRAQLRLVMPSATAAASRCTRQLL

SEQ ID NO: 55709 - protein, 184 aa, Zea Mays
MYDGMKHYCLEGTHIVNLFSFSKAYGMMGWRVGYIAFPNEVDGFHDQLLKVQDNIPICASIIGQRLALYSLEAGPEWIKERVRDLVKNRALLVDALSPLGDDNVRGGQGAIYLWAKLPDTCSDDFEVVRWLANRHGVAVIPGSASGGPGHIRISFGGLKEEDTRLAAERLRRGLQELVADGTVQ

SEQ ID NO: 55710 - protein, 175 aa, Zea Mays
MAHLQFLRRQKQRSLSRRARTLAIATAAAAAAAASATGSSWPPVTTRLPMRQATRRRGRHQSTKSSTESRSTSQSHSHTLSMAIGSPKPEEASTDGAGLDERARTLRREGKKEERCGTSEQLERRQLDQGGESLRLDCGGYGSAQAGGKKRWLGFCDCSSGERRVCNRSCGLVVG

SEQ ID NO: 55711 - protein, 270 aa, Zea Mays
MKGFPAIYMIDCTSNECHHLLKSAGMEELYPALLLFPAENKSAIAYEGGMSVSHLIEFLESHVSNSRYLLEYKGFMWKKRMTPQHDAPQAIQFKVSDKGSGNVGSELPSHPGVVTGSILTATKKLGTAVPFDNAKVLIVSADSHEGFHGLIINKRLSWGVFKDLDSSMEPIKHAPLFYGGPVVVQGYHLVSLSRVSSEGYMQVIPGVYYGNIVATSRVVTRIKLGEQSVNGLWFFLGYSGWGYNQLFDELTEGAWLVSVKPIEHLDWPKS

SEQ ID NO: 55712 - protein, 247 aa, Zea Mays
MSALSAHKGKITVVDIGNNNISPEGLHPVAEFLKRTKSLQWFSLYMNDISDEGAEKVAEALKDNKTISTIDLGGNNIHSKAVSAVAETLKDNAVLTTLDLSYNPIGSDGVKALCDVLKFHGKIQTLKLGWCQIGMEGAECIADCLKYNTTLSTLDLRANGLGNDGAICLARSFKIINESLTSLDLGFNEIRDDGAFALAQALKANEDLAVTSLNLANNFFTKFGQVALSEARDHVYEMTEREIDIYF

SEQ ID NO: 55713 - protein, 113 aa, Zea Mays
MTSMNRNIAAFGAGTGRLSTDQKKKLLWGNKKGNPSEETSKRWDLFSDRERQEKFNKLMGVKSSAPVQENMVASKAASSAEEAKKLEELDTNLEKHYIAGLRRKDGRTVGLGL

SEQ ID NO: 55714 - protein, 585 aa, Zea Mays
MAAVGSLKPGMETLHVQDYKDAPPAKAAVESLQPAMESLHVQDYKDGNMYYGAYPAYAYGAYGGWGEYPYLSHDGAQTPTAIYGSQNYQYPSTYTKQQNSTAKLSSNGISEKLTPAPQTDVSTIGVDEVKGLKNSNSVLKTDRNMPGSNGSYGRSSVRSGSYQNQTSWSHYPYYSSEMFSDKQQKFTGNHNSTSNPKTKGQSRNQNTRQYPHLMGLQTPTSSVYSANGIYGYDGSYGPGLWYGSHMYNSGLYGGWNSLYDGKYRTRGRGNNGYYVYGNGSIDGFNELKRGPRSGMYKNQLGLEATTQAPAKEQDLLFANGSHPAMKDQYNQADFAETYSDAKFFIIKSYSEDDVHKSVKYNVWASTPNGNKKLDAAYQEAKEKSSETPVFLLFSVNASGQFVGLAEMVGRVDFEKTVEHWQQDKWTGCFPVKWHIVKDVPNSLLKHIILENNENKPVTNSRDTHEVKLEQGLQVLKIFKDHVCKTSILDDFGFYDNREKMMQERKAKQQQSLKKVIDVKLPSVTDMERSPKGETGSTELTGVGTDVLNKERLLGKAGEKNGEKGNDVAPQDLKTQTEKLAGLNGC

SEQ ID NO: 55715 - protein, 93 aa, Zea Mays
MRLAIGRISDGEVEYAKTICAFVRDIYRELTLVVPLMDDNSEMKKKMEVMLQSVVKIENACFSVHVRGSEYIPLLESSADPGYSYFGAPDFDQ

SEQ ID NO: 55716 - protein, 144 aa, Zea Mays
MRFRCIKVWLKGDKAGEAETFVDLPGWPDNIRLGSDGHFWIAVLQLRSPWLDFITRWTFTKRVVASFPALSEWSKGAAKGAMVAQVSEDGTILRVLDDSQGKVINFVTSVTEFNGDIFLGSLATNFVGKLSLARVAQKQGAVSS

SEQ ID NO: 55717 - protein, 74 aa, Zea Mays
MRREQLASSVLQAIKPNLPSKYMLSPNPLRIRQKKKTILLARSAEAKRRTKPLAEVVQFFRDRIMAQPALSQVT

SEQ ID NO: 55718 - protein, 283 aa, Zea Mays
MPPILFSPQPKHASPFPSFPFLSLVSSRLRSPFLLRTPSSPHRVKPQHKSTARRLRSPPVPNQPLRCPIRPIPPPIRRRGGASGPTPMYSNFKEQAIEYVKQAVQEDNAGNYVKAFPLYMNALEYFKTHLKYEKNPKIKEAITAKFTEYLRRAEEIRAVLDEGGAGPGANGGDAAVATRPKTKGKDGDGGNGGDDSEQSKLRAGLNSAIITEKPNVKWNDVAGLESAKQALQEAVILPVKFPQFFTGKRRPWRAFLLYGPPGTGKSYLAKAVATEADSTFFRE

SEQ ID NO: 55719 - protein, 252 aa, Zea Mays
MGLPPRRRRIHMTLMHLILAMSSQAEISERMRAILIDWIIEVQYRLTLMPETLYLTVYIIDQYLSMESVPRKELQLVGISAMLIASKYEEIWAPLVKDLMCLDNAFTRDQILTKEKAILDMLHWNLTVPTMYMFIVRYLKAAMCDTELENMTFFYSELALVQYAMLVYPPSVTAAAAVYAARSTLGMNPQWTDILEHHTGLAEPQLLDCARRLISFHALAPESKQKAVYRKYSKPKLGSVALQSPDKKLLSG

SEQ ID NO: 55720 - protein, 64 aa, Zea Mays
MTLGTLLQTAILVFISYRTKWEKQAMRAEERVREWGGRADALPSATQVAPAAEDAGPPSNASAT

SEQ ID NO: 55721 - protein, 120 aa, Zea Mays
MFVLDVDDSTSRRFFCKNKLSRQYHNFIRNLWFTKRRRDRESFTKRRKDGEDMDSLRNGNMLPSFNLPQSGRVMYFWPEVIKRRLCRSGYFTDHNHSQIRLVTAVLIALAVLCLLVSHVK

SEQ ID NO: 55722 - protein, 407 aa, Zea Mays
MIWRNIYSRPLLTSRSGHSHMPQSPKPYTSLSATVIAIAMAGRRPAPVAILLLLAAAFAPISSAVRPVSDAHRSAAVELFAPSADGSFGDLESTYEAVRTFQILGLENYKSLSGKACKFAAENLASPGSTTKDLFHAVRISGALGCAVDAGVYDGVVARLKAVIQDTNSLLELYYPVGGLLGIKEQGHNVVLSDAEGTFHATKALSQSDGRWRYDTDSAESSTFAAGIALEALAGIVSLADAAVDPSMMGVVKNDVVKLFDTIKSYNDGTFYFDEKHVDATEYKGPIITSASVVRGVTSFAAVVSGKLNIPAEKILGLAKFFLGIGLPGSAKDCFNQIESLSFLENNRVFVPLILSLSSKVFSLTSKDQLKVEVTSVFGSAAPSLKVNLVQVLGSDSKVITRTSIRP

SEQ ID NO: 55723 - protein, 338 aa, Zea Mays
MSREDTLKVQTLELKVNIHCDGCLKKVKKVLHKIDGVYQSTVNAAEGKVTVSGLMDPDTVIRKLHKAGKPAQLWGATAKPAVATQLEKLQLKDAGGKGQGQPPKNAGGKGQPPKNAAGKGQGQGQKQQQPKGGAGGAGAGAKVVALPHSQPTPQQLMQMQQQMQMNGMKFAHPELMAMGAGRMPMPMPFPAAAQAQAQAAAAKDPKTVKFDLPGGEEFGDDGSDLDDEFDELDDVDFEDDGLDDDDDGDLYDGPGMVMKPMGMPPAAAAGGGNGNGGGKKGGGGNEVPVQINGNAAGVLLPDAAAPPARQHVQRREPQRVLGDVRRGAAAACGGLRRK

SEQ ID NO: 55724 - protein, 172 aa, Zea Mays
MDRELSPRGNAPGRGSGGASSSKHKNGGGGKKPIKVLYIANPMRVQTSAEGFRALVQELTGQHADPSKYSPGDLDSGAAAQGLSPRARVADVSSETIVASHSPGSKAAPHGGDYYDVEEDEDDVFRSPHMLLENNYTVFSPPTLLYDHHPHSKATSESEAGFAAEHDNFWSK

SEQ ID NO: 55725 - protein, 404 aa, Zea Mays
MEFTFEDAAELCALVSNQQSHVDEKRRWLESMILRPDGCIRRAKRPKFLHEVYLPESYIRSDDRSCDKVRGNIKRIWSSECNGYTHHLVLEGLQLFDFQKKENEPLGPEYLGVMQDTISKLTYETLQSVACVVSHDKVTFDKTRSVMEKIVNSHLPSYLASLDQNDIACQLFNIFRNPCSYRSGSVRLVTPVSPQLLSSIKHALDELDGMPMQGLVAMNRKIKGKSCAPKFGLTASFSKRMHIIKMIRKRCNKILTELEEGNYLPKELAKAMSVVNLYQKQKLKNVSISQSEFFPFAKETISLQNDILNALWSLPNLKHAKLKLLHTILDHDSKFERKHLATLRNYLTECLFGCDDGLPDVALQAIASINQISRCQHVVLTEEREDAEVDAVLNLSSHLKALAH

SEQ ID NO: 55726 - protein, 231 aa, Zea Mays
MRGLACSRCIGAGMEEPSKGSYAKEWAQWEQRLRATLFGNADHLNSIQVPFDYAVKAVLEQLKAVAKGDLKTPDTGKRKFGNIMFAAVRLTPPDILGLLRKVAEKDTAVDSFVNKIRLEDNLTKVHVTLAHKRGHGVSAVASYGIYQHQEVPVSFNALYYTDKMAALEAQLGAVNDEPINSRNEWPHATLWTAPGVTPKEANMLPQLASEGKAERVPIDPPITISGVVDFY

SEQ ID NO: 55727 - protein, 78 aa, Zea Mays
MPLMLDKIRFLSLTDKEVLGEGDTAKLEIQIKLDKEKKILSIRDRGIGMTKEDLIKNLGTIAKSGTSGTGAARVSCRS

SEQ ID NO: 55728 - protein, 1203 aa, Zea Mays
MAPTKRMEKLKLSTLLTFMRCHRGSSDDHSRIGTVGFSRVVYVNEPDMLEEEGFNYPLNEVSTTKYTLATFLPKSLFEQFRRVANFYFLVSGILALTPLAPYTAVSALAPLCVVIVATMAKEGVEDWRRKQQDHELNNRIVKVHRGSGHFEETKWKNIKVGDVIKLEKDNFFPADMILLSSSYPDGICYVETMNLDGETNLKIKQALEVTLDLQEDTKFREVRQTIKCEDPNANLYSFVGSMEWRGQQYPLSPLQLLLRDSKLRNTDYIYGAVIFTGHDTKVMQNATDPPSKRSKIEKKMDQIIYVLMSSLLMIALLGSIFFGIWTKEDVRDGGLKRWYLRPDATTIFYDPKRAALASFFHLLTALMLYSYFIPISLYISIEIVKILQALFINQDIEMYHEESDKPTHARTSNLNEELGMVDTILSDKTGTLTCNMMEFIKCSIAGTAYGKGVTEVERAMAMRKGDSLDDDIENGDYKDKKNHNSPNVKGFNFKDPRIMDGNWIHEPNKDMIRDFFRLLAICHTCIAEIDENEKVSYEAESPDEAAFVIAARELGFEFYKRSLATIIIREQDPSWNVVEKRYRKYELLNILEFSSSRRRMSVIVKEPEGRILLLSKGADSVMFKRLAPNGRKYEEETRRHINEYSDSGLRTLVLAYRVLDEKEYKEFNEKLNTAKASVSADRDVKIEQAADSIEQDLILLGATAVEDKLQQGVPECIDKLAQAGIKIWVLTGDKMETAINIGFACSLLRQDMTQIIVTLEQPDIIALEKDGDKYKIFKASKKKVMSQIEDGIKQIPPSTKISTASFALIIDGKSIPYALEDDVKFKFLDLAINCASVICCRSSPKQKALVTRFVKQVTHKVTLAIGDGANDVGMLQEADIGVGISGAEGMQAVMASDVAVAQFRFLERLLLVHGHWCYRRISVMICYFFYKNVTFGVTLFLYEAFASFSGKPAYNDWFLSLYNVFFTSLPVIALGVFDQDVSARLCIQYPQLYQEGVQNILFSWCRILGWMLNGVMNAVLIFFFCITTFEDQVFRRDGQVAGLDALGVAMYTCIVWVVNCQMALSVNYFTIIQHIFIWGSIAVWYLFLIVYGSMNPRFSTTAYMVFIEQLAPALSFWLVTLFVVLATLVPYFTYAAIQIRFFPMFHNKIQWKRYLGKAEDPEVARQLSSRHRTSSQQRMVGISARRDGKAMQITRETEIEVQE

SEQ ID NO: 55729 - protein, 107 aa, Zea Mays
MDAQFTIGRPSNMSVALWYPDDGKAWSNSDHYSASCNWLVLDIQPSSEATYYRPAPNRSWDAATGFALLLSVVAICMSIFVGYRFSRNRSTAQFTPLEQIQFAEERH

SEQ ID NO: 55730 - protein, 128 aa, Zea Mays
MQKKEAGGFFELIKSLFNQAEREWVGFLGPIHIWQGMDDRVVSPAVAEFVRRVVPGATVHKLLDEGHFSYFCFCDECHRQIFSTLFGIPQGPINPAPPQPGEVVSELTEETTVPDNATDEEQGKSGLP

SEQ ID NO: 55731 - protein, 242 aa, Zea Mays
MNSIEPFNRLVRLAARAFYDDVSMKGDNQPKTSRGDNRGMAVVVLDALTRRPWVREEDLAKALKLHSKQLRRILRFFEEEKLVTRDHRKESAKNAKAHNAAAANDGQPIAKEGEEKVKLHTHSYCCLDYAQICDVVRYRIHRMKKKLKDELDSRNTIQHYICPSCNKRYSAFDALQLVSYTDEYFHCETCNGELVAESDKLASEEMGDGDDNVRKRRREKLKDMQQRIEIIHSLFAQSQEKN

SEQ ID NO: 55732 - protein, 62 aa, Zea Mays
MLRSRVRTQRCLGIERRSRCFYRWEGIARRCSAAAGGENSGKSNKEGKALHVRDAHALVLAC

SEQ ID NO: 55733 - protein, 81 aa, Zea Mays
MGATGDINVFAQMIDDAEGLEKIENLQSHDNNEIYEKAVKLLETYWMEEEDDAMATAGEAAPAVFDFSQGGNPPGGGLNLN

SEQ ID NO: 55734 - protein, 55 aa, Zea Mays
MWRGPDPVDLSGAGRGRPTGNRWARAAMVWLLRPPRSLETSRAGPRAPILRAIAA

SEQ ID NO: 55735 - protein, 1403 aa, Zea Mays
MSRREPDTSPFCDLSNLRTPRPNPKTVPPSPQFFTASKSALQAPTPTSLRRRRPGDGVPTPTPLGRRLHALEVDQSRSARRAESGRERALRTFSASASSWLSLLLRDPSACGCFPGFTGSAAAAQPWATGKRGALDGDRARGGRSPKRCRGGGDRGGERSKEMTPAMVAALRESLKDACSLEDVTERMEKHMSKGACEEVLFMMFQICKNIDEGRLKMKARCPLVTDLRLKEKATRVFMSYNPYWLRIGLHIVLGGDSLLQTGQGKRDKEVHFLKLILEKHMLSQIMTAKSCGNKKLVEEHHVQGYSDVLGNIILKRIFLLVVALDRTKIESTLPLEAGIDGLDGGSPLLFCHQSQIKSSRQIIQESLRETMHGEGDILVHLTTMGYKLNYQQPALSEYDFTMRNLFEDLQDGIILCRVVQLLLADASIISKVIVPSDTDKKRRSNCTTAIQYIKQARVPLSDSDGVTISAEDIAAGDKELILSLLWNMFIHMQLPLLASATSLARELTKLNVHVTEQQISENKPHMGLLYNWVQAICSKIGMTVESSSQLDRRALNCFINYYLNIDISPFKETPTGCRKELFTCHQLDTISDIAGWPSSEMGKVLSDVLQAVDIPASGILADGVLFDERSTILLLAFLSSHLTNDERLDQLKNLINMRLYKSADTKIAARRISRGKIDIKYHPSQTDKNDGACTNQEWAATIIQTQARSLIAKNKYCERKKAIFILQGALRAWSAIISNRNRSCLSIAASIPWQAQGNNRYFIFIMERHRFVQMRKSAIMIQLAVRIWIRGRKKFKNSDSFKSCEFLEGKTPPKISSIAPSPQEHCSGGDKTIASPTACKHCEHVLTVRASAAAPILYFDGMDSLDSTTPLQFSGNQSNFITSTTQLCKSEHDCRSCVVEKSNSVSVSKLVSADDIQCSSSICFPVCKELVAAQTIQSAYRRFLNNRNRITGAIKIQSHWRCYSVRKCFMKEIQAIVGIQTSIRVFLCYQAFQRHRLAAVLIQRVVRGWLARKRLLGSSSLRTYTRLCVVDQSQKRKCYQSLELNIVLDSVIRLQRCWRKFLLRQSVKTYVISIQSFVRGWLARKQLNQTFRCINIIQRWWRKVLQTRKRAVIVIQTRFRGWVARQDAIRTRNSICNIQRWWRKVLFLKLRKQAALVIQAHFRGWIARQVAFRTRKSITIIQSYVKAYLVRKASKQEVAHIRSRLQKSSSQVDDSMRLINRLVSALSQLHRCRSIHSIRQTCATLSTATEYSKKCCEKLVAAGAVDILLKQIYLLNRGIADQEVLKQVFLTLRNIARYSNLRQVLASTAESVEIIFQELLRNKADGFFIASDILKSLCESKEGRETVQALSHLIKRLRNLVHDLEKKVELDKRNGRTGAVKATNLRRLREAATLYHILTSGT

SEQ ID NO: 55736 - protein, 257 aa, Zea Mays
MQDISALSEVEIMQTEDASAKDMTAVCSIDCIEMKQAINTTANDTYAAIVEEKKLIEGTTARMNGVRETYYVEEQTQASDTKELSAVQNIGNSEENKQTENTDAKETNARFNANDVEHKTQTAKEIAAAESTSSVEEKQQLNIVVVQDGSNKKMNEEIASTGAQLNSGRVRVPLKVLLAEASMENQVKKPSTKERMLSFRRQVTKDNNLSVKSGSRKSGPDDHHWSSPAKLPHKDVDKISREKKQPWMPFICCHSVR

SEQ ID NO: 55737 - protein, 328 aa, Zea Mays
MPLCVRKSYYDVLQVPKGASEDQIKRSYRKLALKYHPDKNPDNEEANKRFAEINNAYEVLTDQEKRKIYDQYGEEGLKQFQGGGGGGGGMNIQDIFRNFFGGGGGGMEEEEEQILKGDEVIVELDASLEDLYMGGSVKVWREKNVIKPAPGKRRCNCRNEVYHRQIGPGMYQQMTEQVCDQCPNVKFVREGEFLTVDIEKGMKDAQEVLFFEEGEPKIDGEPGDLKFRIRTAPHDRFRRDGNDLHATVTITLLQALVGFEKTINHLDNHLVEIGTKGITKPKEIRKFKGEGMPLYQSNKKGDLYVTFEVLFPKTLTDEQKGKLKDVLV

SEQ ID NO: 55738 - protein, 128 aa, Zea Mays
MPCTARLHRQLARPQLLGACWHMYRRRTQKHRLMVVPEGLGGLPTLIPSKYPLVKGALRERRPRPSSVSSFPILDWSNHLQPTTFEDPKLYRSFAPPLSFTYRSLLQRVLHSGRKKFLPVRDAHLLPH

SEQ ID NO: 55739 - protein, 367 aa, Zea Mays
MVTNVVDLRSDTVTKPSDAMRAAMAAADVDDDVLGADPTARRFEAEMAALLGKEAALFVPSGTMANLVSVLAHCDVRGSEVILGDASHIHVYENGGISTLGGVHPRTVPNNPDGTMDLARIVDAIRNPDGALLYPTTRLICLENTHANSGGKCLSVEYTDKVGEIAVNHGLKLHIDGARIFNASVALGVPVHRLVKAADSVSVCLSKGLGAPIGSVVVGSEAFIDKARILRKTLGGGMRQVGVLCAAAYVAVRDTVGKLADDHRKAKALAEGLKKIKQLTVDSSSVETNMVFFDIVDPRISPSKLCQVLEQRNVLAMPASSKSVRFVIHYQISDSDVQYALTCVEKAVEELLKGGTKLEHLTNGACV

SEQ ID NO: 55740 - protein, 649 aa, Zea Mays
MSVVGFDVGNDTLVAAAARQRGIDVLLNAESKRESPAAVAFSHNARLIGCHAASASSAHAPFSSVKRLSWAPRGGTRTPPSSATSPASLSPSPTPPVAAPSSTLTTSGRRIALSPTHLLSMLLAYLKQLAEADLGGAPVADCVISVPCYFTQAQRRAYLDAAAVAGLRPLRLMHDLAAAALGYGLYRSDLGGAGGPTCVAFVDVGQCDTQVAVVSFDMSGMKVLSHGFDADLGGRDFDEVLFEHFAEEFRDRYRIDVVRNVKASMRLRAACEKAKKVLSANAEAVVNIECLMEEKDVRGVIRREDFEKLCARLLERVVEPCKRAVEDSGIGLERLHSVELVGSGSRVPAITKVLAGFFRREPSRTLNASECVARGCALQCAMLSPTFRVREYEVQDAIPASIGFNTSDGPVSTLSSDALFRRGLHFPSVKIITLEKNDSFSFDAYYVDANELPPGTSTDIGSFQIGPFQAHTEASKVKVKIRLNLHGLVSVESAVLINDYQRNGSSTDHMEVDSSGDDMQGHKSRSERSIQRQELPITEYIYGAMSKHELLEAQEQEQQLAYQDKLVEWTKDRKNALESYVYDTRNKLSERYRSFATDSEREQISVNLQQTEDWLYEEGDDETEAVYSSKLEELKKVTIKSAIICSGWS

SEQ ID NO: 55741 - protein, 687 aa, Zea Mays
MGKKAKNATYISGNEPGRISREVSKVEKRRTVKSTLCNERSSRSHCVIILDVPAVGGRLMLVDMAGSENIEAAGQTGFEAKMQTAKINQGNTALKRVVESIANGDSHVPFRDSKLTMLLQDSFEDDKSKILMILCASPDPKELHKTVSTLEYGAKAKCIIRAAHAATPRDKMSSEESSAMLNSRIVAMNQFIHKLQKENKLREKERNEARNVLKLREEELAQLRAKLNLIERQGKATENEINSKVMEKTQTLRGELMKMEEAMYKQQQELCVLRQRLQEVEREKADSCQPGQQDVIGGRLLARLSEMPAGLDQSMAIDMSMDLDMGDQTSMQDVKVIKEDTCQQGQIWNHTTTAASACTGSLVQEDDVRLSGYPEKTVLSTVFEEGDEDYAEKKCGLQEEVRKEVVDENFKVDIAQHTLSEPDHPATRKHHIENMFRLCGNHREIAKKPKVQSPAKEMFWNENQSPAKQVFGNQNKSPANKIFGDENKEPLAWGAIETPMCDVRVTDSPVSSQLSPIVCQVVDAPLSAQPDTCSAVEESDPNKENSLAGQKDGGLLEVYIKWESGNLIKGLKLLHNSCLSDLRKFIEAHFEEAGSKQKHQFTFLLLGDPSGAPVSRDTEASVQISRLPHWNNQPDSYLACLRAAKKPSADHVPFSPLDSNLNTVHLAGAVSPKVNQMSPSYIRELRA

SEQ ID NO: 55742 - protein, 145 aa, Zea Mays
MAPEMYKHKPYGRKVDVYSFGLLLWELVTGSLPYEDMTPLQAAFAVVNKNLRPVIPLSCPAALKLLIEQCWSWQPEKRPDFQQIVSILEDLKTVLETDGTLHKVPSSICQALESNDQNKKKAGNWIQRLSYAQPDFSGPPPPKLL

SEQ ID NO: 55743 - protein, 526 aa, Zea Mays
MSTAAPAPGSTATVRVSNIPASAIAAELLAFFDSAVTIAGATFACEIVAAHRGWLSRGHGFVQFDSSAAATHAIDLASSGRLPPFLGSCLSVSPARADLLPRAPDLSLRAASASLILGNRVAERELEVAYSCDGVRAEVIPRMRRVDLYLKHDSQSYKLEVLFEDINECFGCHLDGTGAILLQLTYAPRIHIAISGSTVKSRFTDDRFHACKEDAKFAWVRALDFTPNSSFGECSTLVLKLSKGASVSYILESLPFSGELGELAIASMDVFGSSSNVVPLVDCPNGFSVPYEVLFRLNSLVHMGKLVARHVNADLFKVLEDLSIDTLRRIFEKMSKLKSTCYEPLQFIRHEAHSMNMRKKALSNKRESGKLMRCYRIHITPSKIYCLGPEEEVSNYVVKYHSEYASDFARVTFVDEDWSKLSPNALSARTEQGFFSKPLKTGLYHRILSILKEGFCIGPKKYEFLAFSASQLRGNSVWMFASNSSLTAENIRRWMGHFEDIRSVSKCAARMGQLFSSSRWYREDFY

SEQ ID NO: 55744 - protein, 439 aa, Zea Mays
MEQQKMIFDLQQQAVNSQSTAQQCSQVATQVVGLHSSSTNQYPTQQKTQPLKTFQDFPGNAVSIVKPEIVTSVGARSLHVPGGVQSMKMDEVPSSSTSPSTNNNPVILRSTPSSSKNQCLPTAAKAPQSSVVLGSTLEQGMKPCDSTQHPMVIPKLAEERPATGQDYMNSTQLDYLDTSSSATSVCLSQADGSLQQSFPPSSFNQHQPLREAVPDSEFEVTDAGNNFLFGANIDGHMEPLNEDDLLGTAFEADKYMEQMPGNGISNYISSKDSQQELSSSMISHPFGVADIAFNSIDSSINDIQFLNRNSRAPGPVQQRMRTYTKVHKRGAVGRSIDINRYSGYDELKHDVARMFGIEGQLSDQNRVGWKLVYEDHEKDVLLVGDDPWEDFVNCVRCIRILSPQEERQMRLASDYGDSFLGNQACSSSDGGRPWRVTGD

SEQ ID NO: 55745 - protein, 210 aa, Zea Mays
MTGSGIFAAGGEGEEDESANVSATSVRTAPKNYQAISTISHISFAEEESISPKKPTSISEVAKQRELSGTLLSEDDSKMKRQISDLKSKELSGHDIFAPPEDPRPRNSENGSTSQTPGKNVSNFKFGEADEDSAVKTAKKIPTKKFTDLAGNIFKGDDEAPGTAEKHHLSTAKLKEMTGSDIFADGEAPSRDYLGGIRKPPGGESSIALV

SEQ ID NO: 55746 - protein, 555 aa, Zea Mays
MHRYRSQLEQEVNKLQRQLQEEIDLHMALTDAITYNAALILKASMKLPDKAHELLISISSLETAITKLEEDLHHLHYQLCDARNERLLAENKPECLLPTASDCQPSTACDCTREEPEQTLRYSRFKDYHQVEDGLSTEPEDQQDDEKDAEDGEHVSLNMLMQEACSMENEGKEDQKIDALTFSQPNFKKSDMSGNLWNNPNQLSEEMVRSMKDIFLHLSASPKISREEPFANSSSSAERLSGSTLTTLSDSSIIASVLRSPSIDWNNGDGIIDDVRNFDPYNVKGKEARRDVGSYCSVAEVSWMYIGNEQLEYASGALKKFRFLVEQLSKVDPSCMNCDEQIAFWVNLYNALIMHAYLAYGVPENDIKLFALMQKACYTIGGQPVSAAEIEFVILKMKTPVHRPQLSLMLALHKFKTSENLRRYSIDGTEPRVLFALCCGMFSSPAVRIFSAENVRAELQESMRDYIRASVGINDKGELVVPKLLQSYAKGIVEDSLLADWICRHLTLDQVAAIQDTSSSSSHKQRLLGVRSFSVIPFDSRFRYLFLSNNTRCQN

SEQ ID NO: 55747 - protein, 418 aa, Zea Mays
MSSPAPYAPDTQLCHENGVMHRDLKPENFLFVNKSEESPLKAIDFGLSVFFKPGDRFAEVVGSGCYMAPEVLKRSYGPEIDVWSAGVILHLLLCGFPPFWGDSDEKIAQSILRGVINLQKDPWPKVSQSAKDLVRKMLDPDPCTRLTAKQVLEHPWLKNADKASNASLGEVVRSRLKQLSSMNKFKKKALGVVAMNLPTEEVDQYNQMFRTMDKDNDGNLSLEDLKEGFRINGHPVPEEEIKMLLQAGDIHGSGTLDCEEFVTVLLHIKKLSNDEYLPKAFKFFDKDKNGFIEMAELMEALGDGELKPNEQVVNDIIREVDKDKDGRISYPEFELMMKGGSDWRNASRRIKDWWEATSSPLPKNQKRDFNGLMIYTLWNIWKERNRRIFENSALTPIQLALKIKEDVCTFKRAMFLQY

SEQ ID NO: 55748 - protein, 81 aa, Zea Mays
MTAVSLASDFMYNHMSRDVTSSFGYDYLLRQCRLRGKIDSNGVVAAYLEERLNMGVNFLLSAEIDHCKKNYKFGFGMTVGE

SEQ ID NO: 55749 - protein, 404 aa, Zea Mays
MTILLMAMSLLACSLHSLHSRPKLVAGSPEGFPGHVDGKLREARMNHPKGFTVDDRGNIYVADAMNMAIRKISDTGVTTIAGGKSGRGGHVDGPSDEAKFSTDFEVRYIGSSCSLLVIDRGNQAIREIQLHFDDCVYQYEAGFPLGVALLLAAAFFGYMLALLQRRVLGMYSNGDDHESPVKAKLTSIPPPYQKPLKPYVHPLLIPNDDEPVKQEEEEGLFTSIGKLVGGAKSSIAEIIGAAFSRKKRVNVHHHQLGRPTSWPAQESYAIPRDETPPPLDTRAPTPRKNYAFMSKEPEKIHHIRHGRPQLHGWTGEAAPQQQQPQQVRHQQYVQHHRQYSAGPQTYYEPSCDATKEIVFGAVQEGDTSRRPVEIKAVNHGDAAPYEQNGLRFRSSYSVRYNGNN

SEQ ID NO: 55750 - protein, 742 aa, Zea Mays
MAAPPRRSLLVLLSGLLVFASLVALTTAIYEDQVGLADWHQKYIGKVKQAVYHSQKSGRRRVVVLTEENVISSLDLRSGDIFWRHVIDKNDPLDQLGLSLGKYVLTLSSGGTILRAWNLPDGLMIWETNLRTSTASNSQLHVMSNNKAARDNLVLVSAGRWIYAVSSIDGAISWEKEFSLDDLEIKRILQSPENDVVYALGLAGSSKLALYHLSAKTGEILKDIQESFPGGLCGKTVLGSDNVFVALDKARSSLLLIEFKGERISYNKVLVSDLVQDLSGSFELQSLSSDIISLQTSSSISLLKLKGTDGLEVLQRFDQPAAVSDSLPITEKEKAFAVVQHLGSEIEFIVKFTSDLSSEIIREKVNIDQNKGNVERVFLNSYIRTDKSHGFRALVVMEDHSLLLIQQGEVVWSRDDGLASIVDVTTSELPVEKDGVSVAGVEHNLFEWLKGHMLKLKGTLMLANADEVAAIQALRLKSSEKNKMTRDHNGFRKLLVVLTKAGKVMTLHTGDGRVIWSKLLPSLRASRFGGVPSALRIYQWQVPHHSVMRENPSVLVVGRTGAESSAPGVFSILDSYSGEELNSMKLDHSVFQIIPLTLKDSSEQRLYLILDSNSNAHLYPKSADTLNIFLHEMSNLYFYSVDIQANVIKGYSLQKSCDLNFGDDYCFSTKELWSIIFPSDSERIVISETRNMNEVVHTQAKTIGDHDVMYNHWTHTSSCNSSWCTRPCTCSLERELGCLSLF

SEQ ID NO: 55751 - protein, 556 aa, Zea Mays
MQRSRRALLRRTAAAQEQSAVAEAAANGRRRRLYGFSASLVVASWVAVLLLHSLVGHGDGQRDGGGSTVDLTVVEPTVNVGPINPVVQEEHGGDLEMPGDSCVNSDENAVLSEDTLVQADQLCSSDEVQNENTEAVTIDSQVELSGDQGGYLPQSGVDSGVQPGEKVESKDLPRPPRLSRVAPPDLDEFKTRAIAERGPGISSQPGNIIHRREPSGKLYNYAAASKGAKVLDFNKEAKGASNILDKDKDKYLRNPCSAEGKFVIIELSEETLVDTIAIANFEHYSSNPKEFELLSSLTYPTENWETLGRFTAANAKLAQNFTFLEPKWARYLKLNLVSHYGSEFYCTLSVLEVYGMDAVEKMLENLIPVENKKTEPDDKTKEPIEKIYLKDPAGGKEFSQETLDEDEFELEDDKPNGDSLKNGANDPVSEARTLQAGRIPGDTVLKVLMQKVQSLDVSFSVLERYLVELNSRYGQIFKDFDADIDSKDVLLEKIQSELKNLESSKDNIMNEVDGFLSWKLVASSQLNQLVLDNALLRLTWRTGVLLLYFSVLFSLA

SEQ ID NO: 55752 - protein, 541 aa, Zea Mays
MLICRTDKIVFKLFDKVPSDLPPVLRSQILGWLSSSPTDIESHIRPGCIILTIYLRLVESAWQELSENMSLHLDKLLSSSTDNFWASGLVFVMVRRRLAFMLNGQIMLDRPLAPSSHHYCKILCVKPVAAPYSATINFRVEGSNLLSTSSRLICSFEGRCIFQEDTDSVAENDEYEDRAIECLSFCCSVPGPRGRGFIEVEDSGFSNGFFPFIIAEKDICFEVSELESIFESSSIEHADANDNAREQALEFLNELGWLLHRANRMSKENVTDTSVATFSMWRFRNLGVFAMEREWCAVIKMLLDFLFIGLVDVGSRSPEEVVLSENLLHAAVRRKSVNMVRFLLRYRPNKNSKGTAQTYLFRPDALGPSMITPLHIAAATSDAEDVLDVLTDDPGLIGISAWSNARDGTGFTPEDYARQRGNDAYLNLVQKKIDKHLGKGRVVLGVPSSICSVITDGVKPGDVSLEICMPMSASVPGCLLCSRKARVYPNSTSRTFLYRPAMLTVMGVAVVCVCVGILLHTFPRVYAAPTFRWELLERGPM

SEQ ID NO: 55753 - protein, 237 aa, Zea Mays
MQANNVEIEYADMSKALVAITPDAASIPTPKLKNVNRLRTEHQVYELPDSHPLLEGFEQREPDDPCPYLLSIWTPGETAQSIDAPKTFCDSGETGRLCGSSTCFSCNNIREMQAQKVRGTLLIPCRTAMRGSFPLNGTYFQVNEVFADHCSSQNPIDVPRSWIWDLPRRTVYFGTSVPTIFRGLTTEEIQRCFWRGFVCVRGFDRTVRAPRPLYARLHFPVSKVVRGKKPGAARAEE

SEQ ID NO: 55754 - protein, 203 aa, Zea Mays
MGQGHVDEFLAANRRAEVIDWLGGLLPEFDLPLDSSDEELREYLIDGTGLCYIAEKLMPGIQEEMWGGNASDQRSNVKKFLYFVAEMGLPGFSVKDLEEVRFQMTDSSLETSTGAASIGLCVVYYVKVCKYAYKLVHAQSGSSTRHECKRMDYIAHGQTTNTATLQKMGKMEKTIGEKEVGGLIGHSTSDTSRRVEQESVGNA

SEQ ID NO: 55755 - protein, 121 aa, Zea Mays
MDKISRSLKYWSKGEVQTTFLCHEGFLGTLGAFWSYENMGIDSLAAHEVIREVLLGAPYTGQFPSLPVTQQQENGEHGTLEGEVESLRHDNALLKAEVERLQKENALLRAKLVRSGETSTL

SEQ ID NO: 55756 - protein, 956 aa, Zea Mays
MPSSEEAILRGEYAVIRSLVRVLEGGVEGKRQVDKVIDKCDSMQNLREAIATYRNNILRQPDEMKREASLSFFVEYLERYYFLICFAVYVHSVSSAHQTTLSVEVSFSDWMRARPELYSILRRLLRRDPMGALGYSSSKPPLTKIVESANGRPQDMDVVAAMRNGEVLGRLTVLKSDHCPGSHSLNLPERVEGAPNFREIPGFPVYGVANPTVDGIRAVIQCISTSKGGRPVLWHNMREEPVIYINGKPYVLREVERPCKNMLEYTGIDRDRVERMEARLKEDILREAERYGGAIMVIHETDDGEIFDTWENVDNEAVLTPLEVYKNLVSEGLPIKYARVPITDGKAPKSSDFDTIAFNVTAASKGTAFVFNCQMGRGRTTTGTVIACLLKLRIDHGRPIRIPVCQYDHEDDAIYSTGGDATDHNGHLNSESWKPRTLTKLNSGFGINDILLLRKITRLFDNGIECRQTLDTVIDRCSALQNIRQAVLNYTRVINQQHVEPRVRRVALNRGAEYLERYLKLIAFSAYLGSEAFDGFCGQGQTKISFKGWLQQRPEIQTMKWSIRLRPGRFFTVPHEQKATYPPPQGDVTMETIVKARSGSVLGKGSILKMYFFPGQKRSSSVNFRGAPHVIKVDGYPVYSMATPTIDGASDVLSYLGSKDTTGRNIAQKVVVTDLREEVVVYIKGSPFVLRELDQPVDTLKHVGISGPMVENIETRLKEDILSEVKQLGGRLLLHQEEFNAATNQCSVVGYWEHIDLEDVMTPAEVYSTLRDKGYCIEYKRIPLTREREALAADVDAIQSSIDESARYYLFISHTGYGGVAYAMAITCLGLSADAKFVMEETAETHFVSTSLAKNVSIKTKTDIALKQGDYRDILNLTRVLVHGPKSKEEVDTVIDRCSGAGHLREDIMHYRKALQDCSHDDDDDCDEEHSYLTDMGTKALRFHACRWRDVWMPAS

SEQ ID NO: 55757 - protein, 506 aa, Zea Mays
MGSANHGCRFFGGLTSQHPRSDAKSSLDEGIIEALFGTAAANRKPKPSDKESGESSASLGRSNTPEQIFLLEPRKSHNISIILKSLTVGRDEIIDALRDGQTELGTDVLEKLSRLHISKEEESTILRFSGDPDRLAPTEAFLLRLLLDVPNPIARVNALLFKVNYGAEVAQLKHSLRTLELASQELRTKGLFFKLLEAVLKAGNRMNAGTARGNAQAFNLTALRKLSDVKSTDGSTTLLHFVVEEVVRSEGKRLAINRNYSIRRSGSLARSGHEGGSSAAGFASQGPSREERQSEYMNLGLPIVGGLSTEFANVKRAALVDYDAVVSECAILDGRLNEIKRLLETCSDDGFARGLRGFVRAAEQELKALRGEQERVLELVQKTTEYYHAGATKERNAHPLQLFIVVRDFLGMVDQACVDIKRKVQQKKPAPSSSQPNTAAAPTVAAVAAAAATTAATASATDGQTAPAQKPPEADSKRKRVMPRFPNLPAHFMKDSADSDSSSDEE

SEQ ID NO: 55758 - protein, 438 aa, Zea Mays
MTGKKAPVPPPPPPQAPKPPGVVPPPPPPSSKISNAPAPPPLLGRGRGNTTGPTKGRGIGLAQQSNPPKKASLKPLHWVKVTRAMQGSLWADAQKQGNQARSPDIDLSELESLFSTAVVTSTSEKGATRRGSAINKPEIVHLVDMRRANNCEIMLTKIKMPLPDMINAILALDTSVLDNDQVENLIKFCPTKEEIEMLKGYNGNKEMLGKCEQFFLELMKVPRVEAKLRVFAFRITFSTQVDELRTNLTTINDATKEVKESLKLRQIMKTILTLGNALNQGTARGSAVGFRLDSLLKLSDTRSRNNKMTLMHYLCKLLAEKMPELLDFDKDLIYLEAASKIQLKLLAEEMQAINKGLEKVEQELAASESDGAISVGFRKALKSFLDAAEAEVRSLISLYAEVGRNADSLAQYFGEDPARCPFEQGCNSMAESISHSWR

SEQ ID NO: 55759 - protein, 343 aa, Zea Mays
MSSPSAISTELLQAAASELLQRRRGFRPCRPAEERRFAASHSMKGREEKRWEYLVGARCRRRGQRKPQHPGLGRRRRQLWSESEESKRAGMQRTEGERGNAGGAVVCGLQPREDCQTQMRLRRDLFCAGLQFDGGFGQPRFRFTVREKRGDAKSALKNLLLNGGTCQESSNKQMRKQKGGTGSKAQRSAPGKNPCGKNKRGHYWKSFDDDDECAHTPYGTYGGKKSFTWYWPGEDDGLGSNPSGFQWREESQSAKSKEKFWNESDVDEDEGSSRDDLRSYRISLGLPVLGPLKLDHIKAAFRASALKWHPDKHQGPSQAEAEEKFRRCVEAYNALTRAFRSSG

SEQ ID NO: 55760 - protein, 126 aa, Zea Mays
MQGEVPQPQICGPSDDSSAKVDHHESPSDEDEDDDDEDFDNYESDMMVDEETIHSEKPDTAEGSSEINDINNITLDLKGSRVKFKGLQQVFGPIERRHLNALERQLSRYVKVVGKELSDRMVYCLS

SEQ ID NO: 55761 - protein, 869 aa, Zea Mays
MSAPEFRTSYQQVSSSQPPENVGQLKVCRCGSGDSNFQITNKSDAGENSPTTCPSCQVLKSGNLLLSSKGIGWTVWKKRWFILTRTSLVFFRSDPSVPPPRGSEPIVTLGGIDLNNSASMIVKEERKVITVIFPDGRDGRTFTLKAETIEDLNEWRSALENALAQAPSVANTAGQHLAVSTDITEPVEAAVEQLEDKSVIGRPAEFALVDADGTTAFLEKALKFIEDYGVKVEGILRQSADVEEVKRRVQDYEKGKNEFSPEEDAHVIGDCIKCILREMPSSPIPAPCCTALVRAYRTDKTRRLDAMNRVIYEVFPEPNRQLLQRILKMMQIVGSHKAENRMSPSALAACMAPLLLRPLLLGECEIDSEFNMAGDGSFQLLQAAAAANHAQAIVIIMLEEYDQIFDDIEDGSYSSDAYTESDIDKEYSTDNDIPEDDGSYGCGEDVEEDLNDDTEHSSGIRIDNADDKVNNNKSSTTCDDNDKVVQPPAARAMRIEHGVPMDDSNQISSLSKVDDTSKMQSNSSFTDHIQKPNADSSYLSAKFTEKTGGSTYESKRNSWGRTSARKGLSTEEAGCCSDNDEAHIAKLENKKTHLQSKLTEEVKENTVLQANLERRKAALHERRVALEKEVENLRDQLQKERNLRASLESGLMNMRRGQVSFPSTIDTKTKADLEEVAAAEADIMNLKQKVSDLRGQLNYQVQLSSTSLCESCNKRAINADKLVEGEQNAGLSPQIGSSVEAPPIQGSNSVVPDMLWATNQMVQKMLYSKGEIAKDGQDGSLTSKWNFAQRPHSNSPVMSRVQGSNAYSSTKNEESGAAPSSALAKLTTRLNFLKERRALLASEMQNLDLGRSQAQRHTAPPKTETPTDK

SEQ ID NO: 55762 - protein, 153 aa, Zea Mays
MEEKCASAAICFVSFLPDILDSKAEGRNKYLELLLSVAEKFKKSPYSFVWTAAGKQANLENQVGVGGYGYPAMVALNVKKGAYAPLRSAFQRDEIIEFVKEAGRGGKGNLPLNDAPTVVASEPWDGKDGEVIEEDEFSLDELMGDSSSANDEL

SEQ ID NO: 55763 - protein, 181 aa, Zea Mays
MQYADLIQPIEKRMQNAMDYIKFIKPDLDVRVEPIVDPFGPSIVDQGLEAIIVSKETLPGGHAVNRKRAERGLTQLQIEVIELVPEESTGDKISSTAFRKMEAERALQQQNKQDDTAVGTPAINWRCARNSWEILDDDLTSIAKDSSSVLFVAALRHPRKDSAALALKPGRAKALRRQLRM

SEQ ID NO: 55764 - protein, 652 aa, Zea Mays
MQPGGAASSTATGGRRRVSVQSTRSAGATPASSVWEARMKMDEVRGGVKVFSAGAADEPADEEGVRVYRRLRRNQSEGGGAGAADTAAKKRRSWKASKPVTAIGDLRKSRSDAAAAVTTATTTATAVVARRAVARVSMPEKKVAPAPAAAAGEVKEVVVVEVHKAAAADAKNVARGPDEELDDDDDDHDDGAEGELLDEEQETDEEEEKEMLDLQDHMAIDDDEQTAPHQVDDDDEQDLEPPTKGIKPTLSVEEERATNPEPVKPPPPGKKLASVVDLRAVNPEPMTPAPPPVEKKATPIVVHRMTNFELAQSFPEKKALPAVGPRIPKTEPASSPPGGEEYEEIQGRPSQPSRSQARMQNIVNLVMWTDVSKSALVFGLGTFLLVSSSYAKDLNFNTITAASYAGLIYLGLRFLRKSILSRGESVECDDDGGVGGDRCCYLVGEEDAVWLLRLVLPYVNEVLLNLRSLFSGEPATTMKLALILFAMARCGNFVTLWTLAKLVFFGVFIIPKVCSSYSTQLARYGRFWLERLRDAWESCTHKKAVVAAAFTLVWNVSSTASRVWAVFMLAVAVKCYHQRVGEFGWSSSSAGAQEQPADDDDEPPPPPPKHRAQDESSSPRQEFGAPPRHRRAPVSGEFARERLRARGGIQPR

SEQ ID NO: 55765 - protein, 408 aa, Zea Mays
MQTYLYSVLNSRVSRPSPLLRNPFPSSAEASPPAAETLASAAAVMASSNVSTVYISVIDDVISKVREDFITYGVGDAVLNELQALWEMKMLHCGAISGNIDRTKAAAASVGGTTGTTPPVHDLNVPYEATSEEYATPTADMLFPPTPLQTPIQTPLPGTDTAMYNIPTGPSDYAPSPISDVRNGMAINGADPTAGHPSPYMFLQPPPSPWMNQRPLGVDVNVAYVEGREDPDRGVQPQPLTQDFLMMSSGKRKRDEYPGQLPSGSFVPQQDGSADQIVEFVVSKENANQLWSSIGNKLETPTKTITPVIPQRDGIQDNYNDQFFFPGVPTEDYNTPGESAEYRAPTPAVGTPKQRNDAGDDDNDDDDDEPPLNEDDDEELDDLEQGEDEPNTQHLVLAQFDKSTLSYI

SEQ ID NO: 55766 - protein, 428 aa, Zea Mays
MADHDLTALMAAQLDRHLVFPLLEFLQERQLYSRPEILEAKIRLLSGTNMVDYAMDIHKSLHGTDDVPEDMVKRRSEVVSRLRSLDEAAAPLVAFLQNPQLVQELRPDKQYNIHMLQERYQIGPDQIEALYQYAKFQFECGNYSWAAEYLYQYRALCTDTERSVSALWGKLAAEILMQNWDVALEEFNRLKEIIDSKLQNRIWLMHWALFIFFNHENGRNGIIDLFFQDRYLNAIQTNAHHLLRYLATAVVVNKRRRNMLKELIKVIQQEQHSYKDPITEFLQCLYVNYDFDGAQQKLVECEQVILNDPFLGKRVEEGNFVTVPLRAEFLENARLFIFETYCRIHRCIDISMLAQRLNMSYDEAELWIMNLVRSSKLDARIDSVSGTLIMTTNHINVHEQIIESMKGLNMRTYMLAKNIVEPAQQAAR

SEQ ID NO: 55767 - protein, 792 aa, Zea Mays
MVSVSAAGLAQIMQFLETQGFLDYLERCNTAEENAHNLLDKLQDATGRGQNPLTIFPSQVSDPEIITIANPEIEGLDNRHCYKRFPANARTEEQEEKRKSILALASGASKQVPSSPSIRVNGGPKAESLSPRERAAERERMVLDIKVKLQGLWLRLLRLGATEDPLSSFEYGTILALIESDAEGIGGSGFVECIREHIHSGWQCRLTDEQFIAVKELLKMAITLANSRNDLATIRDALEVSAEMYRKDPNNVQDYVQRHLLSLSVWEELRFWDGYFEYLMENCSNKSANYVTLVTAQLILMATHMAGLGLPDIDSWNMIEKIAERNNLGYKQLIKLRALLTHLQQLRIGYWGVATGKSQPLQSYGMASPHAIDVIDESQQPAEASGLGRSWVQSMFSRDRSLRASSFNRASDGNAVAATGKTEISAAQKKTQTNMRTLRGHTGAITALHCVTRKEVWDLVGDREDAGFFISGSTDCTVKIWDPSLRGSELRATLKGHTRAIRTISSDRGKIVSGADDQSVIVWDKQTFKLLEELKGHEAPVSSVRMLSGERVLIASHDGTVKMWDVRTDTCVVTVGRCQSAVLCMEYDDSTGILAAAGRDITAHVWDIRSSKQMFKLQGHTKWIRSMRMTGETIITGSDDWTARVWSLNRGTCDAVLACHAGPVLCVEYSPSDKGIITGSADGLIRFWENEGGIKCVKNLTLHTASVLSISASDHWLAIGAADNSMSLFHRPQERFGGFSNAGSKVAGWQLYRTPQKTAAVVRCIASDLDRKRICSGGRNGLLRLWDATTSI

SEQ ID NO: 55768 - protein, 1003 aa, Zea Mays
MINEVPEVHVDSRMDPSYESAEEPEYKKAVDWTMHRNGPDLLFPGRKGTELNSVENHTQKSLDTSSLPTEDVDHRSGAGSNINLNNMAPEPASLGILSNDTEPEKVWHYKDPNGNVQGPFTLLQLSKWASFFPRDLRVWLTFESEENSLLLTEVLPKQQKDFIQLSTVTTSDKSMWAGSGQDRVNSNANNSSSPMGYNMVYPSALSSPSAECYDPTKDLKPLGGTSPSRSLKDAHALHEVQNQVNYSFTILSSTGSYAPPGSHDGRVSRDRVDEWNSSQDNGGIWRPTMNSSQKTNAQQHPDGCTGKDLMQTESKCSSHLVSVLTSQHSERDPATSLSTTSWPVFRTRCQQEGSSWTSATNAGAHDLQLSIALAKPETCSPTNPVEDRDSSSASALSCQSGAPVCVPQPDPTSTSNSRKIDATMDQHRTCQPDTSSVSFDLLHEPKSGSLFSLKTQDLEFEYPSPIPKQEGKGISVNQSGSTSVAHENLATKTCVRAPTSKIDSLQPLKERSHSTDRDSITQLEHLFEENVIKRNNKVVNPVSDAEGIAVSDVLESLTEQDCEKCSIHGVAPSQKMVPASAEEDQPQCSSPIALSPWGEPSYYQGEAVDSALWGVQDDPGNDMWSMPSPKPGFQPSSGLGADGKDASCIIEEARADPGDGAFVKTLPTQGEKKMEHGNSSASGSGVSERVKPKGSAASGPSLDGSTKVMGWQLPGSSLEGSAKVSGWKPPVLSLEGIANGSGSQASCPSTQRGTKSSGWQRSSSSPDGSRKASGWQQSSTSPEGSGKAHGWQRSGSFTQGGTKAAGRQPSRSCTDRIAKVDGWQRTSSSPEGSRKASGWHSSGRDSSKIASSASENRKLSSSHQATTPTGRHSLAKRQGSSDKGAAGWDEALGNSSEASKRQQGNSDKNAGSGVALGSNRSWHPSSGNPSRGGQGNHQHDRDSHSGDSRRGSSNYPRRSDNRHDHGSGGSSRPSSRGQSQRGLCKHYESGHCGKGSKCQYLHR

SEQ ID NO: 55769 - protein, 290 aa, Zea Mays
MSAPLDRLARPCFEGFVHNDERKESRSDADNSEGDKKTKIGSFKKKAINAGNKFRHSLRRRSKKKTERGDSIKDIRDIKELQDVETFRQCLIDEDLLPPQHDDYHMMLRFLKARKFDVEKAKNMWSDMLKWRKEFGVDKIEEFEYAELDEVKKYYPQFYHGVDKEGRPVYIELIGKVDANKLVQVTTLDRYVKYHVKEFERCFQMRFPACSIAAKKHIDSSTSIFDVQGVGFKNFSKSARELITRLQKIDNDNYPETLCQMYIINAGQGFKMLWSTIKSFLDPKTASKIH

SEQ ID NO: 55770 - protein, 316 aa, Zea Mays
MEISRVLGGGIVPGSLILVGGDPGVGKSSLMLQLASNILEGFKAKESSPVVYVSGEESIEQIGNRADRMSITSSNLYLYSGTDIEDILDKIQPLSPRALIIDSIQTVYVRSFAGSAGNLSQVKECTSALLRFAKLTNIPVFLIGHVTKTGDIAGPRLLEHIVDVVLYMEGERCSSHRLLRSVKNRFGSADELGVFEMAEFGLQAVLNPSQMFLTEHDSDSEIMAGLAVAVILDGSRTFALEVQALCVSGYHRSGQVVGIPQSRADVIISVLIKQAGLKLQDNIVFLNVVSGFKLTETAGDLAIAASICSRNLLFFL

SEQ ID NO: 55771 - protein, 214 aa, Zea Mays
MRYQMYPAPTNAVCSIGAADASDELFGDLVPCPFQQPDENTQSILKMSQGQEMETRSSEHPKVADLEPLPDSELSCILEFDGACKGNPGKSGAGVIIRRLDGSVIAVLREGLGIMTNNAAEYRALILGLNYASKKGFKYIRCQGDSKLVCNQVQGAWRARSDNMSILCDIAKELKETFLTFQINHVLREFNSDADVQANFGCQLAVDEVQELSV

SEQ ID NO: 55772 - protein, 806 aa, Zea Mays
MAAGGRVSIPAGARRTIADIKEIAGGHTDEEVYAMLRECNMDPNETVQRLLLEDTFHEVKRKRDKKKEVSKEPSDSRWRPAVQGQGGKNCRNCASRSLSSSNDSAGRSAISGKENGISLIMGKGSGSTPITNMNMDVKASTFMPSNSLLSGLCNGPYQSVDPAAVLVSSSSAVGDKSGSTALADLTGGLPFKDVVATIDPNSLQPLKPAPPSDPVVVSFLNSHSLGDVGASRQTIGIKKTSVEHKVGRDVSTDKGSSEQSVQSSFRRSSASRPSSSYNSHSEQSQKVIPSKEWKPKLTCLAASQATEDATVHDNVPLAAADTITQSAPVPNSAGTEDSLKVDICLNDLQLSDKQHVIIPDHLQVSESEKYVLSFGSFDVSFQQTKGSSDPDYVKSSLPKFSSSHELDGNIDELQSMQRDQNSTSVVQEEAGHVPQPSAKLEKCAPSAMEISSIALMESKDCDDDSATSGDPQSTGTHSAPSYVTYGFAPQSHVNQIEKSESHSQSYHPTTDADERLSPSLATQAAHKYGNIPVVPTQTGQDQEGNDSPVIISSVSASVATPAAGVLSASVAIPQQSVPVFRQPLGVHIPHLPMNYVPYNQYISPFFIPPPTLHPFMGNATFSQPPSTGVMYPTPGTARVLPPVKFPVPSFKPGANIGSQASIGVPGCYGTYGSSPSVYTNNAPVSSGNLAENDNVTSSQFKENNIYFAGLQTDGLTLWVPTPGRDISALQVNSFYGLPPPGHQVTYAPQAGHGPYGGIYHPAHSVAGATVTPLLQPSHTMAGAVEIVGAPGGVYQHPQAHMNWGSY

SEQ ID NO: 55773 - protein, 169 aa, Zea Mays
MIARYGVMLEKGAFDKRTADFLWMMIFGAISLLVLSVIPQLNTYVLGLPMVSMLVYVWSRENPNAQINIYGILQLKAFYLPWVMLLLDVIFGSPLMPGLLGIMVGHLYYYFAVLHPLATGKNYLKTPKWVHKIVARFRIGMQANAPVRAPANGNAGTGAFRGRSYRLNQ

SEQ ID NO: 55774 - protein, 181 aa, Zea Mays
MFFPPISVHQERSSGRSRGFGYVTFASADDAKNVLDCEHVLGSRTLEVKIATPKEEMKSQGTKKATRIFVARIPQSVDESMFRRHFEAFGEILDLYMPKEHGSKGHRGIYHFVSCCDFGFVVIHIIDKMKAVLVVTVWKCCMCNKKVSFAKKVITPSDEVPARLYTLALFQYTVTSTSLFL

SEQ ID NO: 55775 - protein, 750 aa, Zea Mays
MSRGERTFIRISKKGTVGQLHKMACKVFDLAPDEVCIWDYYGRTKHSLMDSLDKTLDDANIQMDQNILVEVTTDASGSLDGLVKRNNFFESDAPKSGLPDENFAANNYASRSYSSSLTPSIYLRSPNGDLDNVHGSSGMITRGSPLGLTGLLNLGNTCYMNSAIQCLVHTPQFTKYFCEDYHREINRQNPLGNVGELALAFGELLRKLWAPGGRAPVSPRPFKMKLSRFASQFSGYNQHDSQELLAFLLDGLHEDLNRVKHRPYINSGDADGRSDEEVADEYWANHIARNNSIIVDVCQGQYKSTLVCPVCGKVSVTFDPFMYLSLPLQFASTRSVTAVVFSCDGSVPPTPFTVNVPKQGRCRDLLQALGAACSLKNGEKLLIAEIRNHKIYRFIDDPVLQLSTISDDDHLAVYKLPKLEKRVNYIQFVHRHEDLDHGNNNSLTSWKPYGVPLLAQISRNEIVTGFDIHELVHKMLVPVLRNPDSLHLAVQSSVSTRTHSYHTDSSKCQLLLVDDSNTVIEKSNDAIRIPQSSLATVFFINWPKADLKKIDTHHLEYLPEVFMYAPPAKRTRGEALSLYACLDAFLREEPLVPEDMWYCPRCKEQRQASKKLDLWRLPEVLVIHLKRFSFSRSTKQKLETFVNFPIHDLDLTNYIANKKTSERQIYELYAVSNHYGNMASGHYTAHIKLVDENRWYNFDDSHVASIDEDEVKTAAAYVLFYRRVREQDIARGTSNGSQLYAKRSHGYSHR

SEQ ID NO: 55776 - protein, 506 aa, Zea Mays
MASPASVTNLGSNGRSGPLPAAAARRAQLVTRIRFTGFDGIRRWQYEPGRLCRCMVVTNLIEEKVVQFSSRGSVSVKADDDNDLLLKPPQKPVRSNGPPESMKTASLPDQKPAGATLDDREKVRESLDAVLEKAEKLEASSFGNADGGNLGSRQSNVSMSNGPGPTAVEEGGNSRKTKTLKSVWRKGNPVPTVRKVIREQPRTETRSQSIPVAKPSVSSASKPSPLLLSKPSVAQPPRRPIKSDTSNEKKGPILIDKFASKRAAVDPIVPEELLDPLKPVRGPPAKVRVDRRKKPDTQAGSRRRMSNDDGLVDEDTTDVPISGVPVRKGRRWSKAKRRAARLEAMQAEEPVRVEILEVGEEGMLIEDLAYELAIGESEILRFLSVRGVMLDNVQTLDKDLVKMVCMEYDVEVLESGPVKVEEMAKKKEFLDDEDLDKLEVRPPIVTIMGHVDHGKTTLLDYIRKSKLVASEAGGITQGIGAYQVLLPVDGNHQACVFLDTPGHEIS

SEQ ID NO: 55777 - protein, 203 aa, Zea Mays
MKTHSADNYHVCQYPECGRRFTQESKLRAHIRAQHEKNPGASSMNHSAIGGPHQPPRPAKVSAAPPAPSAERPYVCPYDGCDKAYIHEYKLNLHLKKEHPNHYQDGGPNGAAAPSKRSISKSSHRSKLDITSRMPPANIPKHRGYATPLPAVVSLPEEQQLLRKVVYEDDSEETEEEGDNNGEDRWNYKRAASSDDEETEDEE

SEQ ID NO: 55778 - protein, 480 aa, Zea Mays
MSKDTFINLDVSHHRAVAVVRLLRIEKGKAFVDLLNEKANDSGDKEIGYVQRTLGFSTRYLEDRDIRLVTVIVAGTVRWKRYLDYLIMSLCSEEKVFREMEPLLLQILRIGFFEILKLDVPAYAAVDENVRLAKVALRPGAGNMVNAILRKLVLLKETDSLPLPKIEGDDRAQARALSIIYSHPVWMVRRWIRFHGKDEALRLMNWNNSDPHFSLRVNTSKGYTRADLVKRLESLQVHYEESIMDEFVRIREGMQQVLKAGLLKDGICAVQDESAGLVVSVVDPQPGETIVDCCAAPGGKTLFMASRLSGEGKIWALDINKGRLRILMDAAKLHGLDDMITDIHADLRLYAKETTVKYDKVLLDAPCSGLGVLSKRADLRWNRQFENLEELMCLQDELLDSASMLVKPGGILIYSTCSIDPEENEERITAFVQRHPEFALQSVCGYVPREFITDEGFYSSNPTKHSMDGAFAARLVRSTH

SEQ ID NO: 55779 - protein, 980 aa, Zea Mays
MAPGSLKIPCPKPKSAAPKIFPPSLGFRPIAGNRLKRPKGRQLASFRLTPPIVHTALRLLPGADSFPLLLDAAAASSGIMASVGSRRLTVLREFRPHGLAVEEADGQGVPGAPPPQDYDYFLFDPALAISPTPDPSDEASSSGADGDHELFIRDNQIIWSNGSRVHKRYVSPNTVIMACWCRMNAISDALLCVLQVDTLSLYNVTGEIVCIPLPYAVSSIWPLPFGLLLQKSTDGGHMVSSSSSLLNARDLNRPSKEYGLTYNIPFQANILETDNKANGAIISSHLILKHPFEEPQATYVEEKDKLTMMRDFDEKTIWTSDVIPLIASYHKGKFQHSVWQIDGASYQEAMNENTMLPVDISSHKCAFRKIWQGKCSHSAASKVFLATDIDGMPIISFLLHEQKILLAVRIQVDDATEEAFGDIKPHMSWNIPAFAAAPVVVTRPRVRVGVLPFTDILVLSSDNDLLLYSGKQCLCRYTLPNELGKGFFSNHELNSDISDTYSDLKITSIADAVEGRINVTCSNGLMLRCSLRKNPSSSLVSDCITAMAEGLQSCFYNQFISLFWGSDAAYLYSSSQVDSEWEFFSHEIKRVCTKYGQTLSTKSLTFPSKAWDFLINSKYHSQYCKRALSSSNSFLPVSYNTGKTVFNSFLQDEHSSDVSYNIRFMRETLETLHALYENLKLNILRKEDLGCLASLLCTVASSLGEHSYVDYYCRDFPLNLTESPSLVSSNSLTTPPSLFRWFEYCLRHGLNSAKLEDIPTLMRKQKVSAVSWSRKVLSFYSLLLGAERKGKNLSSGVYCEVASGSARNTEELTVLAMVAEKFGHRQLDLLPVGVSLVLRHALDKCRDSPPDDWPATAYVLVGREDLATAKMGTVRKENLLWNNDNLTSMSVPYMLHLQPVIIPTTAPDIPASEVLNSDDSDSVYKSVEDGMEHIFTSTTQLRFGHDLRLNEVRRLLCSARPVPIQTPTNPSVSDQDLHQV

SEQ ID NO: 55780 - protein, 615 aa, Zea Mays
MGNSLACFCCAGGAAGHVAPAALPSDPAYDEGLGHSFCYVRPDKVPVPFSADDDLVADAKAAEDATTFRAISGAALSANVSTPLSTSLLLLLPDESAASSSGFESSESFAAVPLQPVPRFPSGPICAPAGAGAGFLSGPIERGFLSGPLDAALMSSGPLPGAATSGRMGGAVPSLRRSLSHGGRRLRDLTRAILARTEKLQGSMDLGLGLGLGSPDGAGLQLQWAQGKAGEDRVHVVVSEERGWVFVGIYDGFNGPDATDFLVSHLYAAVHRELRGLLWDQRDAHPDQPTTTSTTASDHQDRRRRRARRSRPPRGADDDQRRWKCEWERDCSSALKPPTQRPPRGSSQNDHLAVLKALARALRKTEEAYLDVADKMVGEFPELALMGSCVLAMLMKGEDMYLMNVGDSRAVLGTMDSVDVEQVTSDGLVGDGTPLLSAVQLTSEHSTSVRQEVCRIRNEHPDDPSAISKDRVKGSLKVTRAFGAGFLKQPKWNEALLEMFRIDYVGSSPYVTCSPSLCHRRLSTRDRFLILSSDGLYQYFTSEEAVAQVEMFIATTPDGDPAQHLVEEVLFKAANKAGMDFHELIEIPHGDRRRYHDDVSVIVISLEGRIWRSCV

SEQ ID NO: 55781 - protein, 313 aa, Zea Mays
MASKQAAAGEALAAQINGMSRPEMYDMMSKMKTMIDHDQETVRRMLVDNPDVTRALFRAQVVLGMVKTPKTTQALDMVQPTAVPTAPSSVKTTAPDHVSLPPPPLPANQQSVAQLSAPFSSGLSNVGSTMDPPTISANPPQSAQAKGYLIHQMPSSAPQPSQHPNMALPHAPPQYSNVPSHIPIVHSQPQQPLQSPAIYNQQLQPPLPQLSRPPFPHQMHSQVPNSFGLTHANAPQHMLQQPMFHPVANPQTNFLPGQPPLPSQPPPQQLYQLTPEMEKMLVQQVLGMSAEQINMLPPEQRQQVLQLRDMLRQ

SEQ ID NO: 55782 - protein, 120 aa, Zea Mays
MLLRQSSDLQGQEIVNTNFGGDTGDAFEAHEWRYVRTFNGIRIFEDISITNPKVGKVILLKSVGVVSANPDTVFEVVLDLDKHKRYEWDMLTADLELVERIDGYYDVVYGTYEPKYLNWW

SEQ ID NO: 55783 - protein, 568 aa, Zea Mays
MSTAPARRARPPLPLQNGAEGDDEREEEVDEEEVGDDEAEEEEDDDDEEEPRLKYQRLGGSVPAILSTDAAAAIAVADRMVALGTHNGTLHILDFQGNQVKEIAAHTATINDISFDADGEYIGSCSDDGTVAINSLFTDEKLKFEYHRPMKAIALDPNYARNYRRFATGGLAGQVLVLTKKSWGGYHKKVLRDGEGPIHSMKWRADLLAWANDAGVKVHDMRTDKGIAFIERPKGIHRPEFLLPHLVWQDDTVLVVGWGTSVKIAAIRTDLSQGLNGLQRTITTASSEKYVDIVGSFQTGYHISGVAPFGDLLVVLAYIPDEDEKEKTFSTSVTSRQGTAQRPEIHLVSWKNDELTTDALPIHGYEHYKAKDYALAHAPFSGSSNAGGQWAAGDEPLYYIVSPKDIVVAKPRDAEDHIAWLLQHGCHEKALAAVEAGQGRTELLDEVGSRYLDHLIIERKYAEAAQRCPKLLRGSPSAWERWVFHFAHLRQLPVLVPYIPTENPQLSDTAYEVALVALTTNPSFHELLLTTIKNWPPTLYSASPVISAIEPQLNSSSMADSLKELNCM

SEQ ID NO: 55784 - protein, 199 aa, Zea Mays
MYLPLGRIHQGVCSTWMKNTIPLEYSEECSWAPIFVRQSNFKLPADPSTPIIMIGPGTGLAPFRGFLQERLALKQSGAELGTSILFFGCRNRNMDYIYEDELQTFLEEGALSELIVAFSREGPTKEYVQHKMVEKATDIWNIISNGGYLYVCGDAKGMARDVHKMLHTIVQEQGSLDNSKTESYVKSLQMEGRYLRDVW

SEQ ID NO: 55785 - protein, 255 aa, Zea Mays
MPHAKTDSEVTSLAPSSPPRSPPRTRGAVYYVQSPSRDSHDGETIKAATSVHSTPALSPMASPRHSHSHSHSSMGRDSSSSRFSGHGHNKRKADKGGSNKGAPGGKGWQEIGVIEEEGLMDEEDHTRIVPRKCYCFLAFLLGFVALFSFFALVLWGASRSQKPRIVMGTIRFDNFIIQAGTDASLVPTDMATTNSTVRFTYRNRGTFFGIHVTADPFQLSYSQLTLASGDVSESVLVRPSRWRSIYPGLSNKGNP

SEQ ID NO: 55786 - protein, 155 aa, Zea Mays
MRTGDCKFGTTCKYNHPRDWSTPKSNYMFSHLCLPLRPGAQPCAYYAQNGYCRYGVACKYDHSMGTLGYSSSALPLSDMPIAPYPISFSVATLAPSSSSPEYISTKDPSINHVVSPVAGPAPVGAILPKGVFHHDTIMQTQTPTSAGSSSPGGGR

SEQ ID NO: 55787 - protein, 430 aa, Zea Mays
MMLAYMDRATAAAEPEDAGREPATTAGGCAAAAATDFGGLASAMPAAVVRPASADDVASAIRAAALTPHLTVAARGNGHSVAGQAMAEGGLVLDMRSLAAPSRRAQMQLVVQCPDGGGGRRCFADVPGGALWEEVLHWAVDNHGLAPASWTDYLRLTVGGTLSNGGVSGQSFRYGPQVSNVAELEVVTGDGERRVCSPSSHPDLFFAVLGGLGQFGVITRARIPLHRAPQAVRWTRVVYASIADYTADAEWLVTRPPDAAFDYVEGFAFVNSDDPVNGWPSVPIPGGARFDPSLLPAGAGPVLYCLEVALYQYAHRPDDVDDDDEEDQAAVTVSRMMAPLKHVRGLEFAADVGYVDFLSRVNRVEEEARRNGSWDAPHPWLNLFVSARDIADFDRAVIKGMLADGIDGPMLVYPMLKSNVQLPFAARQAS

SEQ ID NO: 55788 - protein, 375 aa, Zea Mays
MGDAATRDLSQWHMPDGTLCDSKEDTNPGVASVNEFKREGASDEHRTLKLGIKKNPIGLWQVSSKADDMKPVVRNHIQNNTGFSTPNIVPMISSPTGSYRDGEDVSVNQEGGGIQFDISLNQEFDSFAHNFGQTYNTEDRPQHPHHNAADVIVLSDSDEENDPTVQPPAVYENTPTNDDSFPFVTDAAGSGYPERYQEDASVGTSGLGLLRQNTGEFEINNWQMLSYPQPEQGFQFFVTDTDVGNPFVAPHNSFTIAPEDYSLGCNVGIEDPSAAHDVSICRNSNDVHGSLVDNPLALTGDDPSLQIFLPSQPSTVPLQQELSERSDTPNGVHPNDWRISLTLAAGGGGNEESTSVGGLKSQPKVSSKELLLLEA

SEQ ID NO: 55789 - protein, 109 aa, Zea Mays
MASEYHGDTYHLISKNCNHFTDDLSTRLTGKSIPGWVNRLARLGAFCNCLLPEGLRLESTETKHLGDCRFSDGSNTTSNDNSDEDELEDKHLLPTTSVGEDTIVKEIHR

SEQ ID NO: 55790 - protein, 89 aa, Zea Mays
MPWAWGNRRAGRRRVRVQWPRAAIAMPWACPARPSREVSGTHGTTRHGSAGFPFENALGPRGNLVRGRGGLGRVAMAMPVARRARAACG

SEQ ID NO: 55791 - protein, 749 aa, Zea Mays
MARKLRFFKEQMSKADIGPTQLNETHLDFDDLEIKLGELEAELTEVNANNEKLLRTYNELLEYHTVLQKAGDFFYSAQRTAASQQRELEANQSGQTSLESPLLEQEMSTDPSKQVKLGSLSGLVPKEKAMAFERILFRATRGNIFLRQEPVDEPVTDPVSGEKVTKNAFVIFYSGERAKTKILKICDAFNANRYPFPEDVSKQLHAVQEVSGKISELKATIDMGLAHRDSILKNIASDFEQWNHLVKKEKAIYHTLNMLSVDVTKKCLVAEGWSPVFASIQIQDALQRATVNSKSQVGSIFEVLNTKESPPTYFQTNKFTSAFQEIVDAYGVAKYQEANPGVFTIVTFPFLFAVMFGDWGHGICLLLATLYLIIREKKLASQKLGDIMEMMFGGRYVIMMMAVFSIYTGLIYNEFFSVPFGLFGKSAYACRDSSCSDATTEGLIKVRDAYPFGVDPVWHGSRSELPFLNSLKMKMSILLGVAQMNLGIVISYFNAKFFRNSLNVWYQFIPQLIFLNSLFGYLSLLIIIKWCTGSKADLYHVMIYMFLSPTDEIGENQLFSGQKTVQLVLLLLALVSVPWMLIPKPLLLKKQHQQRHQGHQYAMLQGVDESVGAELGEHHEEAHDHEEFEFSEVFVHQLIHTIEFVLGAVSNTASYLRLWALSLAHSELSTVFYDKVLLMAWGFNNVIILIIGIIVFIFATVGVLLVMETLSAFLHALRLHWVEFQNKFYEGDGYKFAPFSFALIREEED

SEQ ID NO: 55792 - protein, 329 aa, Zea Mays
MEAKKIYEGTVLSNNLVKPSVIAYMMKWLWARLVAAFLWPLHNLAKILVYKKIHSAIGISKAGISGGGSLPMHVDKFFEAIGIKVQNGYGLTETSPVVAARRPFCNVLGTVGHPIKHTEIKIFDIETGEVLPDGSKGIVKIKGPQVMKGYYKNPSATNEAFDQEGWFSTGDVGWIVPHHAMGPSRQCGGMIVLEGRAKDTIVLSTGENVEPAEIEEAASRSTLINQIVVIGQDQRRLGAIIVPNNDEVLAEAKRKSILGEDGELAKDKVMNMLYDELRTWTAHCSFRVGPILVVDEPFTIDNGLMTPTMKIRRDKVTDKYRREIEALFK

SEQ ID NO: 55793 - protein, 51 aa, Zea Mays
MAWKRKNGSASGSPARGAGAGYEEAEKVPRGHVPMLVAGGDDDGDGDQASL

SEQ ID NO: 55794 - protein, 135 aa, Zea Mays
MQEPNADGDSQTCMQVNAYINRSLDAEADLRVPIEAEMSEDTADDDISSRAGNLVESMTADLAGEVTSAAGPVRLEDLQRILSAIQSSGAAADPDAGVGLGDILKPDLVLPLIEDLPIEQLASHLPEFMAVAQFQ

SEQ ID NO: 55795 - protein, 408 aa, Zea Mays
MTGGFYDSRRSKLKFVKIIRDNKTAIDRKTGHLESVVNKLKDILFWFNYNLVTKQQQMDAERDHAKSELEQFKADIARAMKQRGSLEKALVKKEKSLNNICNQIEQVQSSIAMKNDEMGTELIDQLTSEERDLLSRLNPEITDLKERFLMCKNSRIEIEARKEELETNLSTNLIRRQKELEAIISSADSRTLPLEAEAKEQELKSSKRNLDELTSLLKANVDAINNFTRKMDDLKRKRDDLKAREAILEQTVQDGAKDLEQLMNSRNTYLAKQEECTKKIRDLGLLPADAFEAYKRKNKKQLHKILYDCNEQLKQFSHVNQKALDQYVNFTEQREQLQRRRAELDAGDVKIMELISVLDQRKDESIERTFKGVARHFREVFSELVQGGHGYLVMMKKKANVLIVLFYC

SEQ ID NO: 55796 - protein, 210 aa, Zea Mays
MPLDATGYVHRIGRTGRANKTGASISLVSPKEDSTFKEIEHMLQDVEKKDMDCISPFPLLTKDAVESLRYRAQDVARSVTTRDVQEARRQDIKNEILNSEKLKSHFEENPTDLDLLKHDKLLCNKEIPAYLRDVPDYLIDPKTKEASNAVKLSRAAMHIDKPQRRKRQGFKGGSGKSRDPLKTFSAEGKRGRRRKEREGEPDRRKKSKKA

SEQ ID NO: 55797 - protein, 137 aa, Zea Mays
MEMITGRKVLDDSLPEDETHLVTIFRKNMLDREKFRKFLDPALELSAESWNSLLEVADLARHCTAREPHQRPDMCHCVNRLSSLVDQWKPTNVIDDDEEGGTSEMGLHQQLERWRCGDFTISDSESFSTYNTSRKYH

SEQ ID NO: 55798 - protein, 205 aa, Zea Mays
MMPAPPAPGYDRLPLFYGGGGGAPSPISLGSGSYGGPYPHLGMRYGYGPPVGAPGSYGLFSSYGQPGPMSGMGYGPGPELGRYSYGFRGSPMPVSSPWSGGAIAENNDNIASRKRRGGPDGLSEGDWTCPKCDNINFSFRNTCNMKKCGAPRPTPGANTSSSRKDNKEAPEGSWTCPECNNLNYPFRSVCNRKGCSYNKSAPTNN

SEQ ID NO: 55799 - protein, 127 aa, Zea Mays
MWRDEREVVVRGPACSSSAVTGWFSQDLSDGTAAAASTTSTARARPSGEVDVHGFAFNSSVLWDPERWGRYPTSEPDKSQDSTKFVQQVVLEDLSKVKGIPSDCSEVMVWHVDTAAPSPSSPQNKRR

SEQ ID NO: 55800 - protein, 756 aa, Zea Mays
MTGSKPAPAASQNPSAVPHRRPPPPPPPPPPPPVTAVARVREEGELSSGADDDETLQTQLGAASILGKFVEAGSQVPSASLLGKGSNTLIVSNALNHKASAPSYKKIMRVNQGQFKPGTNRNLSWQKPVSSDNLLITFSDDDSGADSGKTGRDKVRKASSQGTQRTGNSMQTRIMREEVSQQKNLGSKVGPAHLPAFPFTHRNVGAGRASGNTFFRKELPVRQVNPLKSKQKVQNGVGVHSEDHRLEILRHKIAAKENELKGQKRPLSAVATKNADFSSNQPRLPSEKIRLEASSIGEYSRFNSLSEHSGGPNKRLKLNQQYNQFCSDLTPLAPIGSISGKTNVQSSEVTNRSENGITMNLNVNETDTTDTTELADQIQQGGATKSLRHHKDSGGAENHVMLESHDGLAAQPPFTDTQTIPEDTSALAPVTSAQARQQVLAVGTSPVLDGTPQLQPGKENDECLNSSGQIGVETQNTILFSLLEMEELQDKELEDAQEHRQKCEAEEREALRAYRKAQRALLEANERCAILRRKREICSSQVHGLIAENSSLVQSLSIRNPEDGLAMPSLLNSQIHAVSQIPENQGGRHRLCPEEPSQQQIDKHEDEARPHYCDKLAASTADPSSVSAVNADSILSDYMEDDLLFPTRQARSECALDVENQMEETIHVYAEENRQVSGDGGEDYELLEASLRSRLVERFGKKSCLNGTIDEGTEGLAVGKVAAEHGKQSAYVGHQLQEAEQNIMTTTLEAILYFVV

SEQ ID NO: 55801 - protein, 314 aa, Zea Mays
MPIIGALWTQKVRRWHDFIVLSCMRSPFGRDKDAVAQLIQSCFSSFLQSSSSGSDIIANRGVGALLGDSITNQGLRLPMAPGFIYLRTCRTFHDTYFVSEVILKQVIEWAHKLANGWCFNGPPQLKSGRTPLSCAASMVQQVALLGGGLLCIAGGPLVVQVLYEETLPTLLLSARDQSLKGPGPVSSTLQGYAMANMLFYCGSLLWGADRTSPVMKLSFLSRRPRVVRTHMDFIAGVLDGHILLGCDPGTWKAYVSQFMFLVVKFVPSWLRDIKLDTLKKIAAGLRSWHEHDLALSLLERGGPQAISVVVETFL

SEQ ID NO: 55802 - protein, 679 aa, Zea Mays
MARCSTCDRFSRFMETTDEFAVPPRPALVHPDADGVRTPSALGPLSPEDPPPAFMERDWRHGGDNTAAYPGCSPFQPSAAGRPVSISLPASPTGGFDISSRTEAELQRDAAAVTDAPPPRMMMLPPFAPAPAMALEQPGKVVFRSQPIPAAPPVGDGGHDDEFGRSAPAAMALEQPGKVVFRSQPIIPGAPPEGDGAARGHDDFGRSAPAAKTRRDSRDTSYDSFKTWSGKLEKQIATHLLGSSLQQQPEHGEEPEEDDAASDRRNSSMPKVQRFFAALEGPELDKLRSSEELILPSDKTWPFLLRFPVSAFGMCLGMSSQAILWKRIAISASTRFLHITVKINLVLWCASVALMAAVSALYGCKLVLYFEAVRREYYHPIRVNFFFAPWIACLFLAIGVPDVVAATLPHWLWYVLMAPIVCLELKIYGQWISGGQRRLSRVANPSNHLSIVGNFVGALLGGIMGLKEGPMFFFSVGLAHYMVLFVTLYQRLPTSETLPRDLHPVFFLFVAAPSVACLAWARITGEFGYGSRVAYFIAMFLYASLAVRINLFRGFSFSLAWWAYTFPMTSAAIASIRYSSEVKNAFTQCMCIGLAAAATLAVAALFLATLLHAVVYRDLFPNDISIAITERRRSKPLVGEKMLLRLRSGKKVQQALSTAPADAAADLEAARAATTTSYT

SEQ ID NO: 55803 - protein, 413 aa, Zea Mays
MLISYFLGIYRNNGYLMVSCNGGLNQMRAAICDMVVIARYLNVTLVVPELDKTSFWNDPSEFQDIFDVEHFITSLRGEVRILRELPPRVKRRVELGMFHSMPPISWSDISYYQNQILPLIRKYKVLHLNRTDARLANNGLPIEIQKLRCRVNYASLKFTPQIEELGKRVIRILRQNGPFLVLHLRYEMDMLAFSGCTQGCSTEEAEELTRMRYAYPWWKEKVIDSDLKRKDGLCPLTPEETALVLRALDIDRSMQIYIAAGEIYGGKRRMASLTSAYPNVVRKETLLEPSDLMFFQNHSSQMAALDYLVSLESDIFVPTYDGNMAKVVEGHRRFMGYKKTVLLDRKLIVELVDRYTNGSLLWDEFSSLIKVAHAKRMGSASKRMVIPDRPKEEDYFYANPQECLQDRDFLQTS

SEQ ID NO: 55804 - protein, 348 aa, Zea Mays
MEKERLADSLPLPFETAFFKKEDRSLPPFQSFAEPENVDSSADLAADKEDTFEEQFSKNAAEVARALSESVGKPSHGIHLDGSMWWKEVGVERRPDGVVCKWTVIRGVSADGAVEWEDKYWEASDRFDHKELGSEKSGRDAAGNVWREYWKESMWQDYTCGVMHMEKNADKWGQNGKGEQWQEQWFEHYDSTGKTEKWADKWCSLDPNTPLDVGHAHVWHERWGEKYDGLGGSEKYTDKWAERSEGDGWSKWGDKWDEHFDLNGHGVKQGETWWAGKHGDRWNRTWGERHNGSGWVHKYGRSSSGEHWDTHAPQDTWYERFPHFGFYHCFENSPQLRSVKRQPPPPRK

SEQ ID NO: 55805 - protein, 259 aa, Zea Mays
MGGSADANGAGSVRVPVPPARPFLDTFRGNLKETFFPDDPFRGVVRERGAGRRTVAALRYFFPFLEWAPAYALSTFKSDLIAGITIASLAIPQGISYAKLANLPPVLGLYSSFVPPLVYALMGSSKDLAVGTVAVASLLISSMLGSEVSPTENPVLYLHLAFTATFFAGVFQASLGLLRLGFIVDLLSHATIVGFMAGAATVVCLQQLKGMLGLVHFTTSTDVVSVMESVFSQTHQWRWESVLLGCGFLFFLLVTRFIG

SEQ ID NO: 55806 - protein, 89 aa, Zea Mays
MVPCLRRKRMVAWSAMRAATLISPTPCLLLGSPTMVLRRRSWPTGHLGSGTDRLMDGCIKCKEQILSWFRLFSATYNYCVDYVPSDVFK

SEQ ID NO: 55807 - protein, 352 aa, Zea Mays
MTNIQQSLVKANLASYVKLVVPCNADAYQSASVPSQGVFRTELTQLMTQLAAFLSSSGAPFVVNIYPFLSLYQNSDFPQDYAFFEGSTHPVVDGPNVYYDAFDGNFDTLVSALSKIGYGNLPIAIGEIGWPTEGAPSANLTAARAFNQGLINRITSNKGTPLRPGVPPADVYLFSLLDEEGKSILPGNFERHWGIFSFDGQAKYPLNLGLGNSVLKNAKEVPYLPSRWCVANPARDLDSVSDHMKLACSMADCTTLYYGGSCYGIGEKGNVSYAFNSYYQQQKQDPKSCDFGGLGMITYLDPSMGECRFLVGVDDSKSSAVASCGGGCCGVCCGLWVLALWVLTYLRMMGSA

SEQ ID NO: 55808 - protein, 354 aa, Zea Mays
MRERSSNPIPFEWRRVIDCDMRQWLCCNCHFDDEEDGHDKEQAKAQSNKIDPKQKSSKPPVSQPEPEFSPPTIDVPELSLDDLKQKTDDFGSSALIGEGSYGRVYHAALDDGRQAAVKKLDASENEPNDEFLKQVSLASKLKHENLVEMLGYCVDGNYRILAYEFATMGSLHDVLHGRKGVQGAQPGPVLDWMQRVKIVIEAAKDFNLLNQAPDMAARLHSTRVLGTFGYHAPEYAMTGQLTQKSDVYSFGVVLLELLTGRKPVDHTMPRGQQSLVTWATPRLSEDKVKQCVDPRLKGEYPPKGVAKLAAVAALCVQYEAEFRPNMSIVVKALSPLLQQRPAPGTAEPAPQPVS

SEQ ID NO: 55809 - protein, 230 aa, Zea Mays
MSTLIHQSVPQSTCLGRYRDREQQLRDGHGGDLGHGDRVLREMGTTRQDSPRHRRHPRHRVNNVGTNIRKPTTEFTAEEYSFLMATNLESAYHLCQIAHPLLKLSGSGSIIFISSVAGAIGIFSGTIYAMTKGAINQLTKNLACEWAKDNIRANSVAPWYITTSLTEGILANKNFEEQVVSRTPLGRVGEPGEVSALVAFLCMPGSTYISGQTIAVDGGMTVNGFYPPKP

SEQ ID NO: 55810 - protein, 486 aa, Zea Mays
MGKEKSHINIVVIGHVDSGKSTTTGHLIYKLGGIDKRVIERFEKEAAEMNKRSFKYAWVLDKLKAERERGITIDIALWKFETTKYYCTVIDAPGHRDFIKNMITGTSQADCAVLIIDSTTGGFEAGISKDGQTREHALLAFTLGVKQMICCCNKMDATTPKYSKARYEEIVKEVSSYLKKVGYNPDKIAFVPISGFEGDNMIERSTNLDWYKGPTLLEALDQITEPKRPSDKPLRLPLQDVYKIGGIGTVPVGRVETGVIKPGMVVTFGPTGLTTEVKSVEMHHEALQEALPGDNVGFNVKNVAVKDLKRGFVASNSKDDPAKEAASFTSQVIIMNHPGQIGNGYAPVLDCHTSHIAVKFAELITKIDRRSGKELEKEPKFLKNGDAGMVKMIPTKPMVVETFSAYPPLGRFAVRDMRQTVAVGVIKSVEKKDPTGAKVTKADGCCWSHQECGEEGPNRRQGDQGGRQEEMMRSRVCFCSAWITCH

SEQ ID NO: 55811 - protein, 60 aa, Zea Mays
MMAIRKPHSLIQYPITKEKDQQIQLNRHLKGSNKGRYASEKKWTSNPPRTKVSLRSSSTF

SEQ ID NO: 55812 - protein, 964 aa, Zea Mays
MLQMLGFRGGSPSTGDASPAISGDGGAAARPLRLVYCDDKGKFVMDPEAVAALQLVKGPVGVVSVCGRARQGKSFILNQLLGRSGGFQVASTHRPCTKGLWMWSAPLKRTGLDGTEYSLVLLDTEGIDAYDQTGTYSIQIFSLAVLLSSMFIYNQMGGIDESALDRLSLVTEMTKHIRVRASGGSCTSSYKPSNINLRPCYASDTFGVRRADDTVLPLLQDFYLDLAEDNRKITPRDYLELALRPVQGGGRDISAKNAIRDSIRALFPDRECFTLVRPVNNEKDLQRLDQLPLSNFRPEFRSGLDAFTKFVLDRTRPKQLGATTMTGPILAGLTQSFLDAINNGAVPTISSSWQSVEEAECQRAFDSAVGTYNSSFDHKKHIEEDSLREAHEDAMRKAISAFNVSAVGAGRQLEHIDAERNALRLKCNSSDDKLALLRKQLEASESHRAEYVRRYEEVLNDKQKISKDYSIRITELQAKSSKLEQRCLSLSSSLETAKRESNDWKSKYDHGILQQKADESKLKSQIASLESRVSISEGRLSATREQADSAQEEASEWKRKYEVAVSEAKTALQRAAVAQERTNKKVQEREDALRVELANQLSEKEEEIARLHAKRSQMEIHATSLISRLEATEAKSKSHESDSLALREEIRLLTDNLESIRSEALSREKEVGILEQEKNHLEEKYLSQCKKFDETDIRCKEAEREAKRATELADVARVEASAAQKDKGEAQRLAMERFALIERMERQVEALERDKAKLVEEIERLHQSEKDAVSKVALLERNVGEREKEIDEMLKQNNQQRSSTVQVLESLLATEREARAEANKRAEELSLMLQATQGKLDMLQQETTLDSKLKTSARRLRGDATESVHDMDIDGDNGRRRKRSKSTTSPFKNNHTEDGGSVFIGEDTYNGSQQGTESEDYTKFTVLKLKQELTKHGFGAQLLQLKNPNKKDIVALYEKHVIGK

SEQ ID NO: 55813 - protein, 434 aa, Zea Mays
MAAQLLFSNASSCHCPLGISRINVGKTLLGESASFQRKKSFSGGSYRFSRFDCSANSRRAGPRRTKDTLYDLHPEISLLYGEDNGAATLSSKEQGIDTTAERLVDTSPSYRYNEPRIKVIGVGGGGSNAVNRMIESSMKGVEFWIVNTDFQAMRMSPIEPENRLQIGQELTRGLGAGGNPEIGMNAAKESQELVEQAVAGADMVFVTAGMGGGTGTGGAPIIAGIAKSMGILTVGIVTTPFSFEGRRRALQAQEGIASLRSNVDTLIVIPNDKLLTAVSPNTPVTEAFNLADDILRQGVRGISDIITVPGLVNVDFADVRSVMSDAGSSLMGIGTATGKTRARDAALNAIQSPLLDIGIERATGIVWNITGGNDLTLTEVNAAAEVIYDLVDPGANLIFGSVIDPSYTGQVSITLIATGFKRQEESESRSSQMY

SEQ ID NO: 55814 - protein, 559 aa, Zea Mays
MRDDGSSKNKLSWSKTLVRKWFNIKTKAKDFHSDYAAEEVGVQWRTSSFSDRDACKSKKSRTERLPKRNVERDGRVGNGFDGAYITNTQDYRVFVGTWNVGGRSPSSHLNLEDWLHTSPAADIYVIGFQEIVPLNAGNVLLTEDNGPARKWVSLVRKTLNNLDQQGSGVYNYHTPSPAPDPIVELNVDFERSSRRQRNSSFFHRRSFQSFNRSSRIDMMDPHSLVDRRFSVCDRISFGSRPSDVDTSMRCGGSSDDENIDEESPSGIFFPPMPCAYGAPLCTGSRYCLVASKQMVGIFLMVWVRSDIREHVKNLKVSCVGRGLMGYLGNKGSISISMSLHQTSFCFVCTHLTSGQKDGDQLRRNADVVEILRKTRFPHVHGAGDRKSPETILDHDRIIWLGDLNYRIALSYRSVKALVEMHSWKQLLEKDQLRIEQRFGRVFAGWKEGRIYFPPTYKYSYNSDRYAGDDMHPNEKRRTPAWCDRILWYGRGLSQLCYVRGESRFSDHRPVYSIFTAEVEIPSQSAAHFGGITRSASLLGLDELPPYQTYPRSYMDINFY

SEQ ID NO: 55815 - protein, 291 aa, Zea Mays
MDRGPEHTINRGFYVAEGAKMCSVEQVGEMHISERQKSLQENYYFSCQCSSCSELNLSDLVMNSFCCPQSNCLGAISESTYYRSKENFVNVSLGGSYVCKLSLPDVSKVDMDMENVAKSLLQNSGVSLNIDHGCCMSCRSCIDLSSALATSHREESTIDRLKKHTFLDKTLITEALQSLKQLKKLRHPYSKALAQAEDTIAEAFAKVGDQELARKHCEASIQILEKLYHPKHIIIAHELIKLVSILLSLGDGASAAATFAQAEAIFSLYYGSHVEKVLTYMGALKKAVIDV

SEQ ID NO: 55816 - protein, 129 aa, Zea Mays
MLWRSPGTPVFTAPECCQGSAYHGRASDTWAVGVTLYCMVSGHYPFLGDTLQETYDKIANDPVELPGDVNPQLADLLLRLLCKDPGDRITLRAAAEHPWVAGDEGPVPEFICRCGFGRRKRNDVREEVQ

SEQ ID NO: 55817 - protein, 938 aa, Zea Mays
MPANGKLSAKPSPSPMVAPASRPKFTAVTFLGDCDDDDDFQPPRPRPLKPCIGAAALRFRKKLKAPSSGKENSSAAGGAVTVVGVASTAVKDAETLAAGSRVSGDVPKTKRRKTGESCGLSRYGSDSTKLSCKPKIELDRYGYGKGCCSFLPSAIDSTVLALGAVCDFGVRRCDEAQIAVSRHCTSVLEAGHATEELTPTGSGCDPPKTEKKPGSSEAVEGHHDSRLIEPRLVESDANLEFVTGILGSLTDKQDTKKANGVVFGCGVGFQNGNYHLDSLQPELLTSNSKYDSRVCVSNEIQEPGLGACNLISQERKVAAGHSACATPENVTAENKSSAPEACKGQCHSDSSASKLPESHMIHDFEVDGCDNFEIGTQLSELINLCMKDSIEGQSNFGAAPMEQNTLDSKRLSSDYEAKCPLCGSDISDLSEELRQLHTNNCLDEPAKESSPNHKKEPSVGQNVETGRVVEWLRNLGLSKYEEVFIREEVDWETLQWLTEEDLLGIGISSLGPRKKIIHALGELLKKHDDPSEMEAVLNSGNTKKTKLPMNGNKLITEYFQCSSFDQRQRRVCKANKPSNLNEKKISSAKVPTRRTAGKGKIKDTPLWCCIPGTPFRVDAFRYLRGDCSHWFLTHFHVDHYQGLTRSFCHGKIYCSSITASLVHHKIGIPWDRLHVLTLNEKLNIAGVNLICFDANHCPGSIIILFEPPNGKAVLHTGDFRFSSKMANNPVLQSSCVHTLILDTTYCNPRYDFPSQEIVIQFVIEAIQAEAFNPKTLFLIGSYTIGKERLFMEVARLLQKKVYVGAAKLQILKHLELPQEIMHWFTANEAESHIHVVPMWTLASFKRMKYLSNQYAGRYDLIVAFCPTGWAFGKGRKKTPGKRWQQGSIIRYEVPYSEHSSFTELQQFVKFISPEHIIPSVNNDGPESANAMLAQLLNE

SEQ ID NO: 55818 - protein, 229 aa, Zea Mays
MGTPKAEVVACVLGQESNVLHPKNPFAPTLHFNYRYFETDAPKDAPGAPRQWWFGGGTDLTPSYIIEEDVKHFHSVQKQACDKFDPSFHPRFKKWCDDYFYIKHRNERRGLGGIFFDDLNDYDQEMLLNFATKCADSVLPAYIPIIERRKDTPFNEEHKEWQQLRRGRYVEFNLVYDRGTTFGLKTGGRIESILVSLPLTARWQYDHKPEEGTEEWKLLDACINPKDWI

SEQ ID NO: 55819 - protein, 123 aa, Zea Mays
MFSGVGPLAISAAKKVKYVYANDINPNAVGYLERNMVLNKLEKKIEVFNMDARRFVSAIYSSKHVQPITQIVMNLPNDAVEFLDVFKGILCNTKSELHCVMPMIHVYGFSKAEDPEHDFHEHL

SEQ ID NO: 55820 - protein, 153 aa, Zea Mays
MPPGSPSSPTDPTSSKVVPPPSYCSHGSPAIILSFLYCLLPPDREAALVQVLPGEVEPNRIPWRTTLQWIQDVRHQINGGSFLRLATTATTPLTSFSPSSVVFVSLLCCWEREVAQPRRWYQRGGARSHPMEDNLPIDPGREAPIQWREKQES

SEQ ID NO: 55821 - protein, 292 aa, Zea Mays
MVPAAAAVAAASPAALPRSTSPRGRRPRARACSFRCAGPSARSSALKSGSAGHGHPRIRQLRGRPDCSRQAEVMGSTVDDDEACELVSGSDLVIGEGDDSVSAYLFKAVKNNNGTGILLLSDIFGFQDSATRDFAYRVACNGYNVLVPDLFRGNPWKLNVPFDGDSFERWRAGQAPGRVSGDIDACTRWLVDEFKAAGVSKKLGVIGGAREAPGRRCTPAGATGSRTGRSRWRRTATPRTRSTRCGGGCTTTCSPDRTIRRCTRVWVFCTYVLICYLTKSPGHPIIKSKIHH

SEQ ID NO: 55822 - protein, 619 aa, Zea Mays
MFWHGVADRLTGKNKEAWNEGKIRGTVRLVKKEVLDVGDFNASLLDGVHRILGWDDGVAFQLVSATAADPSNGSRGKVGKAAHLEEAVVSLKSTTDGETVYRVSFEWDGSQGVPGAVLVRNLQHAEFFLKSLTLEGVPGRGTVVFVANSWIYPHNLYSQERVFFANDALKKNRLFILDHHDHFMPYLNKINELEGNFIYASRTLLFLKDDGTLKPLAVELSLPHPDGQQHGAVSKVYTPAHSGAEGHVWQLAKAYACVNDSAWHQLISHWLNTHAVIEPFVIATNRQLSVVHPVHKLLSPHYRDTLNINALARQTLINADGIFERTVFPAKYALGMSSDVYKSWNFNEQALPADLVKRGVAVPDQSSPYGVRLLIKDYPYAVDGLVIWWAIERWVKEYLDVYYPNDGELQRDVELQAWWKEVREEAHGDLKDRDWWPRMDAVQRLARACTTVIWVASALHAAVNFGQYPYAGYLPNRPTVSRRPMPEPGSDDYKKLEAGQKEADAVFIRTITSQFQTILGISLIEILSKHSSDEVYLGQRDEPERWTSDARALDAFRRFGSRLVEIEKRIRTMNDSPTLKNRKGPVEMPYMLLYPNTSDVTGEKGEGLTAMGIPNSISI

SEQ ID NO: 55823 - protein, 129 aa, Zea Mays
MALGSAFLLHGSVGGWSRTLFLLAHELPQEVGDFGILVRSGFTVSKALFFNFLSALVALAGTALALSLGKDPGHSSLIEGFTAGGFIYIAVAGVLPQMNDQKTTIKSSVAQLISLAMGMLVALGISLVE

SEQ ID NO: 55824 - protein, 207 aa, Zea Mays
MGRAINKTVAIVELLKRRIAGLHQNTSIESIDITDTWEPLEEGLVTLETIRHVSLITIKLSKKELDTSSPGYQPPIPADQVRPAADFDQDAEAVPSGRGRGRGRRSRGRGRGRGFSSGVDYDDEIGEPEEAPRGYRGRGRGRGGRGSFAVGRGYGGDNYAMEEAGRYDDDGYNAPPMQRYEGGRGRGRGRGRGRGRGRQGHGPPPQQ

SEQ ID NO: 55825 - protein, 65 aa, Zea Mays
MADPRGTLRSGGHLRRARRRWLPEASAAATTYSNQCLCMRLLVGHILILFHQLFMQLFIRIYTFA

SEQ ID NO: 55826 - protein, 1040 aa, Zea Mays
MEASASARRSAASPDPGAKKPRLAQPPARDPRSYAAAAAASNGGASAAEQALVDELLGQYRTALGELTFNSKPIITNLTIIAGENLQAAKPIAAVICANILEVPSEQKLPSLYLLDSIVKNIGKDYVKHFSARLPEVFCKAYKQVDPSIHHSMRHLFGTWKGVFPLPPLQTIEKELGFQSSTNGLSGAAPSRTDSQSPRPSNSIHVNPKYLEARQQLNQPTKGILGSGAKTAVIADTDDDIERANRLGTERSAGRRLDAPNARPNIEHIQRDPFSNPIHEKLAGRDVRGLGFSNTSQQAVVGTGQVRSKPRGQDGIGGPYYASGVVSSEEKIDKRSNFYTSKDVRPSGSVHFDSALLPTRSINANRVGRPSSNKSWKHSEEEEYVWDDVPSKTTEYSGTHNIIKGEWMSDDGNAKFASLQSAKWADAGPVECIDPKTHKVDNVSRFGFAAGQERRISAYMDQEEYLLGKREVEARIDREIRPYGQQFPAARDSSLWVSQEKALPDNGLDPWVSKFSNQPAEMSICTGTMPASIISSVPVRLSGHYAGRSNLDTTNSVPIRSTEAFGQQKHRYWSSSPPQAHPPSSTAPFARQGSPNHDESDFYPSGSFSQLGQDPQEEYSQRALPVLAKGSHVVVHNDELTQGQPSLQATLQTQKYPIIQSKSHINPSDQLQASFLCENSPSLFRPSIQLGEVSLPSDSTPISSDLTSASNLLAGLIKSGFKPSNHSDAQPLGPSGSLLVASLSLQNAAGENTILQTQTPNTSRPPLPPGLPPPPSTQSAEKAAPLSSLLSSLVAKGLISSPASDSSDAVISQPNKESSINGKDVAASGVPLPALKSSFGKVSSSNSDSSAPPNASLPKAIEIEMGDLIGLEFKPEKLRKYHEHVISYLDDQSHQCKMCGNRFGLEELSLHTSSCGPRESRTIYTGIAPKRWYPSRNIYIDGSHEIEDSAEASDAGLGSAEVCEFMVHADERQIICALCGEPFDDVYSFEKGNWMYKDAVFLDYAKGKNSCGNNVKGEEHVPIVHVRCMPRGSNDGMDVD

SEQ ID NO: 55827 - protein, 191 aa, Zea Mays
MLSRREKATNFKPDYDIDIHMKVLAMSGQVSSILTGYKLKMIHGFTCSHFLLMVCAFVVFSDILKRVPDKLHVTKKAVLHVFPAALPQSLRLSCLCPRRQLSGLDVPFHAAPTSTHTPTVVTPCSSTRRSMVSQPVKTFFAITMYGTANSHFTSVVWKASTNSNALFLIAAAHNLLCLKLGKEIGVSIGNP

SEQ ID NO: 55828 - protein, 111 aa, Zea Mays
MVIWGTMSSPTRLAAAQMVGMPGSLAATRTLVTLPSGSTTNLSDLITEIRDENYSCKKQPVSSHLQNYRHGKGKQMQDAVDVLAFIVGRGNAPQIRVCSRYMCSFLCFETM

SEQ ID NO: 55829 - protein, 501 aa, Zea Mays
MGGGDADAGGEPADAQATLHIRCTNGSKFTVRTDLGATVGAFKAIVAHSCDVPAPQQRLIYKGRILKDEQTLASYGVETDHTIHMVRGAVLSPTSTAPAANQEPTTAAPASSPATGLGGLLQSLGTTGAAANSEGLFGSAPPGLDQMQQQLAENPNLMREMMNMPLMQNLMNNPELIRSIIMNNPQMRELIDRNPDLAHVLNDPSIMRQTFEAVRNPELMREMMRNTDRAMSNIESSPEGFNMLRRMYETVQEPFLNATTMGSEGDRNSNPFSALLGNQGSNQARDSAANGTTRASDPTSGSPAPNTNPLPNPWGSNAGSAQGAARSSPASNVRSTTASGLGGLGSADLGSTHGASGGGSDATLLTQVLQNPTMMQMMQNIMSNPQSMNQLLNMNPNVRNMMESNTQMREMIENPEFLRQLTSPETLQQLISFQQSLMSQLGQQQAGQERTQSGSGAGNVNLNTLMNMFSGLGAGGGLGVPNAPNDVFLKFSHQQSNVKIC

SEQ ID NO: 55830 - protein, 195 aa, Zea Mays
MSHARASPLWRCPLPGTHPHKASASPIRREPPTARPQGACACSRCSFLMATACHLAAPLGLAPLPRGCASAGVVAVVRCGSKIPRGVAVRATSGGEGATEEVPEIVKAAQDAWDKVEDKYAVATIGVAAIVALWTVVGAIKAIDKLPLLPGVLEIVGIGYTGGGSDRQNQEHLQRNHREQQLIEHHLQDGFLSIW

SEQ ID NO: 55831 - protein, 366 aa, Zea Mays
MVMRARAMGLSSIRREVAVPVPVEGCRHRRGGGAAGAVPRDVRVPDLGVDGGRVPRRAAAGGAVPPGQRVDRGQAQPGNLPWPHHADHHAARRRRAAPPPPPLGLVHQPQRLRLPARHPGRFDGGVRRAAQGPQLHPAHEPPGLEDKRARPVILDTALYEDGRAELIRPVNISTNLRRLPTAFKLFTGSAWTMLSRAFAEYVTMGWDDNLPRTLLLYHANIVSSPEFYFQTVACNSRRFRNATVNHDLHFIRWDTPPKQHPLYLTARDYRRMLLSGAAFARKFRDGDPVLDRIDRDILRRRDPAAHFAYGGWCSEAGDQNGGAALCSNPQEPGRRGAVKPGAGSRRLKAMLRKTLSPRNFRRQQCR

SEQ ID NO: 55832 - protein, 168 aa, Zea Mays
MEHMRFDIMSGSIRILVVLCLKLLRTRKSPAKQTARNLFRGGDDEDDSADADTNDPVVPWSLGRVGVGHMVYISGLTCALSSTNMKVLREVASRGRHVERVKNFFRNMYICAKLFRNLTPFYFLCYSRLCFLSFPMTCYAFALYLACLKLLHKTCYIFCPKILYPCYD

SEQ ID NO: 55833 - protein, 235 aa, Zea Mays
MLEEALEIATDADYKFDLAVQLGKLDVAKAIVIEAQSESKWKQLGELAMSTGKLEMAEECLLQAKDLSGLLLLYSSLGDAEGIEKLASLAKEHGKNNVAFLCLFMLGKVEDCIQLLVDSSRIPEAALMARSYLPSKVPEIVAIWRNDLSKINPKAAESLADPSEYPNLFEDWQVALTVEKSVASQRDHYPPADQYLNHAEKSGMILVEAFKRMQVIEHEEPEDAAEENGEPDQQC

SEQ ID NO: 55834 - protein, 204 aa, Zea Mays
MSRHPEVKWAQRIDKVYITVQLPDAKDAKVNLDPDGVFTFSGSAGTNLYELKLDLNDKVNVEASKISVGVRSIFCIVEKAEAKWWKKLVRDDQRAPHFVKVDWDKWVDEDDDGADINMDGMDFSNFGGMGGMGGMGGMGDMAGMGGLGGMGGMGGLGGMGGMGMDDFEDESDDEEVSKPQAADKAVEAEETESAETKIEAAQSS

SEQ ID NO: 55835 - protein, 506 aa, Zea Mays
MEPSPAQAGASDRDRSPPPPPPPPSQSSTAATISSPLAVVCSFWKDFDLEKERSGLDEQGLKIAENQETSQKNRRKLAENTRDFKKASSDEKLSLLNSLLKSYQEEVDNLTKRAKFGENAFLNIYQKLYEAPDPYPALASMTDQDQKLSELETENRKMKLELEEYRAEAAHLKNQQATIRRLEERNRQLEQQMEEKVREMVEMKQRSMAEDSQKTLEALKDRERSLQDQLRQATESVKNMQKLHESAQSQLFELRTQSEEDRAAKEVEVSLLMDEVERAQARLVSLEREKGDLRSQLQTTNEDASKSSDYLESSDILESSLNAKEKIISELNAELRNIESTLSSEREMHVNELKKLTTLLTEQESALMELKKELQERPTQKLVDDLKKKVQILQAVGYNSIEAEDWELATNGEEMSKLEALLLDKNRKMEHELTQLKVKISEKTSVLEEAEKRIVELTSKVEEQQKLILKLEDDILKGYSSTDRRGSLLNDWDIQEIGSSEASETC

SEQ ID NO: 55836 - protein, 921 aa, Zea Mays
MQSHLLSVLNNHFFGEHLTILYYRSMLWVGPALIFSSATAISMLGWDNKVRSILSTSFPRSVLLGALNDRLLLVNPTDINPRQKKGVEIRACLVGLLEPLLIGFATMQQHFEQKLDLSEVLYQITSRFDSLRITPRSLDILTKGPPVCGDLAVSLSQAGPQFTQIMRCNYAIKALRFSTALSILKDEFLRSRDYPQCPPTSHLFQRFRELGYACIKYGQFDSAKETFEVITDHESMLDLFICHLNPSALRRLAQKLEESATDSELRRYLERILRVRSTGWTQGVFANFAAESMVPKGPEWAGGNWEIKTPTNIKNIPQWELAGEVMPYMKTTDAGIPSVVADHIGVYLGVMKGRGNVVEVSEKSLVKAIAAASSENTQPVSSASAEKSKAIPRGDSVGDTLARQLGVQIASSDEQAKAAEDFKKTLYGVVDDGSSDEDESTSKTKKIHIRIRDKPAAPTVDVNKLKEATKQLGLGPPLSRTRSLSGTPQDFNQAPTQPGGPAAAVSPAMPNSAIDLFGTNTLVQPQAPSSSTGPVIAGMGVTAGPIPEDFFQNTIPSHQLAAQLPPPGIVLSRMAQPAPGIEQGRPVPNQMMANVGLPDDGVPPQAPPQQSQFPPQQSQFPQQPGIPMDSIGLPDGGVPPQSQPLPSQGQFLPSQAQGFQLGIPAPSQPIDLSALEGPGAAKQAARPPAPTAVRPGQVPRGAPAAECYKMALAHLEQNQLTDALSCLDEAFLALAKDQSREADIKAQATICAQYKIAVALLQEIARLQRVQGAGALSAKEEMARLSRHLASLPIQAKHRINCIRTAIKRNMEVQNYAYAKQMLDLLYSKAPPTKQDELKSLIDMCVQRGLTNKSIDPFEDPSQFCSVTLSRLSTIGHDVCDLCGAKFSALSAPGCVICGMGSIKRSDALAGGPGPVPSPFG

SEQ ID NO: 55837 - protein, 231 aa, Zea Mays
MGHATPLSTLPPCSCLCPILLLLPIFSRRVHARREIAADRSALDRPVILDERPARKQEAPSLHVSVPARRTQGLSNCTAIRELYLAGNKISDVEGLHRLLKLAVLDLSFNKITTAKALGQLVANYHSLLALNLVGNPVQANIGDDALRRAVTGLLPSLAYLNKQPVKPQRIAREVATDSIARAALSGSDSRSIRKRTSRRLTQSPRSSSLTRARGGGGGGSPTPRNTSRRR

SEQ ID NO: 55838 - protein, 65 aa, Zea Mays
MRTTGTSSNRPANHHNCPEFAMESDAREKKKNPHRPSPYDTAHRVRVLSHATDARRRPRRGVRPH

SEQ ID NO: 55839 - protein, 698 aa, Zea Mays
MAVYYKFKSARDFDSIPIEGQFISVANLKERIFESKHLGRGTDFDLMISNAQTDEEYADEATMIPKNTSVLIRRIPGRPRKPIVTEPEETKAAEDGVQDVMPTSGAFLGDSSMKYPEESEWDDEFGNELYISDSVPYQPVCQAVDAIENKVDEDSKIKALIDTSALDYSQIPDGYGSGRGYGRGMGGRMMAGRGFGRGLERRTPPPGYVCHRCKVPGHFIQHCPTNGDARYDVKRMKPPTGIPKSMLMQTPDGSYALPSGAGAVLKPNEAAFEKEIEGLPTTRPVGDLPPELRCPLCKEVMKDAVLTSKCCFRSFCDKCIRDYIINKSMCVCGATSILADDLLPNKTLRETISRILEAPPTSSTENVGSMVQVQDMESALPVQPKHRSPAVSAASKEEAKASTLVEESPDAESLNGTKATNIDASSSDKKALTVPDIAEGTLDSKKAKEDKPVEATPVAKDSQEKFPAGEQAVKKKKKKKPRVPGNAEEQWKNFQDFGTENFSGMPLGPTGAFNPYWGGGVPLPMDYMNAPFPGPMPYMGYPPGPFDPFGGGVLPQDPFMPPGYMMPGVPRDLSELAVNAMGINMGPPVMSREEFDPRKPEHRRRREMDRFNDRERERDRSRERERERERERSLERERERERERGRSLERERERVRELERSREGDRERQRGRDRDRDSRREARASPGAINDSSSMRRN

SEQ ID NO: 55840 - protein, 53 aa, Zea Mays
MRVVNGYQPNFFDAFNLTETGVSSALTRILTPFPPNDISKTAILPWLQAGPCN

SEQ ID NO: 55841 - protein, 206 aa, Zea Mays
MASVQVSGAGVGAAAFSVKGKASTGALRLRSTLTFGEVCPARRAFRGLVVRAATVVAPKYTTLKPLADRVLVKINSSEEKTTGGILLPTTAQSRPQGGEVVAVGEGRIIGDKKVDVSIQVGAQVVYSKYAGTEVALNDHSHLVLKEDDVIGILETDDVKDMKPLNDRVLIKVAEAEDKTPGGLLLTETAKEKPSIGTDMKGRNRVG

SEQ ID NO: 55842 - protein, 936 aa, Zea Mays
MLVRLGFVVVASVAALTLQRANSGARHSKDYVQARKRKDKANNSEHGEKEEEKEEVKTISGIINSARSLGDDDDDMLSEIESLLSGDIDIPIPSDRFDVNGRSRYNNAYMANEASEIEKLRSLVREMEEREAKLEGELLEYYGMKEMETDIAELQKQLKIKTAEINMLNDTINSLQAERKKLQDDVACGEVANKELEAARGKIKELQRQIQLEAGQTKGQLMLLKQQVIGLKAKEEEAGKKEAEVQRKLKKLRELEVEVLELRRKNKELLYEKRDLIVKLDAAEGKITESDVVANAREEINKLRHTNEDLTKQVEGLQMNRFSEVEELVYLRWVNACLRFELRNYQTPSGKVSARDLNRTLSPKSQERAKQLMLEYAGSERGQGDTDLESVVSSMPSSPGSEDFDNMSIDSSSSRYSFLSKRSNLMQKFKRWGRSKDDSSSLASSISGSPRRKPKGPLEALMLKNAGDGTAITTYGKRDPNDVLDDENVASSFQLMSKTVEGFADEKYPAYKDRHKLATEREKAIKEKAGQARAQRFGGGHSSALISSPKGALPPKLAQIKERSPAANAESSEQSSDNQNNTLVVSQMKLANVEKRATRVPRPPPPRSTAASGATSIASGVQTPRAPGAPPPPPPPPGKVGGPPPPPPPPGALPRNLGGGDKVHRAPEIVEFYQSLMKREAKRETSLGSISSNVSDARSNMIGEIENRSTFLLAVKADVETQGEFVESLANEVRAASFINIDDVVAFVNWLDEELSFLVDERAVLKHFDWPESKTDAIREAAFEYQDLIKLQNRVSTFTDDPQLACEEALKKMYSLLEKVEQSVYALLRTRDMTVSRYKEYGIPFDWLSDSGVVGKIKVASVQLANKYMKRVASELDALEGTEKEPNREFLLLQGVRFAFRVHQFAGGFDAESMKAFEELRSKMTTQASAPPISQG

SEQ ID NO: 55843 - protein, 689 aa, Zea Mays
MTEVHSRGIELQSAAESRNAEIEAQLQEALEAVGQKEAESRNLNEKLVALESEIESSMHVNEALKQEINAKLVMVDELQEKCSFISSEKEEVAEKLSIHEEKLEHLTEEHSRGLELLSVAESRNKETESQLREVLEKLAQKEAEVTDLTEKLALLEAENEKMTCLNEALKEVDAKLVMFDELQERFSSTLAEKEEAAEKLAVHERTISQLTEVHTRTLELHSVAESKNEEIGAQFLEALETISQKEGEVKESSSQKIKILEEQLAETHSKVEHFLTEKESLVQETSSLNKEFEVHQNKLNDLQLALAAALAEKEAAFEEIHSLCKTLDGMIEHKAELEIQVSSTIQEHEELKSKYQNTMEEKQMLSDKYETAKKELEDAIAKLEEEMNVDKSEKESHISKLERQITLSEIKYMEEIKTMQVETTEKNEALTAKMQEHTDLQHEKHELEQQLLEVRKELDGAYHTIVNQEEQASLREIKWDTFRIYSEDRLEAEQQRAEELELQVAALKQQLQEAEEEQVSLREVQWEGDQNHSLNELKSQRQYATDLEKQIEDLTQKLRSADAHYKQKATEERDKLAEITTEFSKLTHKVSKSVELEKKVQDLEQKLQLAYSKSDEQATDVLESRSREFSLDSLSSLVKQQDRTQAADKASPSPTLQEVQEPSGTMAFKFILGVALLSVLAGVFLGKRY

SEQ ID NO: 55844 - protein, 438 aa, Zea Mays
MNGLVFDVRPAQGFTLEESTGFESTTSFKQEEQDPQSSVFTSRDQRPLHEVIFACDDKPKLLSQLTSLLGELGLNIQEAHAYSTSDGYSLDIFVVDGWEYEADILQSALREGVDKIKYRAWPLVPSMSARMDHQPLEVSPSSDFVQIPADAVDVWEVDLRLLKFEQKLASGSFGDLYHGTYCSQDVAIKVLKPERVSVDMLREFAQEVYIMKKVRHKNVVQFIGACTRPPVLCIITEFMHGGSIFDFLYNRRGNFQLPDVIRIASDVSKGMNYLHQINIVHRDLKTANLLMDDQVVKVADFGVARVKDQSGVMTAETGTYRWMAPEVIEHLPYDHRADVFSFGIVLWELLTGKLPYEDMTPLQAAVAVVQKDLRPTIAVDTHPMLAELLQRCWQKDPALRPTFAEIVDILNSIKEAVRSSVHHKRHSCRSHSGRRRGC

SEQ ID NO: 55845 - protein, 93 aa, Zea Mays
MGRAPCCGKVGLKKGRWTREEDEILARYIEEHGEGSWRSLPKNAGLLRCGKSCRLRWINYLRAGLKRGNITEEEEDVIVKLHATLGNSAAINP

SEQ ID NO: 55846 - protein, 489 aa, Zea Mays
MTQQQKKERAMDIIHELGLERCQDTMIGGSFVRGVSGGERKRVCIGNEILINPSLLFLDEPTSGLDSTTALRIVQLLHDIAEDGKTVITTIHQPSSRLFHKFDKLILLGKGSLLYFGKASEAMPYFQSIGCAPLIAMNPAEFLLDLANGNTTDVSVPSELDDKVHMENHNLENNNSKIDYRPSAQDVHEYLVDAYETRVAFKEKKKLLAPLPISDDLKATITSSKREWGTSWWQQYSILFCRGIKERRHDYLSWMRITQVIATSVILGLLWWHSDPSTLKGLEDQAGLLFFIAVFWGFFPVFTAIFTFPQERAMLNKERAVDMYKLSAYFLARTTSDLPLDLFLPIIFMVIVYFMAGLKATATHFFLSMLTVFLSIIAAQGLGLAIGATLLDIKKATTLASVTVMTFMLAGGFFVKSVPPFISWLRYLSFNYHTYRLLLKVQYDPVPDILTTTRHMDSGGTEVAALVAMVIGYRVLAYLSLRRAKALGS

SEQ ID NO: 55847 - protein, 92 aa, Zea Mays
MKEITVVISNGSSPTHVDQKLIDGPNPNNRRKLFIPLILAVEYFLVVKGIRRAIHADIANGKVDDWEQRYRDLVGSRDLVEQKGSTSRNRKA

SEQ ID NO: 55848 - protein, 623 aa, Zea Mays
MAAPAVASPSRATPTDIPTAAPSPASPPRRLASAPPAVDASGSSSPASAHSGDQLSAPDASSPLLASRSEEYRLLFRLPPDEVLVQDFNCAVQENILLQGHMYLFLHHICFYSNIFGYETKKTIPLQEVTDVRKAKTAAIFHNAIEIVAGSRRHFFGSFLSRDEAYRIIVDGWEQHVSDARLLLERQETKSASSSEENGYVVLEGTKESKQDGDLSLPDRSVNSTAVSSSNADGGDSNINISKRFSEVEENGLEDNIVALNPFNLEPVDAPPSVPESYTMISESKFQVPVEVLFNFLLSDGAFGFVDDFHTKCGDKEFSCSKWRTDEQGGLVRDVSFLHPIKIYLGAKFGTCQEVQKLRLYKNRRLVIQTSQSIGDAPYGDHFTVEGIWDVEQDSLDENCCDLRIYINVAFSKKTIFRGKIEQSTKDECREVFSLWIKLGHDLLKQEYDRSKGASSTPDSGVQPGATTNEESAVEVAVPVVSSSHDESGARSLIPPTQDHQQRTGRDPSITSTSQELWGSLSSYMRSRQLGPVLAMSLVALIILMQVTIIVLLTRPPQVQMDPHGIWTGSSGYSKESIEWVQKRLSLLSEEMQLAEAHMETMRREFAWLRSYLERLQRTRGST

SEQ ID NO: 55849 - protein, 387 aa, Zea Mays
MLTIASTFLYALLTDRVLLVHVPAEQEGLFCEPFPVSSWVLPGSFPQNNPHKLHIGAPESYANMLKNNIVRNDDGPGAPASSSLPPYVYLHLEQFQLKLSDNVFCDEDQVTLSKFNWMLLKSDSYFAPALFLTPMFEAELAKMFPRREAVFHHLGRYLFHPTNRVWGIVRRYYEAYLARVDEKIGFQIRIFPEKPIKFENMYEQLMRCVREQRLLPELGPAEPPTNATADAGDGKVKAVLIASLYSGYYEKIRGMYYESPTKSGEIVAVFQPSHEEQQQYTSNDHNQKALAEIYLLSYCDKITMSAWSTFGYVAYSFAGVKPWILIRPDWNRETSDVACVRSTSVEPCLHSPPILGCRAKTDVDVAAVKPYVRHCEDVGFGLKLFDS

SEQ ID NO: 55850 - protein, 314 aa, Zea Mays
MSASTPPPPPQPLPLPRATVARLEAVLSIGAHLIPHPRKAASGGEDAFFANSDAGGVFAIADGVSGWAEKNVNPALFSRELMRNSSNFLNDEAVSHDPQILLMKAHAATSSIGSATVIIAMLEKTGTLKIASVGDCGLKVIRKGQVMFSISPQEHYFDCPYQISSEAEGQTYKDALVCSVNLMEGDIIVSGSDGLFDNIFDQEIVSIISESPSVDEAAKALAELARKHSVDVRFDSPYSMEARSRGFDVPWWKKLLGGKLIGGKMDDITVVVAQVKTVVVPEDEVQGGDTEEQKGNEQGAAAVVAYKMNDEEVA

SEQ ID NO: 55851 - protein, 302 aa, Zea Mays
MLGQLINRVSCHALDSSRTATDESICADLLDVRRIVPNSLRAIKHGWNEYKQQTVLPASAATVFLNFNVALAPGAIMTALLMHRGTSPSIVGAFSGLCSIMGLVATFISSSLVKRVGILKAGAAGLIFQASLLSIALTVYWAGSISQTTPLLIFLASIALSRLGHMSYDVVGTQIVQTGVPASKANLIGGMEVSIASLAELVMLAMAIIANDVSHFGFLAILSVSSVAGAAWMFCRWLTNPTDEQRELFMVDPLYQVQIVDEAGNNQENCRRLLAGGACWICNTVTMILRYSVTFRFNTGYT

SEQ ID NO: 55852 - protein, 871 aa, Zea Mays
MIQEAAVDSPLSQLPSQTMEGESSLSGQASEYEEAESDIYSGGAGHDSFTWVQQHENGTGPMIASSVFSSYTPALSIGNYHGLHATQNTSFYPVNQLNSPVILNGSSAMLGTNGCANQTDLPSWNSVIELDHEPVQMPDLQFPVPPDQGTSTEGLGVDYLTFDEVYSDGLSLQDIGATGTHGESYLQFSSGTGDLAATVNSFPQENDGSLEAAIGYPFLKTQSSNLSDILKDSFKKTDSFTRWMSKELPEVEDSQIQSSSGAFWSSEEANNIIEASNHEALDQFTVSPMLSQDQLFSIVDFSPNWTYVGSKTKILVAGNILNDSQITERSKWSCMFGEVEVPANILADGTLICYSPQHKPGRVPFYITCSNRLACSEVREFEFRPTVSQYMDAPSPHGETNKVYFQIRLDKLLSLGPDEYQATVSNPTLEMVDLSRKISSLMASNDEWSNLLKLAVDNEPSTADQQDQFAENLIKGKLHIWLLNKVGMGGKGPSVLDDEGQGVLHLAAALGYDWAIRPTLAAGVNINFRDIHGWTALHWAAFCGRESTVVALIALGAAPGALTDPTPDFPGSTPADLASSNGQKGISGFLAECSLTSHLQVLNLKEANMAQISGLPGIGDVTERDSLQPPSGDSLGPVRNATQAAARIYQVFRVQSFQRKQAAQYEDKGGMSDERALSLLSVKPPKSGQLDPLHSAATRIQNKFRGWKGRKEFLLIRQRIVKIQAHVRGHQVRKHYRKIVWSVGIVEKVILRWRRRGAGLRGFRSQEGSVESSSGGTSSSSIQNKSSGDDYDFLQEGRKQTEERLQKALARVKSMAQYPEARDQYQRIFTVVSKMQESQAMQEKMPEESAEMDMSEFKELWDDDAPIPGYF

SEQ ID NO: 55853 - protein, 344 aa, Zea Mays
MTVLRYLVQIGFLYLRYVADPKVLWMWYEPYLRDDEEFSPGSNGRKTTMGVYVRDLILGQYYFDSLLPRIPLPVTRQITANLEKMKLPTKLSGATGDSSRQGSEDTARRPPSVKASLSVSFGQRAPHRASTRDSSPVRRTVTRDGHRSSYSPSRRSGSREGPDHDRSDRELDHSSRDRERARDRSNRDRYHSSRDLDRDKDARDYHRHERDSRDREYYRSRHSEERRDDRRDHESSRHRRSSSRHRSRSRSRSRSRSRSRRSRSRSTSRRSLNEQRSSPFRDANKEKAATVSSNLAKLKDLYGDITAKKEDSDAEKLHRDSCAEEVIRLGGPRWRVIHHFLSTH

SEQ ID NO: 55854 - protein, 290 aa, Zea Mays
MQISQAKKKTGVIAPKRFVQRVKKQNELFRSYMHQDAHEFLNFLLNELVDILEKESSAAKDSPQSSSPEKAPNGPVQPLANGVKKEPPVTLVHKSFQGILTNETRCLRCETVTARDETFLDLSVDIEQNSSITSCLKNFCSTETLNAEDKFFCDKCCSLQEAQKRMKIKKAPHILVIHLKRFKYIEQLGRYKKLSYRVVFPMELKLSNSSDDVDTEYSLFAVVVHVGSGPNHGHYVSLVKSHNHWLFFDDENVEMVEEQTLQTFFGTSHEYSGNTDHGYILFYEGLGGKS

SEQ ID NO: 55855 - protein, 127 aa, Zea Mays
MTRRDNLHVVQPTTPVDQALELLVQHRISGFPVVDDDWNLVGVVSDYDLLALDSMSGNELADTSTNMFPDVDSTWKTFHELQRILSKTNGKVIGDVMTSSPLAVGMITRGNVVSAALKIKKKTEEGA

SEQ ID NO: 55856 - protein, 58 aa, Zea Mays
MVGRVLFKIALQSHLPERDSRARGQQLWHDFLQKHLSTVVDLETLKEEYLSVYSNCCC

SEQ ID NO: 55857 - protein, 376 aa, Zea Mays
MYPVPPLAFTENAYRQLNLFPEANSRLQQNGITNDNATEDGSEQDLQMHPLLFHYPRDVVSSYSHPVQNLINQSRKYDLFPFEKVQVERSNNQTTGSTKNGTVNANTIDFHPLLQRTEVDVHNDVPEYDSNLDYHQSDNNMSKVPVDDQSTAGQASTGPSERETSIDLNIHLCSPTVIKDSNDFRSSFSRSNVQDEVSRKDKSSVPGLEIVNSYFHHCIQEPNEESMQGIVMEQEELSDSEEDSQHVEFECEEMDDSEEEQVQGPEASPIQNKGISASVVCGEFHVSNDQSQIQQGSVQKDKQGASSMQKTQVPSRSVRAKLKPETAKRTGSRTSTSRTVETSRSKTRSSKVPQGQSSAEWKSNDSRRTRKIPAPR

SEQ ID NO: 55858 - protein, 676 aa, Zea Mays
MGPPFFLLFLVLTAAAVVSSAPRREAFRRDPGHPHWHHGAFHDVEDSVRADVRRMLHTRAEVPFQVPLEVNVVLIGFNGDGGYRYSLDGHKLEEFLKMGFPLHRPSCFETGEPIDIEHHIMYNVISAGQPELISLEKSLKEAMQPAGIARDSEYGRELPLFEVEATAVESIFQRLYSFIFDMEPGYPANDMDRPVPVAIFIVNFDKVRMDPRNKEVNLDSLMYGTIGGLTEQELKKQEAEYIYRYRYNGGGATQVWLSSGRFVVIDLSAGPCTYGKIETEEGSVSYRSMPRLSQIIFPRGLAAPSASSTQDIFIGQLGGAIATTIEHVIAPDIRFETVDMAVRLLVPIIVLQNHNRYNILQEGHNYSIDVQAIEREVKKMVHPGQEVIIISGSHALHQHEKLAVAVSKATRSHSLHETKSDGRFHVRTKTYLDGAILKEEMERSADVLSAGLLEVANPSLSSRFFLKQHWTDGEDDVKDSIKHRPLWESYMPKNNKGRRGTGKKKHGSLYRTYGTRVIPVFVLSLAGVDAELLMEEESLVWTSKDVVIVLEHNNEKIPLSYVSETTRQFALPSIAQRHILAGLASAVGGLSAPYERASRIHERHVVNWLWAAGCHPFGPFSNSSQISQILQDVALRTTIYAQVDAALRKIRDTSEFVQSFASEHLKTPLGELVKET

SEQ ID NO: 55859 - protein, 1553 aa, Zea Mays
MFEVPISSGNGSYPFPVEVPGNTRFLFSSKTRTLSKAIAKSVVYLLKPKSLAFEYFEKLINFLEQFYHPSNGGRWTYSLERFLRYLVVYFEKRLQHEQFVMAVEDHDQSYLGKEERSVFVKAILKLLDRGQYSKDNSLAETVSVATSILSYIEPTLVLQFVAKNFQRALETTTATHQLKNAVTSVAFSGRALLLCSLCSSQNDDSSVVDSFSDLVVASLSNALLGMDANDPPKTIATMQLIGSIFSNLAAVSDDVPILLQSTTLSNWLDEFFSRLFSVLHNLESSSPINEGYQSSFMSGTFLVDSPYYFCMLEILLGKLSKPLFNQSLKRIAKFVNANILPGATSEVGLLCCACVHSYPEEASVYLVKPILETIMSSFEGTPTTGYVGRVVADKASTKAALSPALETAIDYYLRVLAISISYAGPTLLNYKEELNHIITSAFQSPSWKVNGAGDHLLRSLLGNLVSYYPIDQYKPFTCQPIGNIIEPWGCSKAHQDREDEMLNFPPKWHDPSHDELSFANELLQLHFQSALEDLLTICQTKVHSDTGDEKEHLKITLLRIHSALHGVMSCLPEIRPSYKDGRSLEVESAFFIAGSAGSTVGSSEMREKAAEFVHIACRYLLKERTDDSILLSLVVRVIDALVNYGSLEYQEWSSHVQAWKLESASIIEPPCNFIVPFHAQGKKRPRWALVDKANLHSTWRCSQSSYHRYRMNADVSPSVPMINLMNDLLDLSLHNYETVRSYAGRSLTKLLKRWPSLISNCVLTLTGNLRDPKAPEHVVLGSCSILISQTVLRHLTTDSVSLSSFIMGILESSHHESLKCQKAITELFVTYNIRFSGISRSFFKTPENQADKPGFLSLISQINALGFETNGLHWRYNLMANRVLLLLILASRSESGIYSQMLAKIAGHFLRNLKSQLPHSRMLAISALNTLLQGSPHKTSAQNSKQPIDHPEDCNISSTEEILNEIIREEGFMNETLNSLSHVHIISDNDGSSKASYGASSFQSGSDKAITYFYFDFSASWPRTPSWISLLRGHTFYSSFARIFKRLIQQCGMPVISSLQSTLEEFLISKERPRQCVAAEAMAGMLHSDIIGNLECENNWLMAQLHKIMLAPSVESAPEWAACIRYAVTGKERAGTRAPVLRQKVLECLCTPLPHSMATSVLAKRYSFLSVALIEISPPKMSPAEKQYHVKILDELLDSMNHSSAQVREAIGIAMCVTTSNMRLSGLFGTGCSPQGLHGDVSMIEQTGNKYWSERLTDGANELAVSIQNSTQSKQLESTSDSAEDSMDDREQADAKRMETIFHFMIASLKSGRSSVLLDTIIRLVYPILSLQETSNKDLSLLAKSAFELLKWRILHRPFLETAITSILPLVSDPNWRTRSALLSYLRTFTYRHTFILSGSEKSQIWQTIEKLLVDNQVEVREHAAGVLASLMKGIDEDLSKDFRERSYAQAQHIFVARRRNLKFSVGTIHGAVLALTASVLSVPYDMPSWLPSNVSLLARFIREPPPIRSTVTKAVAEFKRTHADTWSIQKDAFTEDELEVLRDTSSSSSYFA

SEQ ID NO: 55860 - protein, 159 aa, Zea Mays
MMLMAYLSYMLAELLDLSGILTVFFCGIVMSHYTWQNVTESSRVTTKHAFATLSFIFETFLFLYVGMDALDIEKWKIVGQTYRHTLSLFLSLHCSTRRSFFWICIFYHVQPGKVYRFEQHHFSLGAGFKSCFCFPTILSIKFDQKTPNGKISFRQQVSL

SEQ ID NO: 55861 - protein, 309 aa, Zea Mays
MPIRDFMGGSHDSMVTLENRVRGLERVVEEMAREISLSSGRRGGGPALGFDSSPGRSSKHNGFHEYSNSKYGRSGDGRMGFAERYFSADAMASGTKNQSWRPDSEPWDSYAYSGSRSGMNVRRGLDSVSSDNRMARNERSNDQVGPRRGWDKGQGPFRFGEGPSARSAWRASKDEATLEAIRVAGEDNGNSRAAARVAIPELDGEALNDDNQGDERGPLWEAWTRAMDAVHLEDMDSAYAELLSTGDAELLVKLMEQTGPVVDQLSNEVANEVLHAVGQFLMEESLYDVALNWLQQICRFGLHLLCLKD

SEQ ID NO: 55862 - protein, 645 aa, Zea Mays
MIRCALPDNDIGYIIVTTTRISDVAEKVGGAYKLKPLSLNNSRELMYKIIFGNENRENTKDKEICLDEELAEVSNKILKKCAGVPLAIITMASVLACKARNEMEWYEVYNSIGVGIENNLDVGNMRKILSFSYYDMASHLKTCLLYLSMFPEDYKIEKDRLIWMWIAEGFVQYVKQGKSLFEHGESYFNELINRGMIQPIYNQAGMIYECRVHDMVLGLICSLSNGENFVTTLNGLGHGSPSNMIRRLSVQNGNESQAMTLQTRNLQQVRSVVAFPDATASVVTVLRSFRVLRVLDLQDCDLSQCCSLKYLGNLFHLRYLGLCNTSITQLPEEIVNLQLLQILDVWNNKMYCLPSTIVQLRYLMCLYIDGFTRVPNGIGSLTSLEELTFLGIYDSTVDIIEELGQLTELRVLHIVLFGEWNDKLVECLHKLKKLKYLYIKDRSGQLNIGGLDAWVAPPNLQILNTRSGCWFTTLSASAWMNPSLLQDLSLSTTVRELQQDDIIILGSLPALRYLNLMIVGEDLGVHNEIHGECIVGAGLFPSLVYCQLWGNVAPIVFQRGAMPRLRTLDFRLSVQEVRGINGRDGGIDLGLRNLPSLQKVWVHLDPEGANKAEVKELEAELTRAIKIHPNHPQLYGIQDEDADDE

SEQ ID NO: 55863 - protein, 495 aa, Zea Mays
MDTAEKMRWPFSDGSVTDLLDARSLHGSPDIKKKAQFHSSLVQKLALEKEMEGHVGCVNAIAWNSSGSLLVSGSDDTRINLWNYNNRELVHDIDTGHSANIFCTKFVPETCDEVVVSGAGDAEVRVFNMSRLSGRRPREISMEPTMVYQCHSKRVKKLAVELGNPNVVWSASEDGTLRQHDFRECSSCPRAGSANQECHNVLLDLRCGAKKSLADLPKHPLALKSCDISSVCPHQIIVGGSDAFARLYDRRMLPPLSSCQTKTKPPPCVKMFCPLHLANSKKTYLHLTHVAFSPNGKEVLLSYSGEHVYLFDVDPDNLSSVRYTADYVREQLFVPPFHKVPAKEHAKEKKTSVNTAPRNLSRVDMCKKFMQVATRSLEIGKNLMHGIEACSEVLESTEPDIDDDMRHGFLCTRAALYLKRKWKNDVYMAIRDCNRARKIDATSYQAHLHMAEALLQLGRLKEASEYAEAANRLLPPHCQLSQQVDDFKQRVASGE

SEQ ID NO: 55864 - protein, 1044 aa, Zea Mays
MTSLRTNVELEGEAGEPSYRRLVLRLVSHVIRLYSSSLVTESEVFLNMLVKVTRQDLPLWHQILVLEILRGFCVEACTLRLLFQTFDLNPVNTNVVENIVRALALVVASIQASDSSEETLAAVGGMFSSKAKGIEWSMDHDASNAAVLVASEAHTITLALEGLLGVVFTIATLTDEALDVGELESPKCESNSMECSGQLALLCMALVNSTWLTILDSLSFILTRSQGEAIILEILKGYQAFTQACGVLRAIEPLNSFLASLCKFTINNPNEGEKKSILQSPGSKRSETSMDQRDSIILTLKNVQALRTLFNVAHRLHNVLGPSWVLVLETLSALDRAIHSPHASTQEVSASVSKLSRDTSGQYSDFHILSSLNSQLFESSALMNIAAVKSLLSALHQLSSQHISGSSQLSVQQIGSISFSVERMTTILANNLHRVEPIWDQIAAHHLELANCSNPQLCNMALNSLDQSICLVAGSEKFQGISAAPHQFPESHLVKESETVSFEYAVLSPLMILYSSNKNVDVQMGALKILLHVLERHGEKLSYSWPSILHMLRMVTDASEKDLISLGFQSIRVIMNEGLATIPVQCLDECILVTGAYGTQKTDINISLTSVGLLWTATDFIVKGLVSKPIEQASHMNDDVQSCEMTEEANSKQVPPKLVDYSILFFSVFSVLQKLGSDDRPEVRNSAVRTLFQTLSIHGQKLSKSMWEDCLWLYVFPMLEHVSHLASTSSRDEWQGKELGTRAGKAVHMLIHHSRNTAQKQWDETIVLVLGGIARLLRSFFSYLQQLRKFSSGWVLLLSFIKNSILNGSKEVAIAAINCLQTFVGANCPKGNLESSYVKSVLDIYELVLQTSSNFKNDSTDKVKQEVLRGLGDLYVQAQSLFTGDMYLRLMAIMHLMIKTTLNPTDYDSELGSIPAVQRGILEIIPMLRPTVVLSPMWTHLLLELLCYLNGHEGPLQKNNEQTPDHNSQALVDGAKHALVERSNLNGGGTKLDMVGSGWGILFVEKLVPIIANLFLEAPPNERFSVSPEVIQGLGRYLLFMIYI

SEQ ID NO: 55865 - protein, 952 aa, Zea Mays
MELVGDHLHGSTLDLAWPPMTHNDDTTETQLAPYRRNMQDLLCDAGMIPYPEPFQSMYQKRRLGTLGLEWRPPSVNFAVGPTYNATTGEYQTIPIIDPDSEGEQDIMSGDSSGTSYSSGEIDADNPDSAHLRRSRRKKKKSEADLVTSSGRRVIRKRFLDDPGVATVSRPHRGRKSRNGCSSKKKRSPKSRGLRPRRRAAETALITFPKKGVSTEEDEDDSESFSDSELNTDSTEAEQLEWSGQLRTRREINSPFDIDDVTDPSQFTDNKENSGTGKKLVLRIPRRDLRTQFPLGSGKAECSIQDKAVKSLSLANHEPVEHELTIEPGHSPASKAELTIDGDLHDSSAVCSNNSIRWGEVKMRSSKRCKYSEPAGGLWSSSNNVALQDIEGSSSQQIPHEYGDGIQPSVVQNVQEVQHGTILDNIPENNSTDEHTRENFGDLEKIANNINAHADGVNDTVQVPNTSQPQLKVKFKSRGSADAVGNIMNSKHVKDSVQCGDDSSINQPRNADFYIVPKSSQECLDKSTSLHDSKKPYLDASKKYTAVYKRSKRKNKKKMDSDECPNEDSTSISNDDGGYQPAEYSPVAAASSRLRRSARKSFAYNINGTTQDDISEVKVSYGSHEASTSGRRVVTDVREGMWRQNSRSVGLRSARNKRESNSFLDTHPLGRRHQVSFKYSWLMLLEHEDSYRYIPQLDDEVMYLGQGHEEYLKQVQSSEFCPWNRIKGLKAVELCKIQGLDYATYRGSGESCYFLVERTRYEAAMERNWTHRDKCKVWWRDEEGQVGGTWWEGRVMAVTPKSPDFPESPWEKYVIQYKEDGSDHAHSPWELHETGSLWDPWKHPHMDLTVRDKLLSEMENLQEMSHRDQDHYGVFKLDKVAEKSDFINRFPVQFSIEVIKARLANKYYRTLGAVRHDTTVMLSNAESYFSKSSEMTKKIRKLSELLDQIFSSL

SEQ ID NO: 55866 - protein, 720 aa, Zea Mays
MHVIHGASRRPRRMLALGSNRASMHAHSLPSKRRKGKLTTRLREAFKKPAPSSPFQATQPQATAQRCVWVCVCARDQTPTSPHPRPIPTSPPPPPPHGLLPRGAGVGARAAGGAQPIEDIANKVLKMDGGSAEKIAGGEDEGTTSPVPEKVQVGHSPQYKVERKLGKGGFGQVYVGRRISGGTERTGPDAYEVALKFEHRNSKGCNYGPPYEWQVYSALNGCYGVPWVHYKGRQGDYYVLVMDILGPSLWDVWNSFGQLMTPNMVACIAVEAISILEKLHAKGFVHGDVKPENFLLGQPGSPDEKKLFLIDLGLASRWKESGSSGQHVEYDQKPDIFRGTIRYASVHAHLGRTGSRRDDLESLAYTLIFLLRGRLPWQGYQGENKSFLVCKKKMATSPDLLCCFCPTPFKLFLETVTNMKFDEEPNYSKLISLFDELIEPQHLRPIRIDGALKAGQKRGRLHVNPEEDEQPKKKVRLGSPANQWISVYNARRPMKQRYHYNVADARLHQHIEKGNEDGLFISSVASSANLWALIMDAGTGFTSQVYELSPIFLHKDWIMEQWENNYYISAIAGAMNGSSLVVMSKGTPYTQQSYKVSESFPYKWINKKWKEGFHVTSMTTAGSRWGVVMSRNSGYSEQVVELDFLYPSEGIHRRWENGYRITSTAATGDQAAFILSIPKRKLMDETQETLRTSAFPSNHVKEKWAKNLYIASICYGRTVS

SEQ ID NO: 55867 - protein, 725 aa, Zea Mays
MITFVDSAAMERERESDRCLDPQLWHACAGGMVQMPAVHSKVYYFPQGHAEHAQGPVDLPAGRVPALVLCRVAAVRFMADPDTDEVFAKIRLAPVRPNEPGYADDAIGAAAASGAQEDKPASFAKTLTQSDANNGGGFSVPRYCAETIFPRLDYSADPPVQTVLAKDVHGVVWKFRHIYRGTPRRHLLTTGWSTFVNQKKLVAGDSIVFMRTENGDLCVGIRRAKKGGIGGPEFMHHHHQQPPPPQGGGYAGFSMFLRGEEDGGKMMAAAATRGKAARVRVRPEEVVEAANLAVSGQPFEVVYYPRASTPEFCVKAGAVRAAMRTQWCPGMRFKMAFETEDSSRISWFMGTVSAVHVADPIRWPNSPWRLLQVAWDEPDLLQNVKRVSPWLVELVSNMPVIHHLTATPFSPPRKKLCVPLYPELPLEGQFPAPMFHGSPLLGRGGAGGPMCYFPDGTPAGIQGARHAQFGISLSDLHLNKLQPGLSPHGLHRQLDHGVQVQVQQPRIAAGLIVGGHPAARDDVSCLLTIGTPKSKKPPSDVKKASTAAAPQLMLFGKAILTEQQISLGGGNVVPALAKKSPSDDDDDVAERTVSNSDVSSPGRSNQDGTSSGGGPAARACWQEEECNNRAAGSEDDLLGHCKVFMQSEDVGRTLDLSAVASYEELYQRLADMFGVDKAELTSHVFYRDDASGALKHPGDEPFSEFTKTARRLTILTDESSDSLAR

SEQ ID NO: 55868 - protein, 91 aa, Zea Mays
MNSIISGRMSQSSELAHPIEKHSIGCMSAPWTGDGCAELLEGKGSLYSCLVISVISTEVTAYPRGLPRHVNPSRGAGTFSLGLELVIKDIW

SEQ ID NO: 55869 - protein, 178 aa, Zea Mays
MFDVSSSDEADVDSYTGEAGGSKHQLFLNMQALKAKLSGLVYSLSMEAGGRGADKKNLNDQRDLFQRISDFIKSGECPEESLRISGKNGILRVTSWRESIQLNYMRRFLGRGFLKHSQDNDLLHEVFDIKIDRTENMSATEKKMFRSGEEKGRALKLNKERRLAQERKQQNILNEQYG

SEQ ID NO: 55870 - protein, 768 aa, Zea Mays
MDIDYMDGFRCFTFDSIRFPDPISMVDDLHSIGCKAIWMLDPGIKKEEGYFVYDSGSKSDVWIQKADGSPFVGEYASHSLHSGEVWPGDCVFPDYTSEKTRAWWASLVKDFISIGVDGIWNDMNEPAVFKTTTKTMPESNIHRGDADIGGVQNHSYYHNVYGMLMARSTYKGMEMGNAAKRPFVLTRAGFIGSQRYAATWTGDNLSNWEHLHMSLPMVLQLGLSGQPLSGPDIGGFAGNATPKLFGRWMGVGALFPFSRGHTETGSIDHEPWSFGKECEEVCRLALLRRYRLLPHIYTLFYHSHTKGIPVATPVFFADTQDPELRKVETSFLLGPLLVCASTLPNKGAHEYAHKLPKGIWLSFDFADSHPDLPVLYLQGGAILPVGLPIKHVSEASLEDDLSLIIALNENGKAEGVLFEDAGDGYAFTQGDYLLTYYIAELHSSVVTVKILKSEGSWKRPKRNLKINILLGGGAMISTDGVDGEVIHLTMPSESVVSSLVATSEFEHKKRMEMIQPIPDIEEPSGQEGAELSKIPVDLKSGDWFLKIVPWIGGRIISMAHIPSDSQWLHSRIEINGYEEYSGAEYRSAGCTEEYKVIRRHLEQSGEEESICMEGDIGGGLVLQRQISILKDNPKIVQIDSSIQARSVGAGSGGFSRLVCLRVHPTFTLLHPTEVVVAFTAINGSKQEISPEAGEITFEGDLKPNGEWMLVDKCVGLSLVNRFNPREVSKCFVHWGTGDVNMELWSEERPVSNETPLRICHQYEVQQTT

SEQ ID NO: 55871 - protein, 100 aa, Zea Mays
MKVLQDLVPGCNKVIGKASVLDEIINYIQSLQCQVEFLSMKLEAVNAQANQGVEVFPAKDTYNTAPGLTFDTQTSREYAQGTSTSEWLHMQIGSGYERVS

SEQ ID NO: 55872 - protein, 330 aa, Zea Mays
MKQIFKRLPQNRQTVLFSATQTPEVEKFAKLSFEKNEESKKKPVYVGVDDDKSKATVEGLQQGYCVISSDKRFLVLYAFLRKKRNKKIMVFFSSCNSVKFHAELLNFLGIECSDIHGKQKQQKRTTTFFSFCKAEKGILLCTNVAARGLDIPDVDYILQYDPPDEPKDYIHRVGRTARGEKGKGSALLFLLPEELKFLIYLKAAKVTLTEYEFNQKNVPNLQSQLENIVGENYFLNQSAKEAYRSYVLAYDSHSMKDIFNVHQLDLQKVAASFGFKNPPKVNLDLDSSAAKHRKKMRRVDGGKRHGISASNPYGRKDKGGAGDKRQLARF

SEQ ID NO: 55873 - protein, 100 aa, Zea Mays
MLGLEEGRGVKRPFYTSPDELLEEEYYDEQLPEKKRRLTPEQVHLLERSFEEENKLEPERKTELARKLGLQPRQVAVWFQNRRARWKTKQQRRRRSRSGR

SEQ ID NO: 55874 - protein, 81 aa, Zea Mays
MKTKTHRRTNVEGRCARSKTLNMRGSCLFSLASSFNLEESMMTRSSEPIQSTALSFAGVVLWMYKFRGWLGRCATEFVAQQ

SEQ ID NO: 55875 - protein, 94 aa, Zea Mays
MTRILKVVRRSSHEAAHFYGWPGSGRSSIYGRHGRMAYPRAVIPGGSFRGRAPMKAGARSLQWKREPSGTDSSAGAKTDMSVAFSSEQVLPRAT

SEQ ID NO: 55876 - protein, 131 aa, Zea Mays
MISSQSGPGLLFPKGGWENDETVEEAAAREAIEEAGVRGDLVQLLGFYDFKSKQPEATCRAAIFALHVKEELASWPEQSTRQRSWLTVPEAAERSRYPWMQEALVTGFSAWLENWRNGGGGGGGCVDRTER

SEQ ID NO: 55877 - protein, 1072 aa, Zea Mays
MEDDDLMRPRYRSSKSKGGNNAAHNEVSARPKRQKLSNSIPRREGLRPRRSLRGQRLHPYHESEDDQESSDEQGAEDQRENGNEIEEDVGDEEEVDGGDEAEGDGDDEDGEEEQEGRRRYDLRERSEVRRPSPRKEGKHRPQSPRRVLVHGIGPKNSKYLKKGGSRMHKRPRFSLPDDSDDSLLVDEPDEGPSMPWMRSGRGSMPWLMGGLDMHSPAAWGLSVGASGWGHQGDTSTSLMPGVQTAGPSSKGGADIQPLQVDENVSFKDIGGLSEYIDALKEMVFFPLLYPDFFANYHITPPRGVLLCGPPGTGKTLIARALACAASKAGQKVSFYMRKGADVLSKWVGEAERQLKLLFEEAQKNQPSIIFFDEIDGLAPVRSSKQEQIHNSIVSTLLALMDGLDSRGQVVLIGATNRIDAIDGALRRPGRFDREFYFPLPGYEARAEILDIHTRKWKDPPPKELKMELAASCVGYCGADLKALCTEAAIRAFREKYPQVYTSDDKFVIDVDSVSVEKYHFLEAMSTITPAAHRGSIVHSRPLSTVIAPCLKSHLEKIMEHISDIFPFLSSIDFSKFSALSYGSSIPLVYRPRLLICGGESVGLDHVGPAVLHELEKFSVHSLGLPSLLSDPSAKTPEEALVHIFGEAKRTTPSILYIPQFHLWWDTAHEQLRAVLLTLLNELPSNLPVLLLGTSSVVFTDLEEECASIFSSRNVYQVDQPSFDDRLRYFSILFESLLSFQMEESRNKSKKQKSAIDLPKAPKEVEGPKVSELKARAEAEQHAVRRMRMCLRDICNRILYNKRFNVFHFPVLEDEVPDYRSIIHKPMDMATVLQRVDSGQYLTRAAFIKDIDLIVSNAKVQGMLSQMDPSLVSFCDKIASQGGPLQAVDDEDRAILQAAPVAQLVSGTRISARLRNVQPEVNLSQSYEVLRRQKKSAENEQSMTRDEKSPEDVDLSKPTDAEEAAKEPESNGTTKEANDSPAKEPEVSTSPEPMESDNGKIAAATGDDLLEQLEALKQRFMELTASYGVPQLERLYSKIMKGAIELTSKESNEDHRRLVVRYLWTFVENSNNF

SEQ ID NO: 55878 - protein, 721 aa, Zea Mays
MPVSPRRHLRRIARRVRAMLPFAAEPEVSDGDAAAGADRRAWEPPFDASSPAPPMSYPITGLAALASRAYLSAEANFHLPFNRASVPAPASPLPQRRRVLVCHDMEGGYRNDAAPQGGDKPDAYALWHWHLVDVFVYFSHYLVTLPPPCWINAAHLHGVKVLGTFIAEWDEGVKICKEMLATEASAQMYAERLTELAHTLGFDGWLINIEVNLDVHFIDNLKEFVKHLTMTMHDAVPGSLVIWYDAITVNGDLDWQDKLNKYNKPFFDVCDGLFSNYTWKENDPQDSATVAGDRKYDVYMGIDVFGRNTFGGGQWTTNVALDLLKKVDISAAIFAPGWVYETKQPPDFQRAQNHWWGLVEKSWGILRSYPEQLPFYSDFNQGHGYQVSVEGLQISNDSWNNISCQSFQPMLKYTRDQVHLQAYTDFKAEPYSGGNCLTVKGSLQQNIIFSEQLFNGGLAMEDGPVHLFYSIRANASSALGLSLDLSSRNKQGTSKILVAEDIATFTRKKQNHKYGSYVKADKVELHAPDNHGWVLYKATVSSSAGHTLTGINIVCTLKFTGEISPESEDGSILVEDVDGTSLYQASLGHLSIRNTDKNTEFPPAESWITEGDYISWSKCSNGSELVNLKISWKLKNPDQPQPPFSKYNIYVEKLTADSDLKVPSPKSYLGVASVDAFYVSGLEVSNEVTGLKFFIQAFAHDGSWQELEECPKFFLFPVHSE

SEQ ID NO: 55879 - protein, 202 aa, Zea Mays
MGPTKPVRTVEGLGHGPPVSPSSNYAPLAVPLRSLPCSRLVVPNRRRESPDPSSTTSPVVSGPARGRCLDCPRPVMDRAELTTEQVLKRDIPWEHYMSTKLISGTCLQLLRRYDHKPESQRAPLLEEDGPAYIRVFLNILRSISKEETVEYVLALIDEMLATNPKRAALFYDQSLSGEDIYEPFLSCYGKATGLYKKKVVRY

SEQ ID NO: 55880 - protein, 89 aa, Zea Mays
MAGEDCRSGAEMDALVRRLKLHRPSPSPYDPDPAAAPVPATAGDGELFRPRRAAVLVCLFRGDGGELRVILTKRSSSLSTHSGELLVGV

SEQ ID NO: 55881 - protein, 445 aa, Zea Mays
MASAPFPPVAASAASAPPRLAPRHPFAAAAAARRSSLSFRPAARRPVLPLRSSAVAANTLRCTHRRAVSSRSRRRAQELGAAPALAASTWGVGEEKGGCLSCFPKSRRGRSGLARFAPCALPHASGLSFRSRLSGSKVKPSHILHAAGPDEPHVASPTWSDTSLDTRDMDHAISKEELEDVLNTPLPEHPKLIRGQLKNGLRYLILPNKVPANRFEAHMEVHVGSIDEEEDEQGIAHMIEHVAFLGSKKREKLLGTGARSNAYTDFHHTVFHIHSPTKTKELITQSKLDELKLQHNPSFVPLTKEENAVKVFDSETGISQRRLSNGISINYKITQNEARVGVMRLIVGGGRATEDSESKGSVIVGVRSLSEGGCVGNFSREQVELFCVNNLINCSLESNEEFIFMEFRFALRDNGMRAAFQLLHMVLEVCRAIATFTAEVDSSVS

SEQ ID NO: 55882 - protein, 80 aa, Zea Mays
MTEASFCTQRRKLVYLICISATARRWPLRRPRRAHASHQTGSPDFLSRNTTVQESPGGRRKPLAFVQKLVGVRYDDDDDE

SEQ ID NO: 55883 - protein, 397 aa, Zea Mays
MILGFAEGFPTMLKGEIAMFKMQPKIHYAEDDCPVATPDGFPKDDELQFEIEMLDFFKAKVVADDLGVVKKIVEEGKGWETPREPYEITARITARTADGKEIIPSKEEAYFFTIGKSEVPKGLEMGIGTMSHKEKAIIFVSSTYLTKSSLMPQLEGLEEVHFYIELVQFIQVRDMLGDGRLIKRRVFDGKGEFPMDCPLHDSLLRVHYKGMLLDEPKSVFYDTRADNDGEPLEFCSGEGLVPEGFEMCVRLMLPGEKSIVTCPPDFAYDKFPRPANVPEGAHVQWEIELLGFEMPKDWTGLTFEEIMDEADKIKNTGNRLFKEGKFELAKAKYDKVLREYNHVHPHDDEEGKIFANSRSSLHLNVAFCYQKMGEYRKSIETCNKDCGVGEMEPGVQY

SEQ ID NO: 55884 - protein, 237 aa, Zea Mays
MLKAKKYDFVQKFYEKMQKNGVPPRAITYKVLVRSFWEQDKINEAVEAVNDMEQRGVVGAASVYYELACCLCNNGRWRDAMLQVEKLKQLPLTKPLEYAFTGMILASFNGGYIYDCISIFELMKDHCMPNIGTVNVMLKVYGHCDMFGKAKDLFETTKACFLNSQTYIHEHSSFKADTYTYNSMLEASASAQQWEYFEYVYREMALSHHCLDQSKYSWLLIKACRAGKVRVRALPQK

SEQ ID NO: 55885 - protein, 738 aa, Zea Mays
MMFLRHRVTLGYRNHKNIVMRVSSNVSEDDDPSLLVNGHFDSPLGSPGAADCGSCVASMLELSRLLIDSGWVPPRPVIFLFNGAEELFLLGSHGFIKTHRWNRTIRAFINIEASGSGGTDLVCQSGPGSWPSRVYAQTAKYPMANSVAQDMFGIIPGDTDYRIFAEDITNIPGLDIIFVLGGYFYHTSYDTLENLLPGSIQARGENLFNLVKAFTNPMLLKENEISNKAAKDGIEDVGAVFFDYLTWFMVFYSRDISLILHSLPIAIFLLVPLFLKFPNITLMSWFVTLLGFMRGMVLHTFGVILAIFIPALAAALRLLFTKNAMNWFAHPYLAFLMFVPTSLIGLLLPRLTWGLSEQAHFWGAFGLYSLITMVYTLAGLSGGFLTFFISMSMLLGRFVSRIIRKQWSQQSPRSLVAYVLPMTPCLLYGLYYGGFLIQFLIEKMGMMGSLPKPYGYFVPDVIVGAVVGLVVGWCFGPLSPVASRWLSKTSIIHGFLQITVVALAISSQLFPYSTGAPKRVVLQHTFVTDANNIVDSSYGFSVVDSNSLEFLFNNAPEAAKWLKDNSELSFEEKYRSDRSSWLALYPVPFLFSGSLKFQAQTEEIKKYYQHFPQLAVQEIWDNNGQRRVHLKLALGSLSEIWTSVLNITGPLSNWSFADNMLPAPQTVSGGPPSYICRLSGKSDVDWSFWLEANSSESLRVDVAVLDQYLVDSTKKLKSLFPSWADLTAFTTFFSTYHL

SEQ ID NO: 55886 - protein, 373 aa, Zea Mays
MQIFEESGNSDIEGVDSSNACYGGTAALLNCVNWVESNSWDGRYGLVVCTDSAVYAEGPARPTGGAAAIAMLIGPNAPISFESKYRASHMAHVYDFYKPDLASEYPVVDGKLSQTCYLMALDSCYRQFCNKYEKIAGKQFSICDAEYFVFHSPYNKLVQKSFARLYYNDFLRNCSSVDDDAKEKLQSFSNLTGEESYQSRDLEKASQQVAKHLHDIKVQPSTLLPKQIGNMYTASLYAALASVLYNKHDSLNGQRIVMFSYGSGLTSTMFSLRLNNGQHPFSLSNIASVLDVTEKLQSRHETLPEKFVETLKLMEHRYGAKDFETSRDTSLLQPGTFYLTKVDSMYRRFYSQKLSEETGGGKTKCCNGLANGH

SEQ ID NO: 55887 - protein, 80 aa, Zea Mays
MGSSFVLSWSALSRNESISLLSFPNKAAEDENTDVVLDNVLRRSIFLVCEVSANENGATEEGTRTTEKIRCAPKCVSQSG

SEQ ID NO: 55888 - protein, 351 aa, Zea Mays
MRLHAGARLALLLARRSLSSSPRIPRVHTGIRSEAPSRSSPFYPPSSARRSFHGTRPVAARDYYDVLGVSKSASQAEIKKAYYGLAKKLHPDTNKGDADAERKFQEVQRAYETLKDEQKRSLYDQVGPDQYEKTASGGGGTGFEGGFGNPFEDIFGGGGGGGGMNDFFRNIFGDRDFRGRDVKVALELSFMEAVQGCSKTVTFQTSVTCEICGGAGVPPGTTPETCLSCRGSGFIFMQTGPFRMQSTCTKCGGSGKTVKEFCKACRGNKVVPGRKSVRLDILPGLDNEDTIKVVRSGGEDPDGRPGDLYVTLEVREDPVFRREKGDIHVDAVLNVTQRYTSTYKRKITCHC

SEQ ID NO: 55889 - protein, 269 aa, Zea Mays
MTEMTTAERELDANTNYDWNRIQESGKDAELLFGPGYTGLANLGNSCYMASIMQVMFSIHPFISRYFEKQSLKAAFATAPADPTVDLNMQLTKLAHGLLSGKYSAPAKEGQEGIRSRMFKSVITANHPEFSSMRQQDVLEFFLHLIDRVEKANPGDRELNPFSGFKFVVEERVQCPSGKVSYNKRSDNVLSLSIPLHEATNKEQLEAFNEKKAAMNLDGKEVSNEDIVRPRVPLEACLSSFSGPEEIPDFYSTALNSKTTVTNWFHYLS

SEQ ID NO: 55890 - protein, 175 aa, Zea Mays
MQSSGNTPSVVNSSAEGEMIEPAVDEDAQSSLAQQVDTAVPDEKAQLSTDQPSDMEVSEPSLDEHLVQDENSSLGGKDSDGTLNASKPPKPGKAPSPEKMKYWKEHGFSSLIVAAPGHEVERLVADMLPLLSYSAPFAIYHQHLEPLAKCMHSLQLSKMAIGLQLSEPWLREYQI

SEQ ID NO: 55891 - protein, 829 aa, Zea Mays
MLLRMYVRWGEKQRYKTRVVEKSPGEQAGIKSATVELEGRYAYGYLSGEKGTHRIVRQSPFNAKGLRQTSFAGVEVMPLLPEESMAVDIPEEDLEISFTRAGGKGGQNVNKVETAVRMVHIPTGIAVRCSEERSQLANKIKALSRLKAKLLVIALEQRASEIKQIRGDIVKAEWGQQIRNYVFHPYKLVKDVRTGSNLLVAEDDAFNRNRRECARRLISFHTLALESKQKAVYRKYSKPKLGFVALQSPDKKLLSGGMFYWYKDPIVGPGFSKMHFIFRCIFRSPVPQVNRKSSWVIAVSDSSAHRASNASDSCVNLPPFFWASLVSNEVHWRFAIYVPWHRTGTYLLYDAAAPPEKATKRPLRDSCPYPRMHAKSYRKYVLRSLDLGPPSQHRWSGAEFWEASSPAKKVTGKGSSECIAAIMGAASRLVTYVPLGFGLRSCNIKATELRPRFTQHSSSQVEPPAPQPPGGQDSRDRESMAAAPMVVPRVKLGSQGLEVSAQGLGCMGMSAYYGPPKPEPDMIALIHHAVAAGVTLLDTSDVYGPHTNELLLGRALRAAGGVREKVQLATKFGIRADADDGAWEIRGDPAYVRAACEGSLQRLGVGCIDLYYQHRIDNRVPIEVTVGELKKLVAEGKIKYIGLSEASASTIRRAHAVHPISAVQLEWSLWSRDVEADIIPTCRELGIGIVAYSPLGRGFLSSGPTMVDKLSDQDFRKELPRFQPENLEKNAVIFERVNAMAARKGCTPSQLALAWVHHQGADVCPIPGTTKVENFNSNVAALSVELTPQDMAELESYASAGVQGDRYHDFLNTWKDSETPPLSSWKADE

SEQ ID NO: 55892 - protein, 541 aa, Zea Mays
MVTAETGQFKDQLWRTFRSIALTFLLISGIGALIEDRGISKGLGLNEEVQPSIESTTKFSDVKGVDEAKSELEEIVHYLRDPKRFTRLGGKLPKGVLLVGPPGTGKTMLARAIAGEAGVPFFSCSGSEFEEMFVGVGARRVRDLFAAAKKRSPCIIFIDEIDAIGGSRNPKDQQYMKMTLNQLLVELDGFKQNQGIIVIAATNFPESLDKALIRPGRFDRHIVVPNPDVEGRRQILESHMSKILKGDDVDLMIIARGTPGFSGADLANLVNVAALKAAMDGAKSVTMNDLEYAKDRIMMGSERKSAVISDECRKLTAYHEGGHALVAIHTEGAHPVHKATIVPRGVALGMVAQLPDKDQTSVSRKQMLAKLDVCMGGRVAEELIFGDTEVTSGASSDFQQATAMARAMVTKYGMSKHVGLVSYNYEDDGKSVSSETRLVIEQEVKNFLENAYNNAKTILTKHNKELHALANALLEHETLTGAQITNILAQVRNKQQQEHTVEAPQRAPASPASPAAAAAAAAAAAAQQAAAKAKGVAGMGS

SEQ ID NO: 55893 - protein, 437 aa, Zea Mays
MDGQAPPLLDAVVLEPLAVGDELHPRRPVEVEDAPAAAPPSGMDGQVPPLYNVTRDPLTVSDELQPTGEVVDDALLVAPDIVKGEVMEDDILPVATDIINDAASECPEAGSDGVVLTDELRNRIVKQVEYYFSDENLPTDEFLLNYVKKNNKGFVPIEIIASFRRMKKLVQDLSVIEAALRTSSKLVVSSNGKRVRRLHPLPHKELKDSKKSTVLVENLPPDFSMESIQEKFATVGKVVNITINDPESVKEFSTAKKPDFNLSFKAHVLVEYEAVEAAEKAVTALSDESNWRTGMKVRLLSKQSVMGPGKYKKPSKENQDAVSKMIDQNQHSKEDQLKTLEKISGADAVGITKDRDNLKPVFITETEHQDQKPNARGRKGWYKGQGQMQQNANKQGSCGSESLNKPISGPRMPDGTRGFTLGRGRSLPLQKSEKAEE

SEQ ID NO: 55894 - protein, 121 aa, Zea Mays
MISSGNFQLRRENRGYPGYQSLIHNLVLCVINYYGLKWIYLQSVSQLDYDILSVALRVVYVCIFRVPMYKEAVLIEVSVPRFPVQSFHRCFRLHICIFCREHQFLRHHLCIMRLLPSSVIL

SEQ ID NO: 55895 - protein, 857 aa, Zea Mays
MAATAGASDDGGSVGGGGGGERMKLLCSLGGRILPRPGDGTLRYAGGDTRIVSVPRGVSLPDLLGRLADAYGGATGPHFAVKYQLPDEGLDALISVSSPEDLDNMVEEYDKLSGASPKLRVFIFPILDAAGGSGAAGGEDLETGNFDSGLRYLEAVNGIVRKDSIASLSSTQCSDGGLPPPAPSGGGGPGSPAALSPTSTSSNDAARSNITGAGAAPPPLVDVFSNAAPAPVHVKPQEIGAEGRAPQANPHPHPEAATNTHPEAARYRQPLSQLPPLPPVFMNDHRDAIQGLNQQLPGNGARFDDCHMCLKALPHAHSDPVVNEYGNEVHGGAAPEPGPVFMSLRPEDVARMMIPERGVQPPMGAYGYTHMHPVPQERMYVPKMEGVTNSVFIDPTGLHQHVYVQQQQQQQQMPPQQLPSTYGFSHIPVISSEKDRVVSPSSAHNDVANSHHQFMQQSQQQLPSGHGMPQYPVKPTSPSNPLAGEGSVSGNSRHNEDGQVYRDNMPPVAPVAVPTYMANVDRMMDSLRMSPSEVSGSTEQRKHAMSPDSGLPQNAVPDYSQGHPENSISTWPDTRANDVHPSNTNTFFDVSEPKVLLQTESAPPPSVASSYLHNVQHVNMSHMPHMVSIGGPYSSYVVATVGPGGLPQSTYGIDMIYPNATVNPVTERRDVPPEVYHKEAPHEVVAPPNTVQLPTAALANHATNVDQAAAHALPPRPKRVASRENISPKDPHPHNSLLNCKGPDLNIPAEDVSLQKQSDHKGDDISNPDLLSMDDGLATSKAQSSEPQPPLVNEGVGAITNKVEGEVHPNEVSKSRPADWISGFPASDGRLQIIKNNDLEELQELGSGTFGTVYHAV

SEQ ID NO: 55896 - protein, 800 aa, Zea Mays
MAPHPQEDKSDRHSSGAGASREQERRPSKAWGILIFGLIGVTTASFAITQVRKSMDWFYTQLNKVQSTSSWTWRYTSNNSSRGSFSEEAKKRYYQRMQQEYEEEQERVQRIRHMQSVFNRERNKFGRGYESWRENGPPRGYNYIPRDDWYWQTDTSHSEHKNRRTYTPAGPRVYPMSHHYAVLGLDRSRATPYTDAEVKTAFRTKAMEVHPDQNQNDRDAAEEKFKEVVKSYEAIKSERKNGEGKDVVAKAKTGSGKTFAYLLPLLHELLKLSSEGRIRKPAPNAFILVPTRDLCHQVYNEALSLLELCTCKLRVVQVTASMSDKDITVALSGPPNILVSTPACVATCISKGIIRGPAVKESLSMMILDEADLLLSYRCEVDLKALIPHIPRSCQSILMSATSSSDVDKLTKLLLHNPFVLTLSEVGQAKDDVIPKNVQQFWISCDAKDKILHILALLKFELIQKKVLIFVNSIDMAFRLRLILEKFGIRSAVLNAELPQNSRLHIIEAFNARLFDYLIATDDTKTKEKQTNEENKKEATLSRKRKKQTNKENQKEQKVSRKHLQQTLDAEFGVVRGIDFKNVFTVVNFDMPLDATGYVHRIGRTGRANKTGASISLVSPKEDSTFKEIEHMLQDVEKKDMDCISPFPLLTKDAVESLRYRAQDVARSVTTRDVQEARRQDIKNEILNSEKLKSHFEENPTDLDLLKHDKLLCNKEIPAYLRDVPDYLIDPKTKEASNAVKLSRAAMHIDKPQRRKRQGFKGGSGKSRDPLKTFSAEGKRGRRRKEREGEPDRRKKSKKA

SEQ ID NO: 55897 - protein, 506 aa, Zea Mays
MLANMCACLSKEIQLVYYRKSGKLECLSVKATISKHLVICCHAESPASMEDFPLWKFENQVETLPTKDTTLAFSGQKLIQVDEPDAQVDLVLNSAGPALVGELFTLPVIIESKGHAVHSGELKINLIDARGGGLLLSPREAEDSESHHVELLGVSTVSEDKESKEEADSIRKIQYSFGVVSVPTLSVGDSWSCKLEIKWHRAKSVMLYVSLGYSLGSSEEEALHRLNVHRSLQIEGQIPLLVSHQFLRSFRREPLLLSGIRSLGSDDKKCSLAMNESNMLIVTARNCTEVPLCLHSMTIQPDGDSEQLCSVQQISGISNRHAIVAPREEYKGIFSVNPRAISTNFRLGEICLNWSRDSSLGEDQDRLIIMKVQLPEVNIEEPPLVVGMECPPYAILGIPFTIYVKIHNSTSLLQEIKYSLVDSQNFVFSGAHNHAAFILPKSEHTVSHKFVPLGSGSQQLPRITVTSVRYSAALTPSASAATVFVYPSEPKFNLETSHSTSDEVVS

SEQ ID NO: 55898 - protein, 1153 aa, Zea Mays
MTVPTKDDSQSGTVADTVPLPTYRSLAAPVRKPVDKFALLPAFLKVRGLVKEHIDSFNYFVNKGIKKIVEANNRIEARNDPSIYLRYLGVHVGMPSVHVEYNIENITPHFCRLTDRTYSAPIKVHIEYTVGKQHEVRRKNNFIIGYMPIMLRSHACILYEKDEAELAKYGECPLDPGGYFVVKGTEKVILIQEQLAKNRIIVDTDSKGRVIASVTSSTHAIKSKTVIFMDKGKIYLQLNQFNKPIPIIVVMKAMGMESDQETVQMVGRDPRYGDLLFPSIQECASERIYTRQRALQYMDEKVTYPGATNQKEGRSYSILRDVFIAHVPVKNGNLRPKCIYTALMLRRMMDAIVNSDTFDDKDYVGNKRFELSGQLISLLFEDLFKTMNSQAVERMNKNSDKTHSSPLDFSQLIMQDSITFGLERAISTGNWDIKRFRMHRKGVSQVLSRLSYMASLGYMTRITPQFEKTRKTSGPRALQPSQWGMLCPCDTPEGEACGLTKNLALLSHVTTDQEEGPLIYLCYSLGVEDLLSLSSEEIHTPGSFLVMFNGLILGKHKDPQRLVIDLRNLRRSNVIGEFVSIFINEKQHCVHIASDGGRVCRPLIIADMGISRIDETHMEKLRHGTCGFDDFLRDGLIEYLDVNEENNALIALYEHMDQDDVERSSITHIEIEPLSILGVVSGLIPYPHHNQSPRNTYQCAMGKQAMGNIAYNQLFRADSLLYLLVYAQRPLLTTKTIELVGYDKLGAGQNATVAVMGYSGYDIEDAIVMNKSSLDRGFGRCIALKKYTVLKDNYGDGVSDMIVEPQRDNGVLIKQNMRALDEDGIAGPGQIIRNHDIYVNKRTPKNTSKGIGRALRESDYKDSPALYKGVDGETTVVDRVMLCSDTNDKLSIKCIIRHTRRPEVGDKFSSRHGQKGVCGTIVQQEDFPFSERGICPDLIMNPHGFPSRMTIGKMIELLGGKAGVSCGRFHYGSAFGEPSGNADKVADISSTLIKHGFSYNGKDFLYSGILGQPLEAYIFMGPIYYQKLKHMVLDKMHARASGPRVLLTRQPTEGRSRDGGLRLGEMERDCLIAYGASMLIFERLLLSSDPYQVQVCRKCGLLGYYNHKLKTSYCSMCKNGENMAKMRLPYACKLLFQGKSKVNTMRNFVLANN

SEQ ID NO: 55899 - protein, 296 aa, Zea Mays
MLEDYRKVTMGQRGEEKQYSYEDILRCMKKVTPMDLKQTVQVDKDLVIRAYYAGHVIGAAMIYAKVGDAAMVYTGDYNMTPDRHLGAAQIDRLKLDVLITESTYAKSIRDSKPAREREFLKAVHKCVSGGGKVLIPTFALGRAQELCMLLDDYWERMGLKVPIYFSAGLTIQANVYYKMLIGWTSQKIKDSHTVHNPFDFKHVCHFERSFINNPGPCVLFATPGMITGGFSLEAFKKWAPSEKNLVTLPGYCVSGTIGHKLMCGKPTRVDYEDTHIDVRCQGIMNPSPFRQPRTLK

SEQ ID NO: 55900 - protein, 177 aa, Zea Mays
MESGLLDTAAAAGLCPVAAGRRRVGSTGTARCFLSCSCASRDCRVSASYSHSISRMLSGVRSAARKRLFRSDPAELLGVANWSETGGGGAGGHQHWWTALENNFVLEATDDEYGGVVVDADRLPADRAAFARSLAASLSYWKSVGKKGVWLKLPVDLAEFVPLAVKASSTTTRRKRI

SEQ ID NO: 55901 - protein, 1057 aa, Zea Mays
MVDTRRSSAAKRRGPSEDSSPSPPTTQADPTTAGLPVEPASPPPSSGSRSGKRAKVAVARAEDPGAPRGKAVDPAAVDVLDSSVANLQGVARPPAANVAASSAVSNSVGRRKRNQSVRAIPTGEGTLWKPRPAGGRAEAWGRLISQSSEYPSIPIYTTHFTIGNGGKCDLKLTETSPGPLICKLKHVKRGAALEIYMNKVVHVNGKALDKAAKVTLIGGDEVMFVSLGTHAYIFQQLLEEKASTPSLCSKCVIQQEQYPVVKDKEIVSSLCKTVGEQSYHPSEENMTFGRHQLLKDDLKKAAISASDISESFDNFPYYLSENTKNVLLSSSYVNLCCKESTKWTKDISSLCKRVLLSGPPGSEIYQELLVKALTKSFGAKLLVIDYSLLSGGQPSKSKESKPYKKGDRVRYIGPIQSSGFMFEGQRAPDYGSQGEVRLTFAENGSSKVGVRFDKQIPGGIDLGGSCELDHGLFCSVDSLCLDGPGWEDRAKHSFDVVFEFASEESQQVPVILFLKDVEKICGNNYTYHGLKNKLESFPAGVFIVGSQIQTDARKDKSNNGSPWLKFSYSQAAILDLAFQDSFGRAGEKNKEALKMSKHITKLFPNKVTIESPEDETELSQWKQLLGRDIEILKAKANFLKIQSFLTRHGMECTDLESVVCVKDRNLTSECVDKIVGYALSYQLKDHPIQTPGKDARVVLSGVSLKYGIDLLESIQSGPKKKSTKKSLKDVVTENEFEKRLLPDVIPPDEIGVTFEDIGALENVKETLQELVMLPLQRPELFSKGQLMKPCKGILLFGPPGTGKTMLAKAVATEAGANFINISMSSIASKWFGEGEKYVKAVFSLASKISPSVIFVDEVDGMLGRRENPGEHEAMRKMKNEFMVNWDGLRTKDKERVLVLAATNRPFDLDEAVVRRLPRRLMVNLPDAPNRKKILSVILAKEDLADDVDLEALANLTDGYSGSDLKNLCITAAHRPIREILEREKKERTLAEAENRPAPPQCCSGDVRSLKFSDFKHAHEQVCASISSDSKNMNELVQWNDLYGEGGSRHKTPLSYFM

SEQ ID NO: 55902 - protein, 701 aa, Zea Mays
MLGSKTKSGSAEAKSNGKPDKEKKGGGGGTPPTPKDSKPRKPAEQHAQLAAIREELVKAKEQLLENEKEKCRVLAELERAKKVADEANAKLQDALDVQRRAIEAQEADKLPAGESKQASIHDQQEDDDAVLRSTVEQLEKARYELADAVDAKNEALSQVDDAVRASEVKAQEVEHLIAEVTRLKGLVDSKVDGNRKKTAERIQNLEEENFALKLELQKKKAAEEKAVRLERMIDELESDVDDARNFGSKSKQLADEWQKKAQLLEVRLEEADQSNILKGESLNSAMEELDSTSSLLRDRESEVAALRDKVRFFEDEQTKLKNDIVVSGQRADAAEKEAADLWTEVEGLRLKLHTVEEEKMEALNSDKSTTLETETLNEQKNQLTDKLEANKDELEKTKKAMEGLASALQEMSAESREAQEKYLLKQDEIERAQAQVEELSLSLKNTKENYELLLDEANYEKVCLTKTVERLKAEAKSAHEEWHSKELSFVNSIKNSEEEIVAIRVQMIRTLEVVKEKERENTELQEKLQQLESQLMEANRIREEASAETIRWKENILDQENELQNIKQENDDLQAKELAASEKVKELSFQLANVKDSLINGNTKEGDNEKGGTEEDDEPVVVVAKMWENGKFADCDSSKEKDNDGDSQVDLESNKGDAGLDSNGLHSTNESSGRASTKQPQQHKKPLLKRFGGLLKKKSEK

SEQ ID NO: 55903 - protein, 1227 aa, Zea Mays
MERILDIEVLEAPREDSSSTEPRSKKMERYLIKWKGLSYIHCSWVSEKEYSEAANIHPRLRTRLNNFRRQKEAMKIEAERSGEDIVAIRPEWTTVDRILASRKNLVGDREYYVKWNELTYEECTWENESDITVFQPEIERFNEIQFRRKKSGDKGKATREPRQFKESPTFLSGGTLHPYQLEGLNFLRYSWFHNKRVILGDEMGLGKTIQSIAFLASLFEDKFGPHLVVAPLSTLRNWEREFATWAPQMNVVMYFGAAASRDIIRKYEFYYPKEKLKKLKKKKSSPSNEDKKQSRIRFDVLLTSYEMINMDSSILKNIEWECLVVDEGHRLKNKDSKLFGQLKDYNTKHRVLLTGTPVQNNLDELFMLMHFLEGESFGSITDLQEEFKDINQDKQIEKLHGMLKPHLLRRFKKDVMKELPPKKELILRVELTRKQKEYYKAILTKNYEVLARRNGGHTSLINVVMELRKLCCHGFMIDEPDLEPANPEEGLRRLLDSSGKMQLLDKMMVKLKEQGHRVLIYSQFQHMLDLLEDYLSYRKWTYERIDGKISGADRQIRIDRFNAKNSTRFCFLLSTRAGGLGINLATADTVIIYDSDWNPHADLQAMARAHRLGQTSKVMIYRLVSRGTIEERMMQLTKKKILLEHLVVGRLTKANNVNQEELDDIIRYGSKELFEDENDESRQIHYDEAAIERLLDRDQVDGDESVEDEEEDGFLKGFKVANFEYIDEAKAQAEKEEARRKAAAEAENSERNYWDELLKDRYDVQKVEEHTAMGKGKRSRKQMAAADEDDIHDLSSEDEDYSLEDDISDNDTSLQGNISGKRGQYSKRKSRNVDSIPLMEGEGRTLRVLGFNHAQRAMFLQTLNRFGFQNYDWKEYLPRLKGKSVEEIQRYAELVMAHLVEEINDSDYFSDGVPKEMMRVDDVLVRIANISLIEEKMAATGPGKITNIFPNYLLYEFQGLSGGRIWKAEHDLLLLRGILKHGYARWQYISDDRENGLFEAARRELHLPSVNEIIGAQLNEANGNLEGAQEGQANTTSMSHYKEIQRKIVEFLRKRYHLMERALNMEYAVIKKKIPVPDDITEQGVPAGHAPFIPDISELLRELPNLEPISTNELVSEGTAGQLQVPHLYNKMCGVLEESGAYALSSFFGDKSASSSLANSLRQFETVCENVVEALRPHQNGTGSAIKEELVDAATKAAAAAAPQQDSGHDAPHGQSSTAKADMEIDG

SEQ ID NO: 55904 - protein, 207 aa, Zea Mays
MELSTPVGSSLARTATMALVSPSFKITNQMCARGMPLECQFPHRLPSVACSMLLNTQPSQRTNHKDCGLLQVQCTENLMQSPVSFSDFSVSVCAQEDGLIKLQVNVSGTMTDSIFEKVFTKNVAAAQPLPGFRRMKGGKTPDIPKEVALHLIGPSKVKKETIKKIISSTVAEYVQKEGLTVSKNMKVQQSYEELEAAFEPGKEFCFD

SEQ ID NO: 55905 - protein, 532 aa, Zea Mays
MSTEAYRAKHEITIVGNEAPAPFMTFQSTGFPSEILREVLQAGFSAPTPIQAQSWPIALRGRDIVAVAKTGSGKTLGYLLPGFILLKRLQHNSREGPTVLVLSPTRELATQIQDEAIKFGRSSRISSTCLYGGAPKGPQLRELERGADIVVATPGRLNDILEMNRVSLHQVSYLVLDEADRMLDMGFEPQIRKIVKQIPPKRQTLMYTATWPREVRKIASDLLANPVQVNIGNTDQLVANKSITQHVEVIPHMEKSRRLDQILRSQDPGSKSIIFCSTKRMCDQLARNLSRQYRASAIHGDKSQAERDSVLNDFRSGRCPVLVATDVAARGLDIKDIRVVVNYDFPTGVEDYVHRIGRTGRAGATGSAYTFFGDQDSKYASDLVKILEGANQSVPPQLKEMALRGGYGGRSRRWASSDDSYGGQGYGAKRSTDSFNNNNFGNQAGGGSSFHSSSSGGQFGDTTSFHGSVRNNQTGDNASFPPSSSNNQAGDGLSFHERFYGSRGRDQSRTSNDGFRARSRSPPGKPVEVSNW

SEQ ID NO: 55906 - protein, 65 aa, Zea Mays
MPSYVCLYIMNCMFELYFNQQLFIITRSAQMPPAPKCLLLSCRIHHHRQYHSTSIYQRVFGTALE

SEQ ID NO: 55907 - protein, 173 aa, Zea Mays
MLGLDAAGKTTILYKLHIGEVLSTVPTIGFNVEKVQYKNVVFTVWDVGGQEKLRPLWRHYFNNTDALIYVVDSLDRERIGRARAEFQAIINDPFMLNSVLLVFANKQDMRGAMTPMEVCEGLGLYDLTNRIWHIQGTCALKGDGLYEGLDWLATTLDEMRASGRLTSASSSAS

SEQ ID NO: 55908 - protein, 555 aa, Zea Mays
MKASIKTTVGELLPVLTARPIDSDSVTGDRATDADAGGQSLANKLRSLSSEGFVQLLSAIFRIVQVHLQQAAEVKRIVEWVMGNLDGTLGVDASNPTLQHGGTVIPDTQENDSSRGSNTLTRSTSKIPFVQGKTNDFSIINSLKNVRADVLRENTEAVFAACDAAHGRWAKLLGVRSALHPRLRLQEFLIIYNITEEFIAATEKIGGRLGYNIRGILHQQSKQFVDYQHNVRMTKIKAVLDQETWVAVDVPEEFQAIVLSLSSTYSSVNGMEMPSTDDNSKFSDHRSTSQEPTYSAKNIADNGKVTSGTGENKVEFTSQTENNVAGNLKSTLQTIVHGGVGYHMVNCGLILLKMLSEYVDISKCLPSLSLEVVQRVVEILKLFNTRTCQLVLGAGAMQVSGLKSITSKHLALASQIISFMHSLIPDIRRVLFLKIPEARKHLLMSELDRVAQDYKIHRDEIHNKLVQIMRERLLANLRKLPQIVEGWNGPEDNDVQPSQFAKAVTKEVTYLHRILSQTLLEVEVQTIFRQVVQIFHSHITEAFSKLEVNTPSGKE

SEQ ID NO: 55909 - protein, 220 aa, Zea Mays
MKLVRHPNVVRLHEVLASRKKIFIILEFITGGELFDKIIRHGRLSEADARRYFQQLIDGVDFCHKKGVYHRDLKPENLLLDSQGNLKISDFGLSAWPAQGSFLLRTTCGTPNYVAPEVLSHKGYNGALADTWSCGVILYVLLAGYLPFDEVDLTTLYGKIESAEYSFPAWFSGGAKSLIRRILDPNPETRIRIEEIRSDEWFQKNYEPIKEIENEESQSR

SEQ ID NO: 55910 - protein, 521 aa, Zea Mays
MGLLSSLPPHRRGAFSGGGWQWSFLDVVWGVFLIAVVVFLALVFTPRRGDPILTTPSVARAGGTVPPCAASEVDLLPCEDPRRSSRLSREMNYYRERHCPTRGEALACLVPPPRGYRIPVPWPESLHKIWHDNMPYGKIAERKGHQGWMKHEGSYFIFPGGGTMFPDGAEQYIEKLSQYVPMKTGVIRTGLDMGCGVASFGGFLLKENIMTLSFAPRDSHKSQIQFALERGVPAFLLMLGTRRLPFPAQSFDFVHCSRCLIPFTAYNGSYFIEADRLLRHGGYLIISGPPVRWKNQEKEWDELQAMAGALCYKLITVDGNTAIWKKPAEASCLPNQNGFGLDLCSTDYDPDEAWYFKLNKCVSKISVAEETAIGSILKWPDRLSKPSARASVINNGANLFEVDSQKWVRRVSYYKKSLGVKLGSTNIRNVMDMNAFFGGFAAAIISDPVWVMNVVPGQKPLTLGVIYDRGLIGVYHDWCEPFSTYPRTYDLIHADAIDSLISGPISGTSRSLSLGCSLNVI

SEQ ID NO: 55911 - protein, 464 aa, Zea Mays
MLGRTKDQIRTTEQVNGAMASCQALKLDALVIIGGVTSNTDAAQLAETFAEAKCATKVVGVPVTLNGDLKNQFVETTVGFDTICKVNAQLISNVCTDALSAEKYYYFIRLMGRKASHVALECALQSHPNMVILGEEVAASKLTIFDITKQICDAVQARAEKDKNHGVILIPEGLVESIPELYALLQEIHGLHGKGVSVENISSQLSPWASALFEFLPPFIRKQLLLHPESDDSAQLSQIETEKLLAQLVETEMNRRLKEGTYKGKKFNAICHFFGYQARGALPSKFDCDYAYVLGHVCYHIIAAGLNSYMATVTNLKNPVNKWRCGATPISSMMTVKRWSRGPSATQIGKPAVHMASVDLKGKAYDVLRQNSSSFLLEDVYRNPGPLQFEGPGADSKPISLCVEDQDYMGRIKKLQEYLEKVKRIVKPGCSQDVLKAALSAMSSVTETLNIMTSSSTGQTPLSH

SEQ ID NO: 55912 - protein, 163 aa, Zea Mays
MVGLSEGEKHFIRGGIAQDLRTDGRRRLQFRSLSVQTGVIPQANGSARVRLGATDIIASVKAELGKPSILHPDKGKVAIFVDCSPTAEPLFEGRGSEELSAELSVSLQRCLLGGKSGAGAAIDLSSLIVVDGKVCWDLYIDGLVVSSDGNLLDALAVAIKCCI

SEQ ID NO: 55913 - protein, 543 aa, Zea Mays
MNAKPSANKNDDKGGDVKYTNHTLDEVASMVRDTISAFDTKVQSTFRDFEECNILCPYMSDTIKEIAKACQTLEGKDSSPTAVKLLRTLHFQMTKLYVLRLCSWMRATTKEISKDDTWVILSTLERNKSPYAISCMPLEFRDIIISAMDRIDTMILNLMSETAKSYDISQPLQEINESVRLAFLNSFLDFAGYLERFGGELTENRPNNENNYVQNGYINGTRETSANTDGDLHKKLLVVLSNIGYCKAELSEELYTTYRHIWSPVRNNDERSSDMRDLMTSFSALEEKVLDQYTFAKSNLIRSSAQSYLLDPGIYWGAAPMVKSIRDATLDLLHILVAVHAEIYSGARPLLEKTMKILVEGLVDIFLSVFHENKTKGIRLLDANGFCQLMLELEYFETVLHTYFSPEAQQAMKSLQENLLEKACESIAEAMENPGHQRRPTRGSEDASSDDRQPSVSPDDLLLLAQQYSSDLLQGELERTRLNIACFMESALQSTSAPAGSKPAAYSSYHAQVPQHAPIQTSSPSFRRQQTGTSSPVVSRRRR

SEQ ID NO: 55914 - protein, 667 aa, Zea Mays
MGIFAILIFLFLGSVEGFSTKSQPCHYSKDKTCKPALANAIFSTIAFVLGAVTSLVSGFLGMKIATYANARTTLEARKGVGKAFITAFRSGAVMGFLLAASGLLVLYIAINLFGIYYGDDWEGLFEAITGYGLGGSSMALFGRVGGGIYTKAADVGADLVGKVERNIPEDDPRNPAVIADNVGDNVGDIAGMGSDLFGSYAESSCAALVVASISSFGINHQFTPMVYPLLVSSVGIIACLITTLFATDFFEIKAVNEIEPALKKQLIISTVVMTIGIALISWLGLPYTFTIYNFGAQKTVQSWQLFLCVAVGLWAGLVIGFITEYYTSNAYSPVQVVADSCRTGAATNVIFGLALGYKSVIIPIFAIAFSIFLSFSLAAMYGVAVAALGMLSTIATGLAIDAYGPISDNAGGIAEMAGMSHRIRERTDALDAAGNTTAAIGKGFAIGSAALVSLALFGAFVSRAAISTVDVLTPKVFIGLIVGAMLPYWFSAMTMKSVGSAALKMVEEVRRQFNTIPGLMEGTTKPDYATCVKISTDASIKEMIPPGALVMLTPLIVGILFGVETLAGVLAGALVSGVQIAISASNTGGAWDNAKKYIEAGASEHARTLGPKGSDPHKAAVIGDTIGDPLKDTSGPSLNILIKLMAVESLVFAPFFAAHGGIIFKWL

SEQ ID NO: 55915 - protein, 850 aa, Zea Mays
MQKLPNAYLGFFIKEGVVNAVEALLNQQDCSKSTHMPDNMQQPETQPVIRNKTTCFCYAFDACRSEAAEKRTCRIGKDSLFTFARHVKTTYFTKDVVSSEMGLTEILQKLKNCCAVLNETTDKSSEQCNLQNEEYLSTILSEVMMELHGGETMTTFEFLESGLVKSLSNYLSNGKYLQVEDNMGCSSDHLLAVVKRFQSFSRMSFSRMGQGWDDMLLTLLVRKLQNALTSLDNFPVIMSHNFKPRSSIADIPTRHSTITPCIRVRFKKDEDETKLSSYNSAVNVEISSSLQTIEEFLWPKVSIDVNSQKAESPPSDTALEIKYADDDSQEQDSTPSQKADSPSEGLTCGSQNLPAETCPKQGTSSSGQAERNTTILSDYTIQQKLVFSLNGKELDRSVTLYQSILQDHINAGSEIILDMQFWRSVHDITFKAANPEANRTAVNPEANDSPRHSSTAMSSINENTTGFTWQMLPFFSSMLLGKLPCKLDRSGASYDILFMLHILEGLNRYSFHLVSDERNRSFAHGRITNLDDLKAEVFSIPQQEFVSAKLTDKLEQQMHDPLVSRSCCLPLWCIELMSACPFLFSFEARWKYFQLTAFGSLKNHHGHMMDASVNSVAERGSSHSRKKFKVDRDDILVSAAKMMKSHAKSNALLEVEYKEEVGTGLGPTMEFYTLISHEFQKSGLGMWRGELPCKSGTHDTHVSRFVVASNGLFPRPWSASEDPASFQEVSERFHLLGLVVAKAIKDNRILDIPFSKAFYKLILGQELNIYDIQSLDSELAICLVEFQALACQRKYAESNLTRDCQISDLTYRGCRIEDLAIEFALPGYPEYVLSPGSRSDCVSVLSSACF

SEQ ID NO: 55916 - protein, 711 aa, Zea Mays
MENNRYLSTFFIMDVASTIPFQGLAYLITGEVRENAVYSMLGVLRLWRLRRVKQFFTRLEKDIRFSYFWIRSARLVAVTLFLVHCAGCLYYLIADRYPDRQKTWIGAVIPNFRQASLRIRYISSIYWSITTMTTVGYGDLHAQNNVEMIFNIFYMLFNLGLTAYLIGNMTNLVVEGTRRTMEFRNSIRAASSFVGRNHLPPRLKQQILAYMCLKFRAESLNQQQLMDQLPKSICKSICEHLFVPVVKDVYLFRGVSREMLLSLVTKMKPEYIPPKEDVIVQNEAPDDVYVVVSGEVEVILFDGIYEQVQATLGARDIFGEVSALSDRAQAFTFRTRTLSQLLRLKQATLKEAMQSRPEDSVVVIKNFLKHQVEMHGMKVEDLLGDNTGEHDDDANVLTVAAMGNSGLLEDLLRAGKDADVGDAKGRTALHIAASKGYEDCVLVLLKHACNVNIRDAQGNTAMWNAIAAGHHKTFNLLYQFGRASNPRAGGDVMCLAARRGHLGALQELLKLGLDVDSEDHDGATALRVAMAEGHADAARFLILNGASVDKASLDDDGSGSGSGSGAARLAMSPTELRELLQKRELGHSITIHDSPAVVPNGGSSGHSRPGRLQSTSSDSQRWPRVSVYKGHPFLRNRTSEAGKLINLPGTMEEFRAIVGEKLKVDAEKALIVSDEGAEIDSIDVIRDNDKLFMVTEEDLRRLASMDWLSCE

SEQ ID NO: 55917 - protein, 201 aa, Zea Mays
MPGFYAEGEYDLSGFAVGVVKKDKVIDGKNIVKGDVLIGLPSSGVHSNGFSLVRRVLEKSGLSLDDQLPRNDGITTTVGEALMAPTFIYVKQVLEIISKGGVKGLAHITGGGFTDNIPRVFPSGCGAKIFTGSWEIPPIFSCLQQAGNIDDAEMRRTFNMGIGMVLVVSRESADRIIEDTHGSNPAYRIGEVIEGDGVQYV

SEQ ID NO: 55918 - protein, 112 aa, Zea Mays
MRRLLEHAGVPGHIYPLSLLCYEVMPPPQQVEKEIGEQRVISFHGVGLSATEETKYGDITCHTKNADEGRELFTNTLYNSVVNQYNVLKSAIFRDRGAAVSNNAISLSQPWR

SEQ ID NO: 55919 - protein, 57 aa, Zea Mays
MCKQYWLQNQFLIKIKMNKLYFIPPFISQGYRLHMSQQNSRLQCNLHKLHMSNLQRL

SEQ ID NO: 55920 - protein, 335 aa, Zea Mays
MQPLHQPPMNGQHGPPPPQGSGVPTASQQQAPPPSYYQQQQQQQQGPPPQYYQQGPPQPWAQQQQYAPPPPQYPPQMQQYAPPPQQYAPPPQQQYAAPPQQQYAAPPPQYAPPPPQYAPPPQQYAQPPQYAQPPQYGTTPGSGEVRTLWIGDLQYWMDENYLHYNAFAPVAQQIASVKIIRNKQTGHSEGYGFIEFYSQAAAEHTLMNFNGQMMPNIEMAFKLNWASASTGDKRGDNGSDHAIFVGDLAPDVTDSMLEDVFRANYPSVRGAKVVVDRITGRPKGYGFVHFGDLNEQARAMTEMNGMMLSTRKMRIGAAASKKNTDAQQTYATNGS

SEQ ID NO: 55921 - protein, 77 aa, Zea Mays
MQETRVEYFRGKDFNAFIKNYPEVREILGPDKDLEVEDIVNTLLTKNLVIRCDRVMKTVRPGKKKLSSWPAHLEIHN

SEQ ID NO: 55922 - protein, 234 aa, Zea Mays
MARLDRVKNITGLVEAFAKCAKLRELVNLVVVAGYNDVNKSKDREEIAEIEKMHELIKTHNLFGQFRWISAQTNRARNGELYRYIADTHGAFVQPAFYEAFGLTVVEAMTCGLPTFATLHGGPAEIIEHGVSGFHIDPYHPEQAANLMADFFDRCKQDPDHWVKISGAGLQRIYEKYTWKIYSERLMTLAGVYGFWKYVSKLERRETRRYLEMFYILKFRELAKTVPLAIDQPQ

SEQ ID NO: 55923 - protein, 337 aa, Zea Mays
MVYHFHGMIDMLINCGYEKGTTLFGYGYDFRQSNRIDKAMAGLRAKLETAYKTSGGKKVNLISHSMGGLLVRCFMSMNHDVFTKYVNKWICIACPFQGAPGCINDSLLTGLQFVYGFESFFFVSRWAMHQLLVECPSIYEMLPNPEFKWKEKPIIQVWRKNPEKDGTVELVQYEATDCVSLFEEALRNNELTYNGKKVALPFNMSVFKWATKTRQILDNAELPDTVSFYNIYGTSYETPYDVCYGSESSPIGDLSEVCHTVPSYTYVDGDCTVPIESARADGFSAKERVGVKADHRGLLSDENVFKLLKKWLGVSEKKSEWRCVSKSYSKVGNWVAL

SEQ ID NO: 55924 - protein, 705 aa, Zea Mays
MYGSEVPLGNPSPSHICMLDFGDPFRKHHMVCRYRNKPHVPWSAISTPSGVFVICMLVGYIAGAAWSRYDNVKEDCRKMEELKKQAEAADVAKSQFLATVSHEIRTPMNGVLGMLDMLLDTDLTSTQRDFAQTAQVCGKALISLINEVLDRAKIEARKLDLESVPFDLRSILDDVISLFSSKSREKGIELDVYVSERVPEILLGDPGRFRQIITNLVGNSIKFTERGHIFVQVHLADHSNLATESKVEPVANGMNGHTDEKTAVATSVSLNTLSGFEAADSRNSWENFKLLLSYEKNEMPYESVSDKVTLVVSVEDTGIGIPLDAQAKVFTPFMQADSSTSRTYGGTGIGLSISKCLVELMGGQINFVSRPHVGSTFTFTAVLKRCDRSAIGDSKPVMLHPLPSSFKGLSALLVDRRPVRATVTKYHLQRLGIACDVVATIELALGVLSGRNGSSLTSMKQPCMLLIESDSWGFNIDVSLRSRLLEMKQNGHTHVLPKIILLAAAESGKLKEHYAVDSVITKPLKASALAACLFQTLGIKQSSNERSDNSGSLYGLLLGKNILVVDDNKVNLRVAAGTLKKFGAKVECVESGKDALALLQVPYKFHLCLMDIQMPEMDGFEATKQIRAMEAKANEQAVACDNSEIDGATRAARWRLPVLAMTADVIQATHEECTKCGMDGYVTKPFEEKQLFQALQKFLDPGMSC

SEQ ID NO: 55925 - protein, 257 aa, Zea Mays
MSEPNSGSDVVSMKCKAEKVDGGYVLNGNKMWCTNGPSAQTLVVYAKTDLAAGSKGITAFIIEKGMPGFSTAQKLDKLGMRGSDTCELVFENCFVPRENVLGEEGKGVYVMMSGLDLERLVLAAGPIGLMQACLDVVLPYVRQREQFGRPIGEFQFIQGKMADMYTSLQSSRSFVYSVARDCDNGKVDRKDCAGVILFAAENATQVALQAIQCLGGNGYINEYPTGRLLRDAKLFEIGAGTSEIRRMIIGRELFKED

SEQ ID NO: 55926 - protein, 144 aa, Zea Mays
MVCRRNPSVIESDSNEDSLEIHEEVPTRSRSKRGRGSRNVVMGAEASGSQSGRGRMTRTPSRSRPTANPQAWEPSSNDEGGKDDVTDLPLLDAPIVRGLVLHKAQARRSANEEITDFSASGGSTPLHDMRFQNPACNTYFVIKI

SEQ ID NO: 55927 - protein, 415 aa, Zea Mays
MAAVQAKTALERLASVQEQINKIAQERESSIRAEFASHLEGKEEEIRKLVAKIREAESEESVLTERLLVVESKTQGHNKETTGLRDEIKELTSKLEYLRDRAVSYEKQARMLEQEKNHLQEKFLSECKKYDEAEQRYKSAERDAKKAVELADAARTEAIAYQKEKDKAQQLSIEKVAVIERVQRQVDRLEQEKVNLLGEVQRMHNSESDAWSKVTLLESRVAEREKEMDDLLSRSNEQRSSTVRVLESLLATERAARAEANKRAEALSLQLQSAQGKLDILHQELTSIRLVETALDSKLRTTTYGKRLRDNEVRLYSIQDMDIDPPERSRKRTKSNTSPLKPVQTEDGGSVHMREDSVTVSTDVKDDNPDGYKKFTIAKLKEELTKHGFGTQLLELKNPNKKDILALYKKHVLCE

SEQ ID NO: 55928 - protein, 122 aa, Zea Mays
MKLNKTTLVQETISMNTKMATYGNGGEGYDERIAAILRLMNGMMYNFLDGQKDIYTSDLFCPLSSNLCNLMPNEQAKDVLDTTTLVGTMLDSEGKHCKTLVASLCTCCAQHYIICLLFVMVA

SEQ ID NO: 55929 - protein, 432 aa, Zea Mays
MSASYGSEDYRGGGGGGGYGGGGGRGGGGRGGGREGDWVCPDASCGNVNFARRAECNKCGAPCPSGGGGGGGGGYNRSGGGGGGYNRGSGDYGSGGGGFDRDGGDYNSGGRGGGSGGGGGYNRSGGSDRGFDDHRGGRGGSYGGRDQENQRGSEGGYSAGGYGQAPPQAPPSYGGPAGDYAAPPSSYGGNNAYGSDSAVPPPNSYSGGPGSYPPSYGAPPPHQYGGAPGGQGGLPPTYDGGYGGRSMPGGGGSGGAPPPYHGGGSGYTGSADPEPAGKVKQCDENCDETDNARIYISNLPPDVTVEELQELFGGIGQVGRIKQKRGYKDQWPWNIKIYADDSGKAKGDACLAYEDPSAAHSAGGFYNNYDMRGYKISVVMAEKSAPRAAPSYGHGGGRGGGRGGGGRRDNYRDGGGHGPNRNQGGGSRSRPY

SEQ ID NO: 55930 - protein, 1238 aa, Zea Mays
MGCLEGSFLIEGACGKLLTRLVFERGSTDAAAKVADTMSVDFVHEIISACVPPVLPPRTGQGWACIPVIPTICNISSENRLCTKSSPAQGWSAHDSSLSSRQEPLYPLQLNLVKHLAQLSSVRAVLACVFGSSILSGDNESSFTHVKDSTQAPETERSFFEFALEQSERYPTLNRWIQMQSNLHRVSESSITDKSEVSLHQSKGKFCMKRTRESDSDGESELEENVISGNTSSSSLESTKHEDARLEPTTFISFDWENEAPYEKAVERLISEGKLSDALAVSDRCLRNGASDNLLQLLIEQKEEKGPGTGQIHPYGSHSLGNDTSQYCLRLRDKKVAAQLALKYLHSWDLDAATNVLTMCMCHLPENDPMRSEVLHMKQSLQRYGHIMSADEHYTRWQEVEADCEDDPEGLALRLAAKGAVSAALEVAESASLSIDLRRELQGRQLVKLLITDPLNGGGPAAASRFLSTLRDSNDALPVAIGAMNLLPDLRSKQLLVHFFLKRTVGNLSDAEIARLNLWALGLRVLSLLPLPSQQRCSSLHEHPQLIVEVLLMMKQLQSASLILKEFSSLRDDKLIIAYAKKAISINVSSAPRERRSNISASRAKQKKATTPAKTNFVQSFGNFQREARKAFSWVPRDSGTKTPPKDILRKRKSSGSGGDRSSWEAMPGLQEERTPVYPSEAQERLPFVSAPDEWVLTGDPDKDDATRSSHKYETSPDITLFKVVEKFRKKALISLCTNESVAAKGALELCMTQMKVVLSSQQLPLDASMDNIARAYHATETYVQALSYAKNLFKKLVGSSDLSSGSERSKEVDDVSVDTGSSSTGSQYLDELSDFLTQADMWLGRAELLQSLLGSGIIASLDDIADKESSSRLRDRLVNDERYSMAVYTCRKCKIDAVPVWVAWGHALVRMEHYAQARVKFKQALQQYKGDATSVVTEIINTIEGGPPVDVSSVRSMYEHLAKSAATIFDDSLSADAYLNVLYMPSTFPRSERSRQSRGHVDSQFRTASSYLEDGPRSNLDSVRYAECIHYLQDYARPQMLAFMFRHGHYTEACSLFFPFSQPTTEGETSLSSAPWSDPLTTDYGTIDDLCDLCLGYGAMAVLENTIRTITQSPTYHEAHMIQYMNTIITRICNYCETHRHFNYLYNFLVLKDDHVASGLCCIQLFMNSMSQEEALRHLGHAKTHFEEALSVRDRTIEATKLVLRSARNKGAPGKMTRETIMKYSTRVSYQAKVHGC

SEQ ID NO: 55931 - protein, 140 aa, Zea Mays
MGDNVMLIVAEKDDKLVAGALNLIGGDTLFGRLWGCLPDAYFPNLHFEACYYQAIEAAIELNLSKVEAGAQGEHKIQRGYLPVTTYSCHYFSNPGFAAAIGNYLTHETAQVKHAIKVLRDSGPYKEDILKEFAAQQDDDL

SEQ ID NO: 55932 - protein, 109 aa, Zea Mays
MASLLCPASSCPSASLRRTAASPAAPSFASSRHYGAPLTFRVASQPPQALAAAPYGYGSDLLRPIDTQTIIIAAAVVSAVSLSLVLGLKGDPVPCDSSIGRQRFTWWFS

SEQ ID NO: 55933 - protein, 881 aa, Zea Mays
MASISAPAVACRVAPARATTSVLPAHSRRPGCRSVVWRCWAATRGRRRRWAGLRARCRISCDVSQPSAVQPDSESSGEGLVAQDDGPRRPPFDINLAVVLAGFAFEAYTSPPADVGWRETDAADCQTVFLSDVFLREVYDGRLVVRLKKGINLPAMDPWGTSDPYVILQLNGQTAKSQIKWATKEPTWNEDFTFNIRKSRENLLQVAAWDANLVTPHKRMGNAGLYLESFCDGNNHGVTVELEGLGGGGTIEIEVKYKSYDDIEREKQWWRIPFVSDFLVKSSLGSALRMVLGSESINASQFVKSAFGQLSSFTYTYLPKPSSLESGVDVSKSDEESSDGPTNSNELQQQNIDSEIISDSHSHSEVQSPTAVVNSEGNSSSDMKKSDEYFWRALNNVLNQNVLQNFGFSLPEVKQLGGFDLLSSLGLKSRNIAEQEYLESGLAMADTSTNGGSETTSENTVGVENENRTLTTKEEVQSSFPDINKVSRDVLSQTENILGALMILSKNLSPHDQSVPTTGTNGKYDMIREEQGASAADSVQKADTVSSALLSIDAQEAEDMRRLFASAETAMEAWAMLATSLGRNSFIKSDFEKICFLDNISTDTQVAIWCDSSRRRLVVAFRGTEQSRWKDLRTDLMLVPAGLNPERLGGDFKQEVQVHSGFLGAYDSVRNRIMTLIKYAIGYDDEEDAENIPRWHVYVTGHSLGGALATLLALELSSSQMAKNGAIFVTMYNFGSPRVGNRRFAEVYNAKVKDSWRIVNHRDIIPTVPRLMGYCHVEAPVYLKFGDAKDAPVNNSILDDEDQGDVIGEYTPDVLVTEFMKGEKQLVEKLLQTEINLLRSIRDGSALMQHMEDFYYVTLLENVRSSYQVADTANDEYQLTA

SEQ ID NO: 55934 - protein, 592 aa, Zea Mays
MQLLLFAIMSAAFLTILYTPSVYEHQLQSSSRLVNGWIWDKRSSDPRYVSSASIQWEDVYKSIQNLNVGEQKLSVGLLNFNRTEFDAWTHMLPESDFSIIRLEHANESITWQTLYPEWIDEEEETEIPSCPSLPDPSVPRATHFDVIAVKLPCSRVAGWSRDVARLHLQLSAAKLAATTARGNSGIHVLFVTDCFPIPNLFSCKDLVKREGNAWMYKPDVKALKEKLRLPVGSCELAVPLNAKARLYTVDRRREAYATILHSASEYVCGAITAAQSIRQAGSTRDLVILVDDTISDHHRKGLESAGWKVRIIQRIRNPKAERDAYNEWNYSKFRLWQLTDYDKVIFIDADLLILRNIDFLFALPEITATGNNATLFNSGVMVIEPSNCTFRLLMEHIDEITSYNGGDQGYLNEIFTWWHRIPKHMNFLKHFWEGDEEEVKAKKTRLFGANPPVLYVLHYLGRKPWLCFRDYDCNWNVEILREFASDVAHARWWKVHNRMPRKLQSYCLLRSSLKAGLEWERRQAEKANFTDGHWKRNVTDPRLKTCFEKFCFWESMLWHWGEKSKSNSTTTRNSAVPATTTTTPAAASLSSS

SEQ ID NO: 55935 - protein, 647 aa, Zea Mays
MLEEGVGSFADIDDLAGTFSKLTRIVNGPKQPVVVSHSGSISRQSSNAEWVQESELPYWPTQPVLDTDHGLDKKNWWSQPPHSVNFIDYRLQRTSSSPQQDAQHNPVEPILEAKPSPLHRTSTYPQQEPQYSNTEPIPVPKSSFISCPPSGAASHSSPSQPHHVNMPSPPTAFQLHMSSAQNDLLLPQFHHGGTPPGPPFGRQNHVLNNGSMHGKGPRFMPGLMPHQLQCPNGLMPPQMQPPHQHGMLPIQQSPPQFSQLHARMIGPHHSPPQSMQMFGPQHPSSQVMSRFDANFAMPDLSDPRARSMLQHERLGQRYPHQGYELNNIRIDNGWSRFRSKYMCTEEIENIARMQQAATHINDPYIDDYYHQACLAKKSAGAQLKHHFCPTLIRDPSSRARSKDEPHAYLQVDALGRLPFSSIRRPRPLLDVEQASAPSDNAEKSVSKPLDQEPMLAARITIEDGLCLLLDVDDIDRLLQFSQQQDGGLQLRNRRQGLLEQLAESLQLVDLLAPNKNSPVSPYDDLVFLRIVTLSKGQKLLSHYLELLTSGSELARIACMAVFRHLRSIFGNMPSDISAVETMNRLAKAVSAHIVQMDLSDLSACLAAVVCSSLQPPLRPLGSPAGDWASVIIKHHSTPFLGCLHSTA

SEQ ID NO: 55936 - protein, 155 aa, Zea Mays
MPIIHHDISNEIPIHLQRMQYLAFSSLLGLTACLFWNIIATTAAWIKSEGVMIWLLAIIYFISGVPGAYVLWYRPLYNAMRTESALKFGWFFLFYLLHILFCVWSAVAPPFPFKGKSLAYFTSLDLECSALNHCSASLSFSKYTCTSVEVEKLQR

SEQ ID NO: 55937 - protein, 549 aa, Zea Mays
MAASPQQQGQGGPGSGGWTPEQFWSLLDKADRRFARVRDLPSFGRQEPDEFAKAFRAYTQLWRMQQEHRHRLLDAGLRRWQVGEIAARIAHLYYAQYQRTADTALLSEAFVFYHAVLDRAYFQDADHHLAPAKHLRFLARFLLVALLLGRRSHTVPRLASDIRTLLDDSKKSFQDAEYKEWKHVVQEIARFLRADSPFMNMRPLRYSYAFDPPPDTLRTVPTTVKKRGLVLSDTILCSYYPNEVKFTDLSIDVFRMVQCLEWEPCGSFALNDGYSAHDESGQNQPNLLKDLRDAALPPNPLKTILYRPSVTHFLTVLSTKCEELPSNGIMLIYLSATGEMGTSGFCPDTGENVLSNFNKFDISSLSHTSSKENKEPCLWLGCRETEGSNCIYPGDLIPFTRRPLFLVIDSSTSYAFKSIHGTERGETSAMLLSPSSRSSAAGFSGDSTRHSGSQFTMFLTSPLQAFCLLLGNNGTDIDRDAYNKAEELLLLSLNEWAATLVASSSLHSIWVEVLGDPLLRRLLLRGQRAATCTTHSCWSRLEKSFLLPK

SEQ ID NO: 55938 - protein, 171 aa, Zea Mays
MVKLTMIARVTDGLPLAEGLDDGRDLKDSDFYKQQAKLLFKNLSKGHHEASRMSIETGPYYFHYIIEGRVCYLTMCDRSYPKKLAFQYLEDLKNEFERVNGNQIETAARPYAFIKFDTFIQKTRKLYLDTRTQRNLAKLNDELYEVHQIMTRNVQEVLGVGEKLDLKCQAG

SEQ ID NO: 55939 - protein, 545 aa, Zea Mays
MDFFTEYGEGSRYKIEEVIGKGSYGVVCSAVDTHTGEKVAIKKINDIFEHVSDATRILREIKLLRLLRHPDIVEIKHILLPPSRREFRDIYVVFELMESDLHQVIKANDDLTPEHYQFFLYQLLRGLKYIHTANVFHRDLKPKNILANADCKLKICDFGLARVAFNDTPTAIFWTDYVATRWYRAPELCGSFFSKYTPAIDIWSIGCIFAELLTGKPLFPGKNVVHQLDIITDLLGTPSPEAISRIRNEKARRYLSSMRRKKPIPFTQKFPNADPLALCLLERMLAFEPKDRPSAEEALADPYFKNIASVDREPSAQAVTKLEFEFERRRVTKEDIRELIYREILEYHPKMLREFLEGTESSGFMYPSAVDHFKKQFAYLEEHYAKGSTGTPPERQHNSLPRPSVVYSDNRSQTTANITEDLSKCMLRENTQKTHPYSASVASKFPPHVPQGDVARPGKAVGSVMQYSPCPAPAAERYEQRRIARHPAVAPNNIPSGSSYPRRSQTCKSETGDAESHMDANQARQPKPYAANKLPATVDSRGGHW

SEQ ID NO: 55940 - protein, 744 aa, Zea Mays
MMAYLLILLRQDQYSQGPPSEAFSYHEDVRISLGLSPKDFLIAIVGTPFSYGDNLMEEALVLQAVSPLLRRYHSENSAQSELKVKIFTGNITEKHRMALESVALSVGFPRGAAEHVAAEDKDILLRTADLVIYYSCLEEQLFPSVLVEAMSLEKLVIAPDLGIIRKHIDDGVNGLLFPRKNVGMLAQVLLQAVSNGKVSISGQKIASAGKAHAKNLMASETIEGYAVLLENVVKFPTDALHPLTVDEIPLALKKEWKWHLFEDVKHLHHMNTSLSSYKILKKLEQEWHRNQMENSSLSTTKISDTFSAIAWEEQRANEVMDIKRKMEEDELKDRNDQPHGTWEEVYRNVKRVDRLKNELHERDDKELERTGQPLCIYEPFFGEGTWPFLHQSSLYRGVGLSSKGRRPGADDIDASSRLPLLNNVYYRDILGEFGAFFALANRIDRIHKNSWIGFQSWRGTARKANLSNNAEFAILEAVQSQKHGDSFYFWVRMDQDPRNHTYKDFWSFCDAINAGNCRLAVLEAFQRMYGVHLDHDLDSLLHMPNDGDTWSVMQSWVLPTRSFLEFVMFSRMFVDALDAQMYDKHHQTGHCILSLHKDRHCYSRVLELIVNVWAFHSARRMVYVNPQTGAMQEQHHLSGRRGQMSVQFFSYTTLKSMDEELAEEFDLDHPDRRWLWPQTGEVFWQGLYQRERIMRQQEKERRKQQSREKIQRIKNRARQKTLGKYIKPPPDDTGGSNDTTSVDL

SEQ ID NO: 55941 - protein, 726 aa, Zea Mays
MDIDYMDGFRCFTFDSIRFPDPISMVDDLHSIGCKAIWMLDPGIKKEEGYFVYDSGSKSDVWIQKADGSPFVGEVWPGDCVFPDYTSEKTRAWWASLVKDFISIGVDGIWNDMNEPAVFKTTTKTMPESNIHRGDADIGGVQNHSYYHNVYGMLMARSTYKGMEMGNAAKRPFVLTRAGFIGSQRYAATWTGDNLSNWEHLHMSLPMVLQLGLSGQPLSGPDIGGFAGNATPKLFGRWMGVGALFPFSRGHTETGSIDHEPWSFGKECEEVCRLALLRRYRLLPHIYTLFYHSHTKGIPVATPVFFADTQDPELRKVETSFLLGPLLVCASTLPNKGAHEYAHKLPKGIWLSFDFADSHPDLPVLYLQGKAEGVLFEDAGDGYAFTQGDYLLTYYIAELHSSVVTVKILKSEGSWKRPKRNLKINILLGGGAMISTDGVDGEVIHLTMPSESVVSSLVATSEFEHKKRMEMIQPIPDIEEPSGQEGAELSKIPVDLKSGDWFLKIVPWIGGRIISMAHIPSDSQWLHSRIEINGYEEYSGAEYRSAGCTEEYKVIRRHLEQSGEEESICMEGDIGGGLVLQRQISILKDNPKIVQIDSSIQARSVGAGSGGFSRLVCLRVHPTFTLLHPTEVVVAFTAINGSKQEISPEAGEITFEGDLKPNGEWMLVDKCVGLSLVNRFNPREVSKCFVHWGTGDVNMELWSEERPVSNETPLRICHQYEVQQTT

SEQ ID NO: 55942 - protein, 475 aa, Zea Mays
MASSSSLFSPCALTAKLGIGHASYGSGRRANLRRRGRLSVVAVQTGPQKPSPSSSQAAAAEDEADALQKLLKREYKYGFVSDFESFSIPKGLSEATVRRISELKAEPAWMLDFRLAAYRRFLTMVEPTWSDNEYAPVDLQSICYYSAPKTKPKLNSLDEVDPELLKTFDRLGIPLTEQKRLSNVAVDAVIDSTSIATTHREALMAKGVIFCSISEAIREYPDLIRRYLGSVVPPGDNYYAALNSAVFSDGSFCFVPKDTVCPMEISTYFRINDKETGQFERTLIVADERSTVSYLEGCTAPAYDSNQLHAAVVELVCEEGAEIKYSTVQNWYSGDEEGKGGIYNFVTKRGRCKGHGSKISWTQVETGSAITWKYPSVELIGDDSVGEFYSVALTKDCQQADTGTKMIHKGKNSRSRIISKGISAGKSRNCYRGLVLMNPSAENAYNSSQCDSLLIGDNAAANTYPTIQVVLSPAN

SEQ ID NO: 55943 - protein, 76 aa, Zea Mays
MASAAGGGAAGEGEWLKVSQLRPMVEAQDPNAKVLLSTSSTRSVPESPEGRRNSSASLISRAGGTQTVTSGHTLPL

SEQ ID NO: 55944 - protein, 214 aa, Zea Mays
MAGYLPFDDANLMRLYKLICHATFSCPPWFSSGARKFIKRILDPNPDTRIKIAEILEDEWFKKGYKPPHFEQGEDVNLDDVDAAFNDSEDRLVAEKREKPESMNAFALISRSQGFNLGNLFEKEMMGMVKRETSFTSQCTAQEIMSKIEDACGPLGFNVRKQNYKMKLKGDKSGRKGHLSVATEVFEVAPSLHMVELRKTGGDTLEFHNVRFQK

SEQ ID NO: 55945 - protein, 868 aa, Zea Mays
MPENIDLVLEFLRKNRFAKAEAALRGELTGCADSNGMTVQRCVAELKEDDEQEDLVSSNGGPNGAVTERSADSSREFIVKEVDVGALPNGLDGKKGSGIGQPQENNVGDLYPWTFSIANSTAEQLAELLVSEEVPRHRRAAMLAEKRDRGVGTEQPGPLLEQKVSSGRGKGKVDAAGRTAINEQGHSRDKNLVPEKEEMLNGCTVKTVLPFPGENPSSSYNSTHHENERKEVRRSINADGVGKGAKGHFDEGNRQNYFEKSLDTDQVSDRCFDLQLVGDNQREELPKLPPVRLKSEDKLVNMNWEDKINHHGSGAKQSSADHAFMIGSYLDVPIGQDITSSGGRRTIGSSWLSVSQGITEDTSGFARLDDDSLEYPIGEYWDSDEYDDDDDVGYTRQPIEDETWFLAHEIDYPSDNEKATDHTRGPDRHDRPTKDEDDDQSFVEEDSYISGEQYFHGKNIAQIGTSEGPMVNGIPDNDMIAQYDGQLLDPEELNLMHSEPAWQGFVLQNSELGMLGNGKFLNDSERPHPDDPFVEDDQHGSVRSIGVGISSDAADIGSEVRESLIGGSSEGDIEYFNESSLSVSGKRHSQQDPEKKRVGAKGVKHDQINYAAGIQKGNLLPGAADGGFSFPPPLHSVKNHDSDTKTLWSKKDEMYCINDLDDCQNGVASDDMLATWKKKNSESSLRSSRDEMTSDVVRSRNSSPSYGETEDTTNVRRHKLDDAQEDTGTNLDDEEAAALQEQVRQIKVQEEEFETFNLKIVHRKNRTGFEEDKNFHVVLNSVIAGRYHVSEYLGSAAFSKAIQAHDLHTGMDVCVKIIKNNKDFFDQSLDEIKLLKYVNKHDPGDKYHLLRLYDYFYYRPIGLVIWPV

SEQ ID NO: 55946 - protein, 73 aa, Zea Mays
MMIVEAYAALVLAFLSTESMKVRGAISSCLPDNNLKVLVPVLEKFVSFHLQLNMMTRETHSAVTEVIERCRLS

SEQ ID NO: 55947 - protein, 1762 aa, Zea Mays
MAEPSASSASTAAAAEQTDAERMDALDRMLTRLALADDAHLAPVLARVLPYAVTSLASPAPAVRKLVMEILSHINKRVKHRPEISLPMLELWKIYTEPTSSTMVRNFCILYIEMAFERLPTEEKGNIAPDLLINISNIPPQHQGIILRLVTKAIGECNTHKVDETIASKYRVITESSDGLLFADFCFHTLLYQAPPQGSGCPAGLSVVQSERVTGKQPLKIDVLASRKLGILNVIEAMNFTPEIVYPLYLSASSDSQDAVSKKGDEFLKRKASTVNLEDPDLIKRLFTLFNGTVGAENIAAELKVSPAHASLRMRLMSVFCRSVAAANAFPHTLQCIFGCIYGSGTTSRLKQLGMEFTVWVFKHAVTDQLKLIGPVILSGILRSLDGSSTAETDSTGRDTKIFAYQAIGLLASRMPNLFSDKTDMAIRLFTALRLEDQSLRLTIQEAATSLATSYKRASTIVLKDLESLLLENCEAEQSEVRFSAIRWATTLYDTRHCSSRYICMIGASDVKLDIREMALAGLNLMNDGRQSSAGSVDFSYPDIKEMINYICCQRPQLLHSDEQTNGKLLFPSKTFVSMIKFLMKCFESSDNLKLLQEDPSHSAVAKMCVILEHAMSYEGSSELHALALKSLVDLSSREPKLVSLRYAERINWLRSLLGHVDSDAREAVSRLLGIASSALSTSSALNLLSELTSTLSQNRPSRFENYHGVLCAIGYLTAGALKQSCITEDMVKNVVDILVKVVTSEGSALASVAMESLGHIGLRCALPSINQNSSTGTLLSVLRERLTKLLSENDTKAQQKILVSLGHISWNEMSFPHLNDALDLIFSLSRSKVEDVLFAAGEALSFIWGEVPVTADVILETNFVSLSQATNYLTGDASLVSSNSYEKSGCEEAHSIAREEIIKKLFETLIYSSRKEERCAGTVWLVSLTMYCGRHKKILELLPQIQEALSHLLGDPNELTQDLASQGMSIVYELGDASMKEELVHALVNTLTGAARKKKAIKLMEDSEVFQEGTIGNNPTGGKLSTYKELCSLANEMGQPDLIYKFMDLANYQAALNSKRGAAFGFSKIAKQAGEALQPYLNTLIPRLVRYQHDPDKNIQACYGRFMLLGLPKVCKHLRNIWTTTFRAMDDIKETVRTAGDSLCRAVSSLTIRLCDISLTSTSEANETMNIVLPYLLSEGILSKVSSVQKAAISLVMKLAKGAGPALRPHLPELVSCMLECLSSLEDQRLNYVEMHAGNAGIKTDKLETLRIAVAKDSPMWETLDICIKVVDKNSLDLLVPRLAQMIRSAVGLNTRVGVASFITLLVQKVMVDIKPFAAVLMKLLHSAVLEERSSAAKKAFASSCATVLKYASPPQAQKLIEDTTSLHSGGKNDQLSGAILIKAYLSNASDILGGYNAVVIPVIFVSRFDDDKDTSALYEELWEDIPSSERVTLTLYLPEIVSLLCDGMSLSSWAGKRKSAKAIKKLCDVLGEPLSAHYQNILKSLLKELPGRFWEGKDAILDALASLCACCHVAITAEDSCLPSVILNCVCAACSRKSKLYREAAFLCLHKVITAFRDPGFFNSVFPMLFEVSNQSAISKTKGSAELDESEGASVSLDKVLNCATSCISVAFPQDIINQKKNVVELILNSLLPEESWQVKLSSFLCIKELCLKFDNSGDSNTWPQDTAYLVEELFHLVSPKLVDSIRLVKIAQVHVAASECLLDLSKLYRDFPLSNRTEAKFEDELTELCESEKSEQAKAILKECLAILKALPGVTMTTD

SEQ ID NO: 55948 - protein, 172 aa, Zea Mays
MSGVQAMPAAVGVAGLRGSGLVSSSSTGLFAGDCKRKARRPACSAWALRQSRIGSRSRSKRGLGIVCNLAGQYEDSFDDVQRQLMNYFTYKAVRTVLTQLYELNPPSYRWFYNFVAVNKPTDGKHFLRALGKKCDHAKTYEKISDENLALMRERLMETVIWPTDDSSTEKIG

SEQ ID NO: 55949 - protein, 525 aa, Zea Mays
MEREMADAPAAAIPAAEPLAAVAEEGEGEAAAEAVGSTLTMERVAAAKKFIESHYRSQMKNIQERKERRFRLERQLASSQVPKEQQINLMKDLERKETEYMRLKRHKICVDDFELLTIIGRGAFGEVRLCRERTSGNIYAMKKLKKSDMVVRGQVEHVRAERNLLAEVASHHCIVKLYYSFQDTEYLYLIMEYLPGGDIMTLLMREDTLTEHVARFYVAETILAIESIHKHNYIHRDIKPDNLLLDKNGHMKLSDFGLCKPIDCSKLSTLNEDEPMSDDNLRESMDIDSSLSDTANGRRWRSQHEQLQHWQMNRRKLAFSTVGTPDYIAPEVLLKKGYGMECDWWSLGAIMYEMLVGYPPFYADDPITTCRKIVHWRNHLKFPEDAKLSNEARDLISRLLCDVDHRIGSAGADQIKAHPWFRGVAWDKLYEMEAAFKPQVNDELDTQNFMKFEELENPPAKTGSGPSRKTMLNSKDLSFVGYTYKNFDAVKAIKISGPPGMDSPMEPNGRGTHMHTVSSGDPMIP

SEQ ID NO: 55950 - protein, 151 aa, Zea Mays
MDLGVPRDFTPSDPGARPGQGHQPDAGPGDGGHPHLLPALRHLRHDPGPAEPGPRHRPAADGPHRRRQQPRRRQLHRRVHEPGTLLRPGPGHRGLDKPLGLLDRPAARRAPGRLRVRVAVPGAEDARAAAQWGSLTTISPCVVAHASCLFL

SEQ ID NO: 55951 - protein, 237 aa, Zea Mays
MNTVASLPLAPRLLIKPSLACFSRKDVGRYGGIKVYAVLREDGAEFARNNNLEALFQVDDPGPRAPVKKFLDVNEALEVVRFDIQYCDWRARQDLLTIMLLHSKVVEVLNPLAREFKSIGTLRKELAELQQELEKAHNQVHLSEARVSSALDKLAHMETLVSAPSTAEPPTSSSLSATASSTARVRAKNKQPRRRLDVSGPVKPYNPSLKNFWYPVAFSAASFRIYGPRRDSDGATS

SEQ ID NO: 55952 - protein, 56 aa, Zea Mays
MVVLLVVASFLLLFFAGNYALYVYAQKTLPPKKKKPVSKKKLKREKLKQGVSAPGE

SEQ ID NO: 55953 - protein, 226 aa, Zea Mays
MVDAEKRLLAHALQDPENQHFVLLSESCVCVPLHNFDYIYSYLMETNVSFVDCFDDPGPHGAGRYSDHMLPEIVKKDWRKGAQWFTVKRQHAVLILADTLYYGKFKRYCKPGNEWHNCYSDEHYLPTLFNMADPTGIANWSVTHVDWSEGKWHPKVYRAVDTSFELLKNISSIDESVHVSSNAKHVAQRRPCVWNGMKRPCYLFARKFYPEALGNLMNIFSNFTVI

SEQ ID NO: 55954 - protein, 64 aa, Zea Mays
MCCFCGESALALCCGESRGVQCTRPVFAVRGTGFVRCVDRVAWHAVVGRGQKNSRCVHLVSLAP

SEQ ID NO: 55955 - protein, 500 aa, Zea Mays
MEEFLKLGVRSIILTSGTLSPLDSLAMELNLEFPVRLENPHVISSDQVWVGVVPVGPSGHALNSSYRTRNTIQYKQELGTAIVNFARIVPDGLLVFFPSYSMMDMCVDFWKNRNHSNSASENTIWQRICKHKQPVIEPRQSSNFQSAIEDYRAKLHDSSSGAIFFAVCRGKVSEGLDFADRAGRAVIVTGMPFATPTDAKVRLKREYLDKQGTPSNKNTKMLTGEEWYVQQAARAVNQAVGRVIRHRHDYGAIIYCDERFVWPNYQSQMSYWLRPHIKCYSKYGEVVQGLTRFFRDKASSDPLTLEPTDCNNCIAPPANKHMLKEKLSDLAASAQDECPQITLSGNSTMRRSNFMKLAQITPANRSTLTTKHNFVSTSTKHNLPEDQLSQDTNVDITVDLAIQGHLKEHTFKSLGLKKAKTMDRSKDAVVLDDVSSKLPQNIGSRALARYQCGGPTPESKKSTIATACGKNDGACEKTEGQESNSGPAFLKLVQEKLSPA

SEQ ID NO: 55956 - protein, 129 aa, Zea Mays
MEVDLCTGELCNRARGCRGVRHRGTEVQGRECRDQLRAQPVQPASDRSTRHPHPGEEADSEASSGGRRPGRSERSFVLPVPAVEQQLATVFPHQPPAAAAVAALTSSGSAELQQLGVRGAQLVLALPLR

SEQ ID NO: 55957 - protein, 630 aa, Zea Mays
MSVRRRSTSMEGLLTLDDWKERRSDVDNSEDERRRLSIGSLKKKALNASNKLTHSLKKRGKRKVEHRASSFTIEDVRDEQEERAVFTFQQKLLDMNLLPDKHNDYHSLLRFLKARKFDTEKAIHMWAEMLQWRKESGADTILEDFSFEELDDVLCYYPQGYHGVDRQGRPVYIERLGKVEPNKLMHITTVDRYMKYHVQEFERAFRDRFPACSVAAKRHIDSTTTILDVDGVGLKNFSKTARDMLSRMQKIDSDYYPETLHQMFVVNAGSGFKLLWSSVKGFLDPKTASKIHVLGTKFQNKLLEVIDASQLPEFLGGTCTCAAVGGCMRSNKGPWNDPDIMKLAHNKEAKFTRHTRRLSEIEQGRSSFARLHLLKGRNSDTSTVESGSEIDDLGAPIMRSTVGCSRLAPVREEMQMRARDSAAYYSCDDHFVVVDKTVDYGRGGSPSDKSSASEVRTHVRPLDASTAAHVAGPSSNRRATVVPEEVSDEGVFRRFVRLLLAFIVKVFAFFHIVRSQQETRVNNLLPPAEPELISDDHPAVETFNVDHISPVIERLQRLEGKVDELGSKPPAIPVEKERSLLESWDRIKCIESDLERTKKVLQATVRKQLESAESLEEVIRSSLPRRRFCL

SEQ ID NO: 55958 - protein, 257 aa, Zea Mays
MIDPTAVFGMLFGSDYFEDYVGQLALASVASVEIEEESNTPEARTRIQEKIKDVQTEREQILTQSLRDRLQPYVDGKQDEFGDWASAEAQRLSQAAFGEAMLHTIGYIYVRQAARELGKSKLYMGVPFIAEWVRDKGHHVKSQVNAAAGAISLIQLQEGIKKIEEGDKEEQLIKSIEEKKDAMLNSLWKINVVDIESTLSRVCQAVLRENDIPRDVLKLRARGLKKLGTIFQGAKSNYRRENSLRVEDDAAEATPSH

SEQ ID NO: 55959 - protein, 200 aa, Zea Mays
MDHLQVLKLPSMAKFNAGFTHCNQSFVKDCVGPAKESYERRMSKMLAKSRALFIKEYNNKLFNWLATFSLVMVVIGRFVIKFFLLEIVAWVMFIFLETYTRMFWSAESLYYNPAWHIIVSSWEMIVYSPILDLDRWAIPIVIMLSLGVLYWRCFGRRRKRDGTKHLLIEEATLPVLLDGHVLMLPCLWISNCFLVDEERQ

SEQ ID NO: 55960 - protein, 938 aa, Zea Mays
MSEIKRRRIYIKLVESTRSEDFSESKIITISFLYATMPVWLLFFALGISSDKEVFDMIDMQDCDASVINTISATIKESDKLCEDFRKSDKARQYVDELVKSSRFPPAESFDDYIARFLFPDISGNRNKALFLGYMVKCLLMAFTGKRKCDNKDDFRNKRLDLPGELLGRELRAQLRLAEKRMVKAIQRDLNSDRELQDLERYIDASIVTNGLNRAFSTGSWCHPYKRAERCSGIVATLRRTNPLQMMSDLRKTRQRVAYAGKAGDARYPNPSYWGKLCFMSTPDGENCGLVKNLAVTAIVSSRVMQPLIESFISCGMSKLNDIPTEHIQRMDKIFLNGNWVGSCENSASFVFRLRCMRRSSLIDPQVEIKRDKHHNEVRVFTDAGRILRPLLVVENLNKIRKPKGRSFSFHELMQQEIIEFIGVEEEEDIQCAWGIRHLFESEGAISSYTHCELDPSFLLGLSCGIIPFANHNFARRVLYQSEKHSQQAIGYSTTNPHIRVDTLSHQLYYPQRPLFKTVIADCLGRSDYASFGRKNDFARPEYFNGQNAIVAVNVHQGFNQEDSLVMNRASLERGMFRTEHLRSYKADVENKDGTKRLKLKEKIDFGKTESKRGRVDNLDDDGLPYVGASLQTNDIVIGKVSESGEDHSIKLKHTEKGMVQKVLLSANDEGKNFAVVTLRQVRTPCLGDKFSSMHGQKGVVGFLESQENFPFTHEGIVPDIVINPHAFPTRQTPGQLLEAALGKGIACKGTMRYATPFTTASVDVIAEQLHRAGYSRWGSENVLNGRTGERVQSLVFMGPTFYQRLIHMSEDKVKFRNTGPVHPLTRQPVADRKRFGGVKFGEMERDCLLAHGSAANLHERLFLLSDFSQMHICQTCERVANVVMRSVPGGKKIRGPYCGFCKSSENIVRINVPYGAKLLYQELFSMGICLKFETQVC

SEQ ID NO: 55961 - protein, 737 aa, Zea Mays
MLTFQLSDQTLHPFDHASFQGTARLSAVRCPPRALRSRAALPAARPRAHWTSFRPAPIDPAAMSSAAVSSSSSTFFLALASASPGGRRRARVGSSPFHTGASLSFAFWAPPSPPRAPRDAALVRAEAEAGGKDAPPERSGDAARLPRARRNAVSKRRDPLQPVGRYGSATGNTARTGAASCQNAALADVEIKSIVAAPPTSIVKFPAPGYRMILPSGDIAPETVLPAPKPLHESPAVDGDSNGIAPPTVEPLVQEATWDFKKYIGFDEPDEAKDDSRVGADDAGSFEHYGDNDSGPLAGENVMNVIVVAAECSPWCKTGKNITLSGFFQNCFSFEFDGVTDVVVPRYGDYVEAFDMGIRKYYKAAGQDLEVNYFHAFIDGVDFVFIDAPLFRHRQDDIYGGSRQEIMKRMILFCKVAVEGRGPVDEFPYMDLPEHYLQHFELYDPVGGEHANIFAAGLKMADRVVTVSRGYLWELKTVEGGWGLHDIIRSNDWKINGIVNGIDHQEWNPKVDVHLRSDGYTNYSLETLDAGKRQCKAALQRELGLEVRDDVPLLGFIGRLDGQKGVDIIGDAMPWIAGQDVQLVMLGTGRADLERMLQHLEREHPNKVRGWVGFSVPMAHRITAGADVLVMPSRFEPCGLNQLYAMAYGTVPVVHAVGGLRDTVAPFDPFSDAGLGWTFDRAEANKLIEALRHCLDTYRNYEESWKSLQARGMSQDLSWDHAAELYEDVLVKAKYQW

SEQ ID NO: 55962 - protein, 151 aa, Zea Mays
MRKMESTRSPARLHNKGGFLSATVQIKESTLLPTGKPCWQSEMSHPTTNEVSTSAQATTWIDAGACAEEQEPTPWVDIGVSDYQPFLDVIDDMCGLEWRLQRLKENMLSSSIDGQTAASESDKRNQTVVLVPTAELKEKLPHDGLFGHYCP

SEQ ID NO: 55963 - protein, 155 aa, Zea Mays
MSKKIVVKLHLQDNKDKQKAMKAVSALTGIDEISADMASHKMTVVGMVDPVSVVSKLRKASWSATIESVGPAKEPEKKDGEAAKKDGGEGENKKEAGGEKDKDGKKAAPPTEQQVQLAELLNQYYRASSYYPYPPVATHYHVQSMEEDPNSCTVC

SEQ ID NO: 55964 - protein, 396 aa, Zea Mays
MAFIRSYVVPEGFPDSVTPSYVPYMTWRALKHFFGGAMGVFTTRTLLSSVGVSQSKVTPGAIAINWILKDGAGRVGKMLFARQGKKFDYDLKQLRFSSDLLLEIGAGIELTTAAFPQFFLPMACVANVVKNVAAVTSTSTRTPIYKAYARGENIGDVTAKGESVGNIADLLGTGLSIFISKRNPSLVTSFAFLSCGYLLSSYQEVRSVVLNTLNRARFTVAVDSFIKTGHIPSLKEGNSQETIFNPPWRHEPVAIGSRFGEAFQEPASFLAIRPLFEDERYMVTYNPTKDKVYALLKDQAKSDDIIKAAFHAHVLLHFINASHARRLKQKQKQANPDRSEYLYSRNMDFLAHIAESCKIVSSSYGTFKKKAREQGWIMSESLLNPGKARLCAAKPQ

SEQ ID NO: 55965 - protein, 63 aa, Zea Mays
MAMAMASFVAQLKDMFLGLVDRVTGCRGCGGDKQDVPEATNPLRSGRETPLWAEDPWLGPIDC

SEQ ID NO: 55966 - protein, 693 aa, Zea Mays
MRRSVYANYAAFIKTSKEISDLEGELLSVRNLLSTQSALIHGLSEGVQIDSLATGPEGSAEQDISSVEDQEPSEIWKWSTDFPDMLDVLLAERRVDEALDALDEAERIAADAKQKGTLSTTDILALKRVISENRQKLADQLAEAACQSSICGVELRAAASALKRLGDGPRAHSLLLSAHNQRLQLNIQTIQPSSTSYGGEYTASLAQQFFPVIAQALSDSVEVFSEKSAYTSELVTWATKQAMSFSLLVKRHTLASCAAGGGLRTAAECVKIAIGYSDLLEARGLSLSSVLMKQLRPSVEQALDSNLRRIEESTAALAAADDWILTYPPTGIRPLARSSGNLALQPKLSSSAHRFNSMVQDFFEDVGPLVSLQLGGSAMDGLLKIFNSYVNLLISALPGSVDDEVNLEGLGNKIVRMAETEDQQLALLANASLLAEELLPRAAMKLYSMNPVSKDSLRRRGPENQNRAAEQRAWKRKLNRMVEKLRDSFCRQHALDLIFTEEGDTRLSAEMYIDMDNTVEDPEWVPSAIFQELYAKLNKMASVAADMFVGRERFATLLMMRLTEAVMLWLSDDQSFWEEVEEGPRALGPVGLQQFYLDMQFVILFGQGRFLSRHVHQVILDIIDRAMRAFSATGMDPDRILPSDDWFIDVAQESISRIGGGRARVANGDREVNSPTASVSAQSVSSVRSLGSS

SEQ ID NO: 55967 - protein, 142 aa, Zea Mays
MDHERLTERLRLYELVENKVKGDGNCQFRALSDQLYQSPDHHEFVRSQIINQLKTNRDAYDGYVPMAYDDYLEKVARNGEWGDHVTLQAAADKYGVKIFVMTSFKDTCYIEILPKVQKSNKVILLSFWAEVHYNSIHPQNGE

SEQ ID NO: 55968 - protein, 188 aa, Zea Mays
MMIVKEETWEAVIADSLLYAKGLLLAVTLVIDWWLAFAYFLGFLVIYAVAQQPPYDGLGHSNHLTPLQLESLLTEEPTSRFWLVEFRTSFSAKCVQASSILPELSIVYSNKNISFGTIDLGHFPNAAAKFGISMWDHLPTYILFDKVTEVSRFPEITSESKVFVPKVTKKLLCQHFDLDRRLIGYLST

SEQ ID NO: 55969 - protein, 688 aa, Zea Mays
MTKNPMMLRSLALPFTVLEWTLPAAPRPGQNASSKQSSTSKERSAEASGAESSDETCESFAFALVNGALGVFEVHGRRIRDFRPKWPSSSFASSDGLVTAMAYRLPHVVMGDRSGNIRWWDVTSGLSSSFSTHREGIRRIKFSPVVHGDRSRGRIAVLFYDNTFSIFDLDSPDPLANALLQPQSPGTLVLELDWLSTRTRKDEPLMLCIAGADSSFRLIEVNIDAKGSSISKPVATKERFRPMPFCLPVLFPTAHALALRMILQLGVKPSWFECNSSDKLTGDSFKVAPTFGDLRSYMIETTLPPIGDAVVAELLLKVLEPYRKEGCILDDGRASLYSAIVNKGACARFAFAAAIFGDFQEALFWLQLPQALRHFLGKSTSRSREKISQSSLHPDSEQSSRFNRIASRERSASEKSSIFVQNYGQLSSMAFNQEQLWFNASERIPWHDKLDGEDALQKHVHELVSLGNLEAAVSLLLSTPPEGSNFYPNALRAVVLSSAVSQSLHELAVKVVAANMVRTDKSLSGTHLLCAVGRYQEACSQLQDAGCWNDAATLAASHLHGSDYARVLQRWADYVLRGEHNMWRALILYVAAGALPEALDTLRKSQRPDTAAMFLLACHETYSQALSESEPEDDTSVLALTPTPEQTEKLRFPSKNVADEDLIAVSEVFGQYQQKLVHLCMDAEPTSD

SEQ ID NO: 55970 - protein, 239 aa, Zea Mays
MSTADSQEKGSAEHRRRWGSLRLYLCGEEMNAAAEEEEDGDGDTVSVKSFETCCVMPEEAHVVVPVHHRLMSAAHDGNDQSRVPGGADEEGAATLIQSAFRGFMSRRQLQEARARTRTRTRGREPEPDGAKDQEPSSPTWGPSVATSVLVQVGDESSSLGNLRLRLSEESASVQQQRSSSQRSSSRPPPAFRVKEEWDDSTVSSNVSRMRIQNRIEATTRRERALAYAFSQQCVRTRVR

SEQ ID NO: 55971 - protein, 213 aa, Zea Mays
MREIGRIEGNFCSDKKSAAVNWIDGRGKSVVCEAVIKEEVVKKVLKTNVQALVELNVIKNLAGSAVAGALGGFNAHASNIVAAIFIATGQDPAQNVESSQCITMLEAINDGKDLHISVTMPSIEVGTVGGGTQLASQSACLDLLGVKGANRESPGSNARLLATVVAGAVLAGELSLISAQAAGHLVKSHMKYNRSSKDMSKTLAEETDKPKKC

SEQ ID NO: 55972 - protein, 68 aa, Zea Mays
MEPGWDGSVSPRDFCYLWSSFSSVGRGAPETAGFASGSQGKMCSCSIDCLLHSIERCSSIIIYWSSPC

SEQ ID NO: 55973 - protein, 437 aa, Zea Mays
MTSANKAKLQLQERVPLPRTAWKLADLAVLSLLLALLARRASSLVSSGGTAAACTWCWVAALICEAWFTVVWLLNMNAKWNPVRFVTHPERLAGYWAGDDELLPAVDMFVTTADPKLEPAVVTVNTVLSLLALDYPAGKLSCYVSDDGCSAVTCYALREAAEFAKLWVPFTRKHGAKVRAPFAYFSSSSGGGAAERGGGGGAADADAEFLRAWTSMKNEYEELVRRIESAEEKSLVRRGDGAFAEFVGADRGNHPTIIKVLWDNDSSKSESDEQAAGDGVPSLIYVSREKSRTQPHHFKAGAMNVLTRVSAVLTNAPIMLNVDCDMFANNPQAALHAMCLLLGFDDEVHSGFVQAPQRFYGGLADDPFGNQMQVIFELDTELPDSKAYFTAGRVAFTAGKSCTACHRAPAPAPPKLWQQQIHRPTRSYRRSLAVRKN

SEQ ID NO: 55974 - protein, 596 aa, Zea Mays
MMGEAGEEESAAAPAEVSRQAELDEQRCLAEALDALSSLVSASLSATLFPLKWQLTRDRLHACLADTTVPAGDESGEDRRDAFVNLLRDVAATAREARELVPRSQGRQYGGGKLRLRSDLDVLAAALDAHVARLDEVHASGALTRARALVVPRPGAGATRDDVRFYVRDLFARLRAGGAEMRREAATALSEVLRDDEKCVRVVASDVADGVGVLVALLECPDARVREDVLEAVSVIAGSDAHRGDLVVGGVIAPVVRVLDAAASASSEAAKERAARVLCKLTENSDNAWAVAAHGGVTALLDLCTDHGASGGELVCAACRVLRSLAGVDEIRKYMVADAGAVPVLVSLSQRATDDAARIQAMELVVAIGSGDSSAREAVVQEGAIEVLVRALDASSSSKVREVALRAIDGLCLSPPTSTDRLLAAGFLDSVLSLLRTGDTTLQHCALKAAHRLCPVSEEIRKAMGDAGFMLELVSVLGASSKSPEAREMAAESLCALVSVHRNRKRFVQEDRDDVARVLQLLGSGDEEKLTPAKRFLLSTVTRLADSSSGRRKILTSEHVRNLEKLAETDVPDAKRIVKRLGGSRLRSIFHGIWSL

SEQ ID NO: 55975 - protein, 408 aa, Zea Mays
MGTNLELKLGGCLFSYRHRETEKATVDSRPGHVSDGVFGRPNARKLPHFSPRKPSQAKTRHRCASPATGSQTDRAAMVLVSDSELVERLQEVLRSSDLNTTTTAALRRRLEEDFGADLSHKKAFIREQVDLFLAEVAAKAEPQEPKEEEPEEAPVPKEEEPEELEGVEEEGEGEDEEEEEEEEEEEECEDENSSGARKKQRGNDGKKRGGGFTKLCSLSPALQEFVGASELARTEVVKKLWAYIRENNLQDQNNRRKILPDERLKKIFNVNSIDMFQMNKALTKHIWPLNSEGPVSPDRSTPKEKPQKRDRSEGKKQKGGSSGAGSGFLVPLQLSDDLVKFIGTGESMLSRSDVVKKMWDYIKGNNLQDPSDRRKIICDEKLKDLFGVETFTGFTVSKLLAPHFTKTK

SEQ ID NO: 55976 - protein, 377 aa, Zea Mays
MVTEMAARGGEAAAFGAEADRGDFEVFRSGSAPPTVEGALGAAAAAADLLVDDDLRADPAYQSYYYSNAHLNPRLPPPLLSKEDWRSSHHRLRSAAFGGIGDGRRQQQPAAQGTVGLPGIDLARQRSFSTVFQAIEVVDLDLQTKMVAELEGHVMRCVRDQNGNHVIQKCIECIPQHAIEFIVSTFYGQVVMLSTHPYGCRVIQRVLEHCDDPKTQQIMMDEILQSVCLLAQDQYGNYVVQHVLEHGKPHERSAIIEKLIGQVVQMSQQKFASNVIEKCLAFGNPVERQVLIGEMLGSTSESEPLEVMMKDQFANYVVQKVLETCDDQQREMILTRIKTHLNTLKKYTYGKHIVARVEKLVAAGEKRLGLQPACTAA

SEQ ID NO: 55977 - protein, 673 aa, Zea Mays
MAGSMVDRATSDMLISPDWAKNMEICDICNRDPGQSKDVVKALKKRIGHKNPKVQLLALTLLETVIKNCGDILHMHVAERDILHEMVKIVKKKSDPRVKEKVLVLIDTWQEAFGGPRARYPQYYAAYHELVRAGAEFPKRPEKPAPLFNGQSQAARNMRSPDQQDAAESSTANDFPALSMSEIQNARGIMDVLAEMLNALGPGNREGLRQEVIVELVDQCRTYKQRVVQLVNSTTDEELMSQGLALNDDLQSVLAKHDAIAAGIAVRVEKKPKSLQSLVETEDSANQDSKKEQGLIDIEDPTSQDAAKEPNQSTSDQSPFEQLALPAPPVSNGAATKSDLGIDLLSWDDTPATAQNPLALVPVTDPLADSTSSNQNALAIVDTFSQNSTVNSNTQAADPFGLNPSSAIPGSQAYNTPTQQHFQSQQATLYPNGGAGTSYDQASQFNNVNSGWNDQAANLPAEQALNYDDQSGNLPPPPWEAQPAASNEMPNGELGGVQPLPGTAGQFGGMQQALQPQVNHMGVPQRQPMYSNQSGIGVAPTLMQAGLGNQQLGSTSMMGMPPQMYGGGSQAAMMYPQQMPVAPQQPMYGGGGGRLAGYMQHPAVAAAHYYSNLGTAGMYGYPGANGLSQSMYGLSVQDNSSYQTKTAPPSAVMKPEDKLFGDLLSIAKTKKAS

SEQ ID NO: 55978 - protein, 414 aa, Zea Mays
MSYLGPQFIGKSGNHKVKTIFFSSTGERAAPFVRQAAQEYSSYSSFGFVLWREDESQIWWNSLGVESAPALVFLKGPGTTPFVHHGIFSKSEFIEMMEEHKHHELRQLRSDTSLELGCDARGHSRAGNDAAIWYCVIVAGRPGAELSKKRQILRKAQDKLLGDVDRSAGNVDNSVETSSAATAFKDDRLTFVWLDGEVQKQICAFYLATDYTGACGPRDFGDDNDKPEIFIVRFQRNATYEALKAEKKNNLVDVLQGQHADASQLVARYKGPVEIEEINRWISQIIKDGDTREIPYFTSKVPDLVPEETSKAWNSKSIRSAGKSLKENIGFHFQDYLTHPMIGSTLLMCGCISMGILWFRNNTPTQSTRQEKARKDKAKRPRPKLSTSLFGEPSVPDVDPKDARQWEMSSSDSD

SEQ ID NO: 55979 - protein, 903 aa, Zea Mays
MRHCWSAWLLALCLVSVQLLAPLVCERLLVAAQNLSPPALTPPLVKEVDDVVEHVWISCGLDRGSLEDVRKHFNYNHVFDILRTLSGKDTKDSSPETEDASKALSPEIKNTLLNCLSKHPLVVAAHESAKNLPIDYIKMLFALLRRDVAQGSTGAATTSAPPAAVKSNPSPSLGEPSSTKPDKNPDPPLETTPEEKMVPQTEKTVAKKEDNSNMSITAVIGLSVSAIALLALLCLCNFVCRAKQASSSEVGVDKPPLNQNLSNLSASLKFSKGNSIDVNKLGALPLKSEAGQNGNAKLSSSEISKTEVTPAVYNCLAEPMAASTGYVPGSRPTTPPSMPPPAPAHPKAPPSSTPQAPASLKAPPSSTPQAPAPLKAPHSSTPETPAPPSKPSSVLHSEPSSPSALKAAPPPKDAPQPKAAPPPPPKSTGPPPPAMSGSSNTRPPPLMKKSGNKMDDGANSHEAKTKLKPFFWDKVTANANQSMVWDHLKSGSFQFNEGKMESLFGYNSVEKIGGDGKKDLLSKDIPQFVRILEPKKAQNLAISLRALSVSPEEVCSAVKEGNELPSDLIDTLLKWIPSNEEELRLRLYTGELSQLGPAEQFLKSIIDIPYIFQRLDALLFMSSLPEETSNVKHAFATLEVACQELKNSRLFLKLLEAVLKTGNRMNVGTFRGGAQAFKLDTLLKLSDVKGTDGKTTLLHFVVEEIIRSEGIRATRAAKDTDGNNMRTEDDYKQLGLKVVSNLSDELQNVRKAAILDADQLTMSVATLGHKLVKTKEFLNTGMRSLDEHSGFHRKLKHFAEQCQTDVSLLQEEEKKIRSLVRGTVDYFHGSTGKDEGLRLFVVVRDFLAMLDKVCKEVKEASKVAPKKTKTAQPSQASFNDPRRKLFPAIQDLRADSSSSDEDD

SEQ ID NO: 55980 - protein, 387 aa, Zea Mays
MKKRNSFSWRECAISVALSVGLITGAPTFGPPAYASSLEPVLPDVSVLISGPPIKDPGALLRYALPIDNKAIREVQKPLEDITDSLKVAGVRALDSVERNVRQASKALNNGRSLILAGLAEPKRANGEELLNKLAVGFEELQRIVEDRNRDAVAPKQKELLHVEEDMVDGFPFEIPEEYSNMPLLKGRATVDMKVKIKDNPNMEDCVFRIVLDGYNAPVTAGNFVDLVKRKFYDGMEIQRADGFVVQTGDPEGPAEGFIDPSTGKIRTVPLEIMVDGDKAPVYGETLEELGRYKAQTKLPFNAFGTMAMAREEFDDNSASSQVFWLLKESELTPSNANILDGRYAVFGYVTENEDYLADVKVGDVIESIQVVSGLDNLVNPSYKIVG

SEQ ID NO: 55981 - protein, 605 aa, Zea Mays
MASEAESPVVIHAWSAPRSLSTSLMYSFAQRDDMEVLDEPLYANFLRATGVDRPYRQELLSKMDPDGNKVVKEVIFGPGDKKYRYCKHISKQHLPNLSSDLMKKGKHFILIRNPLDILPSFDKVVPPSFMELGIGELVSIYSELCGLGSPPPVIDADDLQQDPEAVLSGLCEDLGIPFQPQMLKWEAGPKEFDGIWAPWWYGSVHKSSGFSKPRQYPLTFPFVFYDLLEQSLPFYNMLKRQIRKIRGPQQPPLSDPPLPVPANKNILVWVGDELLPRNSAKVSVFDSVVQGGDAVWEGLRIYDGKVFKLDEHLDRLFDSAKAMAFSNVPTRDWIKDAIFKTLIANGMFNNAHIRLTLTRGKKVTSGMSPAFNLYGCALIVLAEWKPPVYDNSHGIKLVTATTRRNSPNSIDSKIHHNNLINNILAKIEGNLAQAEDAIMLDKDGFVSETNATNIFMVKKGIVLTPHADYCLPGITRATVMDLVVKENFVLHERRISLSEFHAADEARTRMAKVCVAAAAAQMPLQHMSLLPQKLPWTLPLQAQSAWAWVLSPHSCRNPFLLVSSGTMAPCQCRCGPLSPNDSFTAYFTLVTTIATQVCCRCSGVL

SEQ ID NO: 55982 - protein, 114 aa, Zea Mays
MVVMEGNGGAGRITIGVCVMEKKAFSSPMEQILERLRAFGEFEIIIFGDKVILDDPIEIWPNCDCLIAFYSSGFPLQKVQAYAALRRYIFYSLFLYISLSNGNYSCKHVSIFLI

SEQ ID NO: 55983 - protein, 198 aa, Zea Mays
MDEQEEYDGPPQKEIPALIVWTLGGKNVYVEGSWDNWKSRKAMQKSGKDHSLLLVLPAGVYRYRFVVDGERRCLPDLPCEIDAMGNAVNLLDVNDYVPESVESVAEFEPPPSPDSSYSFQAPEDKDFAKEPPVLPSQLHLGVLNSQNSEESCARPQHIVLNHLFIEKGWGAHPLVSLGLTHRFESKYVTVVLYKPIER

SEQ ID NO: 55984 - protein, 100 aa, Zea Mays
MGRDGGGGVAGGMSESVLRKGWPTTIMSSCRRSRLRRPRRKPHRLMRRLGRSCRSAMDMVIIRATIRLRLSDLILAFPYWGSDARCKDRSLVYGCFQGGG

SEQ ID NO: 55985 - protein, 123 aa, Zea Mays
MPKIKTSRVKYPEGWELIEPTIRELDAKMREAENDPHDGKRKCEALWPIFRISHQRSRYIYDLYYRRKEISQELYEFCLDQGYADRNLIAKWKKVTSAFVASGAYKHVTTTSQRHASAASPSI

SEQ ID NO: 55986 - protein, 214 aa, Zea Mays
MKKSIDAWRKKEDKLKKVQPYDVFLSDSHVSLTGIVGGVASGYLGDCSRRVAIRDETHKSNAFIMFDERNKRAAFADLFASVTFTAQYGNFQRLFLDLTKASARFDITSGSLFLCGASRLAQDFFFSRRPDVETFCDICPDVTVSFQQQIVGPFSFRVESSVAIDPRSQDHFVRVDDPIFAIDWALKVLGSAKATAWYSPKHQEAMMELRFYET

SEQ ID NO: 55987 - protein, 552 aa, Zea Mays
MHLTVMSLSAAVANGAAAYRYDTIQPVARLRFCGLRRKAHRLHSPRYSRHLVAARRSVVVAATAGNGAAASGTFDYDLVIIGAGVGGHGAALHAVEKGLKTAIIEGDVVGGTCVNRGCVPSKALLAVSGRMRELQDEHHMKSLGLQVSSPGYDRQVVADHANNLASKIRSNLTNSMKALGVDILTGIGTIVGKQKVRYGKVGFPDNEITARNIIIATGSVPFVPKGIEIDGKTVFTSDHALKLESVPEWIAIVGSGYIGLEFSDVYTALGSEVTFVEALDQLMPGFDPEIAKLAQRILISPRKIDYHTGVFASKITPAKDGKPVLIELIDAKTKEHKETLEVDAALIATGRAPFTKGLGLENINVVTQQGFVPVDERMQVMDATGNVVPNLYCIGDANGKLMLAHAASAQGISVVEQISGRDNILNHLSIPAACFTHPEISMVGLTEPQAREKADKEGFEISVVKTSFKANTKALAENEGDGLAKMIYRPDTGEILGVHILGLHAADLIHEASNAIALGTHVQDIKFAVHAHPTLSEVLDELFKAAKIMFHP

SEQ ID NO: 55988 - protein, 312 aa, Zea Mays
MAGSIELQLQQLGSSKHASPPPISPAPRTSMAAGEGGGGDIGADSERRLQKAMDKLYHFPKPKSSSTGGSKPSSSTSAPSSGRAVGKAAAEAARRFGVVRGSRLPHQMLAMAAISPPPPCRPWDRADLMRRLGSFKAMTWFAKPKVISPVNCARRGWTNIEPDVITCEACGARLLFSTPSSWTTQQVEKAAAVFSLKLDSGHKLLCPWIDNICDESLALFPPTPPPVLVGNYYELLSSLLRLLALPRISCSSLETMKKRNPQLEQFLSEPFSSSVVLKGGLMLTEDSTIKDLDDAFQDADTYYQKNKGCMTE

SEQ ID NO: 55989 - protein, 83 aa, Zea Mays
MSSSFSVSYLPGFWSKPDNSAFGLASIVLQVPKKTLLQYDYVEGVGQTGTYFHRARVSANVCFLGWRPQQFHIQTKFCKSKKD

SEQ ID NO: 55990 - protein, 335 aa, Zea Mays
MDVFCFSEACLIADIVQHFIDAKLEFDPSYIYEDVNQSIQHVHRSGLIHRQILSEPEKFLIKKSQVFRFLKMLKEKGKKLFLLTNSPFYFVDGGMRYLLEDQHFDGNSWRELFDVVIAQANKPTFYNSDHPFRVYDTQKDTLTFTAVDKFLPDQVYYHGCLKSFLQITKWKGSEVIYFGDHLLSDLRGPSKAGWRTAAVIRELEDEIEIQNGDSYRFQQAKLSIIHDLLGKVHAAVVSTEKGQVYKALLNELNAERRQCRSGMRDLFNTSFGATFLTDTGRESSFSYHIHQYADIYTSKLENFLSYAPESWLHPPHDIKIMPHNAKVPASLFSTS

SEQ ID NO: 55991 - protein, 178 aa, Zea Mays
MGVPGITIYHVKSHLQKYRLAKYIPDSPAEGSKDEKKDSSDSLSNTDSAPGLQINEALKMQMEVQKRLHEQLEVQRQLQLRIEAQGRYLQMIIEEQQKLGGSIKASEDQKLSDSPPSLDDYPESMQPSPKKPRIDALSPDSERDTTQPEFESHLIGPWDHGIAFPVEEFKAGPAMSKS

SEQ ID NO: 55992 - protein, 123 aa, Zea Mays
MSEPSSASASQDATQTASSTARPAQNPQPMSMRSRRTPTWAKSRNSDDSSSDSSVLRHASGDFKRLGNRIFVFMIGGATRSELRTVHKLTMKMKREIVLGSSSIDDPPQFISKLKSIGSATKT

SEQ ID NO: 55993 - protein, 442 aa, Zea Mays
MHYYADFPSSACKATGNSSTYYPNGPQPQWQNDTVAAATRSTFGPPGGGWHAPPPDMTSGPHGARPPPPTTPHEALLGLGKGTFSYEELAAATGDFSAANLLGQGGFGYVHKGVLPGGMVVAVKQLKSDSGQGEREFQAEVDIISRVHHRHLVSLVGHCIAGARRVLVYQFVPNKTLEFHLHGKGQPVMEWSTRLRIALGSAKGLAYLHEDCEPSPDHSPRHQVGQHSSRQQLPSQGRRLRAGQADVGQQHARVDPCDGDVRVPGAGVRVEREADGQVGRLLLRRGAAGAPDGAAPHRRRRRALVPRRRRQPRGLGEAGAVARAGRRRLRRRRGPEAAGQLRHHGDGAHGRQRRGSRAPLGQEAPQDESDREGTRGGHLAGGPQRQRGGATWAEHGVRHGGRGLVQGQSSRTVHARRGTDQAGAHGVQRRGGPSLYDRQRRR

SEQ ID NO: 55994 - protein, 335 aa, Zea Mays
MRKVLREVASGGRDAERVKLKLEIVVESVDYDKEGSVLRVRGKNITENDHVKIGQFHTLELELKRPFVLRKEIWDWLALETIQQACDPAASADLAVILMQEGLAHLFLIGKSITATRARIETSIPRKHGPAIAGYETALKKFFEYVLQAFLKHIDFEVVQCTVIASPGFTKDQFRDYLFLEAARRDLRVIIENKQRLVLAHATSGYKHSLKEVLDTPGVMALIKDTKAAQEVRALQDFFNMLTNESARACYGPKHVEFALQQFAIQTLLITDTLFRNADIATRQRYVKLVEDVKKNSGTVHIFSSMHVSGEQLAQLTGIAAILRFPLPELEDMEL

SEQ ID NO: 55995 - protein, 743 aa, Zea Mays
MAQNGFLPLMELLEIPKNRILCSVLQLINNIVKDSTGFLENACLVGLIPVVMNFAEPNRPKDVRVQASLFLQQLCQASTLTLQMFIACQGIPVLVSFMEPDYAKYRDMVHLAIDGIWQVFKLQHSTPRNDFCRIAAKNGMLPRLVNTLYSLNEATRFASVSGSGASVTQNGSTPRRRSGQLDPSVLESCKARLDHHHSSGSLQSLQADADKHHILMDSSSSPRFSDKTSSNLERNENDLVIRPQRLSVSAGRTSTDRSPKHIELVSNGHNNSQNDQVRPLLSLLEKEPPSRHVSGQLDYVRHISGLERHETILPLLHTSTERKTNGELDLMMDFAEVSRHGRENGHLDSSIKASNRVHSMKYAPSASASNEGASTSGAASQTASGVLSGSGVLNLRPGSTTSSGPLAQMFSSMSADVAREYLEKVADLLLEFAQADTVVKSLMASQSLLTRVFQMFNKIEPPILLKILRCINHLSGDPNCLETLQRTDAIKHLIPILELRDGPLVYQIHSEVLNALFNLCKINKRRQEQAAENGIIPHLMKFVMSDSPLRQYALPLLCDMAHASRNSREQLRVHGGLDVYLNLLEDDAWACTALDSIAVCLAHDNDHRKVEQALLKKEAIQKLVKFFQDCPEQYFGHILDAFLKIITKSSRLNTAMATNGLTTLLIARLDHREAIARLTLLKLIKVVYEHHPRPKQLIVENDLPQKLQNLIEERRDGQRGGQQVLVKQMATSLLKALHINTVL

SEQ ID NO: 55996 - protein, 178 aa, Zea Mays
MCDLVARTGRHQQRCIPFRYRANNDETSGDKTKKVVEVLMINSQSGPGLLFPKGGWENDETVEEAAAREAIEEAGVRGDIVHFLGSYDFKSKTHQDACCPEGMCRAAVFALHVKEELNSWPEQSTRQRTWLTVPEAASRCRYQWMEEALLTGFSDWHDKWSIGDGGGGGANCVTRPNC

SEQ ID NO: 55997 - protein, 567 aa, Zea Mays
MIVGSSQQQLLLQRKGKPVAGKGAASMTVKAEKVVVAVRAATREISKTAVIWALTHVVQPGGSIILLVVIPAQSSGRKFWGFPLFAGDCASGHKSMVDQKCDLSELCSQMLKKLDVYDIDMINVMYKLVSGSPSGVVAAECKQAQASWVVLDKDLKHEEKRCVEELQCNIVVMKRSQPKVLRLNLVGSPDKESKATCAVPPVLDCSSGKTATDVKEARSSIRGPAVTPNSSPDLDTPFRSTEAGTSSVSSSDPGASPFSASEINGSLKKEVLATKDKIQHSDVNISDSDSETLSPPANFSFQPWMSDILQGSASSRSLGKVPRKTRTATADVLLEKISKLDLLNEISAMRSRSDLNFRGDVRDAVSLARNAPPGPPPLCSICQHKAPVFGKPPRWFSYAELELATGGFSQANFLAEGGFGSVHQGVLPDGQAIAVKQHKLASSQGDVEFCSEVEVLSCAQHRNVVMLIGFCVEDRRRLLVYEYICNRSLDSHLYGRNRETLEWTARHKIAVGAARGLRYLHEECRVGCIIHRDMRPNNILVTHDFEPLVKVFVSDAIMRQLFFVFDW

SEQ ID NO: 55998 - protein, 119 aa, Zea Mays
MSKALRKFPRVIFIRFPLPCTFKSAQSIRALNLHGLARSQLLLSHPTLVPYLTVVCGLSASPYILWCLQNATLIVVYANWAFAAIKGIGWGWAGVKWLYIIVFYFLLRIINFLILLYAE

SEQ ID NO: 55999 - protein, 201 aa, Zea Mays
MSGEAKWSILHLSNSGVVLTCLDCFLRNGSLYCFEYGVPSAVFLAKIRGGTCTIAESDPPEVVVHRAMYLLQNGFGNYDMFEKNCEDFALYCKTGLLPVEEPGIGTSGQASSAIGVPLAALLSTPFKLLAAGPLGMATVTAGMYCAGRYITDIGVRKDVAKVEVEKLSSHPGFHLVEDEESVNKRSEKPKTLLPMKRKRER

SEQ ID NO: 56000 - protein, 178 aa, Zea Mays
MQNTVANPSTAAAAAAAGNGGVQASGAGGERPEDASKQNLAQVTSSIQKTLGLLHQLNLTVSSFNSASQLPLLQRLNALVAELDTMQKLAEGCNIQVPMEVVNLIDDGKNPDEFTRDVLNSCIVKNQITKGKTDAFKGLRKHLLEELEQAFPEDVEAYREIRATSAAILDNRVSLTKS

SEQ ID NO: 56001 - protein, 170 aa, Zea Mays
MNAWFWSSIFHTRDIDLTEKLDYSSAVALLGYSLILSLLRAFNVKDEASRVMFAAPILAFVTTHILYLNFYELDYGWNMKVCVVMAAVQLLTWAVWAGVSRHPSRLKVWTVVFGGALAMLLELYDFPPYMGYADAHSLWHASTIPLTCLLWSFIKDDAKFRTATLVKKAK

SEQ ID NO: 56002 - protein, 402 aa, Zea Mays
MTLMVGLGPPLLAVSNPVSGFTFPLRVSSRLSPRRVAVESAIPFTPVPLPCNREQKPPFQNEDEPAAGAVPSRAPPAPGHLLRVGSRASERHPRLSSPSASPTRRLLASEVKSSTPYHHREFQPIHFRGLLPSALFKPSATATPTTPPAASPASSPSPPTIHASKRRRRETEATGNTPLRGGRGPAPRRRSSTPPPLSLPAAEFDPLDPDADPPPKLLTADEVRLCKQALKALDKKVGKPATLTKEFRSLPDIRTELQSVQKFSVARKQENRGRNRYTDVLPFDQSRVQLESSTGNDYINASHIEIAGRNLTKFISTQGPLANTIEDFWQMVYENHCPVIVMLTKFDGLKCDEYLPLSKGQAVFGKFTIKITKFRKDGQLLLRGVEIRQDESDEVRSLLHIE

SEQ ID NO: 56003 - protein, 545 aa, Zea Mays
MPREEKQALVEGTIVEMGLQDCADTVVGNWHLRGISGGEKRRVSIALEILMRPRLLFLDEPTSGLDSASAFFVTQTLRGLARDGRTVIASVHQPSSEVFLLFDCLYLLSGGRTVYFGKASEACEFFAQAGFPCPPMRNPSDHFLRCINSDFDKVKATLKGSMKARFERSNDDDPLEKMTTSEAMRRLTSYYQHSQCHINAQQKVDEMARLKGTVLDPGGGSQASFLMQAFTLTKRSFVNMSRDFGYYWLRLIIYIVVTLCIGTIYLNVGTGYSSILARGACASFIFGFVTFMSIGGFPSFVEDMKVFQRERLNGHYGVLAFVVSNTVSAMPFLVLITFVSGTLCYFMVRLHPGFTHYLFFVLALYASVTVVESLMMAIASVIPNFLMGIIIGAGIQGIFMLVSGYFRLPHDIPKPFWRYPMSYISFHYWALQGQYQNDLRGLLFDNQDDELPRIPGEFILETVFQIDVARSKWLDLAVLFSMIVIYRLLFFLMIKASEDVTPWLRRYVARRRVRNRRHRKPDLPARTPSLRGYVVDAASLPDDHP

SEQ ID NO: 56004 - protein, 160 aa, Zea Mays
MHSNTEYCSIHGSKAMEDKDSVPHSVVEKDTEALLLHDVLLNGILAIGTLGHHVDSLCPVACIEEDDLFIMDDEKAIVEERDDEEPRNDQVKEDVALETEPCEPVWPIVEPAKMHSLSMKEDNFTCFVAEEILIREVEDGGGANIQERPLLMLEKLPGYH

SEQ ID NO: 56005 - protein, 107 aa, Zea Mays
MKKTSSPLLIVLFLTAAAMAAEPEKQAAPAAQETAVHIVYVDRPEDADPEEFHIRTLTPVLGSEQKARDAVLYHYKNAASGFSAKLTPQQVKDLKGVAAMHLDPLFK

SEQ ID NO: 56006 - protein, 58 aa, Zea Mays
MLEVANGYNFHELHLMLASIGVTQMISCGKYLIWIIGLLTPWDPGRMVFDLKFVMLLA

SEQ ID NO: 56007 - protein, 94 aa, Zea Mays
MPRLCLPRSSSVCLCLPSCNKLIYLEDCSKGLIFKILRRHFKRRIGKYNCLGLQDIYSKIRLCRAIPKFLSVLRHCCWALWKRRNRLIFYGGIA

SEQ ID NO: 56008 - protein, 797 aa, Zea Mays
MKEEIMFDNQTKPCRSRVDSKSNSSSLKPKFGSSWGSQIVKGFTTDKKTKKTAANASKKPPLPSVENVNQANQQIPYHSRVKRSLIGDFPCSPAGAQVHPHVFDCHNIRSPASHDLFLELDHLREQLRESKERELTLQSELRQCRENPKVSELEKELDSMRDEVDRLARLKISLEAEKTSISEQLSALSSMEEHHEENVRLDSHGNRILTVDGDNAPSENLEFEVVELRRLNKELQFQKRNLAIKLSSAESKLAGLEKNEESDIVAKVQAEASLLRHTNANLSKQVEGLQMSRLTEVEELAYLRWINSCLRHELCNSDQAARATTDIDYNGGMAFNEDDNSEGDAKTSEDSSDIKFSIAERIKQWSQNDKSCQASKKESLLDRAWIEAAEARSPTRRHSLGGPKGCAQDFNIIKRRQSDTFISLPDATDESFAFNKDPAIREKRDLLVDKYDFGRSESSRFVLSKPEVCKSQCLDVEKRALRIPNPPPRPSVSVSNSGPSNGSTVNPPRPPPPPPPPKFSSKSTGVMKRAPQVAELYHSLMRRDSKKDTSGGGICEAANSANVRSSMIGEIENRSSHLQAIKADVETQGEFVKSLIKEVTSAAYKDIEDVVAFVKWLDDELGFLVDERAVLKHFDWPERKADTLREAAFGYQDLKKLESEVSNYKDDPRLPCEIALKKMVALSEKTERGVYSLLRTRDAMMRQCKEFNIPTDWMLDNNLISKIKFASVKLAKMYMKRVAMELQYMGPLNKDPALEYMLLQAVRFAFRMHQFAGGFDPETMDAFEELRNLVHVRNSTQ

SEQ ID NO: 56009 - protein, 155 aa, Zea Mays
MLRLSGTKDVDDAENADSTLNITYGISGDRKTGAHSPIPVKSGDSEELVFKIALRLKRPVLDPCVAVGFLPFSTDCLRVGQLVNMRWRVERLKTPEDASISIDEILYQVEANPQNWMVAGRKCGHVSLSNEQGKNHGTRCFNPCLWQRMTTSNPI

SEQ ID NO: 56010 - protein, 547 aa, Zea Mays
MRSAISETFPEPNRRLLQRILKMMHTVASHTSENRMTASAVAACMAPLLLRPLLAGECEMDEVFDMDGDDSAQLLAAANAANSAQGIVATLLEEYEGIFHDEHLRCSLSPESQIEDSGTEASTDDGNLEAKGNGFHDAENDVDQEMDDDNGVERILSGKLSESSGYAGSDLYDYKAVNAEESDAERPVKMLEGNLNLSKVQNSLSTENGSANVDSLLSENNPSNPTVGHETLSMGEILSSFDPGISVPTHSPEYSVERQTNKTNGSHPHVKRSNFWGRNNARKGQNSESVDSSGEEELAIQRLEIAKNDLQNRIAKEARGNAILQASLERRKQALHERRLALEQDVSRLQEQLQAERDLRAALEVGLSMSSGQFSSARSMDVKTKAELEEIALAEADVARLKQKVAELHLQLNQQRQHQYGSVVDANDRHHRLPGHFSQQNFVQQGFDMNLAFCNQEKQRNEESSVESSQWRNIKQHVLPYGSSRPLTRKLSFDASSSESRGTEPSTSMSTENTSVSINVPKLAEGIEFGRQPMVTSSTLEPPEVGG

SEQ ID NO: 56011 - protein, 511 aa, Zea Mays
MALQAAYEYLQQAVGHGAWSSTQTLTLLLIAVPTVLLLLASLAKSTSSSGRGKPPLPPSPPGTLPIVGHLHHIGPQTHISLQELVANAAEAVMRTHDHIFASRPWSMASHILRYNTCDVAFSPLGEYWQQTRKLMNTHLLSNKKVYSFRHGREEEVCLVVDNLREAAAKSPSTAVDMSEVLAAYTNDVVSRSVLGSTHRKKGRNTLFREMTMTNVDLLVGFNLEYYIPRWPLTDLLFRLVCWKVTRHLKRWDALLEEVIHEHVEMRKLSGDKEKESDDFIDIFLSRYEEYGFTMDNVKSLLMNVFEAAIETSYLVLESAMAELMNHRRVMKKLQAEVRAYGAEKKLDMIREDDLSSLPYLKASMKEALRLHPPGPLLLPHYSTADCQIDGYHIPANTRVLVNGWAIGRDPAVWEKPEEFMPERFMRDGWDKSNSYSGQDFRYLPFGSGRRICPGANFALATMEIMLANLMYHFDWEVPNEKEDGGGKVSMDETFGLMLRRNEPLYLVPRAV

SEQ ID NO: 56012 - protein, 470 aa, Zea Mays
MNASQFMDKQILGLAASASPSGGGAGGGGGVDLSDLMIPIPQEDAENRLGRRRSSTSVNGTADDMLPSYDFQPIRTSGGAAAAAAPQASWGSLDSKAPSASYNLKVQAGVQILRDKQEIVETQLHLAKLQTNKTDGQSSENSGSGQAGLQQQPVVPPQAAIQPQQVLTPSQPPALPALPAPNAPPPPPTLQNQSSLQFPSHLQHSQVPSVPSVALAPTVPALPRDAYYAPSAQPTETMHQQYQAPPVPQPQAPPAPPQQYQSQTQFPQYAQPPQPANVNPSTPHVPHAPQQPEETMPYAPAQSYPPNAIAAPYMQPPSGPAPPYYGQQNPSMYEPPAGRANPGPPSSYGSGGYGPQGGGSFSESYGYTGSPSHRGNAGMKQSSPFAQSSGGSGSYGSGKLPTAQMLPQAVPISSSSTSGSSGNRVPLDDVVEKVATMGFSREQVRATVRRLTENGQNVDLNVVLDKLMNG

SEQ ID NO: 56013 - protein, 95 aa, Zea Mays
MHLWPSLRIRDSFKHGYLQKLELNLGNMKRAQRQRQGRQGESQEDQDGQPGGNGKAPLLEDRSPSGSVLAGALELAWDAVLLLTCCCCCFCCGEP

SEQ ID NO: 56014 - protein, 185 aa, Zea Mays
MGQGGEVKAAPAVRVLVVDDSPVDRKVVELLLRNHNHQGGAAPFHVTAVDSGKKAMEHLRLMEQGGQLDSCAADANRITIDIVLTDYCMPEMTGYDLLKAIKALSSPNPIPVVVMSSENEPQRISRCLTAGAEDFILKPLKTKDVQRLRNCSSAARPRDDAAHQCESLRRSSRKLRSDQKISQSL

SEQ ID NO: 56015 - protein, 59 aa, Zea Mays
MLVMLVLHYLVRILRHATFLNYVPMMWIRFLQQSYFYPGVILSILMTVNLVLLLTSHGS

SEQ ID NO: 56016 - protein, 59 aa, Zea Mays
MTTKSREDVFFSVVDSLRMFIRRHRVLQDVMFSIISKKDAIVFEKNDIHVRCKHVLPQS

SEQ ID NO: 56017 - protein, 424 aa, Zea Mays
MVQVTVLPEYPEVYNIVNKLRVESVVAVEGVIRPRPVDAINADMRTGTIEVVAHHVLVLNSVTRSLPFPVTTSDTVKEKFPEEIRLRFRVLDLRRPQMQSNLRLRHNVVKLIRRYLEDEHEFVEIETPVLSKSTPEGARDYLVPSRVQPGTFYALPQSPQLFKQMLMVSGFEKYYQIARCFRDEDLRADRQPEFTQLDMEVAFTSMEDMLKLNEDLMRHVFQAVGDIKLPNPFPRLTYAEAMDRYGTDRPDLRFDWELKDVSDVFLGSSFKVFADTLESGGVIKALCVPGGATVFSNTDLKKGTVYTEASKAGAKGLPFLKVMENGELEGIGPLLSSLKPEKKDQLMELLDTKTGDLILFALGEQSSANQILGRLRLFIAHKLEVIDTSAHSVLWVTDFPMFQWNSDEQRYEVQENTIRRAIKR

SEQ ID NO: 56018 - protein, 54 aa, Zea Mays
MATTCAEVAACASGRNRGRVRRVDEAVAVKTTESGVQHLIIKIDSLVVVSFQIG

SEQ ID NO: 56019 - protein, 276 aa, Zea Mays
MMDDGGGGVQSQGVNPDCPNAANPFHRCAAYCPVPAPAPTKAAAAAVRSKPSPPRPRAAAMTEKQKKLFELRLKMNEARKANQQAMVAEKKRMEPRGESRGVSKQKWLDDRKKKIGKLLDSNGLDMKMAYMLDTQETAEAKYKKWEKEPAPYGWDVFNQKTLYDAYKKRTKNIEVDMESYNKAKEADPEFYRDASSLQYGKVSNVPEENIDKMVKELREREEKRKSFSRRRKFNEDKDIDSINDRNEHFNKKVERAFGKYTLEIKNNLERGTALPD

SEQ ID NO: 56020 - protein, 364 aa, Zea Mays
MRSSEASSRLVQELVLYAASAALSCLVLFAGLRHLDPNRAASQKAQQQKKEIAKRLGRPLVSTTPYEDVIACDVINPDSIDVEFDSIGGLDQIKQALYELVILPLRRPELFTFGKLLSPQKGVLLYGPPGTGKTMLAKAIARESGAVFINVRISNLMSKWFGDAQKLVAAVFSLAHKLQPAIIFIDEVDSFLGQRRTTDHEAMTNMKTEFMSLWDGFTTDQNARVMVLAATNRPSELDEAILRRFTQIFEIGIPVESERSKILQVVLKGENVEHNIDYDRIASLCEGFTGSDILELCKQAAFYPIRELLDDEKKGRKLDKPRPLRQSDLERALSVSRKGKKAASSALQSPLWVRPTDSEDDQIS

SEQ ID NO: 56021 - protein, 358 aa, Zea Mays
METSKIKVSQGCIDLLQEFHHLVDGNIELLVKLRDLIIDWVQEGFQEFFQKLDGHFHVLSGRSKTNLQEPTMDSMQTDKTPTVLVLMLAQLCVYIEQTTVPKVTEELASFFGGGAHSYEYGPPFVPGEICRLYRSSGEKFLHHYINMKTQKISKLLNKRFTTPVWIKHKEPREVNMFVDLLLLEINGLVSEVKQILPGMVRRHRHSDSTGSTTSSRSNPMREDMLNRSNTHRARSQFLENHLAKLFEQKMEIFTKVEYTQESVISTVLKLCLKSLQEFVRLQTFNRSGFQQIQLDMEFLKTSLKEFVDDEAAISFLLKEVNNAAHERCLDPIPLEPPILDKLINAKLAKIKERNPNMR

SEQ ID NO: 56022 - protein, 152 aa, Zea Mays
MSSAQDPFYIVREEIQESIDKLQSNFHRWEQTASNTGEYVHLTKELLTSCESIEWQVDELEKTISVASRDPSYYGLDEVELSRRRNWTGSAHKQVGTVKRAIEKGKSNVATSKYQDTSRTNHYSAQDNDDFISSESDRQLLLMSSVVVFLIL

SEQ ID NO: 56023 - protein, 113 aa, Zea Mays
MSSSAHRLQANSLIKEQKRKRKISGAVVPLCDSIVNSSRENVAISVFSLFFSCSRWSVVLCSRRFLLSFCFEVPRASFNSCQVPFNRECASSTELEGGWLLITLNLEFVKHTI

SEQ ID NO: 56024 - protein, 282 aa, Zea Mays
MGAGRVCRGGPFSASPAAGAAAGRPFPPLTASSSSSPSSAPSETASTSVTKTVNGSHHFKIAGYSLSKGIGVGKFIASESFNVGGFDWAIYFYPDGKSGEDGAAYVSLFIALASEGTDVRALFELTLVDQSGKGQDKVHTHFGRSLESGPYTLKYRGSMWGYKRFFKRVALETSDYLKDDCLLVNCTVGVVQSHTEGPKIYTIPVPRSNMALHIGQLLTSGKRTDIAFEVDGEMFPAHKVILSARSPVFRAQLFGPMKDKDMKCIKIEDMEAPVFKMHYKRS

SEQ ID NO: 56025 - protein, 305 aa, Zea Mays
MASGATLSWVKTPFDTRRFHDLSNLSFRCRNPFGSIQPWWLQTDQDSSLIKVRVAADYSDSMPDSKYTRDRGYHPLEEVKERPKKKDLLLTDIETARTVVEANSKGLLVFPARVHNEPHGHVSWSEFQYVVDEYGDIFFEVPDSENILEDDTANNPVTVLIGMDGPIIGESSVAISDFSDYMDGENFMDVPDEHHTKIDTEITDILIEWGMPATMRAIHPIYFAKCLTKAIHNNNGEKMDSPSNGLSIVGYLRPAFIEEESYLRSMFHGDNGGYSSDWKVNETDEYNRETRPVSGTNRLIGNLVG

SEQ ID NO: 56026 - protein, 274 aa, Zea Mays
MAGVYKWKLASYKQMERTKVASERLSLRSNSTKHHDTVHLGLGHFGKDGNLICRSLKSILKPKARQYAIVKVHNKDVDEGCSSKDNEIISSPSDRKEGSQLRALESYFSKFNPSQQLYSLPQKKHKSGPSSSNEVDAIIADEDANLKNRADSLQVQIDRGHTGIKSNQNTPNEVYKEYLIFDEKSLLDMHTDDQASGFCLTNLLAGVNIAVLLFEIASPVKNSENEYLSLPLLYGAKINNLILSGEWWRLLTPMCLGIWSKDIFSDIHTWRNLW

SEQ ID NO: 56027 - protein, 788 aa, Zea Mays
MASPKHSHRHHRAAATKHRRPLALRRAMLHSCVCFLVGLVTGLAPSDWTDAASRAAVHANGAATAQVFRALHAMNQTAAAGALGQLLALQHYQQQPVVEKEKEKEKKPLDLVVVVTTTTTSTGLSERERRSAGLTRTAHALRLVSPPLVWLVVEAAREAGPTARLLRRTGVVYRHLTYAENFTSEAWEEERHHQRNQALAHIERHRLRGVVLFAGLADVYDGRLLEQLRRHIRTRSVGAWAVATVWEQEKRVAVEGPVVVCNTTTTTTSAASTACAWFSASDSTLLAAAAAAAPPVTADDSVHGFAFASDLLWDPSRWDRFPTSEPDQSQLSSDCSDTPIIMALERGVRVIELDMWPNSTIDDINIVHGRTLTTPVSLIKCLRSIKKHAFVASPYPVIITLEDHLPSQLQEKVAKMVVEVFGNILYYPPDDTHELKELPSPEQLKGRVLLSTKPPKEYLETKLSDSTKEGDADLHLGKGTGDDAVWGKEVPDFRTEIQSAEKDDENDDVDDEEEQKLQPHIAPQYKHLITIRAGKPKDSLADALKSDPEKVRRLSLSEQQLAKAAKDHATEIVRFTQRNILRIYPKGTRVTSSNYNPFVGWVHGAQMVAFNMQGYGRALWLMHGFYKANGGCGYVKKPDFLMQTEPQVFDPREPQPVKKTLKVKVYMGDGWRMDFKQTHFDQYSPPDFYTRVGIAGVPADSVMKKTNAIEDNWTPVWEKEFSFPLTVPELALLRVEVHEYDMSEKDDFGGQTVLPVSELRPGIRAVALFDRKGMKYNHVKLLMRFEFA

SEQ ID NO: 56028 - protein, 270 aa, Zea Mays
MIFLLHSWATCQSETLSGCKLLLYPLEQEEEEGSSKLASLPAIAKKVLSYEEGIYAKLSRKWIEEGLRTVSIGRQEPGGFAAVLWRRREMGGLLLPHHRTFPNSLQASIPGPLSLHKGDRKNLHYFAPDVHLFCSLRQGFPRSSWSAVIRSEASGNAVASPGTVIKRSKEELITFFRDIQTSIAECSRKASKRTRKQPPDLFQEVRRREEQSHGGGDSGTDDVSEGPRKVKSLEDMNVAGLRELARARRMRGYSKLKKGELIDRLRGATT

SEQ ID NO: 56029 - protein, 335 aa, Zea Mays
MTPRAASTPKAQAYRAGNKTVGRWLKDRREKRKEETRAHNAQVHAAVSVAAVAAAVAAVAAATATASASGGKDERAARTDMAVASAATLVAAQCVEAAEAMGAEREHLEAAVGSAVSVRTPGDIVTVTAAAATALRGAATLKARALKEVWNIAAVIPVEKGPGPVGGGGGGHHHQHHQKHGAPKQQLHRKMDSDGSSVSDLSLEEENSFLGICSQELLARGTELLKRTRKGALHWKVVSVYINRMGLVMLKTKSRHVAGTITKKKKSVVVEVCRDVPAWPGRHLLEDGGHRRYFGLRTAERRVVEFECRSQREYEMWTKGVARLLSVAAERKRLA

SEQ ID NO: 56030 - protein, 815 aa, Zea Mays
MDLIFFLLSILAEQKENNNVGASPLVHASLVAGSLHLLTNYFSSQWHELVHILLAHPKVDIFMDVAFDSLHEDVRLLSIRLSSMGFGFFPVGSLESRLAHFICQQCEASLQFLLLLCQQKLFRDRILKNKELSRNGGILSLSHTILKLVVPECLKQSTDLVASISRLKAKILSILLQLCEAESVSYLDEVATNPNNMRLGQTLALEVLNLLKISFGRKINITSDSHDKGKIYPMGSVLISALRLVDVFSDDSNFRSFFLTNTVPFLIQILAAPHDEFVSSWCAVNLPTIEEDASLDYDPFGASEVALLASDNMLTEAKANYSCPFRPSVPSMAYAQTRTSCVVKIIANLHVFIPNICEEQERDLFLQNFQKHLASGSPKLSADLPASSDFKATKVCRNLGFLSDYAKTLVPNLLNGEDLVLLSDFADKLQSWCKSQVAVKVVQNDIPPESMDAMCPVQQLLPTRTSTPASKMNNLPKDAQNMEVSTPVPPINPEGNDEDETPKNTVSRNGGFLQNAVGQDLVHLGVARTTSGGPSAVASGVSTGHQHNRMDLDPASSSVDNFKTPELTKENGLEEDGKGESSMYDERQPKRRKRTLMNNEQIDELEKALVDEPEMHKNPVLLQSWSEKLSLQGPEITASQLKNWLNNRKAKLARIAKERAENADKPSTSHPGESSESAGEDNYLPPAGVMTVLSKGGSLLSPDCTEQTSQAELSPNTTMMVRPFTRSFSLEPGRLVSLVDSDGKEVGRGKIFQAPGKSTTESRVCVVDVTELRTEKWRELPHPSEAFGWTFQEAEARNGGIIRVSWDAVRLFPVA

SEQ ID NO: 56031 - protein, 683 aa, Zea Mays
MPIFETRKEEIISFITKKILECNDDMVRNSSNKSEWGDSTENCLLKIYGIKTLVKSYLPCKDAHAQPGIEKLIDILKNILTYGDVSPNMVSSAADKAHLRLAAAKAVLRLSKQWDHKVPVDVFYLTLRISQDDFPQVRKLFLCKVLQYIKERALDAKYACTFMFGVNDYHAPPYEEFKYNLTEVVQICQQVKMRQLSVQADMDLLTAYPEYIISFLVHALAHDPSSPEIEEHENVNAFGPIYWRLYLILSILLGEEGLQHSVPGMKKDSFTTIISIFKSIKSSQDVVDGSKTKTVCAICDLGTLIAKRLCQDQTSLSEAQTVPLPAQLYTPLHDNQNENSVENNEQIWLGCEKVLAHFEAVRTANMDKVESPKHKMLIDVTDEFGNEVPLGKIVKLLKSRGERKIGEKQKAPSSSSVNAENDDVLGLVREINLNNQEDLEESHKDKSEKRHTNAKDSNQKPLDFSSPKRKRSISKSRPHSAKGSKSSDERLLHTPNSERTNISLETKMKEKDRDDSTDTELLVSPSTRTPVSKQNKGAKKSNINILSSVPKKSADADSTKRTVEPRSLNGSLKRQKSKPISGLLKCSTQDSSSTDLVGHRIKVWWPLDKRFYEGAVQSYDSSKKKHRVLYDDGDVEVLNLAKEKWILIESNDSSVKRQKKDHLGTNPGRALEITSSSKSPPSL

SEQ ID NO: 56032 - protein, 87 aa, Zea Mays
MLSTSSHLAQSIQELTTHWMILQGYFMTQVEPSNTISRLFRLSTNICQRKYCQQISILSRSIFFPFAQLRGPGQSPSKRKEGTSFIL

SEQ ID NO: 56033 - protein, 93 aa, Zea Mays
MSSSPDHKSHRRARDDVKRKSRSKSRSRSRSRSRSYHSSSPARRSASPPKSPPPQRSPTPEKHANGKDSPLSRSVSPSPKRASSRSPGSDSKE

SEQ ID NO: 56034 - protein, 203 aa, Zea Mays
MLRENVLRVTIEVPDAGEVNFHCTHLDHLDEGWRMKQVDAIMRSGGDGPHILAGGLNALDGTDYSADRWADIVKYYEEIGKPTPKVEVMQYLKAKQYVDAKDFAGECEAVVVVAKGQDVQGTCKYGTRVDYIMASPNCPYKFVPGSYTVVSSKGTSDHHVVRVDVAVPHAREPDDAEATANGQRSRVVKMTKKSSRKGIWGAK

SEQ ID NO: 56035 - protein, 262 aa, Zea Mays
MGFPSTPNLKLEPRPRTRRLLRCALSSEPVPPMTVSITGATGFIGRRLVHKLLSDDHKVCILTRSASKAASVFPASTYPGLTIAQQGDWEACVRGSTAVVNLAGMPISTRWSPEIKQEIKQSRVNVTSKVVKYINHAGNADTRPSVFVSATAIGYYGTSEIHSFDESSPSGNDYLAEVCREWEATACQVNQEDVRLVLLRIGVVLGKDGGALAKMIPLFMMFAGGPLGTGRQWFSWIHLDDLVNLIYESLTNPTYKGELTHS

SEQ ID NO: 56036 - protein, 77 aa, Zea Mays
MSSPAEYYKSLPPISKAYGTLCFFTTVLVRLHILNPLFLYLYYPRVFKKFEVWRIFTSFFFLGPFSINFGIRLLMML

SEQ ID NO: 56037 - protein, 110 aa, Zea Mays
MAEPWPAKAIPRPGPSRGSPVIEKEGSTKGPDASNTTHPARRHHVSGVRLPGLRMTTPHRKPSPMFGIPMRPARTCRSARSGVAYELPRAAVAMSFDSIPHCLSGWCSVP

SEQ ID NO: 56038 - protein, 90 aa, Zea Mays
MCRAAGLRRAAGVAPVPTGRACVPAGEAWAWGRAPPPGKEPEQRRGGRDDDESGHTLTPRLAEAHQREVAPSWPWAPPPGRNDDRLGFQP

SEQ ID NO: 56039 - protein, 121 aa, Zea Mays
MSFLASLLKQIDRFLQFDNFMPGYNGVLTVSCIRTLVRIAKKVPSFVCLDHIFELVAPFRNMDKPWKVRIEASRILIDLELHHKGLDAALLLFLKYVDEEKSLRGWIARVLFDGFVCFAIF

SEQ ID NO: 56040 - protein, 76 aa, Zea Mays
MLQKLSKQLNDPPFNFMVHSAPFKISSSCLPYTHWFLQIVPQLSVVGGFELGSGCYINPVFPEDAAKILRELDCSV

SEQ ID NO: 56041 - protein, 631 aa, Zea Mays
MLSSSASRREAAAARATKNGELPKSAAAVAWKDVAATARSGELSKAVTGAELSKAVAAVRDAAAVQHEGWMVRYGRRKIGRSFFHTRYFVLESRLLAYYKKKPKDNMVPLKSLLIDGNCRVEDRGLKNHHGQMIYVLCVYNQKEKEHQITMGAHDIEDALAWKKKIELLIDQQPDSAVKTHKSFATIDFDMDLGGQFSLSDHDSAAEDEEERPTLVRRTTIGNGPPDSIHDWTKDADFGMSGQNEPTQLYSKKNWRLLRCQNGLRIYEELLEVEYLARSCSRAMRAVGVVEATCEAIFGLMMSMDATRYEWDCSFRQGSLVEEVDGHTAVLYHRLQLHWCPRLIWPRDLCYVRYWRRNDDGSYVVLFRSTEHPNCIRQRGFVRAFIESGGFKICPLKCRNGRPRTQVQHLMQIDLKGWFLNYSTSFQYHSLLQILNCVADDIHITPRIPAMESMADVNLAQKDEKLKEVDSKTKPEDQQQAENKNMGTIDEESDDDEDYHVPEADIEEITNKSDNEAKHTDEPPEKIDLSCFSGILHHDPDEKSRNCWTVPDSKLFKFVARISQMTNRRYLLQVISWSLQPLIGLRTPSVWIMLAGRKIVLLRLLLRKGCIHSLSTYSASLMAMMTSVTAG

SEQ ID NO: 56042 - protein, 455 aa, Zea Mays
MVVQLFSCVDKISSVEWAPDSEYILCGLYKRPMVQAWSLSQPDWTCKIDEGPAGIAYARWSPDSRHILTTSEFQLRLTVWSLVNTACVHVQWPKHGSKGVSFTKDGKFAAICTRRDCKDYINLLSCHSWEIMTVFAIDTVDLAGVEWSPYDSAIVVWDSLLEYKVLIYSPDGRCLFKYLAYESGLGVKTVAWSPCGQFLAVGSYDQAVRTLNHLTWKTFAEFSHAGYIRSPCNAAIYKEVDDPWQLDMSELCLSEGLSRNMPDNGADYCSVSFDRMIDRETHEGQPWHNENGTEGGGSRVKYAVMDVPITLPSLKPAFDKPNPKQGIGMLSWSSDSHYFFTRNDNMPTVLWIWDICRLELAAVLVQKDPIRAAAWDPTCTRLVLCTESPHLYMWTPSGACCVNIPFLNFRIVDLKWSSNGSCLLLKERESFCCATIISALPEEEPDHSDDTSEDE

SEQ ID NO: 56043 - protein, 242 aa, Zea Mays
MTGWEEYTLIHNPESFFKIKHPELPLSYYTGVLGMPGLTAWAGFFDVGKPKKGDYVFVSAASGAVGQLVGQFAKLTGCYVVGSAGSDEKVNLLKTKFGFDEAFNYKKEQDLDAALRRYFPEGIDIYFENVGGSTLEAVLPNMRIHGRIPTCGMISQYNLEEPEGVHNLFEIITKRLRMEGFMVFDYYGQYHKFEQEMVGYLKAGKIAYVEDIAEGLEKAPEALIGLFTGRNVGKQLVAIARE

SEQ ID NO: 56044 - protein, 118 aa, Zea Mays
MQELLAIQQQGPRAIGFFGTRNMGFMHQQLIEILSYAMVITKNHIFTSGASGTNAAVIRGALRAEKPELLTVILPQSLKKQPPESQELLSKVQNLIEKPQHDHLPLIEASSGNCCNLQ

SEQ ID NO: 56045 - protein, 659 aa, Zea Mays
MAAANAPIAMREALTLTSLGIAPQFVTFTHVTMESEKYICVRETSPQNSVVIIDMAMPMQPLRRPITADSALMNPNTRILALKAQIPGTTQDHLQIFNIEAKTKIKSHQMPEQVVFWKWITPKLLGLVTQTSVYHWSIEGDSEPTKMFDRTANLANNQIINYRCDPAEKWLVLIGIAPGAPERPQLVKGNMQLFSVDQQRSQALEAHAASFATFKVVGNENPSTLICFASKTTNAGQITSKLHVIELGAQPGKPGFSKKQADLFFPPDFQDDFPVAMQVSQKYGLIYVITKLGLLFVYDLETAAAVYRNRISPDPIFLTAESSSTGGFYAINRRGQVLHATVNDATVVPFVSGQLNNLELAVNLAKRANLPGAENLVVQRFQELFAQTKYKEAAELAAESPQGLLRTPETVAKFQSVPVQAGQTPPLLQYFGTLLTRGKLNAFESLELSRLVVNQNKKNLLENWLAEDKLECSEELGDLVKTVDNDLALKIYIKARATPKVVAAFAERREFDKILIYSKQVGYTPDYLFLLQTILRTDPQGAVNFALMMSQMEGGCPVDYNTITDLFLQRNMIREATAFLLDVLKPNLPEHAFLQTKVLEINLVTYPNVADAILANGMFSHYDRPRIAQLCEKAGLYLRALQVSAFALVQLISLLCFPV

SEQ ID NO: 56046 - protein, 170 aa, Zea Mays
MESGHSYVFLCSRDIELTEKLDYSSAVALLGYSLILSLLRAFNVKDEASRVMFAAPILAFVTTHILYLNFYELDYGWNMKVCVVMAAVQLLTWAVWAGVSRHPSRLKLWTVVFGGALVMLLELYDFPPYMGFADAHSLWHASTIPLTYLWWSFIKDDAKFRTSTLSKKAK

SEQ ID NO: 56047 - protein, 303 aa, Zea Mays
MRIEELRRDWNLLEEFQFSYMALLHASVAMERKLVVEWVPSCDLEDSSAKETPEAHKKAWKLLKGADGVLVPGGFGDRGVQGKILAAKYARENNVPYLGICLGMQIAVIEFARSVMKLRGANSTEFDPATTSPCVIFMPEGSKTQMGATMRLGSRRTYFHVSGCKSAKLYANASSVDERHRHRYEVNPDMVPDFERAGLQFVGKDESGKRMGIIELPSHKFFIGAQFHPEFKSRPGKPSPLFLGLIAAASGQLEPLLQRSNPTTKACPMSKVPKLKLYPTGPVNNPLNSLVNGYYPNGTGIHT

SEQ ID NO: 56048 - protein, 479 aa, Zea Mays
MDATANSDVQRAEEFKLKANDAFKANKFSQAIELYSQAIELNSSNAVYWANRAFAHTKLEEYGSAVQDATKAIEIDSRYSKGYYRRGAAYLAMGKFKEALKDFQQVKKICPNDPDATRKLKECEKAVQKIRFEEAISAGDDERRSVADSIDYHIIEVEPHYAGPRIDGEEITIEFVKAMLDEFKKQKCIHKRYAYQIVLKTLDLLRSMPSLVDVDVPNGGHFTVCGDVHGQYFDLLNIFDLNGLPSEENPYLFNGDFVDRGSFSVEVILTLFAFKCLYPKAMYLARGNHESKSMNKIYGFEGEVRSKLGEKFVELFAEVFCWLPLAHVINNKVFVVHGGLFSVDGVKLSDIRSIDRFCEPPEEGLMCELLWSDPQPQLGRGPSKRGVALSFGADVTKKFLQENNLDLIVRSHEVKDEGHEIEHDGKLITVFSAPNYCDQMGNKGAFIRFTAPEMKPDIVTFSAVRSLSRMSLHSIYGPQ

SEQ ID NO: 56049 - protein, 450 aa, Zea Mays
MAAVAGPLCTWLVAACLSAACDAEEHKQKHFCAGGSRAGGGVMLGQRRRLGARRRGLARSGMTMAVALQAERSVIEKKKPDIKQRRVVVTGMGVVTPLGHDPDVFYNNLLDGVSGISEIERFDCSNFPTRIAGEIKSFSTDGWVAPKLAKRMDKFMLYLITAGKKALENGGLTEELRNELDKTRCGVLIGSAMGGMKVFNDAIEALRVSYKKMNPFCVPFATTNMGSAILAMDLGWMGPNYSISTACATSNFCILNAANHIRRGEADVMLCGGSDAPLIPIGLGGFVACRALSQRNSDPTKASRPWDMGRDGFVMGEGAGVLVLEELEHAKERGATIYAEFLGGSFTCDAYHMTEPHPEGRGITLCIEKALADAGVAREEINYVNAHATSTQAGDLKEYEAIVRCFRQNPQLRVNSTKSMTGHLIGAAGGIEAVASIQLSVFWAFWLQPA

SEQ ID NO: 56050 - protein, 114 aa, Zea Mays
METTYLQETNQFGSVLKGFESFLSSSKNTSNLKRSRKFQADERLFSLSSVTSPAVDEHLAGRDDGREYGAGRSKGGSTPANGQGKPKKGGRPGGRDGKRLRPSNDPDLDDEDDY

SEQ ID NO: 56051 - protein, 87 aa, Zea Mays
MVGFRDFDRTVVKLEWVLNWTTFVTARVICHILITYKLISDAHKFGKGIELPLALLGMAGMNLLNIFLGLDLLKAFTRERNKQNHQD

SEQ ID NO: 56052 - protein, 1509 aa, Zea Mays
MADGQHIQAASEEVDSIHFSFYSDDEIKRISIKKITKSERLDAKNLPVPGGLLDPAMGPINDIDICKSCGQHSVRCPGHFGHIELAKPLFNPLLFMSLKNLLHVTCFHCHKFRLNKEQVDRYVNELELLVKGDIVCAKNLEDSVEEAYLSKEDENMNKTTSGDNSSSVKDKKTWTSIQLKEVLSIFSKIMKKRQKKCAKCDMKSPTISSPIFGWLVKDTKASAVRTNAIADFKLKGDGDIHNSGETGVSGLEEESSSPGMVSKDSINEVRGLSDDTIKELVASSGKKHLLPTEVESILKDLWKNEARFCMLLCDFQKNMSSEPEKRRGYEMFFLSSLLVAPNRFRPSTSSSLGIMEHPQSVLLSKVQESNLALQHNNASSNHMDVLQRWMDLQRSVNVLYDSSKGLARSEKNAHGIRQLLEKKEGILRQKMMGKRVNYACRSVISPDPYLAVNEIGIPPVFATRLTYPEKVTPWNTKRLQEAIRNGADIHPGATHYRDNNSMYKLQAVPAKRRSIAKMLPASRGSICQPGRDPNCEFESKVVYRHLQDGDIVLVNRQPTLHKPSMMAHFVRVLPGEKTLRMHYANCSTYNADFDGDEMNVHVPQDEISRAEAMNIVDANKQYIGPRSGDAVRGLIQDHIVGAVLLTKPDTLLSREEYSQLVFGSCVPSSNCGSHHPAKVSAIEDYDTLELVHPAIWKPRPLWTGKQVITTILNHLTKGCPPFTVEQKGKIPKEYLKEDPSAQKEKEDPSARKEAHSAKKGKREDPSAQKEKDSSVNKEKQEKIQKQKQKDRSELVLYIHNNELIKGIIDKAQFGKYGIVHTVHELYGAYTAGILLSTFSRLFTLFLQLHGFTCGVDDLLLLPEKDKLRSKILSGSEVRSNEVHWKFTGADEDHKGDLVKLHMEVEKAVRSNGESDTATLDNDMKNALNGITTDVNKILFPDGLQKPFPGNCLSLMTTTGAKGGPVNMNQISSLLGQQELEGKRVPRMVSGKTLPCFPPWDISSRAGGFISDRFLTGLRPQEYYFHCMAGREGLVDTAVKTSRSGYLQRCLIKCLESLKVSYDHTVRDADGSIVQFCYGEDGVDVLKTSFLNEFKELADNRKAVLAKLGGCSKDPTLSKCNGYITELPPKLIDKAEEFLKHSKECCRYNIEAKELKELLKVKFLSSLVDPGEAVGVVAAQSIGEPSTQMTLNTFHLAGRGDMNVTLGIPRLKEILMTASDNIRTPVMKCPLLEHISEDDAKMVVAKLRRVRVADVVEKIEVCTVPFYNSNGRVSTLYKLQMKLYPQDQLESGLTIDECQATLRTVFVEAMEHAIEKHLDLLYKINEIRAVKIEDTEGSLLNGDEESQSRHADGGDTGTSDDDDQNDNDVDLGTDAEKMKRQEKDEMEYDDDTETEEGMGSESEESDEDPAESGDDSQEADKEHTISKSETTSVDDLPYSVKKGKKSKDDRGTAKLEEKNQNEGRLDDQKQGQIKKRRKKLKHTIHVESSDLDFEIHYAFHDEPHILLAQD

SEQ ID NO: 56053 - protein, 300 aa, Zea Mays
MPVKQWLEERRFLQGEMQQLRDKLAVAERTARSEAQLKEKYQLRLKVLEDGLRGPPSGSSRPTTEGKSFSNGPSRRLSLGGADNISKLSPNGLLSRRSPSFHSRSSLLSNSSLVLKHAKGTSKSFDGGTRSLDRGKIHGSGAHLLNRSTDAVRDKETSDSWKGDMDERTNERADNNTDEKSNETTNKNSAETVSGFLYDMLQKEVISLRKSCHEKDQILKDKDDAIEMLAKKVDTLTKAMEVEARKVRREVAAMEKEVAAMRASKEQETRAKLLGTKGSGSSQLLPGRNAARTGSMRNFQ

SEQ ID NO: 56054 - protein, 2799 aa, Zea Mays
MDADVVQEEVPKSKADEPATDTLEVLNQEYAEETSGPANEKIEETANQSNMLTSEETVPEYDTATRDPPVNIQAQNQESLEEREATVAENEVAEAVDTEAPVQQSSVALEDAVPEDQHNLGATNNTAQEDTQDAIGQTKEGQQFHDLGPENATENTQPASMANIADVDVTTEAPSGIQTPVEINLDISDAIPDTTDGNTETDKLVKTEGVIHPEKKESFPEDTSTAEPTEEVANVEDQQSQRADAMDADVVDEEVPKSEHADEPATDALEVLNQDYAEETNDPVNEKTEETGNQSNMPPSEETTPEYDTTTREPPVNIQAQNQESLEEREATVEESEVAEAVDTEAPVQQSSVALEDAVPEDQYNLIATNNTVQEDTQEAIGQTKEGQQYHDLGPENATENTEPASTANTPDVDVITEAPSGIQTSIEINLDISDAIPDTTDGNAKTDELVKVDGVILPDHKESFSEDTCVVEPTEEMIEVDQLGQQADAIHAEVLQEEVPEMIEVDQLGQQADVIHAEVLQEEVHKSEQSDEPGVDAQEVLNQESAEETDGLVNVKTDETEHKSNMVVPDDTIPEHDAQTREPPVNIQEQSRESVGDAEAVNTEAEMQQNSVAFEETTPENHVATSEPCSEIQHAHHVEPEEINGPEDGKDDEITNMSSREYLVRDNVLQSGPIIDIQPVQELEQIKTDEASNQTHAVIFNDLAQEDATATSEPQVTETELKDIEATEAEEITKLDHVTHSKELAVENDSTADEPHKGEIHQTLEQDLVEVKDTGTYHEKTISTSEDTVQDNLTEDEPSFGSQEVDDAESTEETKQNIAENIAEVSDVAIVDDAIEQNVLQTEDIVEMHKQELEREETERIEPVESEEASDQRNDAPFDYSAREDNTKESEIQQTESATETNEIEPTEIEAVPRESNTCVSEEPSQEDHIKESETSFDNQEVNITESSEVNDSHKDIISGGISDPSNTASAGDSSEGSNVPEGEPPEQAVQELGSEEIKNTQIDEVNETSLEMNATVFQIPSQEENPDTTKLHESTEVSNIEATEMHGNPHQSDLAAQSEEQTTEGISSGLKPESIEGNDTEAKKCQSTSQEKTISASESVPEDATTEPDVDHQQLQDQESAKLKETEADKFQEIVSSNTLSSEEFTSTEPSSDTEADNSQLAEETEDTEIVKSNTALAEAAAPETDATADTSSFHETDLEENKDTGTIETEDGMVSSDYTSEKMDTETMETEAVPHDSSDANIKEHTEDDTSTPNAPHAGTEPVHELESVEVSADTTEHPGETHDSASDELTPTEENTAVTEPSFSTQEVQNLTSQEIKDSEDDKTDEFSDINSFPIPGEADQVPRSETTPDVQEVEELGLTEETRDIEAIEPGDQQEDIVSTLEKPEIDGEPSADNQQVHEDKLPEVEDNKAIEAEASKQSNIATPDNAAEERNELESDPDPYAQPAEQVELSKDNENSQLVKTEETSDQSNFVVLRRTTEDSVAREIDPPVAIKQEQPVEEIKGVDATEAEEDFRTTQAVAIEKLASVNKIATVEPTYDIQRMDDLEATEEKKHAEAINEGDQSNIAVSEEQTPTYNGETPEDHHVESNEGTMGNETDNIILAHGIKDEIQKSAELKDGPCDLSETVLTTRRSENMIDEDNVQTYGNDTVEASNSIHQVKEEPDAGTEHNSSQMISECSGENETHVQDRDVDMWILTEGVIAEASQALLENDPQAAQDTIEKDDTTKSSEPISDHDSRQHCDVEALQQQSCETEALSILEQDEALQKIDSDQKQKEVEEIESQNDELQVDEQKHEDKRDDLAKEPLVEYQNFENRASNNTKDNDAFKVEQTEAANSEILKNKALHISKESTPSIMAMKVENIKETSEGTEEDDAAKNDNKDEQENAENVDIVSKTSTNEQGQTTDEIRKEEDPVHIIQASEKEIADEIEESKEIHEDNAICHDKLQTNSEKEESPQPHSNEPYNVDAKIDDTTSLCEEIIHDNTSINPREIEEIGENKGPDFTSEPSVESSIQNNVEDSSSHHKVEDEKLSMSEKNDVDTEAMQEINDESGADINQTEQCQEEITADDVLQLETEGNSFDKIEETASNEETETSTAATEAVTFNEDITDKVSGADGAPSNGSLKTFTDTGRDIDVPLVITTSKEESVNDTMENLNLDLPGHQAQDGNTAEKVLSLEEREREMPSSEKLLQTEPGENQIPNEQDEKDIRDENQTLKEKDEDDMQDTEFGEAKKEVQQELPVSHFLMNLILGKESSDANEDSESEAARKQGEATEDDSCTFISEQEESLGSLPTENKVDDNPTFVEQEKHEVKCSEETQEMVEEQSDDQLHTERSIEIDEDIKKNTRALEIPAYQDNPQDGISGELQTEEAAGVSTKMVTRDIDISSVVLDNRTVGTVCQEKMEVSTKNENGSLRSSLNDSTNTMAPQDDTLGEGQSRLVLEPLPEDKSVDVVSEQAPLLTESGMTDANDLSSDTTSAQNPVSTKPTESARVEATYSTDIQLENEEVDKKEEDQHANTTKDEVSKEIVESSHINLQKITRPEEKSNELETQITEPVCDSQAILAHEKEISEENFPTAVEIQADGPNMQINQDKQDEAADIETEMKPEKLGESNFQEHQDNGTEQKSPKETDEGDQQLVAKKEILTQEMDVHETVERPQQAVESPQQTVSITSNEDQELFDSKVQERDLNVVSPREASEAEENFVDVTKPEFSTDEEQSPKADAEEKIYDEKIKDIEGTKNLTDEAAIKTEAPGAAQKTRKKYSLLSGVGSKVKHQLAKVKKAIVGKPGHTKPVSPTA

SEQ ID NO: 56055 - protein, 57 aa, Zea Mays
MCTNWDRLGVDNMELEIQSPPLQKIHPLYRKISVCTIEPIHKGSPFLFITVFRTGHN

SEQ ID NO: 56056 - protein, 807 aa, Zea Mays
MAANNSDPIQDQLGEGGAGVRHEAEEEEVGEETSSAAAQATATTMLPRSSSRPQLDLSGAAIHGTLEDRNPTILLPNQSDDISHLALDIGGSLIKLVYFSRHAELSTEDKHKISTKRRLGMFNGGRRSYPILGGRLHFVKFETGKLNECLDFISSKQLHRGGIDSPSWRSGAQSDDIVIKATGGGAFKYADVFKERLGVSLEKEDEMDCLVAGANFLLKAIRHEAFTHMDGQKQYVQIDQNDLFPFLLVNVGSGVSIIKVDGHGKFQRVSGTNVGGGTYWGLGRLMTKCKSFDELLELSQRGDNSTMDMLVGDIYGGLDYSKIGLSASTIASSFGKIISENKELSDYRPEDISLSLLRMISYNIGQISYLNALRYGLKRIFFGGFFIRGHAYTMDTISFAVHFWSKGEAQAMFLRHEGFLGALGAFMSYEKHGLDDLRVHHLVERFPMGAPYVGGKIHGPPLGDLNEKISWMEKFVQKGTQIIAPVPMGVPATTGMGGFERPTAKGDILRSDASAALNVGVLHLVPTLDVFPLLEDPKTYEPNTIDLDQDEFKYWFKILSDHSPDLVDKAVASEGGTDDAKRRGDAFAHAFSAHLARLMEEPAAYGKFGLANLLELREECLREFQFVDAYISIKQRENEASLAVLPDLLMELDSMNEEARLLALIEGVLAANIFDWGSRACVELYHKGTIIEIYRMSRKKMQRPWRIDDFDMFKKRMLTDRKDQSYKRALLFVDNSGADVVLGMLPLARELLRHGTEGVQTLAQLLIGRANKGQAYFLPPVIKGSRIETRSEMLQTDSFQDIKPNFP

SEQ ID NO: 56057 - protein, 366 aa, Zea Mays
MDSSSRGIRFLVHRRALLLLLLVASSSLVGTSRGREAQPLPAAAATALGSRRSPERHGLALDFYARTCPAVDQIVANVTAAQYRDFPAAGPAVLRLFHHDCFVEGCDASILIAPTADAAAPARPPPPRVERDMEENRNLPQEAFDTVELAKAAVESKCPGIVSCADVLALAARDYVQLVRGWAVLRGEEGPEGQQGVPGGEGPRQPAAGQLDGGRAPARVRGQGPGRGGPGGALRRAHRRVRALRPRAGPHLRLPRHAAAGPGHGRPPREGAPHVVPVVGRQRPRRGALRRQHALPVRPRLLRQPAGQAGPAGLRPGAVPGRAHQAARAGPRRQQDPLLPGVRGQHGPDGLHPDQEGEERRGQESL

SEQ ID NO: 56058 - protein, 816 aa, Zea Mays
MEEPSSSKPTVKRLMEDELRKLKQLKLPNDEVERILADLGHGACLDKSSAQNSKAKKGDQNHIRGITTTAAPSGSLDPTASNCIKEAEENELEFALADFLGRIHRNCNNNGELCTEMKALIQTKIAELDNPPCTFAYEQQTSRGDEYDTAGGKHRCSSSKTQPKKFRDALEMLSSDTELFFQKSNSRILESAQRNQNRLIGNNLEPTKIADNTDSNKDPKSLNQHELATRRYGKESRNIFFWKKERSSPRQTAQGTSSSQPVNKIVILKPNPRREIGHAVAVSSTQAPKLGATESSKFSIKEVRRRFRIVTSEATKGIPSVSEDNLQKGQHWLNSSAFTIIKDTRQLAEQTSEGKFSSSVMKDFRSSNSGRQKKRKNDGPTEKNSSIITSSKDESVFYDEARKHLTEILKDKRQTTKQHPTLEISRSLVRMLSFPQSSTSSPRSSPRAKDCIYLSPEEASIRAIYKSNKDLLEEESQSGEFPENVVCDPSEALHEQAVQERWCVKEESQETTQEELDTLRTKEIDKLDCMGKNSNAWGTPAKQCTYKPSQDMVGEAEPGQRHVRTFPSSPENDFEKLECQEPTTPRPSAQIEQISQFSPDGNHEKQEQPSPQSVLDVFFLDGELHKDILRTRYNTTGDGSDQGIFWEDKHPRLCYIKELLELSELCANQNLEVWYLEDELISPCLFEEVHGGNQIDGTKLLFDCICEAVTEIQDIYFRNPPCLSSLTHSIRAPPPAGQNLISEINKRVERHLHYRFPSTLDQLVNMDLEGGSWMDLGSESGEVAVVIWDCTLDELLEELVYDLWISGFNLAAGNHL

SEQ ID NO: 56059 - protein, 1431 aa, Zea Mays
MQVSQKYGLIYVITKLGLLFVYDLETAAAVYRNRISPDPIFLTAESSSTGGFYAINRRGQVLHATVNDATVVPFVSGQLNNLELAVNLAKRANLPGAENLVVQRFQELFAQTKYKEAAELAAESPQGLLRTPETVAKFQSVPVQAGQTPPLLQYFGTLLTRGKLNAFESLELSRLVVNQNKKNLLENWLAEDKLECSEELGDLVKTVDNDLALKIYIKARATPKVVAAFAERREFDKILIYSKQVGYTPDYLFLLQTILRTDPQGAVNFALMMSQMEGGCPVDYNTITDLFLQRNMIREATAFLLDVLKPNLPDHAFLQTKVLEINLVTYPNVADAILANGMFSHYDRPRIAQLCEKAGLYLRALQHYSELPDIKRVIVNTHAIEPQALVEFFGTLSREWALECMKDLLLVNLRGNLQIVVQAAKEYSEQLGVDACIKLFEQFKSYEGLYFFLGSYLSSSEDPDIHFKYIEAAARTGQIKEVERVTRESNFYDAEKTKNFLMEAKLPDARPLINVCDRFGFVPDLTHYLYTNNMLRYIEGYVQKVNPGNAPLVVGQLLDDECPEDFIKGLILSVRSLLPVEPLVDECEKRNRLRLLTQFLEHLVSEGSQDVHVHNALGKIIIDSNNNPEHFLTTNPFYDSRVVGKYCEKRDPTLAVVAYRRGQCDDELINVTNKNSLFKLQARYVVERMDGDLWDKVLQPENEYRRQLIDQVVSTALPESKSPEQVSAAVKAFMTADLPHELIELLEKIVLQNSAFSGNFNLQNLLILTAIKADPSRVMDYVNRLDNFDGPAVGEVAVEAQLYEEAFAIFKKFNLNVQAVDVLLDNIRSIDRAEEFAFRVEEDAVWSQVAKAQLREGLVSEAIESFIRADDAAHFLDVIRAAEEANVYNDLVKYLLMVRQKAREPKVDGELIFAYAKIDRLSDIEEFILMPNVANLQNVGDRLYDEELYEAAKIIYAFISNWAKLAVTLVKLKQYQGAVDAARKANSAKTWKEVCFACVDAEEFRLAQICGLNIIVQVDDLEEVSEYYQNRGCFSELIALMESGLGLERAHMGIFTELGVLYARYRSEKLMEHIKLFSTRLNIPKLIRACDEQQHWKELTYLYIQYDEFDNAATTIMNHSPDAWDHMQFKDVCVKVAIVELYYKAVHFYLQEHPDLINDMLNVLALRLDHTIVVDIMRKAGQLHLVKPYMVAVQSNNVSAVNEALNELYVEEEDYERLRESVDMHDNFDQIGLAQKLEKHELLEMRRIAAYIYKKAGRWKQSIALSKKDNMYKDCMETCSQSGDRELSEDLLVYFIEQGKKECFASCLFICYDLIRPDVALELAWMNNMVDFAFPYLLQFIREYTSKVDDLVKDKIESQKEERAKEKEEKDLVAQQNMYAQLLPLALPAPPMPGMGGPPPPMGGMGMPPMGGMGMPPMGPGPMPAFGMGGY

SEQ ID NO: 56060 - protein, 701 aa, Zea Mays
MPELRSSTRQACLRSKKLEDLQLGEPPAKPVSPAPPRAGKRAPTRAARGRKGATGKGVPPAPTTRRKRGNIVDLEADPACEDPPKAVKGLEVAAAAAPKNLPLKEVAEVGVLKMNGVSAEKIIGAEDESTATPVPERVQVGNSPEYITDRKLGKGGFGQVYVGRRVSGGAARTGPDAYEVALKLEHRNSKGCNYGPPYEWQVYNTLNGCYGIPSVHYKGRQGDYYILVMDMLGPSLWDVWNSMGQAMTPNMAACIAVESISILEKLHSKGFVHGDVKPENFLLGQPGSPDDKKLYLIDLGLASKWKENNGHHVDYDQRPDIFRGTIRYASVHAHLGRTGSRRDDLESLAYTLIFLIRGRLPWQGYQGDTKSFLVCKKKMATSPEMLCCFCPAPFKQFLEIVTNMKFDEEPNYAKLISIFDGLIEAPASRPVRIDGALKKRGRLHANLEDEQPKKKVRLGSPAAQWISVYNARRPMKQRYHYNVADSRLSQHIEKGNDDGLYVSCVASSANLWALIMDAGTGFCSQVYELSPVFLHKDWIMEQWEKSYYITAIAGSTNGSSLVVMSKGTPYTQQSYKVSESFPYKWINKKWKEGFHVTSMATAGNRWGVVMSRNSGFSTQVVELDFLYPSEGIHRRWESGYRITSTAATNDQAAFILSMPKRKPMDETQETLRTSAFPSSHVKEKWAKNLYIASICYGRTVC

SEQ ID NO: 56061 - protein, 285 aa, Zea Mays
MGSGSSLSGKQNSSHHKMNVRSTSGQRRVNGDSQAVQKCLITESPAKTMHRLVPQPAAKDTHPVDPQSAVKVPVGRSGLPLKFSGSVDPSPARVMRRFDPPPVKMMSQRVHHPASMVSQKVDPPLPKVLHKETGSVVRLPEAARPTVLQKPKDLPSIKQQEIRTSSSKEEPCFSGRNAEAVQVQDTKLSRSDMKKIRKAEKKDKKFRDLFVTWNPVLIENEGSDLGDEDWLFSSKRNSDAIMVQSRATDSSVPIHPMVQQKPSLQPRATFLPDLNMYQLPYVVPF

SEQ ID NO: 56062 - protein, 639 aa, Zea Mays
MPTPPLRGAGLLLRICLFLCLSLRPRLASSEPDADGPGPGWTGVTCSADGARVVALHLPGLGLSGAVPPGTLGRLTALQLLSLRSNDLSGPLPADLLRLPALEGLHLHRNAFSGALPAALAGLTALQVLDLSFNAFDGAVPGALANLTRLVALDLSNNSLSGRVPDLGLPALRFLNLSNNRLDGTVPASLLRFPDAAFAGNSLTRPAPAQAPPVVVAPPPGLAAPPPARRRPRLSEAAILAIAVGGCVLGFAVAALLLLAFCNSSREGRDEETVGGGAAAGKGGEKKGRESPESKAVIGKAGDGNRMVFFEAPSLAFDLEDLLRASAEVLGKGAFGTAYRAVLEDATTVVVKRLKEVNAGRRDFEQQMELLGRIRHDNVVELRAYYYSKDEKLLVYDYYSRGSVSNMLHGKRGEDRTPLDWETRLKIALGAARGVAHIHTENNGRFVHGNIKASNVFINKHERGCVSDHGLASLMNPVTVRSRSLGYCAPEVADTRKASQSSDVYSFGVFVLELLTGKSPVQITGGNGGDVVHLVRWVQSVVREEWTAEVFDGELLRYPNIEEEMVEMLQVAMACVSRSPERRPRMADVVRTIEEVRRSGSGTATGTGTRPSTEASTPATAAEAAQSRAEEGGSSAVAQ

SEQ ID NO: 56063 - protein, 134 aa, Zea Mays
MAAPLFLLLLLLAMFTGSADAAFCVCKTGVPDQAMQAAIDYACAKGADCASASKGAPCYGNGNKVAVCSYICNSYYQSRSATGATCDFNGVATLTGTDPSSGTCKFASGPRQVDTVGSHAHSGVRAMALGETGR

SEQ ID NO: 56064 - protein, 800 aa, Zea Mays
MSSSRFDELPDEFDPTGRFPGSFDDGDPQTTNLYVGNLSPKVDENFLLRTFGRFGPIASVKIMWPRTEEERRRQRNCGFVAFMNRTDGQAAKDEMQGVIVYDYELKIGWGKSVALPSQALPAPPPGHMAIRNKEGGTATVILSGPGGPAVASIKPQTSELVLTPNVPDIVVAPPDDGHLRHVIDTMALHVLDGGCAFEQAVMERGRGNPLFDFLFNLKSKEHTYYVWRLYSFAQGDTLQRWRTEPYIMITGSGRWVPPPLSSNRSPEREKESTFAAGRSRRVEVERTLTDSQRDEFEDMLRALTLERSQIKDAMGFALDNADAAGEIVEVLTESLTLKETSIPTKVARLMLVSDILHNSSAPVKNASAFRTKFEASLPDVMESFNDLYRSITGRITAEALKERVMKVLQVWADWFLFSDAFLNGLRATFLRSGNSGVVPFHSLCGDAPEIEKKGSSEDGNDGFKLNEDGALATGKAAATKELLGLPLAELERRCRHNGLSLCGGKEMMVARLLNLEEAEKERIYEKDVDVKYVQGEQHVVGREDSGVNAHSTSRFGEGSNGDELDVSRNSMRAGKGRSGGSASAELESFPSKKPKYDPVLPASKWSREDDISDDEDRKGGRGLGLSYSSGSDIADGLGKVDTTEASTDHTSHHHDTIVDEEHRQKLRQIEISVMQYRESLEEQGLRDLDEIERKVASHRRRLQSEYGLSTPTDGANSRRSSERTSSSSERKERHGDAHDHPRKRRRSQSRSCSPPRKSQERDREHNRSRDRDRVREKSASRGRDDHHDRSRDREDRRKGR

SEQ ID NO: 56065 - protein, 478 aa, Zea Mays
MASLFGAGRRRSPEDDGEDDRSGRGRTKRFRLSPEEDAASPAEAGPGAATETGWLSGFVYGAKRVISSVLLFSSPEETGSGEDEEEEKDDDDDEEGIHLNEHEATHDTHGAIVPYSEPKLTIEQMVMKETFSRDECDRMVELIKSRVRDSTFPEAHEYVKPEEIPSRNAGITHDFTGTWRSLSRDRNVPESVPLSSMRTRPGSFSQGSPLQASPELCTAAVTEAKKWLEEKRQGLGFKPEDNGPCTLNTDILSSHDDSVSDLGSPVDLAKSYMQSLPPWKSPFLGRQKFNTPPSKYFISSAEVTTKEDYLSSFWTKLEESQRARIGSSGGSADAPKFWNYGSNSRLFENDTSIFSLGTDEKVGDPTKIYNGSGKFAATEPVGGCCLPITPTEDRTDGITEPVDLARNNGNAPQENQVASEILPDKVPEGNDVSSTGITKDTTGHSGDVKAPTSEPHLGETRINSASGWGGGARLRMHN

SEQ ID NO: 56066 - protein, 84 aa, Zea Mays
MASFSEAPPGNPTAGEKIFKTKCAQCHTVDKGAGHKQGPNLNGLFGRQSGTTPGYSYSSANKNMAVIWEENTLYDYLLNPKKQY

SEQ ID NO: 56067 - protein, 106 aa, Zea Mays
MQVTAARFPSISSTHSLQEGMAAMPLMALKTPTRIAVGSLLAAVRRPEPKPMPRRRPPLLRSCPASPCCSIGHRTLLLYRPPALQFRPHARTKGEEEDFADDVDKY

SEQ ID NO: 56068 - protein, 402 aa, Zea Mays
MAWSCSNFLKEPRKYQIVDILMVEELWSCFLDQHGSTNNVVTSVIIDIIKTIPICMWLLKSTHVFCRLVLMPLAVFVFLAHKYWKARITIDAVEKFLRMQQMLVPMRYAYTNIIAITGHFREKLGQGGYGSVYKGVLQPGEVHVAVKMLGNSNCNGEEFISEVATIGKIHHFNVVRLIGFCSEENSRALIYEFMPHGSLDKYIFSSEKSFSWDKLNEIALGIARGLNYLHHGCDMQIVHFDIKPHNILLDSNFVPKVADFGLAKLFPRDDSFVPLSAMRGTIGYIAPEMVSRSFGVISSKSDVYSFGMLLLEMTGGRRNADPHAGSSSQAYYPSLVYNQLSQGDVGEISEGVDMHELKKKLCIIGLWCIQMKPQDRPTMSEVIEMLEAAGSTDDERGHKDVL

SEQ ID NO: 56069 - protein, 299 aa, Zea Mays
MRLFQVTGAVGWRREGLVYKKNEVFLDIVESVNLLMSSKGSVLRCDVTGKILMKCFLSGMPDLKLGLNDKIGLEKEAQLKSRPAKSGKTIELDDVTFHQCVNLTRFNSEKTVSFVPPDGEFELMKYRITEGVNLPFRVLPTIKELGRTRMEINVKVKSVFGAKMFALGVVVKVPVPKQTAKTSFQTTSGKAKYNASIDSLVWKIRKFPGQTEATMSAEVELISTMGEKKSWNRPPIQMEFQVPMFTASGLRVRFLKVWEKSGYNTVEWVRYITRAGSYEISYPQRSICGIMHDHKAHIL

SEQ ID NO: 56070 - protein, 55 aa, Zea Mays
MRPCGNDNDTLALLKMVADKTGRGCVYGMDIQESAIENTSSFLKMAVDDEHHVWV

SEQ ID NO: 56071 - protein, 325 aa, Zea Mays
MQEVERLRAERNAVANKMKGKLDPSVRQALVEEGKNLKEGLIALEEDLVQLTDKLQLEAQSIPNTTHPDVPVGGEESSVLRKEVGSQRSFNFAIKDHLQLGKELDLFDFDAAAEVSGSKFYYLKNEAVLLEMALVNWAISEVSKKGFTPLITPEIVRSSVVEKCGFQPRAKNTQVYSIEDSDQCLIGTAEIPVGGIHMDSILAESALPLKYVAYSHCFRTEAGAAGAATRGLYRVHQFSKVEMFIFCRPEESGKWHEELITIEEDLYASLGLHFKTLDMATGDLGAPAYRKFDIEAWMPGLERYGEVRGKYPGLYTSCQHFLESC

SEQ ID NO: 56072 - protein, 66 aa, Zea Mays
MPTGHLLLLRALDGAGPVSNGSTSLSSTSCCASSISSSCYTLSRRAWNLVLMYILGVCPYVATGVC

SEQ ID NO: 56073 - protein, 403 aa, Zea Mays
MASSVHKVGMVLDSVQTDVMQLNRAMKEATLDSGSIQQKIVLLDALLQKNLKGQDDLKALVESNTKSISDQLTVLNSYSNKLDEISSTLSILPKQIETNLKQQQSDTFRIFRKDMEEIVRAVRSLNNKIDAIQMPTDQSCTTNGRPLMNQLPVDRNERPQVNQTPEVTRVSQTPVATMANQRPVAKGRHLVSQTPAANGKPLTNQTSVANGRSLMSQVPAANGKPLTNQIAVPKGRPMMRQKTAEGGRPQMNQIPVADGWPHTNKIHAPEVRHPVPLVCPAAGPRPKVEEGKLRAVPQKLTGCRSRVTPKQEEAATNTKVVVGRAAATEKVVIFIDDDSDDGGSEALASCVILRPAPLGSGAGECDLVKVGAEESQEILRRARKRRRREMQAIVACMPPELGY

SEQ ID NO: 56074 - protein, 341 aa, Zea Mays
MQSPPPPLQSDRINLDIKRVVGYRQWCNKLWNAIRFAMGKLGDDYIPPATVDVSLMPPICKWILSVLNKAVGKTVTSLEAYKLSDATSAIYSWWQYELCDVFIEAIKPYFSDSQEFESARAASRDTLWICLETGLRLLHPFMPYVTEELWQRLPQPKDSSRRKDSIMISEYPSLVEEWSNGGVENEMDIVLDAVNKIRSLKPPTDSNERRPAFALCRGQEVAATIQCYQSLIVCLSSISHLKILTESDETPADCATAVVNKDLSVYLQLQGDLNEDAEREKLRKKKDEIQKLQNALAQKMDASGYREKAPQSVQEEDMRKLTALLEQLEVISEAEKKLDSN

SEQ ID NO: 56075 - protein, 188 aa, Zea Mays
MQELFINSSADGSLAMEATTCMNETHPGDDSDFNDDVCSDFSNYPQPVHDLGDDSDTLPSPNHHPSQNVDHSSSSSGLKRPQGEGVPAKRNVKPKSRTTKVVDELSATLVELRNDLKKPPPPVPMPFGNPDAILWQRLENMTITTDQKLMVGTYLAHKDQKGMRGFLSAASDITFESWVLKHLSDLDL

SEQ ID NO: 56076 - protein, 145 aa, Zea Mays
MIGALWKPALQGNRVVKLEIAIASKDRDVRSKGAKRGRMSDLEAKLDELRRDLSSTGSDAIFPHAVLTAQQISLLSSQKPTTPAELEKVIGKVKTRKYGSKIIELMRSHDNSGSGRGKEAGDEHRAKKIKTKDEDVVCVESSEEE

SEQ ID NO: 56077 - protein, 335 aa, Zea Mays
MYVSSWHICFHSNVFSKQIKVVIPLRDIDEIRRSQHAVINPAITIFLRMGAGGFGVPPLGCPDGRVRYKFASFWNRNHTFRALHRAMKNFVMMIDAEKQERAQSALRAHSSSRKNSKKEINVPEDCAALTGKLQPFVKEEVLVPVFNGTFPCTAEQFFSILLSDDSNYITEYRTDRKDKDINLGQWHVADEYDGQVRELNCKSICHSPMCPPYSAMTEWQHIVLSADKMDLVFETVQQVHDVPFGSFFEVHCRWCVKTISSNSCSLNISAGAHFKKWCIMQSKIKSGAVDELKKEVKVMLDFAQGYMLKVSSPDQENSNLAQQDNTAPDAPSDTG

SEQ ID NO: 56078 - protein, 749 aa, Zea Mays
MSMGVVSREVLSACERLCFICPSLRTRSRHPVKRYKKLLAEIFPRTQDEEPNDRKIGKLCEYISRNPMRVPKITFYLEQKCYKELRAERYGSVKVVIAIYRKVICSCQEQLPLFANSLLTIVETLLEQNRQDDLRKLACQTLFDFINNQVDSTYMFNLENQIPKLCHLAQEMGEKEKICILHAAGLQALSSMIWFMGEHSHMSAELDNVVSAVLENYESPYANADNDAAIEDRRIQWVDEVLKAEGHEPPAVTILTRVPSWKVIRTVHGELSLTIEESTSPNFWSGICLHNLARISREATTVRRVLEVIFRYFDNNNLWSPSKGFALCVLLDMQIVMEKSGQNAHILLSMLVKHLEHKNVLKQPDMNLDIIEVTSRLAGHSKAQSSTALMASISDMVRHMGKSMQSLASDAGPGDNMVKWNSRYGKAVDECLVQLSRKVGDAGPILDTLAVVLENISSSMIVARSTIFAAYRTAQIVASLPNLSHQSKAFPEALFHQLLLAMVYPDCGTHLGAHRIFSVVLVPSAVAPCSFSDTSRTRKIDLRRTLSRTTSVFSSSAALFGKLKRDMLSFRESPLHDNTKLLPISEDADEISANDAKLFKSQTIQRMASTKDISLPSSTDASTLSEQTPNQEKDAVTLMLSVRQANLLLSSLWTQALSPENVPRNYEAISHTYSLMLLFSRAKGSGADVLVGSFQLAFSLRSVSLQAGFLPPSRRRSLFTLATSMLVFFSKAFNVPALIPVVKHVLTES

SEQ ID NO: 56079 - protein, 171 aa, Zea Mays
MQLRQLCKISGVKVCFDTENARDSFYRAAVNFVLDDCSRAAKDIGAAKLNGEDPRDFLAGLASNIGLDKFRAATLVCASVATRTRTCFLQCWALEIQGKRPEALDELVKICRIHYIFPPEDNSAEMEMVAAGLEKNLHVAERVHLLYLYRSVCTAGNLKTAAQALGLVNKE

SEQ ID NO: 56080 - protein, 394 aa, Zea Mays
MAAPRSSGGGHPDYPPETGVYYRGDLAPGSVDDSEWEEEEEDDDEEEASSSGREPETEETRFKSGIEGMLTRLQKDREQARPPPRSSTHDTREQSDDDALAGNSGAPSHIAAGGRHIRRVPENGSVRGSHYQNGIIEGNNTLESSSNDAWKTWTLGKGGLSHFEVAEVLPTERRKLSQHGDIASVQNDVQRSSNGVAVSDYPSDGVGTERDEIHSRLQSLELDLSSALKTLRSRFDKVLSHMSNSNGATVLDDISDDWELEETKVMQAQEELRSIRAKIAVLEGKIALEIIERNKIIEDKQRRLDEVEKALNELRTVCIMWANPATDVLLVGSFDGWTSQRKLERSENGMFSLNLRLYPGRYEIKFIVDGVWKNDPLRPTVHNNGHENNLLLVT

SEQ ID NO: 56081 - protein, 316 aa, Zea Mays
MPPGKRSTQPSRNSEEDPLTEYEKMRAVNMMKNNQLFQRLGLGQLKTMITATTTNNNQGGPQESGSLYDGENVEDSGEEDVGMEFQARKGVPTHISNDGEHMSTKVTRGNKRIMAPVQERPVRVTRQRVAEESCVKNKLNREKVQYQQCTGSQSYIAKAFILKQEKYKDAEPSAIDLFKEMHCSKKKGFSENVQKAIVDMEEMVAAPVQDGQQPKSPTEVVSNVLPGSSVFLRNVGLKSASQKSSTTTVSAKVQQLQDELETEKQEKDGLREEVETLKAQAQASQETVDSMKRSMEENNNLLRQLLSFNRGQVPPS

SEQ ID NO: 56082 - protein, 530 aa, Zea Mays
MASLFGAGRRRSPEDDGEDDRSGRGRTKRFRLSPEEDAASPAEAGPGAATETGWLSGFVYGAKRVISSVLLFSSPEETGSGEDEEEEKDDDDDEEGIHLNEHEATHDTHGAIVPYSEPKLTIEQMVMKETFSRDECDRMVELIKSRVRDSTFPEAHEYVKPEEIPSRNAGITHDFTGTWRSLSRDRNVPESVPLSSMRTRPGSFSQGSPLQASPELCTAAVTEAKKWLEEKRQGLGFKPEDNGPCTLNTDILSSVTTKEDYLSSFWTKLEESQRARIGSSGGSADAPKFWNYGSNSRLFENDTSIFSLGTDEKVGDPTKIYNGSGKFAATEPVGGCCLPITPTEDRTDGITEPVDLARNNGNAPQENQVASEILPDKVPEGNDVSSTGITKDTTGHSGDVKAPTSEPHLGETRINSASESIPNDAGPPTQNKKNGSTTKKTLVNGLVDQSNANSGLESSGNDNPSYTNSSSAVPPASTQPVESAAAAVDVDSVEKGPGTTPEQPAKRRAPNVRRGQRRVLRSATREGRAT

SEQ ID NO: 56083 - protein, 171 aa, Zea Mays
MSDPLLPNSNTQATQLWLPLLAAQFFAPCSSSSSFRTSAPASASTATEMEAQDDCKWRQVPAFGDWNLWDDMPVTQYFQAGTFFFAAPTTEKDDDEDLFKVPQFPATPYSYKKCVVRVKGEKGTAVPPAARKGGRRRRVNEQQKWKPKGAVDEDLYKISPQLLCKQVELCQ

SEQ ID NO: 56084 - protein, 102 aa, Zea Mays
MGRECIGIVPPFIREFNYPMARNCAGGDSGVFVNGRELHQRDLDLLVGRGLPRTSGKSYSLEMSGNVIDEDTGKKLRSLGKLAPTIEKLKRGFGMHVPEEFR

SEQ ID NO: 56085 - protein, 239 aa, Zea Mays
MKQMGSLSKEEFVHVLRRQSTGFSRGSSRYRGVTLHKCGRWEARMGQFLGKKAYDKAAIKCNGREAVTNFEPSTYHGELPTEVADVDLNLSISQPSPQRDKNSCLGLQLHHGPFEGSELKKTKIDDAPSELPGRPRQLSPLVAEHPPAWPAQPPHPFFVFTNHEMSASGDLHRRPAGAVPSWAWQVAAAAPPPAALPSSAAASSGFSNTATTAATTAPSASSLRYCPPPPPPSSHHHPR

SEQ ID NO: 56086 - protein, 67 aa, Zea Mays
MVYRRRNRRIITIASVIFFREFSVLLQNGWFPKIFMVLLSGVVAGFYFYRIAAGSPKELSSNSDSVN

SEQ ID NO: 56087 - protein, 132 aa, Zea Mays
MKTAAAICLHWSCEKAMVQIVQQINHDGEVNRARYMPQNSFVIATKTVSAEVYVFDYSKHPSKPPLDGACNPDLRLKGHNSEGYGLSWSIFKEGHLLSGSDDAQICLWDIKANSRNKSLDALQIFKNSVPSL

SEQ ID NO: 56088 - protein, 59 aa, Zea Mays
MPQDFRCTVMVPVHAVLAGGLIFQTWVLEQAKYRKDAISQYYRFIWNLFYAEYIFFPLI

SEQ ID NO: 56089 - protein, 278 aa, Zea Mays
MATRYWIVFVWDEGKYPTMSPLKEIVGSIQSQVAKIEDDMKVRAAEYNNVRSQLSAINRKQSGSLAVRDLSNLVKPEDMITSEHLVTLLAIVPKYSQKDWLSSYETLDTFVVPRSSKKLYEDNEYALYTVTLFAKVVDNFKVRAREKGFQIRDFEYSPEAQESRMQEMEKLLRDQEAMRTTLLQWCYASYSEVFSSWMHFCAVRVFVESILRYGLPPSFLSAVLAPSTKSEKKVRSILDELSGDAHSLYWKSEDDVGVAGLGGETEAHPYVSFTINFV

SEQ ID NO: 56090 - protein, 141 aa, Zea Mays
MAFLFGAFLGLVVGVAVVMAFARFENSRAEQRRELAATAAAFSKLTVQDLRKLIPPEFYPSWVSFTQKQKLKWLNQELTKIWPFVNEAASELIKTSVEPIFEQYKSFILASLHFSKLTLGTVAPQFTGEKYWIHRSTSAHI

SEQ ID NO: 56091 - protein, 219 aa, Zea Mays
MDDVKFTPDQQSKLISAAVDGLICVFDTDGDIDDDNHLLSVMNAETSVAKVGFFGNKYKKLWCLTHIETLSVWDWNDGARELNIEDARSLATDRWNLDHVDYFVDCHYSVPDDRLWLIGGTTAGTLGYFPVRNDHDGPIGSAEAILEGGHTGVVRSVYPSSGIHGRLGQNRGIFGWTGGEDGRLCCWRSDEIAETNKSWISSSLVWKQQKKTKNRHQPY

SEQ ID NO: 56092 - protein, 282 aa, Zea Mays
MIFTLQAKNDLSKSIDSCNMEASVVKTWVNFLEDTWQLQLSYNEQKETKTNDELERCTSSFLKLTKHHLSYFKEVLSPSIERIRTYVDNLAVLNSREESIEHEGDDEISVQTSPQKSLEEEYLETEKKIVIAFSIVDRMKKMFYSEQAANSRQDDAEVRTLFSEIEKLKEVFESVERPTLDIEVRKAKDPMKDKSGSNRSAKDKSESSHSPVQVPSSPKDVPVESPKSPVKPEQTMDPDSEFAKLELEFGKVNRDHEEIGGWDFDELEEELRADLSKSTNPK

SEQ ID NO: 56093 - protein, 931 aa, Zea Mays
MPLLKWSFSLLGFFMCPCGLRAVRTRVICRYRLLFGRFVCRLEALLSVDLFVLQNTFADYTARTSFERPLLSGVAYAQRVVHADREGFERHQGWIIKTMKHEPSPAQDEYAPVVYSQETVSYIEGLDMMSGEEDRENILRSRASGKAVLTRPFRLMSNHLGVVLTFPVYHADLPSDAKEEDRVAATAGYLGGAFDVESLVENLLRQLAGNQELVVNVYDVTNISNPLVMYGSEVPLGNPSPSHICMLDFGDPFRKHHMVCRNKPHVPWSAISTPSGVFVICMLVGYIAGAAWSRYDNVKEDCRKMEELKKQAEAADVAKSQFLATVSHEIRTPMNGVLGMLDMLLDTDLTSTQRDFAQTAQVCGKALISLINEVLDRAKIEARKLDLESVPFDLRSILDDVISLFSSKSREKGIELDVYVSERVPEILLGDPGRFRQIITNLVGNSIKFTERGHIFVQVHLADHSNLATESKVEPVANGMNGHTDEKTAVATSVSLNTLSGFEAADSRNSWENFKLLLSYEKNEMPYESVSDKVTLVVSVEDTGIGIPLDAQAKVFTPFMQADSSTSRTYGGTGIGLSISKCLVELMGGQINFVSRPHVGSTFTFTAVLKRCDRSAIGDSKPVMLHPLPSSFKGLSALLVDRRPVRATVTKYHLQRLGIACDVVATIELALGVLSGRNGSSLTSMKQPCMLLIESDSWGFNIDVSLRSRLLEMKQNGHTHVLPKIILLAAAESGKLKEHYAVDSVITKPLKASALAACLFQTLGIKQSSNERSDNSGSLYGLLLGKNILVVDDNKVNLRVAAGTLKKFGAKVECVESGKDALALLQVPYKFHLCLMDIQMPEMDGFEATKQIRAMEAKANEQAVACDNSEIDGATRAARWRLPVLAMTADVIQATHEECTKCGMDGYVTKPFEEKQLFQALQKFLDPGMSC

SEQ ID NO: 56094 - protein, 143 aa, Zea Mays
MHKAARQHLIFYSHCFYFVNSLTHVSVLVYSGDKSPRPELQEDQAWLWLQLCCLLLLDRREGGEKQLACRLLLRWSFILYGASRIHLLQKHHKSCLGHYTRASHSATWHSQSEVLEERQIQLPAYLGSEVMLMCKHLHLEFCL

SEQ ID NO: 56095 - protein, 336 aa, Zea Mays
MMATGRSLAGVYSARATRPMPLRAGARAPCAGAAAAEPAAEHVRRLVAEFDPAVPLDSAVTPPSGWYTDPDFLQLEIDSVFFRGWQAVGHIWQVKNPNDFFTGRLGNVEFVVCRDANGKLHAFHNVCRHHASLLACGSGHKTCFQCPYHGWTYGLDGTLLKATRISGIKNFNKNDFGLIPIKVATWGPFVLIRFDDESTEDNVYDTVGNEWLGSASDLLGTNGIDTSLPHICRREYIINCNWKVFCDNYLDGGYHVPYAHGDLASGLQLQSYETLTYERVSVQRCESAPAEPDDFDRLGTKALYAFVYPNFMINRYGPWMDTNLAVPLDSTRCKDD

SEQ ID NO: 56096 - protein, 180 aa, Zea Mays
MAPLEKRAKVSWLHSRHMHWHFQIPSWPWLTHMMYKAVGIRLDSGDLAYLSVEARKFFHAVEKEFVVVGFGKTSITASNDLNEETIDALNKQGHEVDAFGIGTYLVTCYAQAALGCVFKLVEINKQPRIKLSEDVMKVSIPCKKKCYRLYGKEGYPLVDIMTGEDEPGPKMVGFMIYHSF

SEQ ID NO: 56097 - protein, 1567 aa, Zea Mays
MNGLPMTTWRGLLGAALSSYHKLLLVNTSRNSEFSFFLSLAKSHSTCPQVLSAVAEYLDSLQGVSSMEVTKEFDPQNLLELFSIFAFNLSSPTKDVRILTLRILSYFVKMDQRLITDEERPHKRQRTEVSGEEAVAKYANVVDILLIIESMPISVSTSRKIAIFISRIQMSLSSKMVHDDYIPPLLHGIIGILYNRFSDLWPQTLDCLAVLIRKHKELVWGQFVPFIAIHQSKGLTVKNQEKLEAATQPQSIFDCFNLYLAMDFDCTPAVTVATLLLQSLQRIPDVAESRSRQLIPLFLNFMGYDDSSIFSADSYMPEKCKGKQWKAILKEWLNLLRLMHNARSLYQGNFLQEVLTKRVLDDSDPEIQAKALDCLLNWKDEFLIPYSQNLKNLIDVKTLREELTTWAVSHDSLSILKDHRSRVVPLVIRVLAPKVRKLKLLGSRKHTGASHRKAILRFLLQFDSNELELFFSLLLRSLIPGSLQLKMFGSQPDNLLGSFSDIVGTSTEICVENFTWKKANGFIHLVEEIFGTFDMPHISPFLNVLLIIVARLLESCMRNLRNESDGKYPCNQTNDHGNGCSINSEVGNSVNVDECFKEMHLEGHMETASGSITTYALEFIENLLRLDIDLQQQDEHLVKKVLLQHMDVLIHSLHDFVNHRKELNRRSGTWLGQRELRLFKLLLNYITDPSAADNFIDLILPFFSKKDLNSDDCLEALCVVRGIIQNLRCKVSEKVLNALNPLLAIVGLELRLCICDIYAGLSLNDPSMLFLAGLIGDLNAVSASELGELDYDTRLNTYDKVRPQLFLGLTEEHVGAILSHCVYDMSSEELILRQSASRALQSFLDFSASVMNNDVSKYSIDDKFRENNTRSICTMGCIQKILEKTYLHNMGVAMTKDVSIQKEWIILLREMVSNFNHLASLSSFRPLCKVDIEEDFFHNITHLQAGKRSKALLLFRQGIKENNFSEDITMKVFVPLFFNMFSDVKAGKGEQVRDICLDTLSAVAAKVQWEHYRTILKRCFRELNLRPDKQKIILRLICSILDAFHFMKPANDASGNSDALSEDIDSSLTFSLVTVSSDKQQYMQKVVFPQVQKLLGSDPEKVNVNINLVALKILKLLPVDYFESQLSSIIHRICNFLKNRLESIRDEARSALAASVKELGIGYLQFVVKILRAILKRGFELHVLGYTLHYLLSKNITADMYGRLDYCLEDLLAVVDSDLLGDVAEQKEVEKLASKMKETKKRMSFETLKLIAQSITFKTDLLKKIISPVSLHLQKQLTPKLKTRLEMMLHNIALGIECNSSTETSNLFIFVYCLIEDTITGSRSECKENTQSSPDQDSTVRKTFLGLGESGSQNSYILTKFALDLLRNRLKSIKLDKEDEQLVKMLDPFVDLLRKCMSSKHASVLSATFRCFALLVKLPLPSLRDNAITIKNVLMEILQRAGNSNGHLVTSCFKLLADLLRGFRISLSDNELQMLVHTPMFVDLQTNPSPVALSLLKTIVRLKLVSHEIYDIVVKIGELMVTTLTESIQQQCIQIMLQFFLNYPLSEKRLQQHIDFFLANLRYDEYP

SEQ ID NO: 56098 - protein, 246 aa, Zea Mays
MTSCRRRSAGRGRWTPAAPPRSRRPFAPRPTPTPSGPASCRPTCPRSPMGSSPPTRRPPRSSSSCASPTPPDPSSSPTASRFSECAELQHVCWLEIRGKIPCDMLSRNTTYAAYMVFKMSDESYGLDYPLQEAEVSIGATRSTRQVCLGYVDDDEDGEEVPQNYRSFGAVGTVFRPRIGRRNRRQPPGVHVLHPQTRAGGWMEMEMGEFRNEEGEDGEVSVSLMETRGGNWKRGLTVQGIEIRVKK

SEQ ID NO: 56099 - protein, 1265 aa, Zea Mays
MEEVVLDPGDRIVAMDYLMERESLLLGSSDGCLLLYNVEEKTTEVVGRLEGGVNTIASSPDGALLSVTTGLGQLLVITQDWEVLFETSLDPQDETIDNTDSTGGQSRSAISWRGDGKYFATLVAPESFSSPTKLNVWERESGKLHSSSDAKTFMGASLDWMPSGAKVATALDRRTEGKCPLIIFYEKNGLERSHFSIDEPGEVAIQALKWNCNSEILAALVSSGQHDVIKIWTCRNNHWYLKHELRYTKEEGVKFFWDPTKPMHLICWTLSGQVIIHKFAWTTAVSESSIALVIDGSHVLVTPLILGLMPPPMSLFHLAFPCAVNEVSFVTNNSKSHLAAYLSNGSLSVVELPAPDTWEEFEGNGISVDPCCSDFTLNNCMHLTWIDTRTLIGICCYSEHLSSTKIRSSEASNLVDKHDSLFFIHEIELKCSESSVPGSVCSSGWHARVSKKVQLESSVIGVSPNPAKRGSAFIQVSGGKIIEYCSSLNLLNMCPPAQFSGIGSDLCFPASCPWMTAVLCYENGMTEPLLFGLDESGKLYMGKRLLSNNCSSFTLYSSVYGATEPVMSHLLVTTKQDLLFIVDVNEVLLKDIEVTIDGLVSSPARGKQNKEYITVWEKGAKLVGVLHGDEAAVIMQTTRGNLECTYPRKLVLVSIVQALVQKRFKDAIGMVRRHRIDFNIIVDYCGLNAFMDSAADFVKQVNNLTHVTEFVCSMKNSNVSSKLYEAYISFPDQCAIPMADNESSPGLFLGNKVTSVLMAIRKALEEQIEESSSRELCILTTLARSEPPLLEQALNRIKLLRESELLGLDDAKRKLYPSAEESLKHLLWLTDTEAVFSAALGLYDLNLAAIVALNSQKDPKEFLPFLKSLECLPPAIMRYTIDLRLGRYESALRNIVSAGDAYHEDCMKLLNDNPQLFPLGLQLFNEPDKRNQILEAWGDHLSGEKCFEDAALTYQCCSSYQKSLRAYRACGDWRGVFTVAGLLELKREEIVQLAHELCDEFQALGKPGDAARVALEYCSDAERGVSYYIMAREWEEALRVAYMLSTHDLVEAVRDAASECAASLIAEYQEGLLKIGKYAARYLAVRQRRLSLAAKLRSEDRFMDVEDDSVSETSTSFSEMSAYTTRESSASVMSSNASKSRAARRQKKGGKIRAGSPGEEMALVEHLRGMALTGGAQNELKSLLVALIQLGKAETARRVQEAADSFEVSQRAAVKLAEDTVSSDRVEERAHTLERYVRMLRDRESGHGEAGGTWRINALSPPVTG

SEQ ID NO: 56100 - protein, 835 aa, Zea Mays
MNNQIVYQDLTKVLGLDRFDSENLLDVSTTVLPLKSVAMDPTNLLHLKTVPSENGLKLVENSSDNLQDLACESPLAGKVKFMCSFGGKILPRPSDGKLRYVGGETRLISITRNFSWNELVQKTLTIYSQPHIIKYQLPDEDLDALISLSCDEDFQNMMEEYCSLEKANGSVRLRMFLVSLNECEDSSLDAKSLESEPEYHFVVAVNNLAHLGRSISGNNLMSQPSHQLDPSPHSFRDSPVCQANTEVKAKDSVGATLNESSSQFFLAPYTQQLVVEPSTTPSPSLSQQRTMKQSRKQPPADELTTNQEHVSRSEVSSSSNLKTMLPNHLDKKHNDADKGIGTGSPLKHLHIRRQVKDWAGNGIDLIPHTNYDVSTPVEASLYSEKVIMHPENAGGTSGLQEHAGQILGMPHAFSDPLLKNLNDLPASNLSLPAGSYITQSFSQKICHTNELERTISRTGPAFECVKPPDIARADESNYLVSNHIDQRYNQGIIGPASSQPPVYYQDESLSSNVTQKCHDGYHVVQQQDKFFHQDKSAGLIYNAHGAKLPSDNLDALESSVPKPMHATDHSLSYLLNVSQGDNSESGSHVEKLNSGPVTKDYGTTGYVHGTDKVAPNPQDLLHIKSSEAFITQRSMGNGESGVYQNDNLHKSSVLHTGLIDTDPSVNLHDNGGLSVSSSQNPVVDCVSRREDPLRDWGNIACSEGIIGCDHTTTDNEHIKLAHRLHDNVQMNVPVIVEDVTDNVPSGIPSSRPVVPQVVMAAEEHQEVILSSQKDDDSRTNRPELANEDHDGVADGSISDAVVAELEASMYGLQIIKNGDLEELRELGSGTFGTVY

SEQ ID NO: 56101 - protein, 317 aa, Zea Mays
MAAAAAAAAFDAYTDKNAIFRRLKAKPENKMCFDCNAKNPTWASVTYGIFLCLDCSAVHRSLGVHITFVRSTNLDSWTPDQLKMMAFGGNNRAHAFFKQHGWTDGGKVEAKYTSRAAELYRQMLNKEVAKSAITDNALPSSPVTASEASKPSDDFPEFKLSDAPAPPAENLNGKHEPKSPKAAPRSPKAATHPTFATSVKKPIGAKKVGGKTGGLGVRKLTTKPNESLYEQKPEEPKPAIPALTAPTAKGGPSLHSRFEYVDNEQSSVSRTGGSGSRVTGHVAPPKSSDFFQEYGMGNGFQKKSSNASKAQMLFWLQ

SEQ ID NO: 56102 - protein, 593 aa, Zea Mays
MKNSGGGAAHGDGGDIYNVRAAEILANEALLLPINEAAPIYENLLATFPTAAKYWKQYVEAYMATNNDEAAKQIFSRCLLNCLHISLWRCYINFIRRINDKRGSEGLDETKKAFDFMLNYVGNDAASGPVWMEYINFLKSMPVVTPHEESHRMTTVRKVYQKAILVPTNHVEQLWKDYENFENSVSRTLAKGLLSEYQPKFNSAKAVYRERKKYIDDIDWNVLATPPTGSYKEEQQCMAWKRLLVFEKGNPQRIDATTANRRITFTYEQCLMYLYHHPDIWYDYAMWHVKNGSMDSASKIFQRALKAIHDSEVLKYAFAEMEESRGAIQTAKTVYESLLGENASETSLANIQFIRFLRRTEGTEAARKYFLDARKSPSCTYHLYVAYATMAFCVDKDAKVAQSVFEAGLKRFMHEPGYILEYTDFLCRLNDDRNVRALFERALSLLPPEESTEVWRRFAQFEQNYGDLSSMLKVEQRRKEALSRTSEDALSASENTLHDIVSRYSYMDLWPCSSKELDYLARQEWLAKNIVKKVEKPAMLNSGSMLDKGAAGFSASARLLPQSAKVVRPETSQMVIYDPRQMKEWEITVDSWA

SEQ ID NO: 56103 - protein, 96 aa, Zea Mays
MASDHGVSLPVRVRRRAAEVGQTWACFEGLACAAPWPELLPPRTRRRSEVSSIRRITLVTGILSARQVVPLIHFCYPIIFFIITYSMHRFNFDGTQ

SEQ ID NO: 56104 - protein, 78 aa, Zea Mays
MAGRANIPTNNSALIAIIADEDTVTGFLMAGVGNVDLRKKTNYLLVDNKTTVKQIEDAFKEFTTREDIAIVLISQYLF

SEQ ID NO: 56105 - protein, 117 aa, Zea Mays
MFDIQTEILLCGGGGGARDPGAQAVDHPQPGEEAGGVRAGAQPTQTLAFLLLPAEQEQQRGGGAGGGVHKPGGVPDAGGAAAEQGRGRLPREHPVAEELLAARLTGPRGLPLLILIL

SEQ ID NO: 56106 - protein, 417 aa, Zea Mays
MHSIAVRTAAHSRGGGYSILEDLGVCDGCDVPYVQPLAFGMVLCQVECQGHLGSKSVLSMSRLKCALRTFDLRVLLILLIGVPILLFAIYVHGQKVTYFLRPIWEKPPKPFKVLPHYYHENVSMANLCKLHGWRVRETPRRVFDAVLFSNELDILDIRWHELSPYVSEFVLLESNSTFTGIRKDLHFRENRQRFGFAESRLTYGTIGGRFVKGENPFVEESYQRVALDQLIKIAGIADDDLLIMSDVDEIPSGHTVNLLRWCDDVPEVLHLQLRNYLYSFEFLLDDRSWRASVHRYRAGRTRYAHFRQTDDLLADSGWHCSFCFRRIDDFVFKMKAYSHVDRIRFGYFLNPRRIQHVICEGADLFDMLPEEYTFQEIIAKLGPIPSTFSAVHLPAYLLEHNERYRYLLPGNCVRESG

SEQ ID NO: 56107 - protein, 161 aa, Zea Mays
MSVACAEVMLLGHSDSYVKDKAMQVTIAFNHFGEGLIQRMPRCRHGYFHVVNNDYTHWEMYAIGGSAEPTINSQGNRYLAPTNPFAKEVTKRVETAQTVWKSWNWRSEGDLLLNGAYFTPSGAGASASYSRASSLGAKSSSMVGTITSDAGALSCRKGAAC

SEQ ID NO: 56108 - protein, 152 aa, Zea Mays
MLVTPVFWCLRSFGDVWDLATLQCIQTLSDHTDVVMSVLCWDQFLLSCSLDQTIKVWAATESGNLEVTYTHKEDQGALALSGMPDAQSKPVLLCSLNDNTVRLYDLPSFSDRGRLFSKKEIRAIQMGPGGLFFTGDGTGELKVWQWVDLAQT

SEQ ID NO: 56109 - protein, 171 aa, Zea Mays
MAEIKYLMSGYEKKQRSENLSTWASQHPPTESKRRNRKRKEEEQEHHEAQYNQQQQEQNENKLIQGKRHQLHQENMAQVTQQQQQHMQPTTRPATLKLPTPAIPLVLNAAQIQNFARPAYAAVPGVHNYPAQPGWSAAQGSPFVPQFMSPQYMGLPFNPFGLHPTCYPRRR

SEQ ID NO: 56110 - protein, 1028 aa, Zea Mays
MQSMESLAQLEVLCEKLYNSRDSAERAHAESTLKCFSENSEYISQCQYILDNASTPYALMLASSSLLKQVSDRSLSLMLRLDIRNYVINYLGTRGPKLQNFVIVSLIQLVCRITKFGWFDDDRFRETVKEATDFLGLASQDHYFIGLKILNNLVTEMNQPNPAMPLTLHRKIAGSFKDQFLLQIFQISLTSLNQLKSEAPDDFGHIPLDLALKCLSFDFVGSPVDESSEEFGTVQLPASWRPLLQDPSTLQIFFDYYKVNDIRVSKEALECLVRLASVRRSIFVEDPARSQFLSHLMLGTKEILLTGQGLADHDNYHEFCRLLGRFKVNYQLAELLNVEFYGEWIGLVAEFTTRSLLSWQWASNSVYYLLSLWSRLVTSVPYLKGETPSLLDETVPKITEGFITSRINSVQAILADNSLENPLDSVEVLQDQLEFLPFLCRFQYQSSSLYIINIMEPLLQAYTERSRLPAPGDADELSVIEGQIAWMVHIIAAIVKVRQVTGVSQETQELIDAELSARVLQLISVTDTGAHTQRYQELSKQRLDRAILIFVQSFRRSYVGDQAMHSSKQLYGRLSELLGLNDHLILLNVIVGKIATNMKCYAESEDVIDHTLSLFLDLATGYMTGKLLLKLESVKFIIANHSPENFPFLAEYKCSRSRTTFYYILGSLVFMEDSPVKFRTFMEPLQQVALNLEATPDAAFRTDVAKRAFVGWMRDLRGIAMATNSRKTYGLLFDWLYPSRMPLLLRAISLCTDEPEVTTPLLKFTYEFVLNKAQRLTFDSSSPNGILLFREVSKIIVAYGSRILLLPNGTDIYGSKYKGIWISLTVLSRALCGNYVNFGVFELYGDRALADALDISLKMTLSVPLSDILAFKKLSKAYFGYMEVLFNNHIKFVLNLDTNTFIHIVSSLESGLKGLDAGISSQCASAIDNLAAFYFNNITSGDSPPSPASVNLARHIGECPNLFPQILKTLFEIMLFEDAGNQWSLSRPILSLIMTSEQMFSELRAHILASQVVWCNCNAALRIVAACW

SEQ ID NO: 56111 - protein, 354 aa, Zea Mays
MVLGSESINASQFVKSAFGQLSSFTYTYLPKPSSLESGVDVSKSDEESSDGPTNSNELQQQNIDSEIISDSHSHSEVQSPTAVVNSEGNSSSDMKKSDEYFWRALNNVLNQNVLQNFGFSLPEVKQLGGFDLLSSLGLKSRNIAEQEYLESGLAMADTSTNGGSETTSENTVGVENENRTLTTKEEVQSSFPDINKVSRDVLSQTENILGALMILSKNLSPHDQSVPTTGTNGKYDMIREEQGASAADSVQKADTVSSALLSIDAQEAEDMRRLFASAETAMEAWAMLATSLGRNSFIKSDFEKICFLDNISTDTQVAIWCDSSRRRLVVAFRGTEQVEGFANRLNACTCWTKP

SEQ ID NO: 56112 - protein, 1086 aa, Zea Mays
MASSPQPPPPFAAQNPTAQGSGQGPPGSGVGALPGAFANLQISRGAAPPPGAPRGLTPQQAPPTLAARPGPPPSAARPAFPGSPPAPPFVRAPTPSTSASPPFGGQPGVMSQPPPPFGGPPGASSQPPPPFGVPPGVVSQAPSLFGGPPATASQASSPFVGHSVAASQAAPFGAPPVAGSHPPPFGGPPGAGPQPAPPLRQTFAGQPGPMAAAAAWTQPPPPSFGAPQQPPPPFGSRPAGQPLFATQSAPAAQQLPFMGPPRVNAPAFGPPSWQTQGAGSGAMQPPLRMPGIPGSMQPNTLGPPGTPTIPYSPHAGTQVSTPSKIDPNQIPRPMRESSVIIYETRQGGQATIPPAASSEFIVKDTGNCSPRLMRCTVNQIPCTGDLLTTSGMPLALMVQPFSLPHPSEEHIQLVDFGEMGPIRCSRCKAYINPFMKFVDQGRHFICNLCGFRNDTPRDYMCNLGPDGRRRDADDRPELSRGTVEFVATKEFLVRDPMPAVYFFLIDVSMNAIQTGATAAACSAISQAISDLPEGPRTMVGIATFDSAIHFYSLKRAQQQPLMLIVPDVQDVYTPLQTDLILPVSECRDNLEQLLESIPSMFENNRVADSAFGAAMKAGFLAMKSTGGKLLVFQSVLPSLGIGSLSAREAEGRANITTGDKEAHKLLQPVDNTLKTMALEFAEYQVCVDVFLTTQSYVDIASISVVPQTTGGRVYYYYPFSALSDPAKLFNDLRWNISRPQGFEAVMRVRCSQGLQVQDYYGNFCKRVPTDIDLPAIDSDKTVMVTFKHDDKLPENVECGFQCALLYTTVYGQRRIRVINLSLSCTNLLANLFRYADLETQFSCFLKQAANGIPTSPLPRIRDEATNTCINILQSYRKHCASVTSSGQLILPEALKLLPLYTLALVKSLGLRTDGRLDDRSYWISVASSVSVVLAVPLVFPRLIPIHDLTSRDDDDSLIPSPLMLNSENVQEDGVYLLENGEDGLIYVGNMVNPATLEQIFGVSSLAALPAQLALEQFDNELSRKVNEVVNEIRRQRCSYLRLRQCRRGEPSGDFFRSFLVEDKAPGVFSYVEFLVHVHRQIQSKMT

SEQ ID NO: 56113 - protein, 927 aa, Zea Mays
MGSLRGAAASSAAPRAGDLVTTQVSLGGFDATVKALDLADFLELNAGSVWRCRLKTSWTPPDAYPDFLLPTVTSAAAPPPQYDRVPPHAFVHFARPEGARAAADAAGRSELILSGKPLRAASAQDSSLRASRRRSVSPFRFPGSRLEVGDLPASDAFIAAWRGPASGLEFSVDPFDGSCHFIFARDTAFKVREFRESVVMRCDVKLQFPVRDVAEVRVFRLDCSLLIRLSAAPLVCYRTADDDIHVSVPFDLLDDDDPWIRTTDITPSGAIGRCGAYRITFSPRFWPKMERALTYMRDRRVAILDCVGGWGARRGLTVRDEPEFGERMQDLFFCVQHAEGLKFPVLFLVNALVHKGVISQHHLTPEFFGLLQRKEDDVNVAALREFWGDKFPVFDACGRLKNLQDRVARYLKHLRNKIGDVNSEVRRLVITPTKAYCMPPEVERSNRVIRHYSEVSDRFLRVTFMDERMQMLNSNVLNFSAAQIVKDLMSNSFLHKTTVYKRVKTFLTEGFHMCGRKYSFLAFSSNQLRDRSAWFFAEDRTTTVETIRKWMGRFTSKNVAKHAARMGQCFSSTYATVVLQPHEVNECLDEVEHNGYIFSDGIGKITCDLALEVAQKLQLTDNPPSAYQIRYAGFKGVISVWEGKNDGIRLSLRPSMHKFESNHTVLEVVSWTKFQPGFLNRQIITLLSSLNVPDAIFAQMQEAMLSNLNNILSDSDVAFDIVTASCAEQGTTAALMLSAGISPGTEPHLKAMLLAIRSSQLLGLLEKTRIFVPKGRWLMGCLDELGILEQGQCFIRASSPSLNNCLVKYGSRLSAANTNAETILGTIVMAKNPCLHPGDVRILEAVDVPELHHLVDCLVFPKKGERPHANEASGSDLDGDLYFVTWDENLIPPGKKSWNPMDYSPAEAKQLPRAVSQHMTVSRSSAE

SEQ ID NO: 56114 - protein, 87 aa, Zea Mays
MLNVVCDVKVVTRQYHKAAERGGYGGERYEKIEFQKKVAEHYHSLRDSTWKVVDGFLPMETVEEKLRDLATSCIQDCQGNPLTNLAW

SEQ ID NO: 56115 - protein, 109 aa, Zea Mays
MYLSFQAHDSMKSSWSTFLGCRLKIQGSIHFLKFFKGVDIGVCFEGSQCILHFVNEDYVADAQPVRITCSIRSEDLCTRAASEPFCMWMLIYINMCLPDNIACRLRVGI

SEQ ID NO: 56116 - protein, 337 aa, Zea Mays
MATILLSSRLPTTGTATPSPTRPAPRFLSFPGTAIRRRGRGPLLASSAVSPPAPASAAQPYRALPASETTVLVTGATGYIGRYVVRELLRRGHRVLAVARSRSGIRGRNSPDDVVADLAPAQVVFSDVTDPAALLADLAPHGPVHAAVCCLASRGGGVQDSWRVDYRATLHTLQAARDPSFTYSVVRPTAFFRASAASEEDLAAFIADCIYDQDKANKVLPIGGPGKALTPLEQGEMLFRLLGREPKFIKVPIQIMDAVIWVLDGLAKLFPGLEDAAEFGKIGRYYASESMLLLDPETGEYSDEKTPSYGKDTLEQFFQRVIREGMAGQELGEQTIF

SEQ ID NO: 56117 - protein, 496 aa, Zea Mays
MDATMAFTSGSPTPTRFYSSALLSLRTPKSLSVYGPWRWRGRGRPLLALRHRSQAQAAAAAAGAAEASHHDVVVVGAGIVGLAIARHLLLHTSLSVAIADAAVPCSGATGAGQGYIWMSHRTPGTDTWELALRSKQLWEELATEVDGQGGGGAREKLGWMRTVGRSSEELGTLDERTKALSQAGIHAEFLSASSLHALEPALSVGKDGGAMFLPQDCQIDAFQAVSLIEKTNNSYSSEGRYREFYNDPAMSLIRSDVTGKVEAVQTSRNILYGRKAFVIASGAWTRSLLHSFVEPALTLDIPVKPRKGHLLVLEKFDKVKLNHALMEVGYVDHQITKSNSTHIASESSEDELGALSVSMTATLDTKGNLVLGSSREFKGFSREVDRSVVQCIWERAGEFFPAMKNVSFDIDQNTQIRIGHRPYMPDGKPVIDFIPNLSNILIATGHEGSGLTLALGTAEMVTDMILGNPGKVSYSPFSIKRRFSVRSYPRSTRNES

SEQ ID NO: 56118 - protein, 1085 aa, Zea Mays
MTTSPPPAEQQHEEEEVLVPYGPHLELPNGAQPMEVVPAEPAATVENQQIEDPPISRFTWTIENLSRVSTKKLYSEIFVVGGYKWRILIFPRGNNVEFLSMYLDVADSGVLPYGWTRYAQFSLSVVNQIHNKFTIRKETQHQFSARESDWGFTSFMPLGELYNHSRGYLVNDTCIVEAEVAVCKVVDYWSYDSKKETGYVGLKNQGATCYMNSLLQTLYHIPYFRKAVYHMPTTENDMPSGSIPLALQSLFYKLQYNDSSVSTKELTKSFGWDMHDSFMQHDVQELNRVLSEKLEDKMKGTVVEGTIQQLFEGHHMNYIECINVDFKSTRKESFYDLQLDVKGCQDVYASFDKYVEVEQLEGDNKYHADKHGLQDAKKGVLFIDFPPVLQLQLKRFEYDFMRDTMVKINDRYEFPLQLDLDRDDGKYLSPDADRNVRNLYTLHSVLVHSGGVHGGHYYAFIRPTLSDQWFKFDDERVTKEDAKRALEEQYGGEEELPQTNPGLNNTPFKFTKYSNAYMLVYIRESDKDKIICNVDEKDIAEHLRIRLEKDREEKERRKKEKAEAHLYTIIKVARDDDLKTQIGKDIYFDLVDHDKVPSFRIQKQMAFAQFKEEVAKEFGIPTQFQRFWLWAKRQNHTYRPNRPLCPQDEAHTVGQLKELVNKAHNAELKLFLEVELGLDLKPLPLPDKTREDIFLLFKLYEPEKEQLRYVGRLFVKASGRPQDILPKLKMLAGFSQDDDIELYEEIKFEPNVMCEYIDNRLLFRSCQLEDGDIICFQKSSKADSADRYRFPDVPSFLTYIRNRQVVHFRSLEKPKEDDFFLEMSKIFTYDQVVEKVAEKLGVDDPSKIRLTSHNCYSQQPKPQPIKYRGVERLLDMLIHYNQTSDILYYEVLDIPLPELQALKTLKVTYHHATKDEVSVHSIRLPKNSTVGDVLNDIKTKVELSHPNAELRLLEVFYHKIYKVFAPNEKIENINDQYWTLRAEEVPDEEKNLGPFDRLIHVYHFTKDTQNQTQVQNFGEPFFMVIREDETLSSIKERIQRKLKVPDEDFSKWKFAYISLGRPDYFEDSDTVALKFQRLNFISLDI

SEQ ID NO: 56119 - protein, 123 aa, Zea Mays
MMCPLMTTLGQQKCLSLSLERNRRHWKGLTLVPLLHTHMSWRPKHRAGSRVHQLSLHTVFPQRQLFRSPPPHFISTVKCLQVVQLIAISRPSWFGPITINRPSRSARTTSKSSDLKTLLLYII

SEQ ID NO: 56120 - protein, 232 aa, Zea Mays
MAMDAERRQAELIAQFSAQAAALSSAPQLAALVLEATSHPALFAFSELLTLPALSKLTGTQYASSLDLLRLFAYGTLNDYKSNSGFLPALLPDQVRKLKQLSVLTLAESTKILPYDQLMQELDVSNVRELEDFLINECMYSGIVRGKLDQLRRCFEVQFAAGRDLTPDQLKNMIETLSDWLGTSDRLLHQIQEKIKWADTMSEVNKKHQKEFEDRVEEAKKSIKCCRTMFLT

SEQ ID NO: 56121 - protein, 343 aa, Zea Mays
MRPSSRYPPQPALPAPSRGAAPRRRGLARARRRRRGACWAFSAVAAVEGINKIVTGSLISLSEQELIDCDKFQDQGCDGGLMDNAFVFMIKNGGIDTEADYPFTGHDGTCDLKLKNTRVVSIDSFERVPINYERALQKAVAHQPVSASIEASRRAFQLYSSGIFDGRCGTYLDHGVTVVGYGSEGGKDYWIVKNSWGTQWGEAGYVRMARNVRVRAGKCGIAMEPLYPVKEGPNPPPGPTPPSPVKPPNVCNAEYSCPEATTCCCVSEYRGKCLAYGCCELENATCCEDHSSCCPHDYPVCSVRDGTCRKSANSPMMVKALQRKPAMYTGGGGGGEQSGRSSW

SEQ ID NO: 56122 - protein, 254 aa, Zea Mays
MVQMGVLVPTGDMTAVRRTAQFFLNSFQERLAAQRKEREMATAELGFKKQLTKEEKFEKRKQRLAAIGEDLLAIAADQPFRFPATFTFVVRAFSVLDGIGKGLDPRFDITEIAKPYAKELLRFNDAGVEIVVKDAKKRWERQSRAFYNLFRQPDRVEKLAQIIERLEQGELKLRVRTLESERAFQRVAAVQKTIGYGVAAGSLMNLATMLYFNSIRGPATIAYSLCAFFGLQVLIGLVKVKKLDRQERLITGTA

SEQ ID NO: 56123 - protein, 1009 aa, Zea Mays
MAMEAVATVSSASGLLAMLQEPAPELKLHALARLNSVVHLFWPEISTSVPTIESLYEDEEFEQRQLAALVVSKVFYYLGELNDSLSYALGAGPLFDVSDDSDYAHALLAKALDEYASIKTRALKATEEEENIDPRLEAIVERMLEKCIFDGKYQQAMGMAVECRRLDKLEEAIVGCDNIQGALSYCINLSHQYVNHREYRFEVLRCLVKIYQTLPNPDYLSICQCLMFLGEPETVACILDKLLSGNKDDALLAYQIAFDLVENENQAFLLNVRNRLSSPTPVPSNPDSGPAVQDDQTASTVGTDTEAAGDVQMRDDTSTPNGTAHSVDPNEVAHADRLEKIKGILSGETSIQLALQFLYSHNRSDLLILKTIKQAVEMRNSVCHSATICANAIMHAGTTVDTFLRENLWLSRATNWAKFSATAGLGVIHRGHLQQGRALMAPYLPQSGAVGGGSPYSEGGALYALGLIHANHGEGIKQFLRESLRNSSAEVIQHGACLGLGLAALGTADEEIYEDIKNVLYTDSAVAGEAAGIGMGLLMVGTASEKASEMLAYAHDTQHEKIIRGLSLGIALTVYGREEEADTLIEQMTRDQDPILRYGGMYALALAYRGTANNKAIHQLLHFAVSDVSDDVRRTAVMALGFVLYNEPEQTPRIVSLLSESYNPHVRYGAALAVGISCAGSGLSDAISLLEPLTSDVVDFVRQGALIAMAMVMIQTNESFDSRVGAFRRQLEKIILDKHEDTMSKMGAILASGILDAGGRNVTIKLLSRNKHDKLTAVIGLAVFSQFWYWYPLLYFISLAFSPTAFIGLNSDLKVPKFEFLSHAKPSLFEYPKPTTQQTTTSTVKLPAAILSTYAKAKSRAKKDAESKANQEKATEEASGSTSSKTAKAQEKDADAMQVDNASEKKAPEPEATYQLLTNPARVIPAQEKFIKLLENSRYVPVKPAPSGFILLRDLQPTEAEDLALTDAPTTVAGSTGNTAPAAGQQGSGSSAMAVDDEPQPPQPFEYTS

SEQ ID NO: 56124 - protein, 407 aa, Zea Mays
MPQEEMDDDNGVERILSGKLSESSGYAGSDLYDYKAVNAEESDAERPVKMLEGNLNLSKVQNSLSTENGSANVDSLLSENNPSNPTVGHETLSMGEILSSFDPGISVPTHSPEYSVERQTNKTNGSHPHVKRSNFWGRNNARKGQNSESVDSSGEEELAIQRLEIAKNDLQNRIAKEARGNAILQASLERRKQALHERRLALEQDVSRLQEQLQAERDLRAALEVGLSMSSGQFSSARSMDVKTKAELEEIALAEADVARLKQKVAELHLQLNQQRQHQYGSVVDANDRHHRLPGHFSQQNFVQQGFDMNLAFCNQEKQRNEESSVESSQWRNIKQHVLPYGSSRPLTRKLSFDASSSESRGTEPSTSMSTENTSVSINVPKLAEGIEFGRQPMVTSSTLEPPEVGG

SEQ ID NO: 56125 - protein, 238 aa, Zea Mays
MKLYSESLARFQGGSPYIYPLYGLGELPQGFARLSAVYGGTYMLNKPECKVEFDMEGKVCGVTSEGETAKCKKVVCDPSYLPNKVRKIGRVVRAIAIMSHPIPNTNESHSVQIILPQKQLGRRSDMYVFCCSYTHNVAPRGKFIAFVSAEAETDNPQSELKPGIDLLGSVDEILYDIYDRYEPVNEPSLDNCFVTTSYDATTHFETTVTDVLNMYTMITGKTVDLSVDLSAASAAEEY

SEQ ID NO: 56126 - protein, 240 aa, Zea Mays
MAAKYKVFLVMGVIEREGYTLYCSVLFFDPLGRYLGKHRKLMPTALERIIWGFGDGSTIPVYDTPLGKIGALICWENKMPLLRTALYGKGIEIYCAPTADSRPVWQASMTHIALEGGCFVLSANQFCRRKDYPPPPEYEFAGLGEEPSADTVVCPGGSVIISPSGEVLAGPNYEGEALITADLDLGEIVRAKFDFDVVGHYSRPEVLRLVVNDQPQLPVSFTSAAERTPAAKSDIDTKSY

SEQ ID NO: 56127 - protein, 52 aa, Zea Mays
MTPLPCCYVKLVSWEEGGYKISDYPMLRGEVVVGGHSTTKGYRTNCIVCDIL

SEQ ID NO: 56128 - protein, 1201 aa, Zea Mays
MGSSSRIFEYFVVCGLGPEIRSLDGIKGFHGVEEMYMSAFLDQFPPSNHALYPPPPPQLPTCVLPAGVRIYSSGLDTDDVSTYPRSYPIVLTEGDGSKIYVSCIAFRDPICEDIIEAYQIPANSFADKCICLVSHSPSFQVLRDALEEIFVLCFSPSGCSKPLWDIISHMVSHVTLPTPGKNRVLFAIENCLLSAEAPPKEWLPHADISFQPLVQCLDVDKLILLFTAVLLERRILLRSNKYTLLTLVSEAICHLIYPIRWQHVYIPIIFSSGVDYIDAPTPYMMGLHSGVDTSAVTMDGVVVVDLEYNRITITEEIPPIPETEHNFLRVEILKLLQPNVMGIDFMKINLANMGDLRAGTKSWSQEHDFQLRLIFLRFFAQILSGYRNFIDTTSATGFNSQAFLKKRSRATNQPVDSMSMIMQFLETQGFLDYLERCNTAEENAHNLLDKLQDATGRGQNPLTIFPSQVSDPEIITIANPEIEGLDNRHCYKRFPANARTEEQEEKRKSILALASGASKQVPSSPSIRVNGGPKAESLSPRERAAERERMVLDIKVKLQGLWLRLLRLGATEDPLSSFEYGTILALIESDAEGIGGSGFVECIREHIHSGWQCRLTDEQFIAVKELLKMAITLANSRNDLATIRDALEVSAEMYRKDPNNVQDYVQRHLLSLSVWEELRFWDGYFEYLMENCSNKSANYVTLVTAQLILMATHMAGLGLPDIDSWNMIEKIAERNNLGYKQLIKLRALLTHLQQLRIGYWGVATGKSQPLQSYGMASPHAIDVIDESQQPAEASGLGRSWVQSMFSRDRSLRASSFNRASDGNAVAATGKTEISAAQKKTQTNMRTLRGHTGAITALHCVTRKEVWDLVGDREDAGFFISGSTDCTVKIWDPSLRGSELRATLKGHTRAIRTISSDRGKIVSGADDQSVIVWDKQTFKLLEELKGHEAPVSSVRMLSGERVLIASHDGTVKMWDVRTDTCVVTVGRCQSAVLCMEYDDSTGILAAAGRDITAHVWDIRSSKQMFKLQGHTKWIRSMRMTGETIITGSDDWTARVWSLNRGTCDAVLACHAGPVLCVEYSPSDKGIITGSADGLIRFWENEGGIKCVKNLTLHTASVLSISASDHWLAIGAADNSMSLFHRPQERFGGFSNAGSKVAGWQLYRTPQKTAAVVRCIASDLDRKRICSGGRNGLLRLWDATTSI

SEQ ID NO: 56129 - protein, 777 aa, Zea Mays
MVSRSYSNLLELAAGGSGGEPLPSLGRRRIPRVVTASGIVPDLDVSDAASAADQSSHAPRERVIIVANQLPVRASRRAAAGAGGGGWDFAWDQDSLLLQVKDSLRAHHGRADVEFVYVGGLRDDVPPAEHDQVAHDLLEGFRCVPTFLPADLRSRFYHGFCKQQLWPLFHYMLPLSPELGGRFDRLLWQAYVSVNKIFADKILEVISPDEDFVWVHDYHLMVLPTFLRKRFNRVKLGFFLHSPFPSSEIYKTLPVREELLRSLLNADLIGFHTFDYARHFLSCCSRMLGLKYESQRGYIALEYYGRTVTIKILPVGVHLEQLRSVLNLPELGVKVAELLKQFCHRNRLLLLGVDDMDIFKGISLKLLAFEQLLMQHPEWRGRVVLVQIANPARGRGKDVREVQEESDAMVRRINDAFGQPGYQPVILIDQPLQFYERMAYYVVAECCLVTAVRDGMNLIPYEYVIARQGNERIDSILGLGPASRKKSMLVVSEFIGCSPSLSGAIRVNPWNIDSVADAMDYALEMPEGEKVLRHEKHHRYVSTHDVGYWANSFLQDLERICLDHNRRRCWGIGFGLKFRVVALDPNFKKLAVEHLVLAYRRTKKRVILLDYDGTLMPQTSLGKSPTSRTIDMLNSLCRDRNNMVFLVSAKSRMTLNEWFLPCESLGLAAEHGCFLRLRRDAEWETCVPVIDCSWKQIAEPVMKTYTETTDGSTIEDKETAIVWCYEDADPDFGSCQAKELHDHLESVLANEPVSVKAGPNLVEVKPQENAGPSPRFR

SEQ ID NO: 56130 - protein, 383 aa, Zea Mays
MLTTRADLQDGLFLVRFLRAIDSARRSFFFRSRALWVIAGLRGIHTLTGFLPMQPKQNLPKFRAPRRELKRRIASYHPTRKRQDSLLGGGGFGRVYKGFITKDLREGLEIEEPTRVAVKVHDGDNSFQGHREWLAEVIFLGQLSHPNLVKLIGYCCEDDHRVLVYEFMPLGSVESHLFSRVMVPLTWSIRMKIALGAAKGLAFLHEAEKPVIYRDFKTSNILLDEEYNAKLSDFGLAKDGPVGDKSHVSTRIMGTYGYAAPEYIMTGHLTAMSDVYSYGVVLLELLTGRKSLDKSRPVREQMLADWALPLLAQKKKVLGIVDPRLAEDYPVKAVQKTAMLAYHCLSRNPKARPLMRDIVATLEPLQQLEETPGDSVAVTLEGT

SEQ ID NO: 56131 - protein, 596 aa, Zea Mays
MAANNSDPIQDQLGEGGAGVRHEAEEEEVGEETSSAAAQATATTMLPRSSSRPQLDLSGAAIHGTLEDRNPTILLPNQSDDISHLALDIGGSLIKLVYFSRHAELSTEDKHKISTKRRLGMFNGGRRSYPILGGRLHFVKFETGKLNECLDFISSKQLHRGGIDSPSWRSGAQSDDIVIKATGGGAFKYADVFKERLGVSLEKEDEMDCLVAGANFLLKAIRHEAFTHMDGQKQYVQIDQNDLFPFLLVNVGSGVSIIKVDGHGKFQRVSGTNVGGGTYWGLGRLMTKCKSFDELLELSQRGDNSTMDMLVGDIYGGLDYSKIGLSASTIASSFGKIISENKELSDYRPEDISLSLLRMISYNIGQISYLNALRYGLKRIFFGGFFIRGHAYTMDTISFAVHFWSKGEAQAMFLRHEGFLGALGAFMSYEKHGLDDLRVHHLVERFPMGAPYVGGKIHGPPLGDLNEKISWMEKFVQKGTQIIAPVPMGVPATTGMGGFERPTAKGDILRSDASAALNVGVLHLVPTLDVFPLLEDPKTYEPNTIDLDQDEFKYWFKILSDHSPDLVDKLLVKVGLMMPKDGVMHLHMPFLLIWQD

SEQ ID NO: 56132 - protein, 277 aa, Zea Mays
MVADLAAGDRPASRSTKLVLSDPSKSLSSIVAAICYAWMLPSKGDGQATVPVVNMSRSRMARCRQAAWLLYHVGVDASALLFADEVDTDGLIMDQRVNLLVVGQDILKSKAEVGSVCTTLTHTYCEDAYSLLQNLDIKKLLLAGILLDTNNLSKKCSNRDSDAVQLLLFGTSEHMRHELFQQLMLDHNDHSFVEYLKNTYRYSTINGNEDSPPEQKHSTSASGSSQDVKKSNSTNQRTSRGSGGKASDEASRGKNKFFLANGLVLVQIILLSFVLVW

SEQ ID NO: 56133 - protein, 363 aa, Zea Mays
MASSSAALAVLMLSWAAALAAASSPVTLFEAGYMPLFGGGNLVPSPGGRSVRLKLDRHTGSGFVSRSSYHHGFFSASIKLPDHHTAGVVVAFYTTLFIEWSLKKKVRYKLSNADVFPGNHDEVDFELLGNRRGHEWRVQTNIYGNGSTSRGREERYLLPFDPTLRPHAYAVAWTPTAILFYVDGTPIREVVRVPAMGGDFPSKPMSVYATIWDGSAWATEGGRYKVDYAFAPFAADFSSLVLSGCPVAGGGDDLAAAECQVATMTADCAVMTPAKRAAMRRFRRRYLLYTVCHDMYRYNGTVFPECDADGSERDDFHKWGESKRVSPSSRGYKQQQQRADKAVAVAAPGRPDTWPTVGTLRVD

SEQ ID NO: 56134 - protein, 631 aa, Zea Mays
MLREIPSTLPVEPLEPSDLKPENSRHDAQISVFGAQLQKKLEQSKIFMVGSGALGCEFLKNLALMGISCSQNGKLTVTDDDVIEKSNLSRQFLFRDWNIGQPKSTVAATAAMAINPELHVEALQNRASPETENVFNDAFWESLDAVVNALDNVTARMYIDSRCVYFQKPLLESGTLGAKCNTQMVIPHLTENYGASRDPPEKQAPMCTVHSFPHNIDHCLTWARSEFEGLLEKTPTEVNAFLSNPGGYATTARTAGDAQARDQLERVIECLETDKCETFQDCITWARLKFEDYFSNRVKQLTFTFPEDAMTSSGAPFWSAPKRFPRPLEFSSSDSSHLNFLLAASILRAETFGIPIPGWAKNPKKLAEAVDKVIVPDFHPKEGVKIETDEKATSLSSASVDDAAVIEELIAKLQAISKTLSPGFRMNPIQFEKDDDTNFHMDLIAGFANMRARNYSIPEVDKLKAKFIAGRIIPAIATSTAMATGLVCLELYKVLAGGHKVEDYRNTFANLAIPLFSMAEPVPPKTMKHQDMSWTVWDRWTVTGNMTLRELLEWLKEKGLNAYSISCGTSLLYNSMFPRHKERLDKKVVDVAREVAKVEVPSYRRHLDVVVACEDDDDNDVDIPLVSIYFR

SEQ ID NO: 56135 - protein, 180 aa, Zea Mays
MVMVPPGEWVPHVEAYVDVSRPAVQHSASVDALAALVNKDKLTLFDLVSKMDLYLTTTDHIVRSRGILLLGETLSRISFKYLDVITITTLSDFFISRLSDWQAIRGALVGCLALLHRKHGVGCIVIADVKRLVESFLQNVPVQSLAAADRKLCFEILSCILDRYPEAVKQMLYGICEAID

SEQ ID NO: 56136 - protein, 410 aa, Zea Mays
MAEADQKIYSEVKLNSQYYFYMETQAALAIPDEDNCMVVYSSSQCPETAQNVIAKCLGLPCHNVRVITRRVGGGFGGKAVRSLPVATACALAAFKLHRPVRMYLDRKTDMIVTGGRHPMKICYSVGFKPDGKITALHIGLFINAGMTKDISLIIPHNFIEALKKYNWGAFSYEAKVCRTNLATKSAMRGPGEVQGSYVAEAIIEHVASTLSADANLVRRKNLHTVESLALFHSECTEDAMGYTLHSICDQVTASENYQHRLEIIQSFNKNNKWKKRGLSFVPIVHKVLSRPTPGKVSILNDGSVAVEVGGIELGQGLWTKVKQMTAFGLGQLCPNRSQELLERIRVIQADTLSNVQGGWTTGSTTSESSCEAVRLACNVLVNRLKPVKEQSQEKQDNVSWDELISKGITC

SEQ ID NO: 56137 - protein, 402 aa, Zea Mays
MIPVLKFLFGNGVILINGDDWKRHRKVVLPAFNHETIKSMSAVTAEVTEQMMQQWRGQIHGSEEESAEIDMIHAFNDLTSKVNGRVAFGTSHREVEEVIVLMREMQKLATAATLDAPILWYLPTRRNLHVRRLNKQLRSKIMSIMQARLAADGADRRGGRGGAVSGGGDLLGLLLEAWTPQPQHGNGGETLTTDEVIDECKTFFAAGQETTATLLVWAMFLLAVHPEWQDKVREEVVREFCTSDDGEVPHADVLAKLKLLYMVLLETSRLYPPIVYIQRRAAWDAVLGGIKVPQGTVISIPIAMLHRDKQVWGPDADEFNPMRFEHGLTKAAKDPKALLSFSLGPRVCTGQSFGIVEVQVVMAMILRRFSFSLSPKYVHKPKYLLSLTPKLGMPLIVRNVDG

SEQ ID NO: 56138 - protein, 170 aa, Zea Mays
MSAAAVALEEPAVQMVMVSVASPRSPAVRSEEDLGPAWLRPLLGTSFFVPCRLHPELSKNECNLFCLGCCTGDALCAYCLPAHRDHHVVQIRRSSYHNVIRVSEVGKLIDISHVQTYVINSAKIVFLNGRPQARPGKGVTNTCQICCRSLPDSFPLLLPRMQVCFRYNCV

SEQ ID NO: 56139 - protein, 128 aa, Zea Mays
MELNYHERGFFHWLHREQRIRCTWMGARKRTERQRSRSSGRRRPVRSRRDRAETHHRQHLPPEQQPGKASGARARRLLRRGLVHGARRQDEAGADGRDHSPHLQSRPRSLTLLTSTARPARSAILRGY

SEQ ID NO: 56140 - protein, 253 aa, Zea Mays
MATRVLLTALLLAFLLVATPFTARAEVVEGADLGIVGDDTQVSSDGPLSPAPGVETVVVFPKNAGKIVLAGEETELLVGLQNEGESTLNVVAVHSTLHLPFDHNMYGQNLTVQNFFNASVPVSVQATFPYKFVVSKFLQPGAYDLVGYIVYEIDQHPYQNVFYNGTIEVVEAGGLLSVESVFLITLGTALLGLFGLWAYGQVQQLSKKTKKAPKVELGTGTTDANIDEWLEGTSFVQRSKSKKADLKLALQSS

SEQ ID NO: 56141 - protein, 354 aa, Zea Mays
MKLVRHPNVVRLFEATNGRLKEDEARKYFQQLINAVDYCHSRGVYHRDLKLENLLLDAAGNLKVSDFGLSALTEQVKADGLLHTTCGTPNYVAPEVIEDGGYDGATADIWSCGVILFVLLAGYLPFEDDNIIALYKKISEAQFSCPSWFSAGAKNMITRILDPNPTTRITISQILEHPWFKKGYKPPVFDEKYQTSLDDVDAAFGDSEDRHVKEETEDQPTSMNAFELISLNQALNLENLFEAKEEYKRETRFTSQCPPKEIITKIEEAAKPLGFDVQKKKYKMRMENPKAGRKGNLNVATEVFQIAPSLHVVELKKAKGDTLEFQKFYRSLSTQLKDVVWKCDGEVDGNSAAA

SEQ ID NO: 56142 - protein, 88 aa, Zea Mays
MMLRSALVVSSLIIALSVPFFGLVMSLVGSFLTMFVAYILPCACFLSILRSKVTWYQVVLCVFIIVVGLCCVGVGTYSSLSKIIQKYQ

SEQ ID NO: 56143 - protein, 490 aa, Zea Mays
MVKVELFGFTSLCHSLNRSPLPVNHRYSGAPNSYTFCRRWSEHLPMSPIEGCPTVFQAICSLSPGIHEYKFFVDGEWRHDERQPTISGEFGIVNTLYLTREYNQINTLSSPSTPGSRMNMDVDNENFQRTVTLSDGTVSEGTLRVSEAAIQISRCRVSEYLSLHTCYDLLPDSGKVIALDINLPVKQSFHILHEQGIPVAPLWDSFRGQFVGLLSPLDFILILRELETHGSNLTEEQLETHTISAWKEAKRQTNGRNDGQWRPQQHLVHATPYESLRDIAVKLLQNGISTVPVIYSSSSDGSFPQLLHLASLSGILKCICRYFKNSTGNLPILNQPVCSIPLGSWVPKIGDLNSRPLAMLRPNASLSSALNMLVQAGVSSIPIVDDNDSLLDTYSRSDITALAKDKVYTHVRLDEMTIHQALQLGQDANTPFGFFNGQRCQMCLRSDPLLKVMERLANPGVRRVFIVEAGSKRVEGIISLSDIFKFLLSL

SEQ ID NO: 56144 - protein, 216 aa, Zea Mays
MKLLIAHGSHQELGKGDSMTNLMINMCDVVHMLMHATEVHYQCPKRVRVQSDVSERIANGTSVHVNTHVQNLNLDIEEQSHKHSISHIEEPNTNNSEGSLAGAAVWDVFRRQDLPKLNEYLAVHREECAARCQAVSSVKYPIYDQTVYLNDYHKKMLKDQYVQALQGEVCSVWPKRHPLPEHLRWSRHPLPRPAHQGQRHHQNRSGDQQDHGLHQV

SEQ ID NO: 56145 - protein, 280 aa, Zea Mays
MGHQLHISQDPNSKHHGTTVWDASMVFVKFLEKNSRKGRFCPSKLKGKRVIELGAGCGLAGFGMALLGGDVTTTDQAEVLPLLMRNVERNRSWISQSNPDSDSVGSITVAELDWGNKEHIKAVEPPFDYIVGTDVVYSEHLLQPLMETITALSGPKTKILLGYEIRSTTVHEKMMEMWKSNFIVKTVSRSKMDVKYQHPSIHLYMMDLKAPLIPEVEAADNGNYEEEVEVAVNQEEDEDPGVKSESCSGSSPEAKSGSLDDWEIRRCGAMAARLLKDVKL

SEQ ID NO: 56146 - protein, 238 aa, Zea Mays
MIDMVSGKGGQLKINDISGYLPGRIVFFLVNCHLTPRPILLTRHGESMDNVRGRIGGDSSLSEAGELYSRKLASFVEKRLKSERTASIWTSTLQRTILTAHPIIGFPKIQWRALDEINAGVCDGMTYDEIKKSKPEEYESRRKDKLRYRYPRGESYLDVIQRLEPVIIELERQRAPVVVIAHQAVLRALYAYFADKPLEEVPNIEIPLHTIIEIQMGVAGVQEKRYKLMDAIHPTAGL

SEQ ID NO: 56147 - protein, 1003 aa, Zea Mays
MAAPGRRTADVSSSSPAPSPSPSTGRRLLRTQTVGNLGESIFDSEVVPSSLVEIAPILRVANEVEATNPRVAYLCRFYAFEKAHRLDPTSSGRGVRQFKTALLQRLERENDPTLKGRVHQSDAREMQRFYREYYKKYIQALQHAADKADRALLTKAYQTAAVLFEVLRAVNVSQSVEVDQAILDTHNKVEEKKKLYVPYNILPLDPESTGQAIMRYPEIQAAVYALRNTRGLPWPKDQDKKPGEKNTGKDLLDWLQAMFGFQKDNVSNQREHLVLLLANVHIMKVPKVDQQPKLDDKALDAVMKKLFKNYKKWCKYLGRKSSLWLPTIQQEVQQRKLLYMGLYLLIWGEAANLRFMPECICYIYHHMAFELYGMLAGNVSPMTGENVKPAYGGDEEAFLIKVVTPIYKVIEKEAERSKTMKSKHSHWRNYDDLNEYFWSVDCFRLGWPMRADADFFKTPKDAYLNLLNGENRSAGNTHWMGKVNFVEIRSFWHIFRSFDRMWIFLILSLQAMIIIAWNGGTPSDIFDAGVFKKVLSIFITAAILKLGQAILDLIFGWKARRNMSFAVKLRYILKLICAAAWVVILPVTYAYTWENPTGLARTIKSWLGDGQNQPSLYILAIVIYMAPNIVASMLFLFPFMRRFLESSNVKVITIIMWWSQPRLFVGRGMHEGAFSLFKYTMFWVLLLATKLTVSFYIEIKPLVQPTIDIMREPIRTFQWHEFFPHGTNNIGVVISLWAPIILVYFMDTQIWYALFSTLIGGIYGAYRRLGEIRTLGMLRSRFESLPEAFNERLIPSDANKSKGLRAAFSSRPKASGDERQKEKRAARFAQMWNVIITSFREEDLIDNREMDLLLVPYCKDRELDIFQWPPFLLASKIPIALDMAADSGGKDRDLTKRIKSDPYFSFAIRECYASFKNIINTLVFGQREKDVLAQIFAVVDQHIEDETLIKDLNMRNLPALSKKFVELLELLQKNKEEDLGQVVILFQDMLEVVTRDIMKELHR

SEQ ID NO: 56148 - protein, 2141 aa, Zea Mays
MSQLGLAATASKALPLLPNRQRSPAGTTFPSSALPRPSNRRKSHTRSLRDGGNEVSDAKKHSQSVRQGLAGIIDIPSDAVSEVDISHGPKDPRGPTDSYQMNGIINETHNGRHASGSMVVEFCAALGGKTPIHSILVANNGMAATKFMRSVRTWANDTFGSEKAIHLIAMATPEDMRINAEHIRLADQFVEVPGGTNNNNYANVQLIVEIAERVGVSAVWPGWGHASENPELPDALTAKGIVFLGPPATSMNALGDKVGSALIAQAAGVPTLAWSGSHVEVPLECCLDAIPEEMYRKACVTTTEEAVASCQVVGYPAMIKASWGGGGKGIRKVHNDDEVRALFKQVQGEVPGSPIFIMRLASQEISFKSKPNVWAYFSVKSGGGIHEFADSQFGHVFAYGLSRPAAITNMSLALKEIQIRGEIHSNVDYTVDLLNASDFRENKIHTGWLDTRIAMRVQAERPPWYISVVGGALYKTVTTNAATVSEYVSYLTKGQIPPKHISLVNSTVNLNIEGSKYTIETVRTGHGRYKLRMNDSTVEANVQSLCDGGLLMQLDGNSHVIYAEEEAGGTRLQINGKTCLLQNDHDPSKLLAETPCKLLRFLVADGAHVGADVPYAEVEVMKMCMPLLSPASGVIHCMMSEGQALQAGDLIARLDLDDPSAVKRAEPFDGMFPLMDLPVAASSQVHKRYAASLNAARMVLAGYEHNINEVVQDLVCCLDNPELPFLQWDELMSVLATRLPRNLKSELEDKYKEYKLNFYHGKNKDFPSKLLRDIVEENLAYGSEKEKATNERLVEPLMNLLKSYEGGRESHAHFVVKSLFEEYLTVEELFSDGIQSDVIETLRHQHSKDLQKVVDIVLSHQGVRNKAKLVTALMEKLVYPNPGAYRDLLVRFSSLNHKRYYKLALKASELLEQTKLSELCSSIARSLSDLGMHKGEMTIKDSMEDLVSAPLPVEDALISLFDYSDPTVQQKVIVTYISRLYQPHLVKDSIQMKFKESGAIVFWEFSEGHVDTRNGQGAILGGKRWGAMVVLRSLESASTAIMAALKDSVQYNNSEVNTMHIVLLNAETESNISGTSDDQAQHRMEKLTKILKDSSVASDLQAAGLKVISCIVQRDAGRMPMRHTFLWFDEKNCYEEEHILRHVEPPLSALLELGKLKVKGYNEMKYTPSRDRQWHIYTLRNTENPKMLHRVFFRTIVRQPNAGNKFTSAQVSDTGLGCPEESLSFTSNSILRSLMTAIEELELHAIRTGHSHMFLCILKEQKLLDLVPFSGSTIVDVGQDEATACSLLRSMALKIHELVGARMHHLSVCQWEVKLKLDCDGPASGTWRVVTTNVTSHTCTIDIYREVEDTESQKLLYHSATSSAGPMHGVALNNPYQPLSVIDLKRCSARNNRTTYCYDFPLAFETALQKSWQSNCSSVPEGSENSKSYVKSTELVFAEKHGSWGTPIIPMERPAGLNDIGMVAWILEMSTPEFPNGRQIIVVANDITFRAGSFGPREDAFFEAVTNLACERKLPLIYLAANSGARIGIADEVKSCFRVGWSDERSPERGFQYIYLTEEDYARISSSVIAHKLQLDNGEIRWIIDSVVGKEDGLGVENIHGSAAIASAYSRAYEETFTLTFVTGRTVGIGAYLARLGIRCIQRLDQPIILTGFSALNKLLGREVYSSHMQLGGPKIMATNGVVHLTVSDDLEGVSNILRWLSYVPANIGGPLPITKPLDPPDRPVAYIPENTCDPRAAIRGVDDSQGKWLGGMFDKDSFVETFEGWAKTVVTGRAKLGGIPVGVIAVETQTMMQLIPADPGQLDSHERSVPRAGQVWFPDSATKTAQALLDFNREGLPLFILANWRGFSGGQRDLFEGILQAGSAIVENLRTYNQPAFVYIPMAGELRGGAWVVIDSKINPDRIECYAERTAKGNVLEPQGLIEIKFRSEELQDCMGRLDPELINLKAKLQDAKHGNGSLPDIESLQKSIEARTKQLLPLYTQIAVRFAELHDTSLRMAAKGVIKKVVDWEESRSFFYKRLRRRISEDLLAKEIRRIIGDNFTHQSAMELINEWYLASQATTGSTAGWDDDDAFVAWKDSPENYKGYIQELRAQKVSQSLSDLADSSSDLQAFSQGLSTLLDKMDPSQRVKFVQEVKKVLG

SEQ ID NO: 56149 - protein, 120 aa, Zea Mays
MDARRFVSAIYSSKHVQPITQIVMNLPNDAVEFLDVFKGILCNTKSELHCVMPMIHVYGFSKAEDPEHDFHERINLTLGENIDTVEMHRVRLVAPGKWMICATFTLPQSVASAQPNYITC

SEQ ID NO: 56150 - protein, 145 aa, Zea Mays
MVASADMNHINKLLDRVDSLVKEPDLKDIRITFEEFKAFADLRRRLEPLSMAIFAYGKLNGLLTKEDLKRAAQHVCGVDLTDRVVDIIFHVFDTNQDGNLSPEEFLRALQRRETDIREPTIPGPLGFLSCWFSGRKCSSLKHVVI

SEQ ID NO: 56151 - protein, 1134 aa, Zea Mays
MTTSPPPAEQEQQEEEEVLVPHGPHQELPNGAQPMEVVPAEPAATVENQQIEDPPISRFTWTIENLSRVSTKKLYSEIFVVGGYKWRILIFPRGNNVEFLSMYLDVADSGVLPYGWTRYAQFSLSVVNQIHNKFTIRKETQHQFSARESDWGFTSFMPLGELYNPSRGYLVNDTCIVEAEVAVCKVVEYWSYDSKKETGYVGLKNQGATCYMNSLLQTLYHIPYFRKAVYHMPTTENDMPSGSIPLALQSLFYKLQYNDSSVSTKELTKSFGWDMHDSFMQHDVQELNRVLSEKLEDKMKGTVVEGTIQQLFEGHHMNYIEYLQLDVKGCQDVYASFDKYVEVERLEGDNKYHADKHGLQVLEPSEASMDHNGRQHAHRYWMSSIPCRCVKDAKKGVLFIDFPPVLQLQLKRFEYDFMRDTMVKINDRYEFPLQLDLDRDNGKYLSPDADRNVRNLYTLHSVLVHSGGVHGGHYYAFIRPTLSDQWFKFDDERVTKEDAKRALEEQYGGEEELPQTNPGLNNTPFKFTKYSNAYMLVYIRESDKDKIICNVDEKDIAEHLRIRLENDREEKERRKKEKAEAHLYTIIKVARDDDLKAQIGKDIYFDLVDHDKVPSFRIQKQMTFAQFKEEVAKEFGIPTQFQRFWLWAKRQNHTYRPNRPLCPQDEAHTVGQLKELVNKAHNAELKLFLEVELGLDLKPLPLPDKTREDIFLFFKLYEPEKEQLRYVGRLFVKASGRPQDILLKLRMLAGFSQDDDIELYEEIKFEPNVMCEYIDNRLLFRSCQLEDGDIICFQKPSKPDSADRYRFPDVPSFLTYIRNRQVVHFRSLEKPKDDEFCLEMSKIFTYDQVVEKVAEKLGVDDPSKIRLTSHNCYSQQPKPQPIKYRGVERLLDMLIHYNQTSDILYYEVLDIPLPELQALKTLKVTYHHATKDEVSVHSIRLPKNSTVGDVLNDIKTKVELSHTNAELRLLEVFYHKIYKVFAPNEKIENINDQYWTLRAEEVPEEEKNLGPFDRLIHVYHFTKDTQNQTQVQNFGEPFFMVIREDETLSSIKERIQKKLKVPDEDFSKWKFAYISLGRPDYFEDSDTVALKFQRNMYGAWEQYLGLEHPDTAPRKAHTANQNRHSFERPVKIYN

SEQ ID NO: 56152 - protein, 138 aa, Zea Mays
MGSRREDVLRTQRTTARLPLRHTHYAGITQDARKAAPRAHANDSRASRGHAGHAPRAHAAAPGARWPCRGHSWPRRGKHGHSRRAAHRVGAQGSALATALGSRSYAPRARHGRWPSRQGPGEAVGQWVEGGRRKWGDG

SEQ ID NO: 56153 - protein, 217 aa, Zea Mays
MCILEWWSYELLVLLSGMLPNAALETSVLSICISTVILVYNLPYGIGTAASVRVSNELGAGNPDSARLVVVVALSIIIFTAVLVSVTLLSLRHFIGIAFSNEEEVVNYVTRMVPLLSISVITDNLQGVLSGISRGCGWQHLGAYVNLGAFYLVGIPVALVAGFALHLGGAGFWIGMIAGGATQVTLLTIITAMTNWRKMADKARDRVYEGSLPIQAN

SEQ ID NO: 56154 - protein, 297 aa, Zea Mays
MTSTTIRESRPKVTLVARMVASVANYDYIMDWEFQMDGLVRIKVGLSGILMVKGTSYSHLSEARGNEGDMHGTLLSENVIGVIHDHYVTFRLDMDVDGADNSFVRVEMARQETGPGDESPRRSYLRATRRVAETEKDARVRLSLYHPAEFHVVNPAKKTRVGNPVGYKVVPAGTAASLLDPEDPPQKRGAFTNNQIWVTPYNKSEEWAGGLFVYQSKGEDTLDTWSERDRPIENKDLVLWYTLGFHHIPCQEDFPIMPTVSSSFDLKPVNFFESNPILKQRPTKEDDLPICTASTAA

SEQ ID NO: 56155 - protein, 60 aa, Zea Mays
MHRFGMSSGHSLKETIDWYTTFPYHHERQAWVPTAREKKRPSNPCPDLAELSISIIEPSV

SEQ ID NO: 56156 - protein, 250 aa, Zea Mays
MDPTPQSHPILAYVLSRLPSLPAVRTPRSPRERDLEQPSPRTPSGAAEIDLVGRMPGLRHPSVLSAMTRAVADVSSARDAIRLLGPRPDHEQVDASRELLRLADAGKKADANADVKTKDLDEEKLAKCREVVRLEEDHEAYGALLRDAEGKLEHVYQMAMHGRDIKKVGGGDGKGEEGSGAVDEEVVRVLKDAGEGKVVERVNLADRQMRLLPEPIGRIRGLLALDVSRNQLKVRDSYLSIRAVSLHHAL

SEQ ID NO: 56157 - protein, 198 aa, Zea Mays
MGSNDYLNNYFMPAVYSTSQQYTPEQYADVLINQYSQQLRTLYSYGARKVALMGVGQVGCSPNELAQRSTDGTTCVPQINGAIDIFNRKLVALVDQFNALPGAHFTYINVYGIFQDILRAPGSHGLTVTNQGCCGVGRNNGQVTCLPFQTPCANRNEYLFWDAFHPTEAANILVGRRAYSAALPSDVHPMDLRTLARI

SEQ ID NO: 56158 - protein, 184 aa, Zea Mays
MQDREKLENQLHDMALMIERLEGSRQKLLMEIDSQSSEIEKLFEENSALSTSYQEAIAITVQWENQVRDCLKQNEELRSHLEKLRLEQASLLEVSNITTKSDGQIENSISNLPEMVTENISLKGQLIKEQSRSESLLAEIMKLSAELRKAVQAQNNLVRLYRPVLRDIESNLMKMKQETYATIQ

SEQ ID NO: 56159 - protein, 490 aa, Zea Mays
MAPPPPWLAALLFLLLPALLPAVGSVSGAAAAGIFRVRRKLPAGVGGDTGANISALRAHDGRRHGRLLAAADLPLGGLGLPTDTGLYFTEIKLGTPPKRYYVQVDTGSDILWVNCISCSKCPRKSGLGLDLTFYDPKASSSGSTVSCDQGFCAATYGGKLPGCTANVPCEYSVMYGDGSSTTGFFITDALQFDQVTGDGQTQPGNATITFGCGAQQGGDLGNSNQALDGILGFGQANTSMLSQLAAAGKAKKIFAHCLDTIKGGGIFAIGNVVQPKVKTTPLVADMPHYNVNLKSIDVGGTTLQLPAHVFETGEKKGTIIDSGTTLTYLPELVFKQVMDVVFSKHRDIAFHNLQDFLCFQYSGSVDDGFPTITFHFEDDLALHVYPHEYFFPNGNDIYCVGFQNGALQSKDGKDIVLMGDLVLSNKLVVYDLENQVIGWTDYNCSSSIKIKDDKTGTTYTVESHDISSGWKFHWHKSLVLLLVTMVWSYL

SEQ ID NO: 56160 - protein, 467 aa, Zea Mays
MALEDGSPATFTPQVIANAFVKQYYQTLRYAREDAYKFYNDKSILGRTDSNGKMICVTTIDDIKEQLVSTDCADCLIEIETVDAQPSHVDGVIILVAGYFTTAVVKQKFIQSFFLAPQENSGYYVLNDTFRLTGISFEVKVVAANHDNKSTQITTLPNEPEIDSFKESEVPGVPPAGNILVNDGVISTSANVVSPVKNDPVVETCVKVVNEDVVKIPVAAPASTPVTAEEVVNKDFVKIPESAPALPSSVEKAAPAPPASVEKAAAAPPASVEKGAPAPRTPVEKEVTRKTYASVVKIPREDTQPAPAARPSKPNLNIKMVQNTEKNVSSPSKPAHATVNALPGDKGVPKNKSPDEPGYSIFVKNLPFEATVEMVEQEFSKFGAIKSGGVQVKCQPDQFCFGFVEFESQQSMLAAIELLMVLSPVGMTMATAVAVGSILAEVVVTMGTATSGSGAVRTTATTTARIT

SEQ ID NO: 56161 - protein, 89 aa, Zea Mays
MPRVVCGSGPGGLGPTPTKGEERGRGEMPHRARPMTGLLVFMGVNLALFNTITPVYDFVCFLPHWERRREHRRRELEGLQAKGSVETTN

SEQ ID NO: 56162 - protein, 226 aa, Zea Mays
MKTLSQLTSGKQPVGTMAYMGNVQYLMQCKCAVNTAEDWLNPVAIQEAFEARALRMAVNCAQNIGQAANQEEGFYERSPDLLEAAVAHIQLVIVTKFISKVQQDIPGPGVKEQLQNLCNVYALYILHKHLGDFLATGCITPKQGALANEQLGKLYAQVRPNAVALVDAFNYTDHYLGSVLGRYDGNVYPALYEEAWKDPLNETVVPEGYHEYLRPLLKQQLKLSRL

SEQ ID NO: 56163 - protein, 344 aa, Zea Mays
MAAASFARALCLHMLLLFLVVGSARCKTVKRDVKALNEIKSSLGWRVVYSWVGDDPCGHGDLPPWSGVTCSQQGDYRVVTELEVYAVSIVGPFPTAVTNLLDLRRLDLHNNKLTGPIPPQIGRLKHLRILNLRWNKLQDVLPPEIGELKKLTHLYLSFNNFKGEIPVELANLPELRYLYLHENRFTGRIPPELGTLKNLRHLDVGNNHLTGTLRDFIGNGNGFPSLRNLYLNNNELTGVLPDQIANLTNLEILHLSNNKMIGSISPKLVHIPRLIYLYLDNNNFIGRIPEGLYRHPFLKELYIEGNHFRPGTRSKGTHKELDASLKTHVRMCRIDDVATVFYPD

SEQ ID NO: 56164 - protein, 329 aa, Zea Mays
MMMTRAPMGPMEGAAVDEMVRRLVEGGRGGRQVQLSEAEIRQLCVEGKRVLLSQPNLLRIHAPVKICGDIHGQFVDLLRLFDLGGYPPASTYVFLGDYVDRGKQSLETICLLLAYKIRYPENIFLLRGNHEDAKINRVYGFYDECKRRFNVRLWKIFSDCFNCLPIAALIDDKILCMHGGLSPELTSLDQIKDIERPAEIPDYGLLCDLLWSDPSPDGEGWGESDRGVSCTFGADKLVEFLEKNDLDLICRAHQVVEDGYEFFAQRRLVTIFSAPNYCGEFDNVGALLSIDESLMCSFQILKPTDMGPPHARKQIPNKAHDLMASKLIT

SEQ ID NO: 56165 - protein, 392 aa, Zea Mays
MAPDIDWGKNIRIILDVGCKSAGFGIALLEKDVITLSLGLTNDQTDLAQVALERGIPATVGSLGSRRLPFPSGAFDAIHCGECNIPWHSNGGKLLLEINRILRPGGYFIISSRSADLESEEGISASMTALCWNAIAYNSDDVSEAGVKIFQRPVSNEVYDLRAKKDPPFCKEEQNKASAWYTNIKHCLHKAPVGIEERGSDWPEEWPKRLESFPEWLGETETRVASDHNHWKAVVEKSYLDGLGIDWSNIRNIMDMRAVYGGFAAALASKKVWVMNVVPVHAADTLPIIYERGLIGVYHDWCEPFSTYPRSYDLLHADHLFSRLKIRCKQPVSIVVEMDRILRPGGWAIIRDKLEILDPLETILKSLHWEIVMTFRKDKEGIMSVKKTTWRP

SEQ ID NO: 56166 - protein, 131 aa, Zea Mays
MSEQEELLAKRRASSRKVEEELSNEVELQIHGVEKPSVWRLFGVQFILWPYSVGKALTWKICWFWRYRVKKLPYTWEDACYLTWISLQIPANAWKNMDESRKEDLVRRHLWEKSNMERYTSGTRKEPKRRR

SEQ ID NO: 56167 - protein, 71 aa, Zea Mays
MDRILRPTGFAIVRDKGTVIEFIKKYLHALHWEALTVVDAEPSPESEESEMILIIRKKLWLPKAGPQDSGT

SEQ ID NO: 56168 - protein, 343 aa, Zea Mays
MQTFPFVFYDLLEQSLPFYNMLKRQIRKIRGPQQPPLSDPPLPVPANKNILVWVGDELLPRNSAKVSVFDSVVQGGDAVWEGLRIYDGKVFKLDEHLDRLFDSAKAMAFSNVPTRDWIKDAIFKTLIANGMFNNAHIRLTLTRGKKVTSGMSPAFNLYGCALIVLAEWKPPVYDNSHGIKLVTATTRRNSPNSIDSKIHHNNLINNILAKIEGNLAQAEDAIMLDKDGFVSETNATNIFMVKKGIVLTPHADYCLPGITRATVMDLVVKENFVLHERRISLSEFHAADEVWTTGTMGEITPVVMIDGREIGDGKIGPVTRQIQKAYKILTAGQGVPIPGVAEV

SEQ ID NO: 56169 - protein, 1246 aa, Zea Mays
MSHAVEELHASRDHGVGDDVSDKKQVMVEEQLLEEIQAKDNLSQAKEHKKCRTSSFDTSCMDLLETGTTSLVESLNTSNHQEVHDTLHEESIQLENPSTVGKKKKRKRRQLSPSKSASAQETTEPSATAVDLLIPTGEVLSNNSPGIQIHNIHAMDNLSQEKEQKKSRTSSPDTSNRHLLETNPTSLRETLNTSNHQGHDTLDEEFIQPENPSAAGKKKKKRRQLVPSKYASAQITTEPSSGAAPADLSKSTGDKAYNAELTSKGETVVEASGLPLSSYEHNDGNQGGKSVKFVSDDQASTDLISEQEKFDHALKGCRDPLIADDIYSTGENVAIEGKTTKGSCAPLNGGDRHEEIKHLNEGCHNAGVPETSNMEKDGKSTDVSDKRQTSQNTSQVKKRKKSKVGSVDMPSVDASGEKDHRYSENATKQDTASTKREIVHEPSMQQMSNIVHQGDSNVIENPSGDGKKKKKRRHHSESLKGMNPSQDLTKSSGFVTNESSIQCTGAAPINAKQTNLVIIEGETVTGHRKLSENLDVAATHVVDEVLADLRSKDGLSKDLDENLLPGQTHLGSNQNGIEVPESIAVKVGSTTAALPPKYPATVHSASPVNSPRQRKSKGKKLKVLSTMADSSHQSSGVPEEDANRKLKESDSLRFADKTSDHEDIVTANVVAQADEKRKATKRQRKKGSVKQVLDTLDLKEVNDTEENLVQGGSVVDTPLSTAGNVEQKDWSSETLSPKEQETNCSTHGLDSHTAKDSQDEYVTDTIGTHDNENAAGTPALHVVQKDAMALKSASPNSQKEQETSLNSELQSQDCPLEHGFSADLVNSRTEKGVRTTSSASAVKSDYNTMFHPANGRINVLDHFSRSNLNDGSSIVAESKQNNEDGSLREVKNKKKKRKQGTGSVEPNDVIESLPSEIASLTGHFGTSKAVVSSVATENMNGGNENVNKGKEKKRKGKSNMEVPTAGKDHPNCDTQFIDIGTQESLISIVQKERTGQDNGKESNSKATQNASIMQHEPEDATWNRSPEKNHHQSVDDDQNKLLTEKDHAHINKEVRKFTPQTKAHAKIRKPDGSTIKEKVAPNPKPVTNLVKDFSMSPRASSDSTEGMPQSANRYRVAVRKVPSKRYEETSGNSNKASRKVGSGAIFNDSISEGSGDELDTKTVMERSPNKSSTSADSGISSAASGESEVPDDDGTVSLSQKSFKGLHISSILRGSRSYKKALKRQMELLDDDTIVPDSQPADGLWG

SEQ ID NO: 56170 - protein, 154 aa, Zea Mays
MAVTSGAPNDNGRDAGAAATDDEHRVDLEVRHKDAGTRDSPAPIAAAAPASQSRVAGKLGPSDPKHLIYAGSKLKHIKAAPAAPDKNRRPPLSPPAPAVNRGRGSVRTPLGLKKCLPKVAVNPHYLKHHKHRCLHLMNLNRLVLSQIMTRCQFK

SEQ ID NO: 56171 - protein, 467 aa, Zea Mays
MVNAKCDTLLSAWNTPPGKINMLRVDAKQGAPKDGSSPLELFQVEIYPLRIYLSEAMYRMMWDYFFPEEDDSQRRQEVWRVSTSTGPRRTRRLSSGVDAVTSSSYSVRDHELPGKSSTTVSTSTNVSSWQGILSDNSQVSKFQSIKANMVCGSHQELHRSSSFERNWEESAAESVASNDVVSLLNSSIVSSKVDASNSVLENPVVGSEMWRSKTKDSKPAKSGRLSHEEKKLGKSNDEKKTKPRKSMEFHNIKIGKVELLVTYEGSRLAINDLRLLMDTFHKAEFTGTWRRLFSRVKKHIIWGVLKSVTGMQGKKFSNHRETLEGSIPENDLNLSDSDVGQPGRHDQLTASWLKRPGDGAGDGFVTSIRGLFNTQRRKAKAFVIRTMRGEGHNDEYQDEWSESDGEYPFARQLTITKAKKLIRRKFRPRVQKNPGLSMQDSLPSSPRETTPYQSDSSRSSYEDFHEQ

SEQ ID NO: 56172 - protein, 161 aa, Zea Mays
MALQAQQQATPSPTRDRAGSGEWLADTEKLPGAAASPEDVVVASTHHAAAAARYSEAVNVVGFLYSVFQFVALAELMRRNKHLIPHPKRDLFDFTMDQVVAYLLISSSSSATARASDLIENWGSDSFPSMANGSIAISFVAFVVFAICSLISAYNLFRRDM

SEQ ID NO: 56173 - protein, 352 aa, Zea Mays
MTSIRSMCLNNHPGFDNGGILWFHNLTEFPHGTLAPIFPILVAGLHYLNVQISFQGSQIKDHPGIFGLLAKYYRIYLNVLTIPLFLVAHVVPQGCLVYWTTNGLFSVAQQLSLRNDAVRKLLGLPDTRAQVGYRAQKSPLEWSQLEDANLQTKSMPSDKGTASESTTPNFAMGSMDGNISASSSPEELLEQALQYLGTGCRDQAIPLIRTAVERNPDLYTALIGMGQTLFSNRLFPEAAVCFEHAIPKIQEDDPLLVLAYFGAGLSNKRQGDNETAIKLLERLAELKEPEKPINKSRYFQGMLALASILYREGRNSEAAKYLRMAIAYDPSVERLLKECEEGMDDQPKPEEK

SEQ ID NO: 56174 - protein, 297 aa, Zea Mays
MASAPLPAAIEPGKKGNVKFAFACAILASMTSILLGYDIGVMSGASLYIKKDLKISDVKLEILMGILNVYSLIGSFAAGRTSDWIGRRYTIVFAAVIFFAGAFLMGFAVNYWMLMFGRFVAGIGVGYALMIAPVYTAEVSPASARGFLTSFPEVFINFGILLGYVSNYAFSRLPLRLGWRVMLGIGAAPSVVLALMVLGMPESPRWLVMKGRLADAKVVLGKTSDTPEEAAERLADIKAAAGIPQELDGDVVAVPKKRDSEEARVWKELILSPTPAMRRILLSGIGIHFFQQAQLAS

SEQ ID NO: 56175 - protein, 1614 aa, Zea Mays
MVVRRGAGARRGGGFGGDVGEDAASRICMGGAALRAVFLLSANDARQTLLVPVFISITQLPAACLIANITSTVTDGREIRVGDCALFRAVGAPPFIGLIRWIEKKEEAHPKLRVSWLYRPTDVKLNKDIQLSAAPNEIFYSFHQDEASAVSLLHPCKVAFLRKGVELPAGISSFVCWRVYDIDNKCLWWLTDKDYINKRQEEVNRLLHRTRLEMRAALQSGGRSPKRLNGPSASQQLKTASVGTQNGGLSKGKKRDRSEQGVDPAKRDRDHLLKVDESEPGNFNLDDIKSEISKITEKGGLPNAEAVEKLVHLMQLDRTEQKIDLSGRVILADVIAATESPDCLGRFVQSRGLPVLDSWLQEAHKGKSGDGTSPKEADKPIDELLSALLRALAKLPINLSALQSCSIGKSVNHLRSHKNLEIQKKAKCLVENWKKRVDAEMKSNDVKPLVSGQSVSWSGKAGFQEISNAGTKRGGSSENSPKNPVPTLSSSKILTDKPGGTDAEAKLNPGVSALSNSQHVQPTNVTTNLKDQPCKSTGGTGPELPTVKEEKSSSSSQSPNNSQSISSEPSKDARSSTAASGGASKTSESSSRSHRKANNGLVSGNLKEASVGRSVSLDRSLLQDKSSQTGTASEKGVDMPPDHGNNHRLIVRFPNPGRSPANSASAGSFDGPSVTGDRASSPVVADRHDQTERWVKGKTENSRPHLASDANTESWHSNDGAAGSEEGDKSPCAILDDDNSRTPDDSVKDAHASRVACSSHMNEKDVSETKVGTLFSPMNALIEIKYSEASHSRQAGDDAAMNLLASVAGEISKSELVSPVSSPRSSSAKKLARESDNIGKVKVESDMGPSHPGQADAKKGAMGKEVKNDACLVSMDEQRQTTPSPELPYSKAVVSSAKIETHEVEAKIANKCNSQHASIDSKGESQDACTAHGNVEDGSTDKDGAMESALGSQCSLVVSSRNSRLVHAGESALSAADKQAQGLLKSTNHKQLLSVSDNPGAFDRRDSMAGKLDLMAAEVRKTDVLGNSSIVQNEAEKKEHASSFLPDVPKLVVAAASPVGVANVNKEIKESKDSSSESNSHVKSEGVNSHQSEQSAKQSSKKSSDGVSGKEDEKEDHVLSDEGSSLAANTKSNATAKLDFDLNEGIPGDDGHQSEPTISPVVCSSAIHLTGILPFTSPITTGLQPASVTVAAPAKGPFVPPENLLRAKPEIGWKGSAATSAFRPAEPRKILEMPVAARDISVSHAAGKQSRPTLGFDLNVADDQALEEDIPQSSAQTTCSESGNTRSRDGSSRSAGIEFDLNRADEVADNGQFVPSASHRVEVPLLSTRSLHGVFSNAGLNSSRDFDLNSGPGLDDVGTEAAPKSLPSKNTSSIQFLPQVPVRMNSAAMSNISPWLASASPCGPVAIQSFLPTREQPYPIEAAAGAQRIIAPTADAGQFGGDPCRPPVVSTSPAMVYHPPAYQYPGFPFPPSVHLQTPAFSIGSATFNNSASPGVPYFPTVSPSFVGPAGALTPQHLRQFAINLAEGSSSSGRDSNRKWESQGLDLNSGPGSIDLEGKDERVPLPVRQNLIPPPHGFVEDQGRIYQMPVVGTKRKEPDGSWDSERSTYKQLSWQ

SEQ ID NO: 56176 - protein, 402 aa, Zea Mays
MFSSPTVLVTTAEGCKQVLMDDDAFVTGWPKATVALVGPRSFVAMPYDEHRRIRKLTAAPINGFDALTGYLPFIDRTVTSSLRAWADHGGSVEFLTELRRMTFKIIVQIFLGGADQATTRALERSYTELNYGMRAMAINLPGFAYRGALRARRRLVAVLQGVLDERRAARAKGVSGGGVDMMDRLIEAQDERGRHLDDDEIIDVLVMYLNAGHESSGHITMWATVFLQENPDMFARAKAEQEAIMRSIPSSQRGLTLRDFRKMEYLSQVIDETLRLVNISFVSFRQATRDVFVNGYLIPKGWKVQLWYRSVHMDPQVYPDPTKFDPSRWEGHSPRAGTFLAFGLGARLCPGNDLAKLEISVFLHHFLLGYKLARTNPRCRVRYLPHPRPVDNCLAKITRVGS

SEQ ID NO: 56177 - protein, 768 aa, Zea Mays
MDGDHRRQAAAAVTVTQVSPARRLIAWLRLLFRAFVHRYGKVASWNAAGRPVFVVLAVFFLQRSLRRRYLSWKESSRLPLMAAAAVTVQTTVRAMAAQRELSVRKQTRAATRIQAQWRAHRAVWSYLTTKRAAVICQRAWRQSVARKELRKLRLCVQENLEREMLEEVCRLREMVDVLQQAVNDAETRAVNEREAAKDAMAQLEAASAIEETVVMVEDTEKVKSLSAEVDRLKDLLGAEMSETFAAKKALSEAELRNEKLARLLGVEEVKNKRLQDTLKRMEEKASSLDEENRMLRQAVASNPAIVRSPSGENHEAPGIQAAPDNEKSRNGTVKPIAVDREANVHEKGAEQPSSNGQEAGKQQQELLIKCLSEDLGFSVGRPIAAYLIYRCLVHWRSFEEERSVVFDRIIQKITAALEARDNNDALAYWLSNSCALLVLLQRTLKINGVAALARQRRRTSSPLKVPQENQDPAPDGQLICGLAQVYQVEAKYPAIAFKQQLTALLEKVYGMIRHNLKKELSPLLGLCIQAPRTFVVSPRGSCSQGTDLAQQASMAHWQSIIKILTNSLDVLKSNYVPPFLICKMFTQVFSFINVQLFNSLLLRRECCSFSNGEYVKAGLDELEHWCFWLTEEYAGSAWDELKHIRQAVTLLILDDKHSRSLAEITDDFCPVLSMQQLYRISTMYCDDKFGTLGIPSEVVSSMRTKMIEGSSSSPSAHDDINSFLLDDDFSIPFSVDDFTKLIVHVDVADMDLPPLIQESSGGGSKMGH

SEQ ID NO: 56178 - protein, 93 aa, Zea Mays
MVASFVSFTCNSSFVPGAEMQTAPGYHQLLNAVVDLLADGHPDPGQEEDVVSWACGRPHDQKHASMRQQQQIAANPAQLPPAKYIFFHNTTAG

SEQ ID NO: 56179 - protein, 440 aa, Zea Mays
MEMNGVLQAADAKYWVYKGEGAANLILSYTGSSPTMLGKVLRVKKLLNDKSQLPPSCMVFSSHEQLLWGHIPELVESVKQDCLAQAYAVHVMSQHLGANHVDGGVHVRVSRDFLELVEKNVLSSRPPWRVNASSIDITADAALLIADHSLFSGTPKGSSCIAVEIKAKCGFVPSSEYISKDNSIKKQVTRYKMHQHLKFHQGEISKTSEYNPLDLFSESKERISMAIKSFFSTPQNNFRIFVNGSLAFGGMGGGADSVHPADTDKCIKDLSKVSGLELPDFTELLSETIFKSGVLGKLLTTQKLDDHDIEGAIHLYYNIISQPCLVCKNLTDVELLRKYTLLHSLPLDKSLKIVRNFLISATAKDCSLMISFRPRENGSTDSEYDSVFLESAKRTYEYKTYFVDLDVKPLDKMVHYFKLDQRIVNSYTRYGEVLPPPKGK

SEQ ID NO: 56180 - protein, 119 aa, Zea Mays
MDSIVETMMQQLLSKEILHEPMKDIVEKYPKWLEDNKDKISKEEYGRYNNQLELMVKLIEVYENDPENMTRIFDIMQNMQECGQPPSDLVQDIVPDLDLSKLGQLSPEMLESAPNCCVM

SEQ ID NO: 56181 - protein, 232 aa, Zea Mays
MSPSLLLLHSSATPCRGLLPPPSSCFATFSRASSPLRPRHRIRLVCAAEQPNGAASPGSGSGGDATANPTNNGLDYAPGTQKKVTGEVIRWNKATGPEKIDAVKYIELLEAEIDELSRQVARKTSQGSNELLEYLKSLEPQNLKELTSTAGEDVVFAMNAFIKRLLAVSDSEQMKTAVSETSASQLANLLFWLMIVGYSMRNIEVRLDMERVLGAPPKVAELPPPPSGGENI

SEQ ID NO: 56182 - protein, 177 aa, Zea Mays
MIDPEGIETLCSHLEVPHTDVRILMLAWKMGCEKQGYFTLDEWRAGLKALRADSISKLKKAFPELVQEVTRPSNFQDFYIYAFRYCLTEDKKKCIEIPVACELLNLVLGLQFRPQVDKLSNYLKYQNDYKVINMDQWMGFMRFCNEINFPSLDNYDSDLAWPLILDNFVEWLRENKS

SEQ ID NO: 56183 - protein, 128 aa, Zea Mays
MVTQEGEKDAQHKRKLTSKWKPTTKGTLKRTYRVRSTDEGRRILKEIASVLSQDDHFVDASSHKGCQIRRESAHGESVCCYNVRALFDELPTPHLLLEITPFPAGQLTDNDYRKAERLEMVLRLSTSI

SEQ ID NO: 56184 - protein, 72 aa, Zea Mays
MNRYLGENWKSFTSRNYFDRSGVFISVVWSGPLIVISIVSVISSLIALCRLMVKWKRAELRHRARLAHDKKD

SEQ ID NO: 56185 - protein, 94 aa, Zea Mays
MLLLQKGKCVAIGGPTGEILETNAHVLGQISSNLSNMQIQDNISLLCQTRDNILRVLKEINDAPDIMKQMPPLPVKINEELVNSLLPRPTVPMQ

SEQ ID NO: 56186 - protein, 64 aa, Zea Mays
MARQYSVLEEKHSQSQAELVRRCSDLEEKYSQSQTGLAQVSAALNDANMLNSTLRAQLDYEKTR

SEQ ID NO: 56187 - protein, 490 aa, Zea Mays
MGLLVKGGNVLESLGEVRVAAFDKTGTITRGEFSIKDFHVVGDKVEMNQLLYWVSSIESKSSHPMAAALVEYAQSKSVQPKPENVTETCIYHGEGIYGVMDGKQIYIGNERIIARSSCRHHQHAGHQETDGLKGVSIGHVICDGDLVGKFSLSDTCRTGAAEAILQLRSMGIKSVMLTGDSAAAAKHAQEQLGGVLEELHAGLLPEDKVRLVRGLQARHGATLMVGDGMNDAPALAAADVGVSMGLSGSAAAIETSHAALMSGDILRVPKAVRLGRRARRTIAVNVASSVGAKAAVLALAVAWRPVLWVAVLADVGTCLLVVLHSMLLLRDGAARRPRCCASATACKSKQASKPCCATVKPVATTRHRHGHGHGHGHAGAGKPGTLGGDKQGKDCHGCCQKESKPPEDAVVIAIPGRAVEHRKEAFPHENAGAGGCCAAAHGAEDEVCIVISARSPCCSTARSRSGSPKDALCCHGSGGKDGGAISALVC

SEQ ID NO: 56188 - protein, 577 aa, Zea Mays
MMAYNGALVPLILLAQIIFQVLQIGCNFWMAWAAPISENVNPPISSLQMVNVYFALAIVSSLCIFIRSHLLVMTGCKTANILFENMHNCIFRAPMSFFDSTPSGRILNRASTDQSTVDTRIFDLMGYLLFPAIEILGTVILMSHVAWQVFIVFVPIITASLWYQQYYIDAARELQRLVGVCRSPVLQHFSESMAGSNIIRCFQKERQFIRYIGYLVDNLSRPSLYNAAAMEWLCFRLDMLSSFVFSFTLILLVSSPSALIDPKTAGLAVTYGLSLNMLQGWAIAVLCSLENRMISVERMLQYTTIPSEPPLTISERQPNRQWPTKGEIEFLNLHVRYAPQLPFVLKGLTCTLLGGKKTGIVGRTGGGKSTLIQALFRIVDPCIGQVFIDGTDICTIGLHDLRTRLSIIPQDPVMFEGTLRTNIDPLGEYSDEKIWEALDSCHLGDEVRKNELKLDSTVTEKGKNWSTGQRQLVCLGRVILKRRKILVLDEATSSVDPITDSLIQKTLKQQFLKCTMITIAHRITSVLDSDKVLLLDNGEIAEHDAPAKLLEDSSSLFSKLVSEYTMGSDKWRMQESS

SEQ ID NO: 56189 - protein, 57 aa, Zea Mays
MGFIGAHGVETLKRYRYSGEDRSVVAKYVLQPFWSRCVTLFPLWMPLFCRSLWEVEE

SEQ ID NO: 56190 - protein, 369 aa, Zea Mays
MIKQILGRLPRKPGKAGDSREAAAAGNGTEPSNSYSVVRGMDPGNKRAGNGDYPVPSGLTSNPVMNGAVVYHSSEPLPAFKDVPASEKQNLFVKKVNLCCAVYDFADPTKNLKEKEVKRQTLMELVDYITSANGKFSEVVMLEITKMVSINLFRSSSPTPRENKAIEGVDLEEDEPLMDPAWSHLQIVYEVFLRFVASQETDAKLAKSSKEVMFLGELEEVLEATQLAEFQRCMVPLFRQIARSMNSSHFQVAERALFLWNNDHIENLIKQNYKVLLPIIYPALERNSRDHWNQAVRSLTLNVRKIFSDHDSAFFGECDQRFSDEELKQEESDSKREALWMRLEEMAASKPRENSPLGAPNGKPSQAAG

SEQ ID NO: 56191 - protein, 91 aa, Zea Mays
MILHRLLQTQRMKVGNLAEVRLHAVFWILPCGSRLNSTGLASLGTSIVSLLPAGRNQTQTAPAFSPYPMCYLHEVIGTPLTHLYGDLYICI

SEQ ID NO: 56192 - protein, 289 aa, Zea Mays
MDVVVSVARKTDGRHWADLFSAAGRSTEMFEECFQQRWYRTAACYILVIAKLEGPAVSQYCALRLLQATLDESLYELAGELVRFLLRSGRDFENATSDSEKLSPRFLGYFLFRSPYKRQSSDLKSNSTKELSPHIASVMNILERHASYLMSGKELSKLVAFVKGTQFDLVEYLQRERQGSARLENFASALELIGQKLQMDTLQSRLDAEFLLAHMCSVKFKEWIVVLATLLRRTEVLVDLFQHDLRLWKAYSITLQSHDVFREYLDLLNILEEQLSSVSDLTLQNGPLS

SEQ ID NO: 56193 - protein, 610 aa, Zea Mays
MNNHHLCSVPQLQPIILVLTDTLLRICVRQLMYSFYTEHQTWHATSLNFLDASQLLYYLFDRHWSRPDSEWRYLVDDFAATFGITNRTLLECLVFCLLDDYSSEALEEACSHLPKISSKETHPKIAQVLLERQKYDMALLVLKCTGHGSFSATENFKKDDISSLSEAVTVVRVRIECRLLTEAFMYHRSYCSKVKEQHSADMTHAEDALKNSWVYHVEMMVTEFCAICIKRNLVDKMIDLPWDSEEEKHLHKSLFDSAHEMPMKPNGSLLVVYYLRRYRYLEAYEVDRSLQKFEQKILENTTEEIASKIRAIARWRESLVVKCLDMLPEVQRENVKAINSGEQSQFARTAQLSSPAHVGKSQSPVMDLSTTFTTSLQNKSSLLRKNNALTDSGGLIRSSRSEFGRKVPSVLDTRASPHGPPTSNMRSSAGDMFPTVGQRVESPFLRGAKDISSRKGEEGFKKGIKYGDHDPVPMYLNLSSGDTPMKDYRTSLLKTAVNKTTIFQGKDSVGKGELHFGSRAEKPFILNGTGVGQNGLAKVSGYAGFREDYKVPTKENILSSSKRSSIDGAEASKGVSRWRSDESSEDEEERTNRESGASLVTRRRPRFSRR

SEQ ID NO: 56194 - protein, 87 aa, Zea Mays
MIFYFQILWMFSSFFFFGLLILPLTCALILCMLIWIWCINCASCGEITRIIYLSCKLFLMHYISSLEIWMALDFCRVFLFFFLFPSV

SEQ ID NO: 56195 - protein, 282 aa, Zea Mays
MGAGRVCRGGPFSASPAAGAAAGRPFPPLTASSSSSPSSAPSETASTSVTKTVNGSHHFKIAGYSLSKGIGVGKFIASESFNVGGFDWAIYFYPDGKSGEDGAAYVSLFIALASEGTDVRALFELTLVDQSGKGQDKVHTHFGRSLESGPYTLKYRGSMWGYKRFFKRVALETSDYLKDDCLLVNCTVGVVQSHTEGPKIYTIPVPRSNMALHIGQLLTSGKRTDIAFEVDGEMFPAHKVILSARSPVFRAQLFGPMKDKDMKCIKIEDMEAPVFKDISAAQ

SEQ ID NO: 56196 - protein, 319 aa, Zea Mays
MGVDAYRMSIAWPRLIPDGRGAVNPKGLEYYNNLIDELLSYGIQPHVTIYHFDFPQALQDEYSGLISPRFIEDFTAYADVCFSNFGDRVKYWSTVNEPNVETIGGYDQGILPPRRCSFPFGFGCEEGNSTTEPYVAAHHLLLAHASAVSLYRDRYQAAQGGRIGLTLLGWWYEPGTQTPDDVAAAARMNDFHIGWFMHPMVFGDYPPVMRRNVGSRLPTFTDEEAARVRGSFDFVGFNHYIVVYVKADLGRLDDQVRDYMGDAAVKYDMPFLKSRNQFPFGALTSDFMTSTPWALKKMLRHLRVTYKNPAVMIHENGTK

SEQ ID NO: 56197 - protein, 259 aa, Zea Mays
MSLQYVAPPVRALAVLPAPGPPRRRTSHVSLYLPSRRPGLAVAPVRAAESSSPPTVPASAAGKAVVPDDEFSLAKVSFGVIGLGLGLSLLSYGFGSYFNLLPGSEWSALLLTYGFPLTIIGMALKYAELKPVPCITYADAFALREKCATPILKQVRSDVTRFRYGDEQHLDEALQRIFQYGLGGGIPRRNAPILQKIREEVTDDGKYSLVLVFEAKALELSDFEKRQAKFTSFFGPGIKAEIGKGGGDLYEVRLISDTV

SEQ ID NO: 56198 - protein, 439 aa, Zea Mays
MSYNSADTIYFRQARSIEALAKKDFENLRQPSDEEEPKPPARRGRPPKNPKTEGDVSPDLSNVKANKPEDNVDTFRKRSTGDRTRNTNTPMKDLSSFHDTFGSFSAKRTDKIGDYSGSSKWGKKPVSLDDDRRSTYDQHYSRNSSLFAALDDERKLLVPVGVQQPHAYARSLARFASKLGPVGWDVAANRIRRALPPGTSFGPGWVVDGEPPQNSQWAPAASTNPSSEPTAPPNMPSKNDVLDHKSGPSSNGDVTGEEHLTRTQTVASTSTSFDKSSDISSKVTKLENGVTESCGGTDNTGSAAPPMQQHSHSREIHSNINGFTAMSNAMSQYAGQGLFGSGIHMTHAQVLGMFSGMNGKVNGYIHRHPVTADSLKTAGQNGDVGKATVNPVQSAGQDPKTATENSSAHPGLNSRAQSSGSSPRGKLTNPKHPDLALQL

SEQ ID NO: 56199 - protein, 375 aa, Zea Mays
MSPLALLQALIFILCCSPLASASSSELTLAGAACGDDQLVIFDASDGLLNLSVNGVLMQDRVFACQKLGFYFGSGCLRCSNLSDAWRSAVKQYCGEGSEKSHATLHQDVPRKLLRWSTENSSRNACERSGLNENNQDIGDSSEKQEHLLAVPGVILLCCGLMLPCFHAERKEVSRHDNATIQRNALESVSSYEGSMSSEKVPPTPHRIPPSPSRFAPSPQIARVGSVNLSIQQILRATQNFSPSFKLGEGGFGMVYRAVLPDGNVVAVKRAKKDQFAGPRDEFSNEVDLLAKIDHRNLVRLLGFTDKGNERIIITEYVPNGTLREHLDGQHGRVLDFNQRLEIAIDVAHALTYLHLYAEALICKASNEPRKKYMA

SEQ ID NO: 56200 - protein, 126 aa, Zea Mays
MAQRWMPSKIRSMSLHMRIRMQTGCLSVIFPGRSSLAQGHPTLVLLQPEIGLDIDKLQMLPSFEAQGAWLVEASLEDHAGLLAAVAQADVVVSAMSGAHIRSHNHSLQHKLLKAIKEAGNIKGLFG

SEQ ID NO: 56201 - protein, 1274 aa, Zea Mays
MATQPPSTATAAVDLYETASQPDAPAAGDAYTFLEFNTQGDDFDYPDFPELSQPPPRSTPLTSSIPGAGTSSSSWPAPPPPPSDAASPEPDLTSQDVHTPPASSSSPSPRSASKARPSAAADGLASGVVALNFEDPVGTGAVEDGYDYSKGDFVEHACRYCGIHNPACVARCNVPSCRKWFCNSRGNTSGSHIVNHLVRAKHKEVCLHKDSPLGETILECYNCGCRNVFLLGFISAKAENVVVLLCREPCLSVNALKDMNWDLSQWCPLIDDRCFLSWLVKVPSEQEQLRARQISAQQINKVEELWKTNPDASLEDLEKPGVDDEPQPVVLKYEDAYQYQNVFAPLIKLEADYDKMMKESQSKDNVTVRWDIGLNKKRVAYFVFPKEDNELRLVPGDELRLRYPGDSSHPTWQSVGHVIKLTAQEEVALELRASQGVPTELNVGFSVDFVWKSTSFDRMQGAMKTFAVDETSVSGYIYHHLLGHEVEHQIIRNTLPRRFGAPGLPELNASQVLAVKSVLQKPVSLIQGPPGTGKTVTSAAIVYHMAKQGQGQVLVCAPSNVAVDQLAEKISSTGLKVVRLCAKSREAVSSPVEHLTLHYQVRHLDTSEKSELHKLQQLKDEQGELSSSDEKKYKALKRATEREILQSADVICCTCVGAGDPRLSNFRFRQVLIDESTQATEPECLIPLVLGVKQVVLVGDHCQLGPVIMCKKAARAGLAQSLFERLVILGVKPFRLQVQYRMHPCLSEFPSNCFYEGTLQNGVTVNERQSSGIDFPWPVPNRPMFFYVQMGQEEISASGTSYLNRTEAANVEKIVTTFLRSGVVPSQIGVITPYEGQRAYIVNYMARNGSLRQQLYKEIEVASVDSFQGREKDYIILSCVRSNEHQGIGFLNDPRRLNVALTRARYGIVILGNPKVLSKQPLWNSLLTHYKEHECLVEGPLNNLKQSMVQFQKPKKIYNDRRLFLGGGQGVMHGTNFGAGASSQAADKRSGRGKEGQSFAPYGPPNGVHKPGVHPVGYAVPRMPFPPFPGAPHSQPYAIPTRGLHGPLGAVPPVHQPGSRNFGSARSNTGGPIGGHLAHQQNSQQAMGSIGSNFNYTGMENPSSQPSGGAQMSQTGLMTQVPVQGLSQTFRDGFSIGGMSQDFFVDDFKSQGSHVPYNIAEFSTQASQGGYGVEFTQAPQSGYSGNYMNQNSHPGYSHIGTTNDIVSQDHMAHGSHGMFTQAGYNDPSQDESSQIHYGMAAAGPLQSQGMMNPLYSQSYAHYNTQPQSLQPPPQ

SEQ ID NO: 56202 - protein, 552 aa, Zea Mays
MAHPNDPEFINLGIFECMASLIWKGLKNRRWLAHDQNIYIPYYAAHIIGSYTMNMEEFAERAVRAGVIPPLVELLRGRLTWVEQRVAVRALGHLATYPSTFPAVADHGEVLELAIQLASSSLEIVYSHFYQFVDRRLGYHCDLLTRGMGGVEMESRKAEEWASQLQCWSLQLINCFAFKPEFLHDICKPDFLVKLPGMWGGLVNENSPAGVGLLRTICQSKVGRGHVANIPATIDALCNIARSSDDWQYMAVDCLIWLMQDASTCHKVKDIVAPTLIDLSDISALGDYKKLGDTIVTVLQECMQQSGNSRGAIGVQTKSEIDELLRSKQSLKLEKSMPKEDLHIKQAAALVVKLEGNSLFSSGNIAGAAEKYSEALALCPMKSKKERVVLYSNRAQCYLLLQQPLAAISDATRALCLHSPVNRHAKSLWRRAQAYDMLGLAKESLLDAILFINECSQSNDPDLSLKQNKVPDYAERLVKKQMRSAWLFREAALKHGGVHCEGDASDAFGQDADDSEWETASESDAENDDTGEADDGTEWKNDGHREDICEKS

SEQ ID NO: 56203 - protein, 321 aa, Zea Mays
MSKLKHLENLILKNNKLVGVIPSTLSQLPNLKILDLAQNKLSGEIPNLIYWNEVLQYLGLRSNSLEGSLSPDMCQLTGLWYFDVKNNSLTGAIPETIGNCTSFQVLDLSNNHLTGEIPFNIGFLQVATLSLQGNKFSGPIPSVIGLMQALAVLDLSFNELSGPIPSILGNLTYTEKLYLQGNRLTGLIPPELGNMSTLHYLELNDNLLTGFIPPDLGKLTELFELNLANNNLIGPIPENLSSCANLISFNAYGNKLNGTIPRSFHKLESLTYLNLSSNHLSGALPIEVARMRNLDTLDLSCNMITGSIPSAIGKLEHLLRL

SEQ ID NO: 56204 - protein, 102 aa, Zea Mays
MILTTLDFELEVAHPYASLSSALGKLGLTHTVLFNVAWNLINEGLRSSLWLQFKPHHIAAGAAFLAAKFLHYDITFHPNFWHEFKTSPYIVQDVVQQLKELL

SEQ ID NO: 56205 - protein, 233 aa, Zea Mays
MEMINLGQRPPIDREGFRKAIYTIDIGQNDVSAYMHLPYDQVLAKIPGFVAQIKYTIETLYSHGARKFWIHGTGALGCLPQKLAIPRDADDGDQLDAHGCLKTYNNAAKRFNALLGDACAQLRRRMVDAALVFVDMYAVKYDLVANHTTHGIEKPLMACCGYGGPPYNYNHFKACMSAEMQLCDVGTRFISWDGVHFTEAANAIVAAKVLTGDYSTPRVTIAKLVNSTLPNDD

SEQ ID NO: 56206 - protein, 295 aa, Zea Mays
MSNYTDHVPPVQHQKNNYDCGFHVLLYIEEFMKEKMYKINKKMVLKFRKQLCMNLLYHPLNRINLVEFRKKLGITLKRKLPGILDLTIEGERSESEAAVIIEIENRDDKTLEDEHISVEKEKLRKHKFTSDKINDEICKHILNYNERELLSVGQTTMTGGQLEKYVNEGDNGDKILRAFITCFTCDEKFNQGNITTVIPPHEVSEEGELSKVDAAQLVEEIKAVLKGTNVARVRKDTESTKDPKVKVFRNMRRTFIFFPFYKNEELFVFHVDTKRLPIIDALFCKMSSLSFEDRS

SEQ ID NO: 56207 - protein, 388 aa, Zea Mays
MALEGGYNLRSIANSVCACAKVLLGDKFTFNTPEMQPFESTWRVIQAVRNELKTCWPVLSSKLPENVSLRIKPAPSELYASDSESDSEDVDELLGTVASVSVIEATGVAISEHLSKMKLDDDSLAVKTNSSCSAAEQHPVDSVKVHNNASVVLTKKISDLSLEWRSDLSKTDVWYASFGSNMWRPRFLCYIQGGKAEGMNIPCCGSRDTSSPKGTVWKTVPHRLLFGRSSTPCWGTGGVAFLNPEINYNEKSYVCMYKITLEQFNDILFQENRLVLEDGKDGNTVYPDSPLIGSSEIKFISTNRAVHLEPIKDSWYSNVLYLGNEDEVPILTMTCPASDIERYKSGELRLAPPSETYAATLIKGLVEGKQMDADGAASYINAAAARAL

SEQ ID NO: 56208 - protein, 264 aa, Zea Mays
MKHLSNNPDDLNSMSLKPELFEGLSVFMGSLEVPAQGSETIKVPTAHYEFGANFLDPKLMLIGRVMTDGRLNARVKCDLTDNLMLKVNAQLTQEAHYSQGMFNFDYKGSDYRAQFQIGNNAFYGANYIQSVTPNLSMGTEMFWLGHQRKSGIGFACRYNTDKMVGTLQVASTGIVALSYVQKISEKVSLASDFMYNHMSRDVTSSFGYDYLLRQCRLRGKIDSNGVVAAYLEERLNMGVNFLLSAEIDHCKKNYKFGFGMTVGE

SEQ ID NO: 56209 - protein, 101 aa, Zea Mays
MSPSSNHASSDDEIDMAPLFLRIKRRQLENQDVTSRGARSQSYPSSSGSREEFVERSRDAAAELRPKRVKIRLPSSASRQIEQQRSSGQRFAREDKLPLAF

SEQ ID NO: 56210 - protein, 259 aa, Zea Mays
MFPANDDHPSHDVARGQRFVKEVYETLRASPQWNETALIITYDEHGGFYDHVPTPVVGVPQPDGIVGPDPYYFKFERLGVRVPTFLISPWIEKGTVIHEPNGPQDTSQYEHSSIPATVKKLFNLHSNFLTKRDAWAGTFESYFKIRKTPRTDCPEKLPEVTKSLRPFGPKEDSSLSEFQVELIQLASQLNGDHVLNTYPDIGRTMTVGEANRYAEDAVARFLEAGRIALRAGANESALVTMRPALTSRASMSSGLSSEL

SEQ ID NO: 56211 - protein, 56 aa, Zea Mays
MTSLTQTQKTRRTSKARQDLPCQIRGKGITRMMPMDTSKTVRESSIFLNFGNVPVH

SEQ ID NO: 56212 - protein, 174 aa, Zea Mays
MELDQKIDLVHELDGHIMRCVRDQNGNHVIQKCIECVPTEHIGFVVSAFQGQVTSLSMHPYGCRVIQRILEHCGGNSQGQCIIDEILQWVCILAQDQYGNYVTQHVLERGKAHERSQIITKLAGQVVTMSQNKYASNVIEKCFQHGDIAERDLLIRRIVEQTEGNNNLLVCLVV

SEQ ID NO: 56213 - protein, 724 aa, Zea Mays
MEVPDILRRCVSRDEAALAVAQKVFKSLYDNTSNTTYVSWLLATLVAIRDVCKLVVKELTSWVIYSDEEKKFNIDIIFGLIRSELLNIGEYNVHLAKLIDGGRNKVATEFAMSLVQALFAHDPVGFTEFQNVLDALSKHTKRPGSPESLQQLIEIARNNVSTTTGFVAVKDEKVKLPKDKKVLATRANKEENTANEITLVDPNQVAVLFSEWCQMCNHVSASDAAYTRFVTQLQQDGLLKGDDISERFFRILTELAVTHSLVSEQIVAPGGSSQQSPQQPHISYFSIDSYAKLVVMVLKYSVEITPNKASILSKILSVTVRSIQKDAEEKKASFNPRPYFRLFINWLYDLTTTDGHHDSSNFQVLTAFANAFHMLQPLRVPAWSFAWLELKGWPFFQRLLVALLKFMEPYLRNAELPEAMDLLYKGTMRVLLVLLHDFPEFLCDYHFSFCDVIPSSCIQMRNVILSAFPRNMRLPDPSTPNLKIDLLAEISIAPRIMSDVDGALKSKQLKTEVDEYLKRPEGSSFLSDLNQKLLLPQNEASVAGTRYNVPLINSLVFYVGIQAVQQLQLNKANPSASVQQINHISPMDIFQIGTATDIFRSLITSLDTEGRYLLLNAIANQLRYPNSHTHYYSFITLYLFSEATQEITQEQITRVLLERLIVNRPHPWGLLITFIELIKNPRYNFWSRSFTHCAPEIEKLFESVARSCGAKVVDEGISVQDGSH

SEQ ID NO: 56214 - protein, 395 aa, Zea Mays
MPGLAASDNSPPAPAPPPRRLSSPLPRRAPSSPSPSASSRAKPRKPSPSPAAFPTDADDSLVLDAKGDYDGALEHLVLASMTMVANGRDIEVATIDVAIGNTYLALARFDEAVFSYQKALTVLKSARGDDHPTVASVYVRLADLYHRTGRLRESKSYCENALRVYAKPAPGAAPDEIAGGLMEIAAIYEALGDLDEALKLLQRALRLLEGSPGQWSTVAGIEAQMGVLYYMVGRYADSRNSFESAVAKLRAIGERKSAFFGVLLNQMGLACVQLFKIDEAAQLFEEARAVLEQECGASHPDTLGVYSNLAAIYDAMGRVEDAIEILEHVLKVREEKLGTANPDVDDEKKRLAELLKEAGRSRNRKQKSLQNLFGTNSQRAKKEAGRRWSNFGFRS

SEQ ID NO: 56215 - protein, 263 aa, Zea Mays
MDPAISKMLYFHVPSRHPSSTPELELPTLLQSAAVMGIGLLYEGSAHALTMKILLGEIGRRSGGDNVLEREGYAVAAGSALGFVALGHGNRAFGFMDTFLDRLFEYIGTKEVYHEKYLNATSADDQSCNPGQMMDGAQINVDVTAPGAILALALIFLKAESEEIAARLNIPNTYFDLQYVRPDFVMLRIIARNLILWSRIQPTKGWVDSQIPETVRCGISNMSEGTIDSDELDAEALFQAYVNIVTGACIALVTSTFWLRSHV

SEQ ID NO: 56216 - protein, 137 aa, Zea Mays
MESKLANTSLNDNNGRKTTSSSAFDRGNNSASRPPQVLEEDVIDPDNMTYEELQQLGEAIGTQSKGLPESVIALLPTSTYKTGIFSRKEKHDECVICCMAYKNRDRLTKLPCGHHYHQACVAKWLQINKPLVACMTL

SEQ ID NO: 56217 - protein, 117 aa, Zea Mays
MQRACSPKAVCCESHHSLALPVSSHLLRLPHGLMLTLRRLLSPVHLAVPTKVCLRQPEIQTFQTHHHLFDATMALPSSACVIYLSAYADPFVITGAPLCLIYTSCRTALPFCFLVTY

SEQ ID NO: 56218 - protein, 409 aa, Zea Mays
MAEIEVVSEGGRRDEDEERRRQQQQGAGEPDPVVDVYSAAAYGDLERLRGFVEQGGAATALREPDGNGYHALQWAALNNYPHVALYIVEHGGDVNATDHARQTALHWAAVRGSTSVADVLMEHGARVEAADVNGFRAVHVASQYGQTAFLHHIISKYGADFDALDIDGRSALHWAAYKGNADTIRLLLFMDANQVRQDKNGCTPLHWAAIRGNLEVCTVLVHTGTKEELTLKDSGGLTPVQLAAEKGHRHLSNVLSNATKVSFEDKFFPGKSRKIGYAPFLFAYLVICLILFLNSIVFAPNFSRITATAGLWSWAAVSLFFASQVMFYRVSRKNPGYIKANSKRIDPKEPLMEIDLTNSSTWTGNWSQLCPTCKIIRPMRSKHCPTCKHCVEQFDHHCPWISNCVGKVS

SEQ ID NO: 56219 - protein, 1217 aa, Zea Mays
MLTKFETKSNRVKGLAFHPRRPWILSSLHSGVVQMWDYRMGTLLNRFDEHDGPVRGVHFHATQPLFVSGGDDYKIKVWNYKTQRCLFTLHGHLDYIRTVQFHHECPWIVSASDDQTIRIWNWQSRTCVAVLTGHNHYVMCASFHPKEDLVVSASLDQTVRVWDIGALRKKSASPADDILRLTQMNTDLFGGIDAVVKYVLEGHDRGVNWASFHPTLPLIVSGADDRQVKIWRMNDTKAWEVDTLRGHMNNVSCVMFHAKQDIIVSNSEDKSIRVWDATKRTGIQTFRREHDRFWILAAHPEMNLLAAGHDSGMIVFKLERERPAFCVSGDTVFYVKDRFLKFFEYSTQKEVQLAPIRRPGSVSLNQSPRTLSYSPTENAVLICFDADGGSYELYIAPKDSAGKADYLQEAKKGAGGSAVFVARNRFAVLERSSNQVLVKNLKNEIMKKSPLPIATDAIYYAGTGNLLCKAEDRVAIFDLQQRLVLGELQTPAVKYIVWSSDMESVAFLSKHVVVIASKKLVHQCTLHETTRVKSGAWDENGVFIYTTLNHMKYCLPNGDSGIIKTLDVPIYITRVIGNNIFCLDRDGKNKLIAVDATEYIFKLALLRKRYDHVMSMIKNSQLCGQAVISYLQQKGFPEVALHFVKDEKTRFNLALESGNIQIAVASAKEIDDKDHWYRLGIEALRQGNVGIVEYAYQRTKSFERLAFLYLITGYLDKVGFMYKIAGQNNNLMGQFHNALYLGHVNKRVEILENAGQLPLAYVLAVTHGLTEIAERIAAELGEHVPLLPEGKSHSLLIPPAPLTACGDWPLLRVVRGIFEGGLDSTGRAELEEDDEASGADWGDEDLDIVDASEVVANGGDYFDAEGEPNEEEGEEGGWDLEDLELPPDTETPKSAGNARSPVFVTPTAGIPVSQIWTQKSSLAGEHAAAGNFDTAMRLLSRQLGIKNFAPLKPLFLDLHMGSHSYLRALAAAPVISVAVEKGWNESASPNVRGPPALIFSFSQMEDRLKAAYKATTEGRFPEALRQFLSILHTIPVIVVDSRREVDEVKELIEIVREYILGLKMELKRKELRDDVTRQQELAAYFTNCKLQRIHMRLVLSSAMALCFKQKNYATAAHFARMLLENSPQEAQARKARQVLQACQDKDDSHQLNYDFRNPFIVCGATYVPIYRGQKDISCPYCGSRFAPSIEGQLCTICELAIVGADASGLVCSPTQMK

SEQ ID NO: 56220 - protein, 786 aa, Zea Mays
MELDLIKQYSQVERIFADRVSKADGDDLVPEYLVKWQGLPYAESTWEKDTDIDFAQDAIDEYKAREAATSILGKTVDFQRKKSKASLRRLDDQPEWLKAGKLRDYQLEGLNFLVNGWRNDTNVILADEMGLGKTIQSVSMLGFLHNAQEINGPFLVVVPLSTLSNWAKEFRKWLPNMNVVIYVGNRASREMCQKHEFFSDKKGGRHVKFHTLITTYEVILKDKAVLSKIKWNYLMVDEAHRLKNCEASLYTTLLEFSTKNKLLITGTPLQNSVEELWALLHFLDPVKFNSKDSFVERYKNLSSFNETELANLHKELRPHILRRVIKDVEKSLPPKIERILRVEMSPLQKQYYKWILERNFQNLNKGVRGNQVSLLNIVVELKKCCNHPFLFESADHGYGGDSIGDRNKVERIVMSSGKLVLLDKLLMVKMLDILAEYLSLRGFQFQRLDGSTRADLRHQAMEHFNAPGSDDFCFLLSTRAGGLGINLATADTVIIFDSDWNPQNDLQAMSRAHRIGQQETVNIYRFVTCKSVEEDILERAKKKMVLDHLVIQKLNAEGRLEKKESKKGGSIFDKNELSAILRFGAEELFKEDKTDEEAKRNLESLDIDEILERAEKVETKGGEGEEGNELLSAFKVANFSSGEDDATFWSRLIQPDPADIIQETLAPRAARNKKSYVEDPQFDKNNNRKRRAVEAQEKPRRRSGRTVETVNSVPLVDGAVAQVREWSFGNIPKKDASRFVRAVKKFGNATQIDLIVDDVGGVLEKAPHEAQIELFDLLIDGCQKSC

SEQ ID NO: 56221 - protein, 305 aa, Zea Mays
MVCGSHQELHRSSSFERNWEESAAESVASNDVVSLLNSSIVSSKVDASNSVLENPVVGSEMWRSKTKDSKPAKSGRLSHEEKKLGKSNDEKKTKPRKSMEFHNIKIGKVELLVTYEGSRLAINDLRLLMDTFHKAEFTGTWRRLFSRVKKGKKFSNHRETLEGSIPENDLNLSDSDVGQPGRHDQLTASWLKRPGDGAGDGFVTSIRGLFNTQRRKAKAFVIRTMRGEGHNDEYQDEWSESDGEYPFARQLTITKAKKLIRRKFRPRVQKNPGLSMQDSLPSSPRETTPYQSDSSRSSYEDFHEQ

SEQ ID NO: 56222 - protein, 1659 aa, Zea Mays
MDASTAGDGDTNTLKRPCKTSPPEGETDKYKRQKRECQDFSPRRYQLDVYEVATRHNTIAMLDTGAGKTMIAVMLIKHFGKINKANNDRKLIIFLAPTVQLVTQQCEVIKSYTDFEVEHYHGAKGVDQWKAHSWQQQLLKYQVMVMTPQVLLDALRQAFLILDMVSLMIFDECHHATGNHPYTRIMKEFYHGSEHKPNVFGMTASPIIRKGVSSDLDCKNQLSELENILDSKIHSVVDREEIELCVPSAKEVNRYYEPRTVSFDDLSEELEILCSKYDGLIIQLHNRSTNQYKDADEITKESRKRLSNSLAKICYCLEDAGLLCASEATKICIERGQRKGWLKGGSDTTDQQSGQNGPILFAEISMLHMEFFQEVLDIIGKRVQQQQGIDALLNSERGCVEAKNMGYISPKLYELMQVFLSFSDPDNVRCLVFVDRKISARVIERTMKKIGQLSCFRVSFLTGGSSSVDALTPKMQKDTLDSFRSGKVNLLFTTDVAEEGIHIPDCSCVIRFDLPRTTRSYVQSRGRARQRDSQYILMIEQGNVKQDDLISGIMRSKASMTGIASNREPEDSHPSFLPTEEINEYHISKTGAKITTDSSISVLNQYCDKLPKDKYYTPRPKFQFTHYGDGYECTVTLPSSAMFQLLVGQKARNMQKAKQLVCLDACKRLHQLGALDDHLSPSVEEPPPEISSKSSISTPGAGLGTTKRKELHGTTKVLSMSGSWGSDRSVTKLQGYKLNFVCDQVGQKYSAFVLLIDASIAKEAATLDIDLYLHDKMVKASVSPCGPLELDAWQMEQTKLFQALLFNSLFGKLFIGSKASKTPREFILKKDDVFLWNKENMYLLLPVDSTLDSHKSVCINWSVIDVVATAVGFMRSIYSDGKCNLTDKLNYEKNGEDLIHLANKSCKGNDLKNMVVLAIHTGKIYTIVVVSDLCANSKFDGTTDKKEAKFRTFAEYFEKKYSIFLCHPLQPLLVLKPTHNPHNLLSSKNRDEDNVVENKNRANSLVHMPPELLIPLDLPIDVLRVFYLFPSLMHRLESLMLASQLRSEIAYRDSDISSFVILEAMTTLRCCEDFSMERLELLGDSVLKYAVSAHLFMTFLNKHEGQLSSRRQETICNATLYRLGIERRIQGYIRDAAFDPRRWLAPGQLSRRPCPCECPVNSEVVTEDIHRIDDKSIIIGKACDKGHRWICSKTISDCVEALIGAYYVEGGLKAAFAVLKWFQIETEIEEELIMEALSSASVRNYLPKVDVVELLEAKLGYTFQMKGLLIEALTHSSQQESGATYCYQRLEFLGDAVLDILITRHLFLSHKDTDEGELTDLRSASVNNENFAQVAVKHNLHQFLQHSSGFLQDQITEYVNSLESSSMDRASLLSSGPCRGPKVLGDIVESIAGAILIDSKLDLDLVWRVFKPLLSPIVTPENLELPRFRELNEWSDKNGYFIGIKCENRGDSTMAILNLQLKDLLLVRQGCGKNKVDAKAHAASLLLRDLEEKGLIIPRNASRVEQLEKNSGTVKHCNNVLDVMDTQNVAPPRQKEVAVLSTTTPGSVLDKPLVVKVKLSKGGPRISLYESCKKLQWPMPTFEFVKVEPSVCSSSCGSSQKVAPQGFAFASTITLHIPNGDVISLTGDGRADKKSSQDSAALLMLYELQRQRRFQVQEV

SEQ ID NO: 56223 - protein, 347 aa, Zea Mays
MADDHYSSKRKYDDPSPPPRRTGFSSGPPPASPPAGGAPSYNSVAPPPDEIQLAKQRAQEIAARIFNAAEAKRPRVDNGDDDVGGFGGGSSLGGSGGGGGGRIGGAGLGFSSSAGGGHGASIPPLSSQSSAPQYSYGGHQGTSKKIEIPNGRVGVIIGKAGETIRYIQLQSGAKIQVTRDHEAEPGALTRQVELSGNPEQISKAEQLIKEVIAEADAGSSGAVSGGRKYNAPQPGAETFQMKIANNKVGLIIGKGGETIKSMQAKSGARIQVIPLHLPAGDTSTERTVHIDGTQEQIEHAKQLVAEVTSEVCFLSLVVSDICDCFALLCFNLSFRLLLVRSVYYIVL

SEQ ID NO: 56224 - protein, 153 aa, Zea Mays
MWVLLGAVGNSLLSLVLKKMLNHERPAPALRSDPGMPSSHAQSIFYAATVLALSLYYWLGTNYLTMILGPATLSLAAYLSWLRVSRGLHTLNQVMVGAVVGSAVGALWFVLWHWLVQEAFASSVLVRVAVILGSSAFCVSFVVYMIRHWLKDE

SEQ ID NO: 56225 - protein, 473 aa, Zea Mays
METADYSGKLFVGGISWETDEDRLREYFGRFGEVTEAVIMRDRSTGRARGFGFVVFADATVAERVTIEKHMIDGRMVEAKKAVPRDDHSIVSKSNTSSIGSPGPGRTRKIFVGGLPSNVTEADFRGYFEQFGVITDVVVMYDHNTQRPRGFGFITYDSEDAVDKALHKSFHELNGKMVEVKKAVPKEQSPGPVARSPAGVGQNYAMNRVHSFLNDFNQGYNPNPIGGYGMRVDGRFGQLSGARNGLSSFGPGYGMGMNVEGGMSGTFGANSGFISNSNGRQMGSYFNGSSNRLSSSIGYLGYDSGSMLSSMSRNFNAGVNYPINPTNMSAFAALGNGGGVNYMGLPSIAPELAQLGNISSLGSGNFSRGAGVNNLSLPSGSYGRSNSTGTIGEPFSASGNAYEVNNPDTYGNSSIYGGTSWRFPSSEVDVPSFSHDLGNVDPNMKSDISANYMGNYSVSNNQPSRVTRCFFFA

SEQ ID NO: 56226 - protein, 381 aa, Zea Mays
MSLCLRAADEERRWEVAGAKGLAHLAAPLVNILTHTDEIKLKAKRIAAVEKKKRCLGMKILSTKEASGGLQRCADYFGMPTAPSESNKEPRPEECVNELGIKQPVQHVASEEQEGVQDDAKADANVMNVSFGKGKSEDSFGTINGTNSGDKIESPSGLAERTLTQPTTKGCSKQRGRSSNGRGNRTKKIEEGNASGLIAVAPESEDDDDDAAFIDGNQAEGGALWDIFRREDVSKLHDYLMKHAHEFRHCNFEPVKQVTHPIHDQCFYLTIEHKRKLKEEYGVEPWTFEQKLGEAVFIPAGCPHQVRNLKSCIKVALDFVSPENVRECIRLTEGFRLLPKWHKVNEDKLEVKKIALHAFNQAIKDITDESSNSNESKWIRR

SEQ ID NO: 56227 - protein, 446 aa, Zea Mays
MVESAKFQAVQARFYEGKEPIQFFVIFQSFQVFKGGLSSGYKRFIAENGIDDESYSEDGLALFRIQGSGPENMQAIQVEPVASSLNSSYCYILHNGNTVFTWAGNLTTALDQELMERQLDVIKVKEIHHFTQDDLMTEDVFILDCHTSIFVWVGQQVDVKGRLQALDAGEKFIVLDFLMENLARETPVFTVMEGNEPPFFTRFFTWDSAKSLMHGNSYQRKLAIVKGGGAPALDKPKRRTTVYSGRSTTQDKSQRSRSMSFSPERVRVRGRSPAFTALAANFESSSNRNLSTPPPVVKKLYPKSVTPDPSNTASKSPAIAALAGSLDHPSQTPALEFMKGGSESEKPKQEGDGKEGVDTVATRVESLTINEDVKENEPEDDEGLPIYLYERLKTTAADPVTEIDVTRRETYLSSTEFKEKFGMTKEAFSKLPKWKQNRLKIALQLF

SEQ ID NO: 56228 - protein, 70 aa, Zea Mays
MPMGRPMDGEDICASGHLVLWGYGRLEQPCKSGTARVSSAHPLQSVPVLGLALFSLYGVVFTVNVCKKKK

SEQ ID NO: 56229 - protein, 1736 aa, Zea Mays
MAPLPPRELLSVIEAALLGSTAPSPAQRVELLHAVRDAAPAFRTLLSYPVPKASDRTQVESKEVRLPGMPPITLDDTDVRTALKLSDELNLNEIECVRLLVDANREWVLYGREPLEIYRLAAGLWYMERRDLITALYILLRSVALDQGLDADLMSEIEDQIQPLFNDGLRQRIITLVKELNREEPAGIGSPSSERYVLDFRGALVERRAIVSRERLSLSHCLALSALIKLTSPKEVKDVFSILKDCAAEANQNSSVELQITYGLLFFLVATFISDALSTSLEKASLSSSDSSFRREFHELVMRTGNNMTIEGFVGVVRLAWSVHLMLTQDRSNSRETSDIWSCLEIICRQNSFEFLREQVLKTAAYQNDDEDIVYMYTGYTHKLMMCFISHPTSRDKIKEIKEKAMTALSPYEPPRGQREDLGRNGEQADQPTKEPFVSLLELVREIYQKVPELGNGNEELWTFVIYAGEDHTNTQTLVAFLGLLSTLASTEVGAAKVYELLQGKTYRSVGWSTLFDCLSIYEEKFKKSIQSSANILPDFPEGDAQALVAYLAVLQKVVENGNLTERRKWFPDIEPLFKLLSYENVPPYLKGALRNSITAFIKVSPILKDAIWNYLEQYDLPVVTAPLGHHTATQVYDMRFELNEVEARRESYPSTISFLKLINALIVEERNISDKGRRFMGIFKFVYEDVFGPFPQRAYADPLEKWELALACLEHFRMVLSMYDIKDDDIYASVNTLAPSSLERQLPLLELLKDFMSGKVAFRNIMNIILVGVDSIINERTTQTYGIILERTVLLSLEIFILVMERDLALADVFRPLYQPLDVILAQSHRQIVALLEFVRYDYLPQIQQCSIKIMGILSSRIVGLVQLLLKADVGKMVIEDYAACLEFRFDDFQVIEDTKDDVGVLTLQLLVDNICRPAPNITHLLLGFDVNGSIEQTVLKPKSQYSCLKIILDNLEKATKPDINSLLHEFSFQLLYELCLDPLTCGPVMDLLSTKKYQFFSKHVGTIGVTPLPKRNSNQSLRISMLHERAWLLKMLALALHISDISSSVYREACMAILYHTFGQCAENFQSTSLIHSHDALTSISDVPAKRNKVLDLLEVLQFRCPDTSTKYPQLLSSLGIESKIEEILRNSATFENGGVYYYSERGDRLIDLDAFREKLLQISQELNSQLTEPEKAGLKESVHHLLKWAWRYNKNLEEQAAQLHMLTGWSQIVEVAVSRRMSLFEDCSQLLFELLDASLNATTSPDCSVKMAYVLTNVSLTCMAKLRDERFICPAGTDSDAVTCLDIISSKQLPNAACNSLLFKLVMATLRNESSEILRRRQYALLLSYFQYCSSILDSDVPPSVLRFLLLEEQDGDDEDITLQKVLKEHNELAHANFSIIRKEAQAIVDLVTKDAFHGSEAGKALSFYVLDALISIDHEKYFLNQLQSRGILRSCLSDVANYLSKVKNKIVREIVDFAKQHQSVFNSILRENMTGTNLLTLEQLSMAVSILSKVWAYEENEECSYIQDLFSLMHSLFSVDFGILNFMQSPNMIENQKSELIAFGLCFSLVSYLYVLATRKNMRFQVSYGRNSDQQHPTLQMVSDLLNSATLALERVGEEKYMLLNKIRDLNELSRKEVDEIIKVCMKQDCISPNDNIRKRRYIAMIDLCCMAGNRDQLITLLLQITECAVTILLIHFQDDASAKGLSSFSDELLPVLERLEHLKEDKVGRSLKLFHRSITTLKEMTIRTITI

SEQ ID NO: 56230 - protein, 319 aa, Zea Mays
MVCGSHQELHRSSSFERNWEESAAESVASNDVVSLLNSSIVSSKVDASNSVLENPVVGSEMWRSKTKDSKPAKSGRLSHEEKKLGKSNDEKKTKPRKSMEFHNIKIGKVELLVTYEGSRLAINDLRLLMDTFHKAEFTGTWRRLFSRVKKHIIWGVLKSVTGMQGKKFSNHRETLEGSIPENDLNLSDSDVGQPGRHDQLTASWLKRPGDGAGDGFVTSIRGLFNTQRRKAKAFVIRTMRGEGHNDEYQDEWSESDGEYPFARQLTITKAKKLIRRKFRPRVQKNPGLSMQDSLPSSPRETTPYQSDSSRSSYEDFHEQ

SEQ ID NO: 56231 - protein, 364 aa, Zea Mays
MEENNRSVEECSRTVPSSELIQENVLSKSSRLMKNLKKLETAYFLTRSKLAKQVGNQINSCNRVVKRTTGSAVGTEASSIDDFSLERQYGRRQRGWVNSFLEGLCKYLSFSKLKVRAELKHCDSLNSSNLVCSVGFDRDREFFATAGVNKKIKVFEYNMIVNEHRDIHYPVVEMSNRSKLSCISWNSYMKSHIASSDFEGIVQVWDVTRSQVFVEMREHERRVWSVDFSIVDPTKLVSGSDDGSVKLWDMNQAGSIGTIKTRANVCSVQFQPDTARSIAIGSADHKIYCYDLRHIRAPYCTLVGHTKTVSYVKYLDASTIVSASTDNSLKLWDLSMSPGRIIDSPVQTFKGHTNTKGTVGYFTC

SEQ ID NO: 56232 - protein, 358 aa, Zea Mays
MRAIATQAPPAVPQYLSGEKTKIGINGFGRIGRLVLRIATSRDDIEVVAVNDPFVDAKYMAYMFKYDSTHGPFKGSICVVDDSTLEINGKKVTITSKRDPAEIPWGNFGAEYVVESSGVFTTTDKASAHLKGGAKKVVISAPSADAPMFVVGVNENSYDSKMNVVSNASCTTNCLAPLAKVVHEEFGIVEGLMTTVHATTATQKTVDGPSMKDWRGGRGAGQNIIPSSTGAAKAVGKVLPELNGKLTGMAFRVPTPNVSVVDLTCRIEKNASYDDVKAAIKAASEGALKGILGYTDEDVVSNDFVGDSRSSIFDAKAGIGLSSSFMKLVSWYDNEWGYSNRVLDLIAHMALVSAAAKL

SEQ ID NO: 56233 - protein, 1075 aa, Zea Mays
MQKDVDGHVPSYPNLPSKLICLLHNVTLHADPETDEVYAQMTLLPVTSYGKEALQLSELALKQPRPQTEFFCKTLTASDTSTHGGFSVPRRAAEKIFPPLDFSMQPPAQEIQARDLHDNVWTFRHIYRGQPKRHLLTTGWSLFVSGKRLLAGDSVIFVRDEKQQLLLGTRRANRQPTNISSSVLSSDSMHIGILAAAAHAAANNSPFTIFYNPRASPTEFVVPFAKYQKALYGNQISLGMRFRMMFETEELGTRRYMGTITGISDLDPVRWKNSQWRNIQVGWDESAAGERRNRVSIWEIEPVAAPFFICPPPFFGSKRPRQLDDESSEMENLLKRAMPWLGEEICIKDPQTQNTIMPGLSLVQWMNMNMQQNSFANSAMQSEYLRSLSNPNMQNLGVADLSRQLNLQNQILQQNSIQFSSPKLPQQMQLANELSKASLPLNQIGVGTKPQEQTQDPNNLQRQQQSMNQLLPLSQSQTNLVQAQVLIQNQMQQQKQPTSMAQNQQPAASQSLILPQQQQQQQQHQQQKLVHQQQQILLQQQQLQQQQQLQQQQQNQQQLNKMAAQMPNLASHQPQLSDQQLQLQLLQKLQQQQQSLLSQPAVTLAQLPLIQEQQKLIIDMQQQLSNSQPLSQQQTMPQQSIQVPSRATPPPTTTVQQESQQKLPQKHVGFTDTSHTTIPPTTSVNTISVVGSPLMATGATHSVVTDEIPSCSTSPSTANGNHIVQPVLGRNQLCSMINYEKVPQSTPMSIPSSLEAVTATPRSIKELPKLNSNVKQSVMASKLPNAGHVAQNLTNNAPPTDYPETASSATSVWLSQADGLLHHSFPMSNFNQQQQMFKAAAPETDIQGADPSNNTLFGINGDGQLGFPMGADDFLSNGIDASKYQGHISTDIDGNYRISKDGQQEISSSMVSQSFGASDMAFNSIDSGMNDGGFVNRTSWPPAPPLKRMRTFTKVYKRGAVGRSIDISQFSGYDELKHALARMFSMEGQLEERQRIGWKLVYKDHEDDILLLGDDPWEEFVNCVKCIRILSPQEVQQISLDGDLGNNILPNQACSSSDGGNAWRARCDQNSGTHI

SEQ ID NO: 56234 - protein, 684 aa, Zea Mays
MMMDKLEVPRRKVRKDWYVGLNPDPVDRSHPDVNDSSIAKVATSNETPLIDQNKSGSMKGGEALKNSSEQHSAETKLNSTQVQENVQLPNNVNDTHSESISSVTTKAENTSQTHTQRRLLETADKSDDQTGSSETHESDSGAKAAATVENSEPLDEDADASFDLFRDPEDLPDEYNYDYDDYVDDRLWGDEDWKEQEHEKEEDYVSIDAHILSTPVIADIDKDGVQEMVIAVSYFFDHEYYRDSDHAKELEGIDMGKYVASSIVVFNLDTRQVKWAADLDLSTDAVNFRAHVFSSPTVVDLDGDGYLDILIGTAYGLFYVIDHRGKVRNKFPLEMAEIHAPVIAADINDDGKIEMVTTDSHGNVAAWTAEGEEIWEVHLKSLIPQRPTVGDVNGDGHTDVVVPTVSGNIYVLSGKDGSKIQPFPYRTHGRIMSPVLLLDMSKHGDNAKGLTLATTSFDGYLYLIEGSSGCADVVDIGETSYTMVLADNVDGGDDLDLIVTTMNGNVFCFSTQSPHHPLKEWRSSNQGRNNAAYQYNREGIYVKHGSRTFRDEEGKNFWIEFEIVDKYRVPYGKQAPYNVTVTLLVPGNYQGDRRIVVSGVYHQPGKQRMMLPTVPVRTTGTVVVEMIDKNGLYFSDEFSLTFHMHYYKLLKWLLLLPMLGMFGVLVILRPQEGAPLPSFSRNID

SEQ ID NO: 56235 - protein, 145 aa, Zea Mays
MAANHQEVWRITSALENHKYEIADWDLGAGIYIDFYVLKNSMQERNAMDDSDSLEEMSESCRSFFGRLNESLLVWGSKLPVESRACYSKMAEELCALLVDTPSETLNLPMGCLLTMLNAPVPDESRSSYLQDALSVFTEILCSDP

SEQ ID NO: 56236 - protein, 508 aa, Zea Mays
MTFSMDMDLNASPVPDDDEQQPYNEPVEAEYAQEEHVESAVATLRREREERRKRLKREQQDDGSRLHSQQIRVDYAPQPKRHSRIKEAPQGWLDCPAFGEPIDKIIPSKVPLDETFNESVPPGKRYSSKQLVNKQRKAGREIGLVIDLTNTTRYYSPAEWTKQGTKYAKIACKGRDAVPDNESVNKFVYEAMIFLDRQKHSKNPKYILVHCTHGHNRTGFMIIHYLMRTHVSCVAEAINMFAQRRPPGIYKRDYIEALYSFYHEVPENMMIACPPTPEWKRPDDLDLNGEAKQDDDDDNGDPEPPRNESEDKIITNDDVLGDEVPYDQQEALRVLCYKLLEMPLIRGHSQFPGSHPVSLNSENLQLLRQRYYYATWKADGTRYMMLIMRDGCFLIDRNFCFRRVQMRFPHKSLEGLHDMTLIDGEMIIDTVPDSGLKRRYLAYDLMALGAVSKTKLPFSERWKMLEDEIIRPRYYEKNKFESGSKSNPLYKYDMELFSVSDSRIPPEL

SEQ ID NO: 56237 - protein, 185 aa, Zea Mays
MMVPQQQQQHGGAPAAAIYPSPQFGYCWYPPDFQYQQALASPQALQNYYAQLYGLTTSPSAAAAPYHHQYLGYMAPPPPTPRMILPPPPPLAAQQVTAVQPLVQHPPPPAQQVTVQPLLQHPPPQIHAPFFPAPSLPQHNFRLHPPPQAMAVLPPNTTGGSLPPADQAAAPAARATNASSTRPGA

SEQ ID NO: 56238 - protein, 489 aa, Zea Mays
MAKKLGKKARKFARKNLQSAAKRNRKIRNQFKHRRGPRGGGSAGREDGDEHVLQRVLDPTMVTDDAAATLIHGLEFPEDDAELDADLSDSDGYLSEDPGCPYYSDSEDEKAAKDCIMEEGLDRQNDDMNRDIKKQKKKLKKLLDKDPEFANFLEKWQSELESSRSKGDSDEEGMDSMDDDDDSNDGNLPNAKVLTRKTISEWCQLVSKEPKAPALRNLLNAFRDACRYGVHSDGPLMQRFQSARVFYQIIMFVLSESDNIFRALLEIQDDVNKGKIMNLRNSKKWLTVDSLIKSYLSSSLDLLSQLTDNKILAFVLTRLRVSVVLFSAYPSTSSRLVKILFRLWASGDRSLSLSAFLMIREVASLLPDCLDHCLTKSYNTYLASTNLVNDRNTKHIYFLMDCLVELYSLDVQKSYERAIISVEQLNAILRQASKTKEKEDLRKIDNWQYISCVNLWVRFLCCHYKDYNLHPLFSQVLQSDVLSNSIVAL

SEQ ID NO: 56239 - protein, 772 aa, Zea Mays
MPNLVTMAEEFKLSDNPCQIMLRSLFELEDVCTGASARRSIPLLVDLLKPMPDRPGAPLIALHLLTQLAEGSESNKIAMAEAGALDALTKYLSLSPQDSTETTITNLLGILYTNPDLLYHESSRSTSNQLVAVLRLGSRSSRLSAVRTLQKLFDSENIRDTEVARQAIQPLLDMLESGTEIEQQAALGALIKLSAGNIAKDSAMFDVEGNTLENLYKVLSFSSSLELKKDAAQLCYILFENSTVRASPIATECLQPLISLMTSGSSLAIEPAVCALNRLLDEDYNAEIAATSEVIDLLVSFVPGTNYQLSEACIGALIKLGKDRPNCKLDMVKAGIIEHALDMILDVPVSVSSSIAELLRILTNNSGIAKSSAAAKMVEPLFLLLRRPDVTMWDQHSALQALVNILEKPQSLAALKLTPSQIIEPLISFLESPSQAIQQLGTEVLSHLLEQEHFQQDITTKNAVVPLVQLAGIGILSLQQTAVKALENISQSWPKAVADAGGIFELSKVIVQDDPQPSQALWESAALVLCNVLRYNSDNYVKVSMAVLVRLLNSTMESTVTIALSALLVQEKSSSRCAVAMAEAGAVRALLELLKSHRCEESAARLLEALINNSRVRETKVAKYAIAPLAQYLLDPQSKNQSAKFLVTLALGDIFQHEALARASDSVSACRALVSLLEDQPTDDMTTVAICALQSLVMHSRTNRRAVAEAGGILVVQELLLSPNVDISGQAALLMKYLFSNHTLQEYVSNELIRSLTDHICDIQQLQKGSVF

SEQ ID NO: 56240 - protein, 567 aa, Zea Mays
MWEPPSKLSVSGKDFWLTLIARRSRHFAGTRFLKRGVNEKGRVANDVETEQIVFEDTSDGIPTQMASAVQHRGSIPLVWFQETSRLNIRPDIILKPDVDYKATRLHFENLALRYGNPVIILNLIKTREKKPRESLLRAEFAKAIHYINKSLPDDKRLKFLHMDLSKLSRRKGTNVLALLTKVASDVLDLTEFLHCEISTSTKPDDTSSGERTAAKPHDDRSSSDQTECAAKLAPLLLQKGVLRTNCIDCLDRTNVAQFAYGLAALGRQLHALGLTEAQKIELHDPLADDLMDFYEWMGDTLAIQYGGSAAHNKIFCEQRGQWKAATQSQEFLRTIQRYYNNAYTDHDKQDAINMFLGHFQPQQGKPALWKLDSDQHYNIGRQGTLKEEIGRSFIKRSLSDGNILLENNLPVTSCNNETNNTELLPMQQLDDIREPTDSAPEISICEPNPCSSVNYGRVPGRHSISEERQSYLKRLGYPELHSSNFLDLDLLSSSGNSCDEEVFERSSLINSPMDVVSVESSTSYSEQGHTDEGRDDMDLSRSSSQVSDVRDYSDRFAHWVADGGMLW

SEQ ID NO: 56241 - protein, 225 aa, Zea Mays
MELDIQNFMQNPQLQEFEFQNFPTSYLRCAAHRVAQHYGLETIVADSLVEGSVSRIVARKTAESRYPAIFLSEVPSNQARNDHETAEKLKFVIYQRPKAFQNGSADSRNKSGVPKTVDERIEEYNKARARIFNGSISADSDAASIMGTLSTGKDEPVNVDPSVDETKVSTMNSRSRVAVFKDTEKDRSDPDYDRNYKSLCSMTLVMCNLLACPQTSILCTLASLI

SEQ ID NO: 56242 - protein, 845 aa, Zea Mays
MAPTVPSAAKSASPSQPSGKSEVTDLKQQLRQLAGSRAPDADAQRRDVFKRVISCMTAGIDVSAAFGEMVLCSATSDVVTKKMCYLYVGAHARAHPDLALLTINFLQRDCQDQDPTIRGLALRSLCSLRVPNLVEYLVTPLTTGLKDPSAYVRMIAAVGAAKLYHISATACIDADLPASLKALMLSDPDAQVVANCLHALQEIWALEAAKSEAAAREIETLHSKPVVFYLLNKIKEFSEWAQCIVLELASKFLPSDNNEIFDIMNLLEDRLQHANGAVVLATIKVFLHLTMSMTDVHQQVYERIKAPLLTLVGAGSPEQSYSVLCHLHLLVMRAPMLFSSDYKSFYCQFSDPSYVKKLKLEMLTAIANESNTYEIVTELCEYAGNVDVPIARESIRAVGKIALQQYDVNAIVDRLLQFLEMDKDYVTAETLVLVKDLLRKYPQWSHDCIAVVGNISSKNIQEPKGKAALIWMLGEYSQDMHDAPYILENLVENWDEEHSPEVRLHLLTAVMKCFFKRPPETQKALGATLSAGLSDTQQDVHDRALFYYRLLQYNPNVAERVVNPPKQAVSVFADTQSSETKDRIFDEFNSLSVVYQKPSYMFTDREHREPFEYSEDLTSLTVGAEDPENVISAQRYQENDNDLLLSTSDKEDNGTRASNGSSTSAYNAPSDLISPSLISSQTPAETSLVNTGGPTHSSQSNFSLDDLLGIGVTEAPAPTPPALTLNSKPVLDPGTFQRKWGQLALALSQECSLSPQGAASLMNPQSLIRHMQSNYIQCIASGGQPPNYKFFFYAQKDGATAFFLVECIVNTASAKAQLKIKADDGTAAEAFSTLFQSALSKFGLS

SEQ ID NO: 56243 - protein, 153 aa, Zea Mays
MKATLKGRYEGDKATAATTLAAPAGDLRLKASATEAAFTNGPSLRGLTLTLEKPGAFLVDLKPHNQAPAAAASSTPTRTGSTASPPSSPSSTPTRTHGSSPSPGSSPEGTPSRAPTRPPPSCSASSGAGTLSPAAPSRLRRHSICRTKAKHQS

SEQ ID NO: 56244 - protein, 55 aa, Zea Mays
MLRRHTCFKHSFRSFSSEFILYVNNIPLLFLMTIQTFFLFFSRGSGAWPEPLLAY

SEQ ID NO: 56245 - protein, 433 aa, Zea Mays
MEPHLTEDKPVRIDQESSSTSNRDAEASTSTSMKPVKTEEAGADLLPKEMNIMTISDDKADGHNDKEGEGVTLDGTGTETGQIIVTTIGGHNGKPKQKVSYMAELVVGTGSFGIVFQAKCLETDETVAIKKVLQDKRYKNRELQTMQLHDHPNVVQLKHHFFSTTQKGEVYLNLVLEFVSETVYRVAKYYNRMNQRVPIIYVKLYAYQMCRALAYIHRVVGVCHRDIKPQNLLVNPHTHQLKICDFGSAKKLVPGEPNISYICSRYYRAPELIFGATEYTTAIDIWSVGCVVAELLIGQPLFPGESGVDQLVEIIKILGTPTREEIRCMNPNYSEFKFPQIKAHPWHKLFGKRMPPEAVDLVSRLLQYSPNLRCTAVDACAHPFFDELRDPKACLPNGRPMPPLFDFTAAELEGLPAELVHRIVPEHMRKEVN

SEQ ID NO: 56246 - protein, 498 aa, Zea Mays
MRMKDALIELSKAVQTGPCANLVPVLFGEKAPMRSKDAMKFSPFNKNLDDSQKEAISKALGSRDVFLLHGPPGTGKTTTIIEIILQEVKRGSKILACAASNIAVDNIVERLARYRTKLVRLGHPARLLPQVLDSALDAQVLRADNSSLAGDIRKEMKVLNSKLLKAKDRNTKRDIRKELKTLAKEERKRQQLAVTDVLKNADVVLTTLTGASSKKLNGITFDLVVIDEAAQALEVACWIALLKGPRCILAGDHLQLPPTIQSVEAEKKGMGKTLFERLTEAYGEEITSMLTVQYRMHEHIMSWSSKELYNNKIKAHSSVAGHMLYDLEEVTRSSSTEPTIVLIDTTGCDMEEVKDEEESTMNEGEAAVSIAHAKLLVESGVNASDIGIITPYAAQVTCLKMMRNKDAKLKDLEISTVDGFQGREKEAIIISMVRSNSKKEVGFLSDHRRMNVAVTRARRQCCLVCDVETVSSDRFLKRLVEYFEENGEYLSASEYQSS

SEQ ID NO: 56247 - protein, 772 aa, Zea Mays
MFRTVTQAMNIVHISKEDQESVFAMVSAVLWLGDVSFTVIDNENHVEIIVDEASKTVSELLGCSIEDLNLALSKRHMKVNNENIVQKLTLAQATDTRDALAKSVYASLFEWLVEQINKSLSVGKRRTGRSISILDIYGFESFDKNSFEQFCINYANERLQQHFNRHLFKLEQEEYVEDGIDWAKVDFEDNQDCLSLFEKKPLGLLSLLDEESTFPNATDLTFANKLKQHLDSNSCFRGERGKAFAVRHYAGEVAYDTSGFLEKNRDLLHMDSIQLLAKCKTSLPKMFASKMLVQSDNSMSVPYRSSAADSQKLSVAMKFKGQLFQLMQRLESTTPHFIRCIKPNNLQLPAIYEQGLVLQQLKCCGVLEVVRISRSGYPTRMTHQKFARRYGFLLEDVASQDPLSVSVAILHQFNILPEMYQVGYTKLFFRTGQIGNLEDTRNRTLHGILRVQSCFRGHQARHHARERTRGVLTLQSFIRGENARQIYSSLLRKHRAAVVLQRNVRCWLARRYFINVRKASVIIQSGIRGSLVRRCNGNIDLINVLREFESKQEAHGDQILIKASVLAELQRRILKAEATVREKDEENEMLHQRLQQYENRWLEYEQKMKAMEEMWQKQMRSLQSSLSVAKKSLVLDETPRMSDSSVDQSWESNGNHHVSSGSQLVPHTGGREMNAGLSVISRLAEEFEQRSQVFADDAKFLVEVKSGQADASLNPDMELRRLKQNFDSWKKDFSGRMRETKVILNKLGNGNESSPNSVKRKWWGRLNTSKFS

SEQ ID NO: 56248 - protein, 1256 aa, Zea Mays
MGGSESHVTPFAKAGVFSVMSFWWMNPMMKTGYEKPLEEKDMPLLGPSDRAYSQYLVFLEKLNRKKQLRAHGNPSMFWTIVSCQKTGILVSGLFALLKVLTLSSGPVLLKAFINVSLGKGSFKYEGYVLAVAMFLCKCCESLSQRQWYFRTRRLGLQVRSFLSAAVYKKHQRLSNSAKLKHSSGEIMNYVTVDAYRIGEFPYWFHQTWTTSVQLCIALAILYDAVGLATVAALAVIIATVVCNAPLAKLQHKFQSRLMEAQDVRLKAMSESLVHMKVLKLYAWETHFKKVIEGLREVEIKWLSAFQLRKAYNSFLFWTSPILVSAATFLACYLLKIPLDASNVFTFVATLRLVQDPIRQIPDVIGVVIQAKVAFTRITKFLDAPELSGQVRKKSCLGDEYPIVMNCCSFSWDENPSKPALKNVNLVVKTGQKVAICGEVGSGKSTLLAAVLGEVPKTEGTIQVCGKTAYVSQNAWIQTGTVQDNILFGSSMDRQRYQETLERCSLVKDLEMLPYGDRTQIGERGINLSGGQKQRVQLARALYQNADIYLLDDPFSAVDAHTATSLFNGYVMGALSDKTVLLVTHQVDFLPVFDSILLMSDGQIIRSASYHDLLAYCQEFQNLVNAHKDTIGVSDLNRVPPHRENEILIKETIDVHGSRYKESLKPSPTDQLIKTEEREMGDTGLKPYILYLRQNKGFFYASLGIISHIVFVCGQISQNSWMATNVENPDVSTLKLTSVYIAIGIFSVFFLLFRSLAVVVLGVKTSRSLFSQLLNSLFRAPMSFYDSTPLGRILSRVSSDLSIVDLDIPFGFMFSIGAGINAYSNLGVLAVVTWQVLFVSVPMIVLAIRLQRYYLASSKELMRINGTTKSALANHLGESIAGAITIRAFQEEDRFFEKNLELVDKNAGPYFYNFAATEWLIQRLETMSAAVLSFSALIMALLPQGTFNPGFVGMALSYGLSLNISFVFSIQNQCQLASQIISVERVHQYMDIPSEAAEIIEENRPAPDWPQVGRVDLKDLKIRYRQDAPLVLHGITCSFHGGDKIGIVGRTGSGKTTLIGALFRLVEPTGGKIIIDSIDITTIGLHDLRSRLGIIPQDPTLFQGTIRYNLDPLGQFSDQQIWEVLGKCQLLEAVQEKEQGLDSLVVEDGSNWSMGQRQLFCLGRALLRRCRILVLDEATASIDNATDAILQKTIRTEFRDCTVITVAHRIPTVMDCDMVLAMSDGKVVEYDKPTKLVETEGSLFRDLVKEYWSYTSN

SEQ ID NO: 56249 - protein, 579 aa, Zea Mays
MSSNEDSEPECGRLVGTVRRHMPIDTRDPVGAVIHFYLGDSFDSNCESNVLRKLQSQSTWYLTGLGSLATTQREYVALHAFRRLSVLMQNAILQPSPEHFPKYQEQPPAIPDCFTPNFVDHLHRSFNGPQLSAIHWAATHTAAGTSNGVVKKQEPWPFTLVQGPPGTGKTHTVWGMLNVIHLVQYQHYYAALLKKLAPESYKQVSGSTSTSLETVAAGSIDELLQSMDQNLFRTLPKLCPKPRMLVCAPSNAATDELLARVLDRGFIDGEMKVYRPDVARVGVDSQSRAAQVVSVERRTDQLLLMGREDVIGWLHQLKGREQQLSQEISYLQRELNMVAAAGRSQGSVGVDPDVLAQRDRNRDILLQKLAASVESRDKVLVEMSQLLILESRFRPGSSFNIEDARASLEASFANEAEIVFTTVSSSGRKLFSRLSHGFDMVVIDEAAQASEVGVLPPLALGAARCVLVGDPQQLPATVISKAAGTLLYSRSLFERFQQAGCPTILLSVQYRMHPQIREFPSKYFYQGRLTDSESVVKLPDEAYYRDALMAPYIFYDMSHGRESHRVEMPSAGIQGCYEY

SEQ ID NO: 56250 - protein, 292 aa, Zea Mays
MHKAYYRKGAACIKLEEYQTAKAALELGSSYAPGDSRFTRLLKECDECIAEESSQAPAKNVEAPVAATVEDKEDVANMDNTPPVVEPPSKPKYRHDYYNSATEVVLTIYAKGVPADSVVIDFGDQMLSVSIEVPGEEPYHFQPRLFSKIIPEKCKYQVLSTKVEIRLAKAEQVTWTTLDYSGRPKAIPQKISTPAETAPRPSYPSSKSKKDWDKLEAEVKKEEKEEKLEGDAALNKFFRDIYKDADEDMRRAMDKSFRESNGTVLSTNWKDVGSKTVEASPPDGMELKKWEI

SEQ ID NO: 56251 - protein, 490 aa, Zea Mays
MTQALHYDVRRGPHSIGSHVNCRRAASAAFQENVGRQGTFPHGIDIVNTTDYFALASRSNSYLNVAVSVAQCKEYLYPFADELLCNKITHWEKSLRELAAQALALLVQYDMNYFGGHALEKLVPCTLSTDLCTRHGATLAAGEVALKLYQLGFTFTTDMQKTLSGIVPAIEKARLYRGKGGEIMRSAVSRFISCISIAGISLNDRTKKCLLETLNENLRHPNSQIQCAAVEALKHFIPTYLVSSGEKIASDIISKYVALLDDPNVAARRGAALALGILPFKFLMLKWMPVMSKLCSSCTIEDKPDDPDAEARVNSVRGLISVCETLTASFDQLSNGDSLYAYIKDYVMRALFRALDDYAVDNRGDVGSWVREAAMDALVRCMFILCKRDIVALRAVSATGHDSELGDMEVNASSTAYRLFDSGIAQDLVAGIAKQAVEKIDKIREIAIKTLQRILYHQEHLIPFIPHRELLEEIIPNSRDLEWAVVCRSL

SEQ ID NO: 56252 - protein, 351 aa, Zea Mays
MRNSFSLDNVFRYDVAVDVAPEVRWLSEDKYRNLKVVVEIDEAVDAEKAAEKELQRRHKALGLLRIVADRGLQIGDLVVLDIFAESINNDGSRGEKISSAESTGFHLDTEENSNLVPGFLGSLIGIRAGETRSFPIQFPESFERESLRGVRAQFTVVCKELFYRELPVMDDSLAVKLLPGCTTIDEVRERILKRCKEVEKTAIEQATDNAILDQLGKLVEVDVPRALFQEQGQQLYGAKLLQLQAERKLDKDQLASLSTKRSVQAYLEDEKENITRIIKQMLAVGDIFKSENLQYSTDQLVKEVENSIAEFKQYNQDYDEDNIRQQVQDVLEAAKVLEWLKENCSVEYIRR

SEQ ID NO: 56253 - protein, 198 aa, Zea Mays
MANKQRGCHQYHNESEVNMSSDDEDHSFYQSLEAFQVEENWDFSYLLDILICSGIIVVDWQLICKSWYLPGYPVGPHVFDRLERKYNKIATWAKPERRLLFDLVNSILSEVLAPCVDVHPWVQPSRHCVAFWGPEGPVEKVWQTIVRLQEDCVTRHPDEMVLDTNWLEVGTDINMVGKQIARMLHGDLLEEVIVDFLG

SEQ ID NO: 56254 - protein, 441 aa, Zea Mays
MGRAVLSVGPFSTARLAIYTQQSLLISIRAVGHSLSFPVPVAIYHFPRLRFGPNLRLRLRLHLHLLAAAAPLLSPQSEANSPSASTATMSRDRYFHRLLDLHLHANDDLFFPFPTPASSCPYITASSAHHRFLLDDHPFYPTSCPLGITSRSPIDDTFDLDLLLPLPLHAAVSAPPCAAFDFDPFLLDTLGHRISVLERALALAPPRRKYTYAAEANGRKLKWTAEDRPAGGRNLKWEAELRTPHTDGFDRKWKWESKESATGSTKVKWAKEIKGKGCLEPWSNSYSVEETYGEDDHADDDREKKKPTGVQKKVKGENKQQQKKQGNVEIVEIEDNTAGCVAIRKAFEMNHCKGKRKELSPQDAALLIQMNYRAHLAHRSQVLRCLRDLAVAKAKLKEIRSFFYNITYRRRIAYDNEERQRFAEKIIVLLLTVDALELFTI

SEQ ID NO: 56255 - protein, 106 aa, Zea Mays
MSTEINVVMDLSKKMRLKLGATSEPVKPLEKPSVGLVKDELVKPSEKPSSGPVTGEPVKPPEKPSAGPVKDEPMKPSEKPSAEPVKNEPSEPALAGENNRAPRPAV

SEQ ID NO: 56256 - protein, 434 aa, Zea Mays
MATSPLPTATASASKKRRSRGGTLALDEDVALDALMDFVKLGKDGKFHSAIYHKFLYAVVHAADPVDMLLELLVSKYFKYTDIRYFTYTSLDKIANSLGSKTTGSGKDALQNGSDESKNRSSIFIHNIYNLLAHVPLMDFQKESTFDMWSTVGLSSKGENDSSKDTSTYINKKLKLKFTKAWLSFLKLPLPLDVYKEVLASIHQNVIPSMSNPSILCDFLTRSYDIGGVISVMALSGLFILMTQHGLEYPKFYEKLYALLTPAVFMAKHRSVFLQEVDESDSNATREASQSKKIGSDPFNQNDADPAKSGAMRSSLWEIDTLRHHYSSAVSRFVVSLEEDLTVRAKTTEMKITDFSSGSYATVFRDEVRRRLKQVPLAFYRTTPTSLFLGSDFPGWTFGDQHNSTVETTVEGNGKVEAVGASDSTPSKRLRMET

SEQ ID NO: 56257 - protein, 142 aa, Zea Mays
MAGKGAKATAAKSADKDKGKKTGGPVSRSSRAAPHSAPKKDVYQLFAEKVRDNKQLESRWAIMQETRVEYFRGKDFNTFVKNHPEVREILGPDKDLEVEDIVNTLLTKNLVIRCDRVMKTVRPGKKKLSSWPAHLEIHNGVC

SEQ ID NO: 56258 - protein, 1681 aa, Zea Mays
MSFRKRQPSSNGASINLAPLGFPSQELEKVNPVNSVMSTDFESMDGVDIDMREVYFLIMHFLSHGPFKRTFGELCNELLEHQLLPRRYHAWYSRGGFHSGEENDDGISLPLDYVKLAERYPHIGKDHLVKLLKQLMASSYHPHNLIGRVSPNAADVPTLLGSNSFSLLPSDRQDKGTPRLPSYLRWPHIQTDQVHGLSLREIGGFTKHCRAPSVRASCYAIAKPSTLVEKMQIIKRLRGHQNAVYCATFDRTGRYVITGSDDRLVKIWAMETAFCLASCRGHEGDITDLAVSSNNSVVASSSNDFIIRVWRMPDGMPVSVLKGHTGAVTAIAFSPRPGAAFQLLSSSDDGTCRIWDARYSQQPPRLYTPKPPDVAPGKSGDASSSAAQVQPTNHQILCCAFNANGTVFVTGSSDTYARVWNACKSSSDEHEQPIHEMDLLCGHENDVNYVQFSGCAVASRSFSSDSSHTSKEENSLKLRNSWFTHNIVTCSRDGSAIIWVPRSRRSHGKIGRWTRAYHLKVPPPPMAPQPPRGGPRQRYQPTPRGVNMIVWSLDNRFVLAAIMDCRICVWNASDGSLVHSLIGHKESTFVLDVHPFNPRIAMSAGYDGKTIIWDIWEGKPVQIYETGQFKLVDGKFSPDGTSLILSDEVGRVFIIGTGQGESQKDAKYDQFFLGDYRPLIRDTNGSVIDQETQLAPYRRNMQDLLCDAGMIPYPEPFQSMYQKRRLGTLGLEWRPPSVNFAVGPTYNATTGEYQTIPIIDPDRWEPLPEITDFIELEPENEVISDDTDSEYNGMDEYSSEGEQDIMSGDSSGTSYSSGEIDADNPDSAHLRRSRRKKKKSEADLVTSSGRRVIRKRFLDDPGVATVSRPHRGRKSRNGCSSKKKRSPKSRGLRPRRRAAETALITFPKKGVSTEEDEDDSESFSDSELNTDSTEAEQLEWSGQLRTRREINSPFDIDDVTDPSQFTDNKENSGTGKKLVLRIPRRDLRTQFPLGSGKAECSIQDKAVKSLSLANHEPVEHELTIEPGHSPASKAELTIDGDLHDSSAVCSNNSIRWGEVKMRSSKRCKYSEPAGGLWSSSNNVALQDIEGSSSQQIPHEYGDGIQPSVVQNVQEVQHGTILDNIPENNSTDEHTRENFGDLEKIANNINAHADGVNDTVQVPNTSQPQLKVKFKSRGSADAVGNIMNSKHVKDSVQCGDDSSINQPRNADFYIVPKSSQECLDKSTSLHDSKKPYLDASKKYTAVYKRSKRKNKKKMDSDECPNEDSTSISNDDGGYQPAEYSPVAAASSRLRRSARKSFAYNINGTTQDDISEVKVSYGSHEASTSGRRVVTDVREGMWRQNSRSVGLRSARNKRESNSFLDTHPLGRRHQVSFKYSWLMLLEHEDSYRYIPQLDDEVMYLGQGHEEYLKQVQSSEFCPWNRIKGLKAVELCKIQGLDYATYRGSGESCCKLTIEFVDCTSSGFGKTFMITLRELVNFPDFLVERTRYEAAMERNWTHRDKCKVWWRDEEGQVGGTWWEGRVMAVTPKSPDFPESPWEKYVIQYKEDGSDHAHSPWELHETGSLWDPWKHPHMDLTVRDKLLSEMENLQEMSHRDQDHYGVFKLDKVAEKSDFINRFPVQFSIEVIKARLANKYYRTLGAVRHDTTVMLSNAESYFSKSSEMTKKIRKLSELLDQIFSSL

SEQ ID NO: 56259 - protein, 116 aa, Zea Mays
MLAKCYFTNGMAATSQTLNDVYCVGFQNGASQSKDGKDIVLMGDLVLSNKLVIYDLENRVIGWTDYNCSSSIKIKDDKTGATSTVNSHDLSSGWKFHWHMSPVLLLVTTVCSYLIC

SEQ ID NO: 56260 - protein, 921 aa, Zea Mays
MMRKCHMNTCPVGIATQDPVLREKFAGEPEHVINFFFMLAEELREIMANLGFRTITEMVGRSDMLEVDPEVVKTNEKLENIDLSLILKPASEIRPGVAQYCVEKQDHGLDMALDNKLIDLSRTAIEKQVRVFIETPIQNTNRAVGTMLSHEVTKRYHINGLPAGTIHVKFTGSAGQSFGAFLCPGVTLELEGDSNDYLGKGLSGGKIVVYPPRNSSFSPEDNIVIGNVALYGATMGEAYFNGMAAERFCVRNSGAQAVVEGIGDHGCEYMTGGTVVILGKTGRNFAAGMSGGIAYVYDVDGKFSARCNNELVDLYHVEEEDDIITLKMMIEQHRRNTESVLARDILSDFDNLLPKFVKVYPRDYKRVLENMKLEKSVANHAKEPKMVNGISVTTKKVQPDQSASRPTRVANAKKYRGFITYERESISYRDPKERVKDWKEVAIESTPGPLLNTQSARCMDCGTPFCHQESSGAGCPLGNKIPEFNELVHQNRWREALDRLLETNNFPEFTGRVCPAPCEGSCVLGIIENPVSIKSIECAIIDKGFEEGWMIPRPPLQRTGRKVAIVGSGPAGLAAADQLNKMGHFVTVFERADRIGGLMMYGVPNMKTDKIGIVQRRVNLMAEEGVTFVVNANVGSDPLYSIERLRSENDAVILACGATKPRDLTIPGRELSGVHFAMEFLHANTKSLLDSNLEDGKYISARGKKVVVIGGGDTGTDCIGTSIRHGCTSLVNLELLTKPPSNRAADNPWPQWPRIFRVDYGHQEAATKFGKDPRTYEVLTKRFIGDENGKVKALELVRVKWEKVDGRFQLKEIQGSEEIIEADLVLLAMGFLGPEASIAEKLGLEKDNRSNFKAQFGDFATSVDGVFAAGDCRRGQSLVVWAITEGRQAAAAVDKYISRHDQNVAGDITPFGAGLVQPVGA

SEQ ID NO: 56261 - protein, 107 aa, Zea Mays
MARLPLSTRTRKRNLTFRNVTSAIMLMYYYILALLVLSHKWKCWKIERRIKVKELRSQRMYHLICESDVKCINDLRMDRRTFHILCDMLRDVGGLRGTRNTPLEEIV

SEQ ID NO: 56262 - protein, 703 aa, Zea Mays
MSSLLLRVLLIQLAAVECLSAAIPGCLTQCGGVEIPYPFGVGTNCSRKGFRIKCINGSAGEEIPVLLPTTRYQNIRVLNLSVSPLPEARVLLPVAWQCFNATGGVTGIYSGDVDFNPEGVYRISNTQNELFVLGCDTYAFTKGVRVHNVNARFPYRYFTGCITVSVDDKDPRDGACAGLGCCRVDIPPGITDTSMTFSSTWTRANQTFCPCDYAFIVEKGNYTFKASDLVSHTPDNRLPLDWWTMPLRLDWAIRDNNGDSMTSISCAQAPNEPDYGCRSKHSECTNSTNGPGYFCKCAHGYDGNPYVQSDGECTNINECQDPKSHNCSSGSKCIDTDGGYYCQCNFFRRGQQCDPLIPMAAVALNGGKLLNAQGITTYTKRELKKITNGYSKRLGGGHFGNVYEGTIVDGRKVAVKCPLRTRVSSHRCHWKNLIRPRRVPLPQQRVEEDGSFMNEIRFQFEVSRHKNLVQLLGCCLETDIPILVFEFVANGSLEDILHSAKKPCTLSLPERLDIAIGSAEAIAYMHSLDNQKRVHGDIKPSNILLDDDLNPKVSDFGSSKLLAIHSYYVRAVAADIGYMDPLYMKTEHFTLECDVYSFGVVLLELITRRRASWYEQDHQGNKILPIEFVKCFKDHGSGCAMYDSRLDFSAGEDAQSRCNKRCLDMIGMLAVRCLKEDKRERPTMAEVVEELKRVKVLLLGTHI

SEQ ID NO: 56263 - protein, 305 aa, Zea Mays
MGKNAQERRNTREDRGKGEGVETSKKTLILHGTKTSAVLNSVLSDIYHLKRDNAVKYTKKNDNIRPFESGGESSLEFFSLKADCSLIVYGSHSKKRPNNLILGRTYDHHIYDLVEVGVENYKSMESYVYDKKLAPLLGSKPFFAFIGEHFESAEELKHLKEVLLDLFRGEVVENLNLAGVDRIYVCTAISPTTVYMMHCALRLKRSGTSIPRMELVEVGPSMDLVVRRHRLPAESLKKEAMKTAEHAKKMKNVTKDPVQGKLGKVYMPDQQVGKLTLSNDIKGLKRERREAKKNQDSKKQKVNPE

SEQ ID NO: 56264 - protein, 82 aa, Zea Mays
MIEKCICFNLSKEECMDALEKHANVKPVVTSTVWKELEKENKEFFETYNKDREERKVEAETMARIEKMLSEAAASKSSDDEG

SEQ ID NO: 56265 - protein, 278 aa, Zea Mays
MLEVPQSSLVHLPCHSDFCLVAPWPSGLNLRSNGPRNSVNSCKLFQELTVAGFCQFLHVGANCFDVIVSVGEEANDPAVALHRNLERGSQLRSERPVCFARAGHERQRGHDTGYCSVPRAWMECPSNFHYELFRGKMNLSTSSSAAAPRTGGVLLPVAIAVQILQRVYDRPAEDRHSVQAMRPLCDVMESISNPAPRPNPGDDGLITTCFWFGFRRRVDTDRVEVPSGAPKETDDAAIALHWDVEGCASPSSKRPVATSVGDERQRRYDVCMAVECAD

SEQ ID NO: 56266 - protein, 153 aa, Zea Mays
METLKRVVGAGNRARDALVAQGLKVGLVEVLLGILDWRAGGRQGLRNKMKWNESEASIGRVLAVEVLHAFATEGAHCARVREVLNSSDVWSAYKDQKHDLFLPSSAQSSAAGVAGLIESSSRFTYALAAPPSSSLSPPSAPANPSGRQYYQHS

SEQ ID NO: 56267 - protein, 51 aa, Zea Mays
MLEKFYSDVQYPKLEEMGEYTTCVGLTYSQGCIWFKERRRKERREMGAIGP

SEQ ID NO: 56268 - protein, 364 aa, Zea Mays
MAFWWPLLVLAAAYALCRLLLFLIPPTVPSIDVDASDVLAKEDSFIYIPRRGKSTQTDKVQCYEPATMKYLGYFPVVTPDEVKEHVAQSRKAQRIWAKSSFKQRRQFLRILLKYILEHQDLICEVSSRDTGKTMVDASLGEIMTTCEKITWLLDEGEKWLKPEYRSTGRSMLHKRAKVEFYPLGVIGAIVSWNYPFHNVFNPVLAAVFSGNAAVIKVSEHATWSGCFYFRIIQAALSAVGAPENLVHIITGFAETGQALVSSVDKIIFVGSPGVGKMIMKRASETLIPVTLELGGKDSFIVCEDVDLPSVVQVATRAALQSSGQNCAGAERFYVHDDIYSAFVSQIVKTVKSISVADMTWVQSV

SEQ ID NO: 56269 - protein, 51 aa, Zea Mays
MKLALISTKSLLEPRRPLLLNLLQREGLPRLKVLGMLTLESTPICRQGWTI

SEQ ID NO: 56270 - protein, 235 aa, Zea Mays
MVGVDFTASNGNPRLPDSLHYIDPSGRPNVYQKAILEIGDVLQYYDPPKRFPAWGFGARPIDGPVSHCFNLNGSTYQPEVDGIQGIMSAYISALRNVSLAGPTLFGQLISTAMAIASQSLAENQHKYFILLIVTDGVVTDFQETIDAIIKASDFPISIIVVGVGGADFKEMEFLDPNKGEKLESSTGRVASRDMIQFAPMKDMHGTGISTLQSLLAEVPGQFMTYMRTRETQTDS

SEQ ID NO: 56271 - protein, 91 aa, Zea Mays
MHLVSCIFSKVLLLAGCIRFDPFKSQHTRLLVFHITFLNRGTFEDHKACACDHFKHLIAYVYVIVHRITPLKASLHFDCYIHEALIFFLFP

SEQ ID NO: 56272 - protein, 418 aa, Zea Mays
METKDVSPLAAAAAAPVLAPASQQQQQQPPQPQQHHHQPPQPQHQHQHQPPPPPFPQQAAPAAASSPAASMPGGMRLSFDHMPGKAPGEQHHHHHHAAPPMLYAAPPQGAGAPGGSVLGMGELMRKKRGRPRKYAPDGSMALALAPISSASAGGGGGAAAPGQQQQHGGFSIGSPPSDPSAKRRGRPPGSGKKKQFEALGSWGIAFTPHILAVKAGEQGPRTVCILSANGAISNVTLRQPATSGGLVTYEGRFEIISLSGSFLLAEDGDTRSRTGGLSVALAGSDGRVLGGCVAGMLMAATPVQVVVASFIAEGKKSKPAEARKVEPMAAPPPPPPQMAAFVPAPVATSPPSEGTSSASSDDSGSPINHGAMPFSHSSQHQHPHQHQQHMPPAYASGGWSLSVHQQNRHDSDMKMMSN

SEQ ID NO: 56273 - protein, 460 aa, Zea Mays
MIKLTANLSSAFFPRFSPDGKYLVFISAKSAVDSGAHNATNSLHRIEWCTDGKLDGSLGVADVVPIVLCPKDNCFPGLYCFGLLRDPWLTDGQTMIISSVWGSREVILSVNVVSCELSRVSPQDSDYSWNVLAVDKNNILAVSSSLITLPQMYYGIKVSQTESNWEWQGVSTPFPKPSDKISSVLAEHKFSILKIPISNPSDELANGAKLPFEAIFVSHKDSASNPTIVVLHGGPHSVYPSSYSKSLAFLFSQGYNLLVVNYRGSLGFGEEALQSLPGNIGSQDVNDVLTALDLVIKRGLIDPSRVAVVGGSHGGFLTTHLIGQAPDTFVAAAARNPVCNLSLMVGTSDIPDWCFVEIYGKEGKKYFSESPSVDDLCQFHQKSPISHIAKVKTPTLFLLGAQDLRVPVSNGLQYARALKERGIETKTIVFPEDIHGIDKPQSDFESFLNIGVWFKKHMGK

SEQ ID NO: 56274 - protein, 1049 aa, Zea Mays
MSSRPSSSSSRRSSSPFSAGHRRPPTASSSSSSSYFSSGRLIPRSSSSSVSSSFYGGGGGGSTRSTTPSRRSSSVAPALPPSPVPFPSADELVIEDTSRSGDSISVTIRFRPLSEREFQRGDEISWYPDGDRLVRCDYNPPTAYAYDRVFGPSTSTEAVYDVAARPVVKGAMEGINGTVFAYGVTSSGKTHTMHGDQNCPGIIPLAIKDVFSMIQDSPGREFLLRVSYLEIYNEVINDLLDPTGQNLRVREDAQGTYVEGIKEEVVLSPGHALSFIAAGEEHRHVGSNNFNLFSSRSHTIFTLMIESSARGDEYDGAMYSQLNLIDLAGSESSKTETTGLRRREGSYINKSLLTLGTVIGKLSEGRATHIPYRDSKLTRLLQSSLSGHGHVSLICTITPASSNMEETHNTLKFASRAKRVEIYASRNRIIDEKSLIKKYQKEISSLKQELDQLRRGMIGGASREEILSLRQQLEAGQVKMQSRLEEEEEAKAALMSRIQRLTKLILVSTKNNIPALTDGHQSHNSLSEQDKLITSQDSSTLVQTEGTTKDPLSSALPDSLDEINQLRSGTGEQSSVTGSATDSMQVGFTASDHMDLLIEQIKMLAGEVAFGTSSLKRLIEQSIDDPEATKDQIENLEREIQQKRRHMRALEKQIMESGEASVANASMMDMQQTITKLTAQCSEKAFDLELKSADNRVLQEQLHQKNLEIYDLQEKVLRVEQQLSAKVDISPEKETDCAQQETIDLKSKLQSKEAEIEKLKYEHLKISEEHCDLINQNHKLSEEAAYAKELASSAAVELKNLAEEVTKLSVLNAKQAKELLVAQEMAHSRVHGRKGRTASRGRDEVGTWSLDLEDMKMELQARRQREAALEAALAEKELLEEEYKKKFDEAKKKELSLENDLAGMWVLVAKLKRGALGISDLNVDDRTVNLADITNSTKENKGGKNFALVEKQASEDSVKSLSSEEHTSPEFEPLLVRLKAKIQEMKEKDIDPLTDKDGNSHVCKVCFESAAAAVLLPCRHFCLCKPCSLACSECPLCRTRIADRIITFT

SEQ ID NO: 56275 - protein, 315 aa, Zea Mays
MTKWQFFLQIEQSFQVHRSYGSMLEGEADELKRVFLEGNPYLLGLTMIVSLLHSLFDFLAFKNDIQFWNKNKSMEGLSAKSVVLNFVCQLIVFLYLLDNDTSWMILASSGIGVCIEFWKIGKAMHIEVDRSGKIPMLRFRDRESYAQNKTKEYDAIAMKYLTYVLFLLVIGFSIYSLKYEKHKSWYSWILSSMTSCVYMFGFIMMCPQLFINYKLKSVAHMPWRQMTYKFLNTIIDDLFAFVIKMPMLHRLSVFRDDVIFLIYVYQRWKYPVDKKRVNEFGFGGEEEPAAQETLEGSDPAAAAAAAEPTEDKKTK

SEQ ID NO: 56276 - protein, 1024 aa, Zea Mays
MAWWSGKVSLGGLQDIAGAVNKISESVKNIEKNFDSALGLEEKRDDEDASGSQTSNSDRIGFFNPVMAFMGHNGEEDGTEVSEKPQSLKNLSAEEGINSTPTKKHISEVDPSEVSGTTSPKLPSKSEEVHSISNGSPVSKADVSEQSITPQTPTHPSVAEEKLDSSTEAPASKVGDAEASETSQSAGHPSTVEENQHHQVSKHSDPSDEAEPNQLRESVRDLPDGSASSSPTKIHQSGDTETGESIHTGKEDTSDRNILQSQPAESALASSDDITEAEDNIAQEYDAPKELSGPQESSDMVDKGTHLEVKLHDSNINTEKSEEESNKMESGESSVVVQEDNAMEQPQDLTLKSLTAEHDSNSQNESVINSTDIPVGLGEGPPNDFTKEEKILESVRGTDSQTLDSVVSVDELEKLRRELKMMEAALQGAARQSQSKADEIARLINENEQLKSTIDDLKSKSSEAEMDSLKDEYHQRVATLERKVYALTKERDTLRREQNKKSDAAALLKEKDEIINQVMAEGEELSKKQAAQEATIRKLRAQIREFEEEKQRLNSKIQVEEAKVESIKRDKAATEKLLQETIERNQTELAAQKEFYTNALNAAKEAEALAEARVNSEAKIELENLLGEAGEKENMLIKTIEELRHFLTRQEQEAAFREKRLKGDYDDLQKRYQASELRYNELVTQVPESTRPLLRQIEAMQETTARREDAWAGVERTLNSRLQEAEAKAASSEEKERSVNERLSQSLSRITVLETQITILRTEQTQLSRSLEKERQRASESRQEYLAIKEEAAIQEGRAKQFEEEMKELRARHKEELQEAAEHRDLLEKDLEREKAARAEIEKTSSREAPKAPLPDQTRNAPLRKLSSSGSINSLEESHFLQASLDLSDNASLERRMSSESNMSYYLKTMTPSAFESALRQKDGELASYMSRLASLESIRNSLAEELVKLTEQCEKLRTEATAVPGLRAELEALKQRHFQALELMGERDEELEELRNDIVDLKEMYREQVDLLVSQLQSLGARV

SEQ ID NO: 56277 - protein, 202 aa, Zea Mays
MPKKDSSAGGASKLPKEYAEPWDYSHDYPVTLPLRKPYSGNPEILDEEEFGESSASRTQDDELSAAEQLGLMDMSSESQFLFFQLPSSLPLPRQPQSGADPNEVRDEKREDMRPSSHNGSKLKEVPEGYMGKMLVYKSGKVKMKIGDTLFDVSFGSNCMFSQEVAAINIREKHCCTVGEISKRAIITPDINYMLGSVDKMEE

SEQ ID NO: 56278 - protein, 259 aa, Zea Mays
MWDNKTGRSRGYGFVSFRNQQEAETAITEMTGKWLGSRQIRCNWATKNNSEEKPETDNHNAVVLTNGSSNNSATDASQDAGSKEPPQNNPDCTTVYVGNLGHEVNRDELHRHFYNLGVGAIEEVRVQQDKGFGFVRYSTHGEAALAIQMSNGSVVRGKPIKCSWGVKPTPPGTGSKPLPPPAATYQPAVAMPGVPQGFTTAELLAYQRQLALSQAAAGQQHAGLAGQVSAAGLLAAAGSQALYDGYPNQSSAQQLMYYN

SEQ ID NO: 56279 - protein, 627 aa, Zea Mays
MASSVSQRRTGNMLPPPGDDFSYSAVVSAKHTFKNATLNTTNQPRPSPPNSSSGRSTLPPAASWGQRDVNARTTATGVTSSQSHTKPKSESQSNPFSSSSVISSTKTPSSWNDDTSTAAKMSEGQQVSEKESKTLQLYKPGISMATQATSSLELSLNIDFSTIPSAWNDDEIVVSDGMSKGSDENQVANENGELTHPASKPLVLSKKDITMKSTSTSKSPPNIVSSLAISKSDVNTSDGDHSLTNISLTSNAVVCQSNHVAGAKILEDIRSRDTDMEKLSVHISSVKLGGNDEIQIMAGNQRPDVMPCTSVDAPMNQNFDRDQSHLNLNEPLLPSENKDTVLSCQYSSDKRLDWSSEMQNGSVTPSNNIVDSTMLTGKLHSILLDVSEQPSYARFPSSLDTSLCNDTESNTAATIDTTISHMQTEFSSINNMYALLNGGQDGLGTVNTHGNVSEQHPGMGNHQCRAMGSVRTEAMGSVRTDSIGSFEKTISINKDESRIISDMLSSEFNPWDDSYSTANNFVRMLRESENNDVHFAVPSWKSGTGNKESRFSFARQDNQGNLLDSSLRNCGTGTEQNFSLLPQNSRGNIYQNGLAFQSLENDFSNSNSLGVLDMLTTGSFSCMICEA

SEQ ID NO: 56280 - protein, 442 aa, Zea Mays
MPARWFSSTGLPPHLVVGMPALSPTMNQGNIAKWRKQEGDKIEVGDVICEIETDKATLEFESLEEGYLAKILAPEGSKDVQVGQPIAVTVEDVEDIKSIPADTSFGGEQKEEQSTESAPQNKVVNVSEQSSTVSRISPAAKLLIKEHGLDTSSLRASGPRGTLLKGDVLAALKSGINSSSTKEKKSPAQPSSQPTRDSQSQASSISQKDDTYEDIPNSQIRKVIAKRLLESKQTTPHLYLSKDVVLDPLLAFRNELKELHGIKVSVNDIIIKAVAIALRNVPEANAYWNNDKEETQKCDSVDISIAVATEKGLMTPIIRNADQKTISAISAEVKQLAEKARAGKLAPNEFQGGTFSISNLGMYPVDHFCAIINPPQSGILAVGRGNKVVEPVVDSDGTEKAAAVTKMSLTLSADHRVFDGQVGGKFFTELALNFSDIRRLLL

SEQ ID NO: 56281 - protein, 320 aa, Zea Mays
MVAASVAERAYEAATRSALVALERNLIPDAVTRRLTRLLLAQRLRQGYLPSAPLQLQQLLQFVHSLEEMPIAIETDKAKAQHYELPTTFFKLVLGKNLKYSSCYFPGDSSTLEDAEVAMMDLYCERSKLQDGQSILDVGCGWGSLSLYIAKKYRNCSVTGICNSTTQKAFIEEQCRDNELSNIEIIVADISKFEMERSFDRIVSIEMFEDKNDDDWITRYFFTGGTMPSANLLLYFQEDVSVVDHWLVSGTHYARTSEEWLKRMDKSITSIRLIFEETYGKESTTKWIAYWRTFFISVAELFGYNNGDEWMVAHYLFRKK

SEQ ID NO: 56282 - protein, 393 aa, Zea Mays
MNMKASEKAIAPTTAKSETKPASSLPPVRPPAAGAPAPRVESKTELEKKDNPPPSAKVPEGTADNEFEKRIRPEVIPANEIGVSFDDIGALDDIKESLHELVMLPLRRPDLFKGGLLKPCRGILLFGPPGTGKTMLAKAIANEAQASFINVSMSTITSKWFGEDEKNVRALFTLAAKVSPTIIFVDEVDSMLGQRNRAGEHEAMRKIKNEFMTHWDGLLSRSDQRILVLAATNRPFDLDEAIIRRFERRIMVGLPSMESRELIMRRLLSKEKVDERLNFKELATMTEGYSGSDLKNLCTTAAYRPVRELIQKERKKELEKLKREKGETPSDLPKKKEETITLRPLSMTDLKEAKNQVAASFASEGVCMSELRQWNELYGEGGSRKKEQLTYFL

SEQ ID NO: 56283 - protein, 474 aa, Zea Mays
MGNLTSLQVVNLSQNKLNGTLPVELSNLPSLHIFDVSHNMLTGDLPHSRFFNNIPESFLVDNSGLCSSRKNDSCSAVMPKPIVLNPNSSSNPSWQATPSAPSNMHHKKIILSISTLVAIAGGAAIAIGVITISVLNRRVRARAAAPRSAPATALSDDYLSQSPENDASSGKLVMFGKGSPEFSAGGHALLNKDCELGRGGFGAVYKTVLRDGQPVAIKKLTVSSLVKSKDDFERQVKTLSKVRHHNIVALRGFYWTSSLQLLIYDYLPGGNLHKHLHECNEDSLLSWMERFDIILGIARGLTYLHQHGIIHYNLKSSNVLLDSNGEPKVGDYGLAKLLPMLDRYVLSSKVQSALGYMAPEFACKTVKITEKCDVYGFGVLLLEALTGRRPVEYLEDDVVVLCDLVRGALEEGRPEDCVDPRLRGEFPMDEALPVIKLGLVCTSQVPSNRPGMGEVVSMLELVRNPRDIAEDELV

SEQ ID NO: 56284 - protein, 588 aa, Zea Mays
MVGLLPETNAAAETDVLLDAWDFKGRPAPRATTGRWGAAAMILVAELNERLTTLGIAVNLVTYLTGTMHLGNAESANVVTNFMGTSFMLCLLGGFVADSFLGRYLTIAIFTAVQASGVTILTISTAAPGLRPASCSATGGGVVGECARASGAQLGVLYLALYLTALGTGGLKSSVSGFGSDQFDESDGGEKRQMMRFFNWFFFFISLGSLLAVTVLVYVQDNLGRRWGYGACACAIAAGLLVFLAGTRRYRFKKLAGSPLTQIAAVVVAAWRKRRLPLPADPAMLYDVDVGKAAAVEDGSSSKKSKRKERLPHTDQFRFLDHAAINEDPAAGASSSSKWRLATLTDVEEVKTVARMLPIWATTIMFWTVYAQMTTFSVSQATTMDRRVGGSFQIPAGSLTVFFVGSILLTVPVYDRLVVPVARRVSGNPHGLTPLQRIAVGLALSVVAMAGAALTEVRRLRVARDSSESASGGVVPMSVFWLIPQFFLVGAGEAFTYIGQLDFFLRECPKGMKTMSTGLFLSTLSLGFFVSSALVAAVHRVTGDRHPWIANDLNKGRLDNFYWLLAAVCLANLLVYLVAARCRRRRRR

SEQ ID NO: 56285 - protein, 257 aa, Zea Mays
MAGSTVTHGVSPYSLNVQVDQFVYFRHRSLEMFERGLEGPVSKEGFESALYMMDIGHNDMVGVAHTPSDQWDKKITEIVGEVRQAISILYDNGARKFWIHGTGALGCLPALVVQETKGEQDKHGCLAGVNRAAKAFNRKLSQLCDDLRFHLKGATVVYTDMFAIKYDFVANHTKYGIEWPFMVCCGNGGPPYNMKQGRPGCGDLCPPEAKVVSWDGVHFTDFGSGLAAKLAMSGEYSKPRVKLASLIHGGSKKTSDS

SEQ ID NO: 56286 - protein, 313 aa, Zea Mays
MQHVLPGLLGRRGHGHGRGRALLAVPGAARAPRPPHHPDPALLLPRRHPRLGHPALHGHRRRADLRHQQRPRRLPQRAAAAAEAGWRQGRVVVVGLRQPLRGLRPQPPRQLPLLLPRLQGRRLLPRRRQGQELAPPGRRRRRFHHILLGPAQRRQEAELHAAHAAADPADEAPQGHPAPRPVRQPHRRVLESPSPPAIAVHVRCFCIGSWHYTRAVEWKYSSNDGMESHSEPVNPDYRQANRLATTWVAWPAFLCHGTSVGGCLSRWMPFARWLRFPERGGRRKEGGWIGSDIGGRIKTSFSSLFTRYMFLSV

SEQ ID NO: 56287 - protein, 104 aa, Zea Mays
MKKQQRPFLMQFFSPIFLKAFSITFFGEWGDKSQIATIGLAADENPFGVVLGGIIAQALCTTAAVLGGKSLASQISEKMVELSSGVLFLLFGIMSLLSGPEGEL

SEQ ID NO: 56288 - protein, 151 aa, Zea Mays
MLQGPKETFVTIKVKHGDCGPVESMKVQRQLVTRTPVFYRLEKRENNDSSVGYIHITEFNAVAKKDLVSALKRLQKSGASYFVLDLRDNLGGLVQAGIETAKLFLNKGDTVIYTAGRDRLVQKAIVAESGPMIATPLMLLVNNRTARASEI

SEQ ID NO: 56289 - protein, 249 aa, Zea Mays
MVSHYVVFVAGGVFASILGVICLFWVGVVDNVGFENKGTALNLPGIPIAIGLYGYCYSGHGVFPNIYSSLKKRNQFPSILFTCIGLSTILFAGAAVMGYKMFGEATQSQFTLNLPENLVVSKIAVWTTVANPITKYALTITPLTMSLEELLPPNQQKYSNIVMLRSALVVSTLLIALSVPFFGLVMALVGSLLTMLVTYILPCACFLAILRRKVSWHQVAVCSFIIVVGVCCACVGTYSSLSKIIQNYT

SEQ ID NO: 56290 - protein, 642 aa, Zea Mays
MAHVSFKSKDVDSGMSRWSEYLSVEEPIPSAMATWRNMSADAPQGSSAGSHKHLQMEPVVQLSKVAEGLLAKMYRLNSILDYPDPNTHTFSDAFWKAGVFPNFPKICITMSKKFPEHPNKLQLERVDKFGLDALNENAEGYMHNLEQWILLLLDLLAFREQALRLILDLSSTVITLLPHQNSLILHAFMDLFCSFVRVNLFSDKMPRKMILQVYNILHIMLKGGRDCEFYHRLVQFVDSYDPPIKGLHEDLNFVSPRIGEVLEAVGPIIFLSTDTKKLRNEGFLSPFHPRYPDILTNSAHPMRAQDLANVTSYREWVLLGYLVCPDELLRVTSIDVAMVVLKENLILPLFRDEYILLHENYQLYVLPKVLESKRMAKSGRTKQKEADLEYNVAKQVERMLTEVHEQALVSCDAMHRERRILLKQEIGRMVLFFTDQPSLLAPNIQMVFSALALSQCEVIWYFQHVGIASSKSTRLKTVDIDATDPTIGFLLDGIGKLCCLVRKYIAAIKGYALSYLLSSAGRIRFLLGTPGMVALDLDATLKGLFQQVLHCLENIPKPQGESVPDITADLADLRKHWLSILMIVTSSRSSINIKHLEKATVSTGKEGLVSEGNAAYNWSRYLAGYQAEKEHIRLGGDDRQSN

SEQ ID NO: 56291 - protein, 124 aa, Zea Mays
MESNLGGGFDKLTLDSLYDDGTYRQMQQQQLYGSAPPNPFMASDPFAVSNQVAPPPSVQMAAMAPQPQHLPMMIEPNPFGPPQQHHAGVAPAANPFLDAGFGAFPAVNGMHPQTNPFGGAAQLL

SEQ ID NO: 56292 - protein, 445 aa, Zea Mays
MVLYLIASHVLGALWYLLSVDRQTFCWKTNCLNETGCDLKYLDCDTTPNATWANTTAVFSNCNASDTNISFDFGMFEPALSNQAPAQSFAMKYFYSLWWGLQNLSCYGQTLTVSTYLGETLYCIFLAVLGLVLFAHLIGNVQTYLQSITVRVEEWRLKQRDTEEWMRHRQLPCELRERVRRFIQYKWLATRGVNEESILHALPADLRRDIKRHLCLGLVRRVPFFSQMDDQLLDAICERLVSSLCTKGTYIVREGDPVTEMLFIIRGKLESSTTNGGRTGFFNSITLKPGDFCGEELLGWALVPRPTTNLPSSTRTVKALIEVEAFALQAEDLKFVASQFRRLHSKKLQHTFRYYSHHWRTWASCFIQAAWRRYKRRKMAKDLSMRESFNSVRLDEVDNEDDDSPPKNSLALKFIARTRKVPQNMKELPKITKPDEPDFSAEPED

SEQ ID NO: 56293 - protein, 51 aa, Zea Mays
MRIGVQGSPDHSRDQREQGRKRRASQGPSTEAVKARRKARLSEPFTMVFSI

SEQ ID NO: 56294 - protein, 50 aa, Zea Mays
MYRVVMVRWFSACWPADDAPALWYLNANLGQGRFAMHGWLTTYVWSFDNT

SEQ ID NO: 56295 - protein, 349 aa, Zea Mays
MSPAASAPVFSHLGPLIPPPTPMLSTLLRHRLTAAASSSSPTHSTPLRLRPLAAAMSSSASAPHGGRKPNRLAAEHSPYLLQHAHNPVDWYPWGEEAFQKARAKDVPIFLSIGYSTCHWCHVMEVESFENEEVAKLLNDWFVSIKVDREERPDVDKVYMTYVSALHGGGGWPLSVFLSPDLKPLMGGTYFPPDDNYGRPGFKTVLRKVKEAWETKREALERTGNLVIEQLRDALSAKASSQDVPNDLAVVSVDQCVEKLASSYDPKFGGFGSAPKFPRPVEDYIMLYKFHKYMEAGKEIEALNIKKMVTHTLDCMARGGVHDHIGGGFHRYSVDECWHVPHFEKMISDQ

SEQ ID NO: 56296 - protein, 157 aa, Zea Mays
MDSEAVQHGCAHYSRGCSVVAPCCGQAFGCRHCHNDAKNSLEVDPRDRHEIPRHEIKKVICSLCSKEQDVQQNCSSCGACMGKYFCKVCKFFDDDVSVLESQTMNKETELDALFTAFLFSPFFFTYILYCSWSRSQRASTTVTDVEYNRRRGELFPL

SEQ ID NO: 56297 - protein, 285 aa, Zea Mays
MSGLYSQGFSPARNLSPQIRSNPDVDSQYLAELLAEHQKLGPFMQVLPICNKLLSQEIMRVSSIVHNHGFGDHDRHRFRSPSPMSSPNPRANLPGNGFSPWSGLQERLGFPQRTSMDWQGAPPSPSTQVVKKILRLEVPVDSYPNFNFVGRILGPRGNSLKRVEASTGCRVFIRGNGSIKDPGKEDKLRGKPGYEHLSDPLHILIEAEFPASIIDARLRHAQEIIEELLKPVDESHDFYKRQQLRELALLNSTLREDSPHPGSVSPFSNGGMKRAKTDTHLIEVF

SEQ ID NO: 56298 - protein, 497 aa, Zea Mays
MASTAATVTFGGKGAALSPAAVYALSIGLAAPGIDPSAHKALSTRAPSPQETPAPLAAALPALAPAESRAAAAVLLNKLVLTASDSASALVTAATAVGLAGSLDLAAALPLGSRDEVAVAAASAPVAVGLAALVDCCAAPLARVADAVAALSCEAVRGDAAAFDVQASGDGLSSKDEADVAADIKVLVFGSKLVGAAGGAPAAATFAKVPALNGIFRQAVRALHAQVRIELNAPVKLGKKDAGQTDAVSVLKGVYNHLLKFRDFLSWEAAMAMAVIETDSSIEKPQSAVDNEAAGSSEKAQAGGDKAKGDKKSKKKKTLGKGTSAVLMLLRDHVTNGSTVASVNSVLVAEWAASLSLLFDPKCPGLVSLVEKVKEIVESNEVRRLPKIPKGTRDFGKEQMAIRERAFSIITSVFKMHGATALDTPVFELRETLMGKYGEDSKLIYDLADQGGELCSLRYDLTVPFARYVAMNSISALKRYQIAKVYRRDNPSKGRHV

SEQ ID NO: 56299 - protein, 95 aa, Zea Mays
MSCLVVRRIVSNFVLLEGSCVGEKFKKAYEGRIEQLGDKSFWPKVEMANEVGAPLGRRGVGRQRKNRIKGCLEGGRGKKACANETVKQWKVIRGQ

SEQ ID NO: 56300 - protein, 581 aa, Zea Mays
MACLAISLQPVNGPDILLQTRSWFPVSRALAAVSAFRLARLHLARGSDHAAPAVNAFAVADAVNQSVSVVVAACRGVDVTPEKVHRKYPEVYLALDLVLHGVGSVRLSQILATIHGDNLARMVNSSPDAEARARGADPWPVVEHLAQDRHAAREGFSGASFELPQETLAAGDEFSSNIAPATTVATGDEPPPEEAAPVEKDPFAASDLINNKPEEALVGGFKKNKETALVVADPAAALAGLEVTTLPPAEATKPTFIGVEGFEGDYGGIEFGNDETSLAEAFEGLNAPFGGGLDASEFVTTTKKDHKDRTVTGLELLVASGQPPNAAAGTPLENLLLTKRAEMTAPELFIAEEINAEFKESILVRVGLKGTIFLRTLPLNKAAGKETEFSFRLEGTSGMKRAALQSNVLSNLQNGLFHVRTVSKEEPIPLMKYSFLPKHSPLPLRMRLVKRHSGTLLSVMIQYASNPMLPQPLSNVTFVVKLPVDPTLLNVSPKAVLNRAEKEFRWHISDIPLKGPAGRLRARMPVDQDSKDGELEVVGMVKFAYQGPFTLSGIKLCPATDGIAQFNEVGHTFSSGSYLCI

SEQ ID NO: 56301 - protein, 151 aa, Zea Mays
MGGGSGSFLKVLVNNMDVLAGPLVSLAYPLLPFWSYAKLFFNCWLVLPQFNGAAHVYEHFVRPMIVNQQVVNIWYIPKKDESSRPDDVISAAQRYIEQNGSKAFENLVNKFKSSNPRRSILEEVEVERRARIQLESEAREVNPFFNPEYQY

SEQ ID NO: 56302 - protein, 422 aa, Zea Mays
MDYRPSDSSGTDDDLPQFPHKSIRGSGRVSGNGRAVVPAGSYARAPTDMEKEGLMTELRKELRVSDKAHRELLNRVNNDNIICSIREWRSTGGLQASLSNNPQLIHDSVPSPTTSGRKRQKTSQSVPALPAPPPAMHSQQLATPTQPSSSTARKAVPPGHKGKKMKPGQKVPGGSAAKPIPSSAGPSGRGPHMNRGGSAPEAQAQNVDPLIGRKVMSRWPEDNSFYEAVIYEYDAETGLHALVYDIDTADETWEWVDLKEMGPEDIRWQEDDSGIDPVTYLRSRGGPTSGVRKPAGRGGPMPGSVRGRGLQKNMPKKDFPPPQNGVGKRSSDDIDILHTESLIKEVGKVFSVSNPDPQEVEKAKKALKEQEQSLIDAIARLAEASDGESDGHNRGRRNLYAANQHQASYVGAMPVGDRAGAM

SEQ ID NO: 56303 - protein, 167 aa, Zea Mays
MDSGGGGGSGAHKAASGSAPSPAPNPTAMLSALMSKRAKLQEELRSIERQVYDMETTYLQETNQFGSVLKGFESFLSSSKNTSNLKRSRKFQADERLFSLSSVTSPAVDEHLAGRDDGREYGAGRSKGGSTPANGQGKPKKGGRPGGRDGKRLRPSNDPDLDDEDDY

SEQ ID NO: 56304 - protein, 321 aa, Zea Mays
MASRQNTREARAEADARRAVEELARARDEHLEKAEVNARSAADEIARSRADRGAAGGGGILESVQEGARSLASAVGRTFGGAKDATVDKTSQTAHTAGDKLGEYRDYTADKAREANDSVSRKTGETAEATRNKLGEYKDSAVEKARETKDATKNKLGEYKDAAAGKAREAADTTAGKAREARDVTRQKAGEYTDASREAAQEARDRSRATAQTAADKARETASTHDTDREQGQGLLGALGNVTGAIKEKLTLGQGQHVDVRLGGEDERAAKERAAEKAASVYFEEKDRLMQQRAAERVDQCVEKCVEGCAGSSCVHRQGKM

SEQ ID NO: 56305 - protein, 516 aa, Zea Mays
MSPAELLAKAAQFDALIVRSGTKVTREVLEAGQGRLRVVGRAGVGIDNVDLQAATEVGCLVVNAPTANTIAAAEHGIALLASMARNVSQADAALKAGKWQRNKYVGVSLVGKTLAVMGFGKVGSEVARRAKGLGMHVIAHDPYAPADRARALGVELVSFDEAIARADFISLHMPLIPTTSKIFNDESFAKMKTGVRIINVARGGVIDEDALVRALDSGKVAQAALDVFTVEPPPKDSKLVLHENVTVTPHLGASTVEAQEGVAIEIAEAVVGALRGELAATAVNAPMVPAEILSELAPYVSLAEKLGRLAVQLVAGESGIKGVKVVYTTARGPDDLDTRLLRAMVTKGLVEPVSSTFVNLVNADYTAKQRGLRLTEERVAHDSPAAEAPLESVQVRLSHVQSKFAGAISDGGDDIVLEGRVKYGVPHLTLVGPYEVDVSLEGNLILCRQIDQPGMIGKVGNILGDTNVNINFMSVGRTFRGKQAIMAIGVDEEPDKDTLEKIGAIPAIEEFVFLEL

SEQ ID NO: 56306 - protein, 426 aa, Zea Mays
MAKEPSRLCVEEVHRVLLDIVNASANATPGLGRYPPFKREVVAIASNALETFKNDAKKMVVALVDMERAFVPPQHFIRLVQRRMERQRREDELRNRSSKKTQEAEQPTSKRASSPQTDAEQGGGSLKSMKDKSGQQDKDTKEGSNLQVAGPAGEITAGYLLKKSAKTNGWSKRWFVLNEKSGKLGYTKKQEERHFRGVITLEECNLEEVEEEEPSKSSKDSKKANGSEKISSLVFKITNRVAYKTVLKAHSAVVLKAESMADKVEWVNKIKAVIQSKGGSFKGPSTEGSSMRQSNSDGALDTMARRPADPEEELRWMSQEVRGYVEAVLNSLAANVPKAIVLCQVEKAKEDMLNQLYSSISGQSNAKIEELLQEDHNAKRRREKYQKQSSLLSKLTRQLSIHDNRASVSSYSNDTTEAATASCTCV

SEQ ID NO: 56307 - protein, 131 aa, Zea Mays
MSLVVQQSTIHLTKPLFDNSSYFEVIKFPGGITIIPPQTAFLLQKPHATFNFTLNYPIYKLQDRTNELKDQMEAALLLNPYELFACPAALSRSYRWTSPCSCTSCVRRRKKLMADQIPECNKFQIIRWLTF

SEQ ID NO: 56308 - protein, 109 aa, Zea Mays
MFIKFIRTLYYQLKHGFQHTQDSKSGDMGNSLCLDETWFSRDIFLYRLSKDFFTVVFEAPVVDGDLLSWARKLKSLLETTFGWDLEDDAVNLIDEDDEFAPVVVEMDGS

SEQ ID NO: 56309 - protein, 185 aa, Zea Mays
MRSAGEVKLIMHVDVSAMKNKMGRSVAASSAHPVPALSMPAPSPTPAPAPSPASAATPAPAPALASAIPYTGVSPSYPPVSAYPGATAYPAYPTSSHAPYTTAEYPPPPQQPYQPPPAGYPPSYPPQPYEQSYPPQPYEGSYPPQPYERSYPPQPYGQQPYPPPPAAESPYPPAPYPGTYPPRPY

SEQ ID NO: 56310 - protein, 257 aa, Zea Mays
MLNMMTDLSCGPSSKAKGGQPAAAPGSGGDRQGRGKIEIKRIENTTNRQVTFCKRRNGLLKKAYELSVLCDAEVALVVFSSRGRLYDVKSTIERYKKANSDTSNSGTVAEVNAQHYQQESSKLRQAIDSLQNANRTIVGDSIHTMGLRELKQMEGKLEKAINKIRARKNELLYAEVEYMQRREMDLQTDNMYLRSKIAENNNETGQPAMNMIGVPSTSEYDHMASFVDSRNFLQVNMQQQQPQHYSHQLQPTTLQLG

SEQ ID NO: 56311 - protein, 618 aa, Zea Mays
MMSCDAAGYISVRTTALAENSTVAKMERLVEEAQNSRSRTQRLIDSCAKHYTPAVVVLAAGVVLVPVLLGAPDLEHWFRLSLVLLVSACPCALVLSTPVATFCALLRAARMGLLVKGGNVLESLGEVRVAAFDKTGTITRGEFSIKDFLVVRDKVQMSQLLYWVSSIESKSSHPMAAALVEYAQSKSIQPKPEDVTETCIYHGEGIYGAINGKHIYIGNERIMARSSCRQQEAGHRETDGLKGVSVGLVICDGDLVGKFSLSDTCRTGAAEAILQLRSMGIKSVMLTGDSEAAAKHAQEQLGGVLEELHSGLLPEDKVRLIRGLQARHGATLMVGDGMNDAPALAAADVGVSMGLSGSAAAIETSHATLMSGDVLRVPKAVRLGRRTRRTIAVNVASSVGAKAAVLALAVAWRPVLWVAVLADVGTCLLVVLHSMLLLRDAARARRRCGGASKACCATACKAPKTACCATASKACGATTVKPVATRPQPAGAGKKADRPGGDKHGNGKDDCHRCCHKQSKLPEDAVVIAIPVRAVEHRKDAAAHEKAEGNAAGGCCGGAPASAACCAEAHGGEDEVCIVISARSPCCSTARSRSASPKDAMCCGSGGKDGGAISALVC

SEQ ID NO: 56312 - protein, 440 aa, Zea Mays
MAIRMPALIFRRRAAAAAPKPIQQYLAGLSTAVEHVIPEDNGHIAGGEENKKRWVELPPFAPLDANATARAISRGDGGEGACSNATAIRWVRHCCPHVPASLVQKLFRLRKVKKNLVTADTSSTDSITLQLRLRRVSAKDELVPGDILFLPVNIQESSVTEKTKKFGNKNEIDFLRDLEIYKDRAIIVLNKPPGMPVQVHRLDRDCSGVLVLGRTQFSASLMHAIFREKTADALGDGTQQVLQRKYVALVIGRPRHPKGLLSAPLAKVVLQDGRSERLTVCAGSNTASVQDALTEYRVIESFPQGYTWLELFPRTGRKHQLRVHCAEVLGTPIVGDYKYGRQAHQNWMPLPMPQTIDKEMLKKRKLPFGLTLGGGSVAEQQPQLHLHCKQMILPDISAAMQQLRSSDADHDFSDLEKLSFVAPLPLHMQLSWKILLSVGK

SEQ ID NO: 56313 - protein, 546 aa, Zea Mays
MALRRVASVLLRTRLRGPVTSPARKALVHPLQAPPRRQFSPRPPPPVPFAAAAAADAAEEAFEAARSTNDMLAAFSRLEATVPANDKRLALACLKLGQHLEASGSADTSRVLALALRCLGILEASPNASTPSSASDAVSLAMALHLAGSASFDLSRFHDALSFLSRALRLLAPLLPETGVAFEVGEEPGGFDVRPVAHAVRLQLANVKTALGRREEALADMRACLDLKESILPPGSRELGVAYRDLAEAHATLLDFKQALPFCQKALELHESTLGKNSVEVAHDRRLLGVIYTGLEQHEQALEQNEISQRVIKSWGAASPDLLLHAEIDAANINIALGKFDEAVSVLKNVAKQVKKDSETRALVFISMAKALANQEKAGDTKRCLEIACDILEKKKFATPDKVAEMYIEVSSLFETVNELEKAISLLKKSLGMLERMPQAQHLEGNVAARIGWLLLLTGKVSEAVPYLEDAVERMKDSFGPKHYGVGYVYNNLGAAYMEMDRPQSAAQMFALAKEVMDVSLGPHHSDTIEACQSLANAYNAMGRGG

SEQ ID NO: 56314 - protein, 203 aa, Zea Mays
MLEAQKATSGAAGSNTTGQPEGGSDSRTVFVSNVHFGATKDALSRHFNKFGAILKTHIVTDGVTGQSTGSAYIEFLHKESAEQALTLNGASFMLRILKVVRKNSTEATRSPGLLRVSRGSPFASRLIRTAYPRPTFPGAIRGRLPLRGVAQSLQWKRSATDSSNAVKPSQAAPSAPGNQLVTPTPRSFTYTRTEPKPNDGAMA

SEQ ID NO: 56315 - protein, 501 aa, Zea Mays
MEFFTEYGEASQYQIQEVIGKGSYGVVAAAVDTRTGERVAIKKINDVFEHVSDATRILREIKLLRLLRHPDIVEIKHIMLPPSRREFQDIYVVFELMESDLHQVIRANDDLTPEHHQFFLYQLLRALKYIHAANVFHRDLKPKNILANSDCKLKICDFGLARASFNDAPSAIFWTDYVATRWYRAPELCGSFFSKYTPAIDIWSIGCIFAELLTGRPLFPGKNVVHQLDIITDLLGTPSSETLSRIRNEKARRYLSCMRKKYPVPFTHKFRHADPLALRLLERLLAFDPKDRPSAEEALADPYFASLANVEREPSRHPISKLEFEFERKKLAKDDVRELIYREILEYHPQMLEEYMKGGEQISFLYPSGVDRFKLQFAHLEEHYSKGERGSPLQRKHASLPRERVVVSKDGNTEQQINDQERSADSVARTTVSPPRSEDADMDDVKPTSLSSRSYLKSASISASKCVVVRNKHPEPEDDGIPEEMEGTVDGLSEKVSRMHS

SEQ ID NO: 56316 - protein, 331 aa, Zea Mays
MISPDTIRTAIGVHDLPGHHPHGHRRHRQWNCTRALPLPSAYVHPHLEERVGGAVLADPVRGDAAELHDVGAVRAAGGAPAQHAGDHHQRHRHGDPADLRGALPPLLGGGCAAQGGPAAGRRGGLRRRRRRAGAQPGAHARAQVHGGRHPLRPLRHRHVRRPALRHENGDPDKERGVHAPVPVAGFPREWHLLDCLRAHPLRPLHYYPQRAGRAVRGGAAGAVRHLLQVHPGDHRGAQAQGRPDRHDRGGRRRRQDQQPSRRGPILTDDQVTIDTNMLKQEASGKSIMSPLGFMYFVILYARCLSVPANGKKRGKKKCLSVYVFSPNNSRA

SEQ ID NO: 56317 - protein, 278 aa, Zea Mays
MDQQLHQVPSTVTHSVVSRIKNNTSGWLNNVSNVAASASGKLSVPSGAVTAVFHNSIYQGSLPVPSKANALEHLLVYSPSGHVIQHELLPSSGSESSGSSPRVGSGPNLQLQDDEMHVTAEPIQWWDVCRRTNWPERDENIANIVLYNQRSSMMAMGASDCEDSEHSDSTASNDGISGKEIMRIRERSSWYLSNAEVQINSWRIPIWQKSKICFYVMGYPAAELVESVSSGGGEIEIEKLPLHEVEIRRRELLPVFKQFQYSDRHSSDRLSECLVPHQ

SEQ ID NO: 56318 - protein, 652 aa, Zea Mays
MMKMVVCTKAIVAMDKSAAISSDSSFPSNTLRLSQSKTIDRSSERSLESVLSSSKEKVSAIESLLKGVSMSGQNFSAARSTSLDLGVDPPSSRDPPVPLAAPASNVLSLQNSALLDSSLPTIPPSSRNGGSRLLDTMTTHLPTKERSRSPYLSNMSSESMSGLSLPYSRKSLERLQEGGRMDESYDIRSTRRIPQMHLDRNYVDMPYRDSHNNHVPNFQRPLLRKQVMSRASASGRHSFDDSHVPLGDVPGYTDSLASLNDALSEGLSPSSDWVARVSAFEFIRNLLKQGQKGIQEIIQNFEKVMKLFFRHLDDPHHKVAQAAFSTLAEIIPACKKPFESYVERILPYVFSRLIDPKELVKKPCSITLEIVGRTYAIDMLLPALVRSLDEQRSPKAKLAVLEFANKSFSKYSVDSDGYSNSGFLKLWLSKLAPLVNEKNAKLKEASISGIISVYSHFDSTAVLNFILSLSVEDQNLLRRALKIKTPRIEVDLVNYLQSKKERPRPKPYDQVDFGTSSEDGYALTSKKSYPFGRFSSSSLDAEGGKMISSMQEPALHNVSIGRTVSDMSMDHAIQSLESSTGAEVHLTRGREPKNNSNLVAEAARSWTSYPEKTDASVDGETATGTPRLDFGRFITSDGHNTVGSTTEGSVQD

SEQ ID NO: 56319 - protein, 236 aa, Zea Mays
MKPNQLITSHVDIHRFSFPMREEQAVQLILARLASATIGRLLNEQQRACNLLTLAGAVAIVPPLENISSMMLAESITSRNIDSDIRRLVDQPYVEGKCLSCACPSVPSTIFQEDPIEPKTGIKFPTFLEDDSSPSAAVLVGIGFKGMRVMRVKNLNLYAFGLYMQPTSIREKLGPKYASFPTDKLMENPDFYSDLLRENLDIRVRLVVNYNGLSVGAVRDVFEKSLGLRLQKTFTA

SEQ ID NO: 56320 - protein, 329 aa, Zea Mays
MAAPSGGGGGGAGEGSSSAAAAMTIGAHGVDQVTEAMWQMNLGDAMELGPYPERVGDPDCSYYMRTGMCRFGMTCKFNHPADRKLAVAAARMKGEYPQRIGQPECQYYLKTGTCKFGATCKFHHPREKAAMATRVQLNELGYPLRLNEKECAYYLRTGQCKFGSTCKFHHPQPSTMMVAVRGSVYSPGQSATSPGHHAYQGAVTSWPLSRSASFIASPRWPGHSSYAQVIVPPGLVQVPGWSPYAAQIGSSSSDDQQRTPGAAQYYTGSRQSGTPGIGDRGMFSSYQAGSVPVGLYAVQTENVFPERPDQPECQFYMKTGDWRTNMQFL

SEQ ID NO: 56321 - protein, 500 aa, Zea Mays
MDPLSLLQLPRASRPPMPLAAAAAPLVSARLSVSGGARSVRRRRRRRAAGLSVFAVATETPRTEEQQPSPSGEERFDWLDQWYPLAPVCDLDPRAPHGKTVLGLSVVAWYDRGAGEGRLQCVYHGWCFDGAGACKFIPQAPALGPPVHTSSRACVASYPCVVQNNILWFYPRADPEHSDVLQRKRPPLIPEIDDPDFVTVYGIRDLPYGYDILVENLMDPAHVPYAHKGIMRGIRKKEDPGRVDYDKEGGGPVKMKIEQANIEGFVSPQERGYFQFVAPCTFFGTPFVQEKKKAPRVMLVFFCIPVGPGRSRVIWAFPRNVGVWLHHITPRWLYHVGQNLILDSDIFLLHVEERKFAAAGLDNWQRACYVPTSSDAMVVAFRNWFRKFCKNQVGWATLQVDQLPPTRTKDQLMERYWSHVVQCRSCNAALKAMKALEAALQVASVAVVGFLAVAKGTVLTSTVQRAAVVSATVLCFAASRWLANFIQKNFYFQDYIHAYK

SEQ ID NO: 56322 - protein, 155 aa, Zea Mays
MKSVLSLDDGRWSVPAEEHTPLPSANLEEELFQLNIKQPSPPPVLAEVQRPISPSRVADPTPGLPTSGTARFQNLHVPIKLMECFLRVAESNTKRSLETCGVLAGTLKNRTFYVTTLIIPKQKSTSDTCEATNEEELFEVQDTYSLFTLGWIHEL

SEQ ID NO: 56323 - protein, 477 aa, Zea Mays
MAGSYESDQLVDHEPFQRSNTSDWHSGMDIDGSEVSENSSLVKNIGKVVRDLRCIGFTSMTEDAYSSAIIWLLKSKVYELAGDDYRVSVLWCVKKWIQAVPLQFLHALLTYLGDSVDHGSGSSGLKSPLASRPSSFPGIGVPSEALVRWHMRLEYFAYETLQDLRIGKLFEIIVDYPESSPAIEDLKLCLEYTGQHSKLVDSFISSLRYRLLTAGASTNDILHQYVSTIKALRTIDPTGVFLEAVGEPIRDYLRGRKDTIKCIVTMLTDGSGGSGSGTGNAGDNLLEELNRDAENQENADYDDHANIDEKQAWLNSESWEPDPVEADPLKGNRNRRKVDILGLMVSIIGSKDQLVNEYRVMLAEKLLNKSDFEIDSDIRTLELLKIHFGESSMQKCEIMLNDLIDSKRTNSNIKTSLLKSSQTVPGQEEAEVSHDVLDATIISSNFWPPIQGWHERILSLPPQPSNTGLLHPRRRLS

SEQ ID NO: 56324 - protein, 367 aa, Zea Mays
MAAQASIAAGSQVWVEDPGVAWIDGEVVKVNGDTVTVRCSNDKTVTVKASNVHAKDPEEAPCGVDDMTKLAYLHEPGVLQNLKARYDMNEIYTYTGNILIAVNPFRRLPHLYDTQMMQQYKGAEFGELSPHPFAVADVAYRLMRNEGISQSILVSGESGAGKTESTKMIMRYLAYMGGKAASEGRTVEKQVLQSNPVLEAFGNAKTVRNNNSSRFGKFVEIQFDQKGKISGAAVRTYLLERSRVCQISDPERNYHCFYMICAAPPEERERYKLGDPSTFHYLNQSNCIKLEGLDESKEYLETRKAMDIIGISSEEQEAIFRVVAAILHLGNVEFAEGDDGDSSKPKDEKSLSHLRTAAELFMCDEKA

SEQ ID NO: 56325 - protein, 535 aa, Zea Mays
MMLQSKFITAKEGKERGLIDALCSPDELIKTSRLWALEIANCRKPWMRSLGRTDRLGPLSEARAVLNAARQQAMKIAPNMPQNQACLDVMEEGILCGGQAGVLKVPGVTDVQLKPRPIRKVAVIGGGLMGSGIATSLLVSNISVVLKEVNPQFLQRGEKTIAGNLEGLVKRGSLTKDRMHKAMALLKGALDYSDFKDVDMVIEAVIEKIPLKQSIFADIEKICPKHCILATNTSTIDLNVVGKKTNSQDRIIGAHFFSPAHIMPLLEIVRTEKTSPQAILDLITIGKIIKKVPIVVGNCTGFAVNLTFFPYTQGSHLLVSLGIDVFRIDRVISTFGMPMGPFQLQDVAGYGVALAVKDIYADAFGERNLDSDLVDLMVKDGRQGKVNGKGYYIYEKGGKPKPDPSVKHVIEEYRKHANTMPGGKPVTLTDQDILEMIFFPVVNEACRVMDENVVIRASDLDIASVLGMGFPKYRGGLVFWADTVGAPYIHSKLSKWAEIYGPFFKPSSYLEQRAKSGVPLSAPGASQQGSARSRM

SEQ ID NO: 56326 - protein, 56 aa, Zea Mays
MYGSGIDLFSRMSMSLMILMREKVKLKNAQMWLFMDDSIKKPATCNQILRNLPPAT

SEQ ID NO: 56327 - protein, 80 aa, Zea Mays
MVGDGINDAAALASADVGIAMGGGVGAASDVSSVVLMGNRLSQLIDALELSKETMKTVKQNLWLDYPLLLEHCFQLRGRY

SEQ ID NO: 56328 - protein, 374 aa, Zea Mays
MLERARLMVEMHEMVPGKRFDRYHELGQHAFGDRLGLWIVVPQQLVVEVGVNIVYMVTGGKSLKKFHDVLVCGDTGVCEGKDNIKTTYFIMIFASVHFVLSQLPNFNSISGVSLAAAVMSLSYSTIAWGASVHKGRMSGVDYHLRATTTPGKVFGFFGALGDVAFAYAGHNVVLEIQATIPSTPDKPSKKPMWKGVVVAYVVVALCYFPVALIGYWAFGNTVEDNILITLSKPKWLIALANMMVVVHVIGSYQIYAMPVFDMIETVLVKKLRFPPGLTLRLIARTLYVAFTMFIAITFPFFGGLLGFFGGFAFAPTTYFLPCVMWLAIYKPKRFSLSWLTNWMCIILGVLLMILSPIGGLRQIIMDAKTYQFYS

SEQ ID NO: 56329 - protein, 642 aa, Zea Mays
MAAANAPIAMREALTLTSLGIAPQFVTFTHVTMESEKYICVRETSPQNSVVIIDMAMPMQPLRRPITADSALMNPNTRILALKAQIPGTTQDHLQIFNIEAKTKVKSHQMPEQVVFWKWITPKLLGLVTQTSVYHWSIEGDSEPLKMFDRTANLANNQIINYRCDPAEKWLVLIGIAPGAPERPQLVKGNMQLFSVDQQRSQALEAHAASFATFKVVGNENPSTLICFASKTTNAGQITSKLHVIELGAQPGKPGFSKKQADLFFPPDFQDDFPVAMQVSQKYGLIYVITKLGLLFVYDLETAAAVYRNRISPDPIFLTAESSSTGGFYAINRRGQVLHATVNDATVVPFVSGQLNNLELAVNLAKRANLPGAENLVVQRFQELFAQTKYKEAAELAAESPQGLLRTPETVAKFQSVPVQAGQTPPLLQYFGTLLTRGKLNAFESLELSRLVVNQNKKNLLENWLAEDKLECSEELGDLVKTVDNDLALKIYIKARATPKVVAAFAERREFDKILIYSKQVGYTPDYLFLLQTILRTDPQGAVNFALMMSQMEGGCPVDYNTITDLFLQRNMIREATAFLLDVLKPNLPEHAFLQTKVLEINLVTYPNVADAILANGMFSHYDRPRIAQLCEKAGLYLRALQ

SEQ ID NO: 56330 - protein, 196 aa, Zea Mays
MQGHLRTYMNAGIPKRFKEDEEKEQLAKDLAKDWNAVFERSINTLFLTEMVRGLMLTLKYFFDRNVTINYPFEKGPLSPRFRGEHALRRYESGEERCIACKLCEAICPAQAITIEAEEREDGSRRTTRYDIDMTKCIYCGFCQEACPVDAIVEGPNFEFATETHEELLYDKEKLLENGDRWETEIAENLRSESLYR

SEQ ID NO: 56331 - protein, 74 aa, Zea Mays
MARRYGCAVFAEQEEKIESSTLEQNGDELDGGRLSVFVVHACLRRQESRCWLPPARYLQRRKIFEFLTGGWISL

SEQ ID NO: 56332 - protein, 370 aa, Zea Mays
MTSKFGLAGGIPERRVRPIWDAVDSRQYKPALKLCTALLAKHPTSPYALALKALILERMGKPDEALSGALNAKELLYSDNIFHFDDLTLSTLQIVFQRLDRLDLATSCYEYACTKYPSNLELMMGLFNCYVREYSYVKQQQTALKMYKTVGEERFLLWAVCSIQLQVHFSSGGVKLLALAEALLKKHINSHSLHEPEALSLYVSILEQEKKYDTALEVLSGDLGSLLGREEDKLRLQGCLLAQASSYLSASEIYQKVLESCPDDWESFLHYIGCLLEHDVNLPKPSTGEHTCPSCSVDSALSNKTSLDKELVESRLTSALSFVQSLQENNSSDCVRGPHLAKIEIERQRCLNGNPDNIKLMEALVQYLHS

SEQ ID NO: 56333 - protein, 1235 aa, Zea Mays
MRVTVTPKDEERLVDLMAREQPRSAVVAAGGDLVTAAGGGGEGSDRDSSGSIEEITADDFKKDSSSALGGAAAAAGPRSRSWVAPPAVGYMARNFRYAFNSFAWSQAVRNKPLGLQPPAPDDDEVEHAVDVSDGEKEEGEIEEGEAVEALASPAPAQPETIDLDSDAPEKSESVAIDGSASVVPVPAAEEEEVNLDQRVGSILEELEMVSIEEAEKSFEGACARLHTCFENLKPLFQELENGSPMAILEPLMQQAFIGIDTLTTVANLYNLPRREQNKTTLLKLLFHIKNRYSDMLTPEQREEMDSRVRKLVFGEKDNVSDPSTSCGTSAINVSAPSGQVSNTGGLPFESGAANLFSSLPRLEVPAKRNSPLLNLHADYDENSLPSPTRDNAPPFPALKPIGFGAFPMVPEKLSFLDRVEPTKNSLYPPLNDPLKAVSSYQQKYGQKSVYPSDDLPSPTPSGDEGKPADKGGDIFSDVSSFPVPKSIVLPSTSQMPASQPSTVSSSSISYASSTSQMAASQPITVSSSGISYASGPPGFAKQIEQSTAGPNHAIKAASKSRDPRLRFLNRDSAGATDVNWRANFSELKDGNLGGVSVGNRKQKAVDDPQVDDNALKRFRGGIANQRDMQPTGNPNQLMNIRAPTHSSSINMKTLQPPQTTAPHVSAAPAVPLPPMLLKDIAVNPALLMHLIQMEHQKKSASESQGGMSSGMTNNGIAGMVFTPGNAPKITEAAQVPSVRPQVPVQTPPLNSQNDGGIVRMKPRDPRRILHNNIAQKSDAMSLEQVKNNGTTQPDSQGTKDQTTPVPSQPALPSSIARPFSSAKHVDPVSNSQLAATAIMAPTQALSSVNKVDPRLAVEQNGQNADATTNGASATTLEATQPVSPWGDVDHLLDGYDDQQKALIQKERARRITEQHKMFSARKLCLVLDLDHTLLNSAKFIEVEPIHEEMLRKKEEQDRTLPERHLYRFHHMNMWTKLRPGIWNFLQKASNLFELHLYTMGNKLYATEMAKVLDPTGTLFAGRVISRGDDGDPFDSDERVPKSKDLDGVLGMESAVVIIDDSVRVWPHNRHNLIVVERYTYFPCSRRQFGLPGPSLLEIDRDERPEDGTLASSLAVIERIHHNFFSHPNLNEADVRSILASEQRRILTGCRIVFSRVFPVGDASPHLHPLWQTAEQFGAVCTNLVDDRVTHIVANSPGTDKVNWALSKGKFVVHPGWVEASALLYRRANEHDFAVK

SEQ ID NO: 56334 - protein, 451 aa, Zea Mays
MQSDQPVISLRPGGGGGPRAGRLFSPAFATSVSGDFLRLHVGGASGISKIGDSHFEPRERVRYTRDQLLELRELVDVSEDILRLKQEIDIELHGEDQTWIHNDSAVQGQVQGQTQAQNRYAETDNRDWRARSAQPPSANEEKSWDNIREAKEAYTSSGRQQEQANRQDQLSSQFASKAQFGSTPALIKAEVPWSARRGNLSEKERVLKTVKGILNKLTPEKFDLLKGQLMEAGITTADILKDVINLIFEKAVFEPTFCPMYAQLCSDLNEKLPTFPPEEPGGKEITFKRVLLNNCQEAFEGASSLRADIAKLTGPDQEMERRDKERLVKLRTLGNIRLIGELLKQRMVPEKIVHHIVMELLGSGPDKKTCPEEEDVEAICHFFNTIGKQLDENPKSRRINDTYFIQMKELTMNPLHFTCSQTSPRCPRNAVPKMRGTASFGLYNFARSDEC

SEQ ID NO: 56335 - protein, 74 aa, Zea Mays
MILGIFSYDTVFRICLQTTQPNADDKYVAIDKYMIITVEEAKEFYPLFGLGANVALIFSGHTLKYFSNMRKIRS

SEQ ID NO: 56336 - protein, 556 aa, Zea Mays
MVDFVREGFLGSTHEFRNRFQNPIENGQHTNSTSDDVKIMNQRSHILFEQLKGFVQRKSMNVVKNDLPPKKVFVITVKLSQLQRKLYKRFLDVHGFSSSGYSEKSHRSFFAKYQTLSQVWNHPGLLQMAKEQRGNLRREDAVENFMMDESSSDDNVENYLPNGEKQKDKADQQSKKSNIIMNEESNWWEELLDENTYMKADYSGKMTLLLDILSKSSELGDKVLVFSQSLTTLDLVEFYLAKLQINGKEGKHWKRGKDWYRLDGSTPSSDRQNLVEMFNDLENTRVKCTLISTRAGSLGINLHAANRVVLLDGSWNPTHDLQAIYRVWRYGQTKPVYAYRLMAHQTMEEKIYKRQVTKEGLAARVVDRQQVSRTISKEEMLHLFEFGEEELMEQNENGSTMIEKPSTSNTIKTSVPVPVDSLMLSLLSEQTRWISGYHEHEALLQENEEEKLTKEEQDLALSEWESLRKAASDPERKSSMSAVPTYPNPVRPLKPASRSRQLQQPKANSNNQKKCTNLTHLLTLRSHGTKAGCTTTCNECGQEISWETLNRDGRSR

SEQ ID NO: 56337 - protein, 102 aa, Zea Mays
MVSLRRRRLLGLCSGKDSLPVDLPKPIENEKTVEVAHSNVKPFSVHPLPLAKTSDVLIKSSNGSDDSKEEKTQYYPGLYFILILYYWHFFTLCPGYLWLWYL

SEQ ID NO: 56338 - protein, 732 aa, Zea Mays
MMYAQNAISVNEFHGHSWNKQFANQNITMGEAILTGYGLFKEKYWFWIGVGALFGYAIILNILFTMFLTLLNPIGNLQAVVAKDQVRHRDSRRKNDRVALELRSYLHSNSLSGNLKEQKGMVLPFQPLSMCFRNINYYVDVPVELKKQGVAEDRLQLLVDVTGAFRPGILTALVGVSGAGKTTLMDVLAGRKTGGLIEGSITISGYPKNQETFTRISGYCEQNDVHSPCLTVIESLLYSACLRLPSHVDADTQRAFVEEVMELVELNPLSGALVGLPGVNGLSTEQRKRLTIAVELVANPSIVFMDEPTSGLDARSAAIVMRTVRNIVNTGRTIVCTIHQPSIDIFESFDELLFMKRGGQLIYAGPLGAKSRNLVDFFEAIPGVPKIRDGYNPAAWMLEVTSTQMEQILGVDFAEYYRQSKLFQQTREIVEALSRPSSESKELTFATKYAQPFCAQYMACLWKHNLSYWRNPQYTAVRFFYTVIISLMFGTICWKFGSRRGTQHDIFNAMGAMYAAVLFIGITNATSVQPVISIERFVSYRERAAGMYSALPFAFSLVTVEFPYILVQSLIYGSIFYSLGSFEWTAAKFLWYLFFMYFTLLYFTFYGMMTTAITPNHTIAPIIAAPFYTLWNLFCGFMIPRKRIPVWWRWYYWANPVSWTLYGLLTSQFGDLDQPLLMADGVTSTTVVAFLEEHFGFRHDFLGAVAAMVAGFCVLFAVVFALAIKYLNFQRR

SEQ ID NO: 56339 - protein, 493 aa, Zea Mays
MDDSPILGVIEKKQDASVEDCEDLAEFSPAREMTDEAIPVTEDKEVAISEESVTEDNEVAISEEAVTEDKEVAISEEAVTEDKEVAISEEAVTEDKEVAINEEAVTEDKEVAISEEAIEEDGFANTVETDPTPKEILLTEGEIILIEGKEGAANEMPQAGETSEEDEEDYLAELKEGAADQVLQAELADNETSKEDEDDLSEKREGTAAKMLQGELTDDETSEEDDLDEDEEWVSDDDENTEEDYLAELKEGVADQVLQAELANNETGEEDEDALSEEREGTAAKMLQGEPTDDETSEEDDLDEDEGWASDDDENTEEIGSTDETDEDPDETNEESYTSDAVQMMQGSGIAEDANEDASTEDDDFSGDLPPEFENIMIFSGAETESDIAPPVLEENKDAVVSATKTAKSLDDSALKTGQEEEGPEEVDNVVKSLDEEVESKEMQKQQPQDYNSMSLRKLKATHKKYLIAAKEEVTEGKRLPLEEVDENACIDH

SEQ ID NO: 56340 - protein, 368 aa, Zea Mays
MFGSGRSLIDKISSIDDSMFGSTSYLSEQARVVDDYTISQVITRELSDGDVSRLLIVVTGASHVMYGPRGSGVPGRISKKVPKKDQVVVLLDPERQVIRREGEVPIADFLWYSAAKPCTRNCFDRAEIARVMNAAGRRPEALPQDLQKGLDLGVVSPEILQNFFDLEKYPVMTELIHRFQGFRERLLADPKFLQRLAIEEVISITTTLLAQYERRKGRFFEEIDYVLTDTIRGSVVDFFTVWLPAPTISVLQYADDGSGSSLEFVKGLLGSLPDNAFQKNILGQDWSIKQRIAAVLVGGLKLASVGFISSVGAGVSSDLIYAARGIVKPSENVETGRKRSPIWKSAAVYSCFLGTSANLRYQFNYPYI

SEQ ID NO: 56341 - protein, 158 aa, Zea Mays
MQLKRRKTDVGETLQWTDYMSLSFTQHVITETLRMGNIINGIMRKAVRDVEVKGHLIPKGWCVFVYFRSVHLDDKRYDEPYRFNPWRWKEKDTSTMGFTPFGGGQRLCPGLDLARLEASIFLHHLVTSFRWVAEEDHIVNFPTVRLKRGMPVRLTSKD

SEQ ID NO: 56342 - protein, 587 aa, Zea Mays
MLCHLFSYLSAIAQRRPSFYGRILPVLLSLDPASSIIKLRVPGAFHALKSAFSACLKCTHSSAEPWRARLLEAQNIINQGGSIEDAANAAKNFGDTSNREESWPLMERSTDGSNKRSLAEDMNHVTEDDVHSTKRARQSIDANEHSEEANKTNFESMSVDISSSQPSSIRTGNSEAVYQLIGMFAALAAQGDRAAGSLQILSYSIASDLLAEVVMVNMQHLPISRPEVDQQQLPSTSSGDGLPLSSFSSLLGILLKGANQIDQDEVSPAKEPALVSSVADDRMILPANSPVPSSVNLPIEENSNSPTVPLCIETTEAKVTSAGGNSSIDIPESSEASHASTEPQGTQEHASTFAGPFPADNFSVGFSLAQSSETRSPSSSTLEANHSQLSSLSSQYVLPKLVVNNIDLSDEAKDLLQKEAFVRILESDKKEASGGSIARLPLLAHLGVEFPLEFDPWVILQKHILSDYANNEGHELTICILNRLYHEAEQDHDFLSSRTATSVYESFLLNIAENLRDMFPASDKSLGKLLCEIPYLPEGVLKLLESLCSPGSNERQDKDIQSGDRVTQEFNSSSRGGPHEGNTFGGK

SEQ ID NO: 56343 - protein, 636 aa, Zea Mays
MNQISEKKQLISTILDSSIHNEQEPLSGQSDGSLSNLNAIAKGTEIGYDHQTYHNRSLQQYEFDTTYGESIYDQNTYYESSEDDGTDFSENYQYKSFPRATRSVYELEEDNGMKQGYVVQLSQASGHEQSVNEGTNDNASEVDVMNVILVAAECAPWSKTGGLGDVAGALPKALAKRGHRVMVVVPKYGDYEEPQEIGEPRSYHVAGQDMEVKYYHAYIDGVDFVFIDNPVFHYVQSEIYGGDQTDIWKRMVLLCKAAVEVQWYVPCGGFCYGDGNLVFIANDWHTALLPVYLKAYYRDNGFMPYARSVLVIHNIAHQGRGPIDDFRYLDLPGHYMDQFKLYDPFGGDHLNIFAAGIRAADRLLTVSHGYAWELKTPDGGWGLHSIINENDWKFQGIVNGIDTADWNPRHDVHLQSDGYTNYSLETVQTGKAQCKEALQKELGLPVRGDVPVIAFIGRLDHQKGVDLIAEAMPWIAGQDVQLIMLGTGRQDLEDTLRRLESQHYDRVRGWVGFSVRLAHRMTAGADILLMPSRFEPCGLNQLYAMMYGTVPVVHAVGGLRDTVQHYNPYEEVGVGWTFEKAEANRMIDALGHCLNTYRNYWSSWEGIQRRGMMQDLSWDNAAKLYEEVLLAAKYQW

SEQ ID NO: 56344 - protein, 67 aa, Zea Mays
MSVGRTNATSVHLLSFLSTSGSCSLLSPLLFFKLVPKTFQCAHNLWVQLVLQEFSLQRCRPVNFKFT

SEQ ID NO: 56345 - protein, 910 aa, Zea Mays
MAFKGLPRDSRGSLEVFNPDAPVSDRATTSPFLLPPAAASHPSLLAAGDGGDADVGRATQRAAEWGLVLQTDEHTGRPQGVVARPSGSNRTSESGNSIDERAAAAGAGRALPRVSEELRAALSAFQQTFVVSDATRPDHPILYASAGFFNMTGYSSNEVVGRNCRFLQGSGTDPVEISKIRQALAAGSNYCGRILNYKKDGTPFWNLLTVAPIKDEDGRVLKFIGMQVEVSKYTEGNKDTALRPNGLPESLIKYDARQKDHARSSVSELLLALKDPRSLSESRNNTLKRKSQESAGSALVPGKRSSETGSRRNSHSGMRNSLQKISEVPEGGNKTRKSGLRSFMGLIGMGHGNVEKNILKPREDPLLDSDDERPDSFDDDFRKKEMRKGIDLATTLERIEKNFVITDPRLPDNPIIFASDSFLRLTEYCREEILGRNCRFLQGPETDRGTVKKIRDAIDNQTEVTVQLINYTKSGKKFWNLFHLQPMRDQKGDVQYFIGVQLDGTERVREAAAKDGAILVKKTADNIDEAAKELPDANLRPEDLWANHSKPVLPKPHMKDTASWRAIQKVLENGESIDLKHFRPVRPLGSGDTGSVHLVELLGTGEYFAMKAMDKSVMLNRNKVHRATAERQILDMLDHPFLPTLYASFQTKTHICLIVDYCAGGELFMLLDRQPMKVLKEDAVRFYAAEVVTALEYLHCQGIIYRDLKPENILLHRDGHISLTDFDLSCLTSCRPQVFLPHDIDKKKKRRKSRSNPIFFAEPMRASNSFVGTEEYIAPIITGAGHTSAVDWWALGILLYEMLYGYTPFRGKTRQRTFANILHKDIRFPASIQVSLAARQLIYRLLHRDPANRLGSYEGAMEIKQHPFFRGINWALVRAATPPELEAPLQDTLEATLPPPAADGAHTDMF

SEQ ID NO: 56346 - protein, 384 aa, Zea Mays
MQGISAWILPVFIKVAWQWLPFTSSARTDNLQLYHWVRVVNGIQPTGDYQFAKYNKRADVLKYTDEEYEKYLVDPDWSKEETDQLFELCERFDLRFIIIADKFPTARSVEDLKSPYYSASRALLIHRARSFEDVSGNPLVKDAYDAAHETERKRALSALLSQTKQQERKDAETLAEAKRIMESRAASKNVDVAVMPPNSDNAMVPVDGVSPSSSTHPSLAHPNTSANILIPNSLRTLRVYLRTHALDQMVQAVGASAGLRVIKRVDQTLQELAVNLKPKVPTKAVCIEHIELRNELLTLLNLQKQLQNKEAEVSANRESSFTEAPSTPKRSNRDIDRPFIPDTSGFTGERAGKRDHKRKSTGRFIDAPPSPPQSKRPRKLKGSD

SEQ ID NO: 56347 - protein, 448 aa, Zea Mays
MDYRPSDSSGTDDDLPQFPHKSIRGSGRVSGNGRAVVPAGSYARAPTDMVAQVQQLEQEAYRSVLRAFKAQSDAITWEKEGLMTELRKELRVSDKAHRELLNRVNNDNIICSIREWRSTGGLQASLSNNPQLIHDSVPSPTTSGRKRQKTSQSVPALPAPPPAMHSQQLATPTQPSSSTARKAVPPGHKGKKMKPKVPGGSAAKPIPSSAGPSGRGPHMNRGGSAPEAQAQNVDPLIGRKVMSRWPEDNSFYEAVIYEYDAETGLHALVYDIDTADETWEWVDLKEMGPEDIRWQEDDSGIDPVTYLRSRGGPTSGVRKPAGRGGPMPGSVRGRGLQKNMPKKDFPPPQNGVGKRSSDDIDILHTESLIKEVGKVFSVSNPDPQEVEKAKKALKEQEQSLIDAIARLAEASDGESDGHNRGRRNLYAANQHQASYVGAMPVGDRAGAM

SEQ ID NO: 56348 - protein, 557 aa, Zea Mays
MPVRSSVAMTTTAARALAALVLVTAAAAAAAVADDGAALVEIKKSFRNVGNVLYDWAGDDYCSWRGVLCDNVTFAVAALNLSGLNLEGEISPAVGSLKSLVSIDLKSNGLSGQIPDEIGDCSSLRTLDFSFNNLDGDIPFSISKLKHLENLILKNNQLIGAIPSTLSQLPNLKILDLAQNKLTGEIPRLIYWNEVLQYLGLRGNHLEGSLSPDMCQLTGLWYFDVKNNSLTGAIPDTIGNCTSFQVLDLSYNRFTGPIPFNIGFLQVATLSLQGNKFTGPIPSVIGLMQALAVLDLSYNQLSGPIPSILGNLTYTEKLYMQGNRLTGSIPPELGNMSTLHYLELNDNQLTGSIPPELGRLTGLFDLNLANNHLEGPIPDNLSSCVNLNSFNAYGNKLNGTIPRSLRKLESMTYLNLSSNFISGSIPIELSRINNLDTLDLSCNMMTGPIPSSIGNLEHLLRLNLSKNDLVGFIPAEFGNLRSVMEIDLSYNHLGGLIPQELGMLQNLMLLKLENNNITGDVSSLMNCFSLNILNVSYNNLAGAVPTDNNFTRFSHDR

SEQ ID NO: 56349 - protein, 133 aa, Zea Mays
MVALDGYDGMGPHVKFAQFFVRNAQLLELMKFRIFRNYHCEPGKTKAWIEDQQRQLQVRSMTSRPVKFKFVHDSRYNQDVYCGEDISDLSEHIHDDPFDQWFESEKEAPRHAEGKEDAIVWNSSQRLDSFDQS

SEQ ID NO: 56350 - protein, 160 aa, Zea Mays
MRRNKLNDRFLELGSALEPGKPVKADKAAILSDATRMVIQLRSESQQLKETNGSLEEKIKELKAEKDELRDEKQKLKLEKESLEHQMKLMASAPAYMPHPTLMPAPFAQAPLAPFHAQGQAAGQKLMMPFVGYPGYPMWQFMPPSEVDTSKDSEACPPVA

SEQ ID NO: 56351 - protein, 346 aa, Zea Mays
MENGHTRVDQIENVFDQLISKIEQADPDFDPRPFLKQLNVLGRYEPIKRNVYFTKRYIEDYGISCHCKPSPGSSVVCGRDCYCSMLFSCCSSQCECDIACTNKSFQHRPLTKTKLIKTEKCGHGLVAEDEIKKGEFVIEYVGEVIDDRTCENRLWTMKRLDDTDFYLCEVSSNMVIDATNKGNLSRFINHSCEPNTAMQKWTVDGETRVGIFALRDIKIGEELTYDYKFVQFGAAQVCHCGSSKCRKMLGTTKYSGSSQNHRTKKKKRKTSCENCIQQFLRLWHPRQKMYVGCWIVDFDQGTKMHTLQFIDHHTEKFDLKEEEWHFLEVLRCQRKMNKWMMLNEQG

SEQ ID NO: 56352 - protein, 540 aa, Zea Mays
MLHQENSEAFGRHHSEQLACVNMRGADNGHPNFLPEKCQIAVHQRGEKVGLFDEELVHGIHLTSPCVQSPFLPSGVKETPIVDHNKRPASSDILDIVECKRLKQEDQIVTKEDNHTSAEEEFHDYPTYTTCERSFDSPLYESEESEDEGVDSPLHCSHARTYVEDGLWPASFHQSVGPFSLRKPVPIGSNHQAELPECRPFGGRTEEDESVKWIRNSVVPMPGTDASSLVLEPVHCKAGCDCLDEGSINCVKKHVMEARENLKDSVGADAFRELGFYDMGEEVASRWSEEEERLFQQVVSSNRASLRRNFWDELPLAFPSKSSKELVSYYFNVFMLRKRAEQNRFDPANIDSDDDEWQAGGDFEFPITGRTDEYMPIESLTDQDDVACNPFPLEGDLYGDSDDEDELDNSSGDRHNGVQRAGMLSEGHPEMSFIDHDQQTLKLDADAQDDSCTSFEAHQVGCDGGAHTDIGNHYRSDDGLCGGAEHGFFGDHCDTKEWGFGFSTGWERHDFLSTNNVIEEVFGKGSSEDGSDTATGQDLI

SEQ ID NO: 56353 - protein, 795 aa, Zea Mays
MFLAQGFKEAKDAFKKKNLNKFGVKPGSKSGTPAVRAGTQGKNPDTSNKGRDQKYPKHRNSNSGVATVQQSSSGPKRFESLFWMPLVNNLLKKSLVPVVIFCFSKNRCDKSADSMFGTDLTSSSEKSEIRVFCDKAFSRLKGSDRNLPQVVGIQSLLRRGIGVHHAGLLPIVKEVVEMLFCRGVIKVLFSTETFAMGVNAPARTVVFDSLRKFDGKEHRKLLPGEYIQMAGRAGRRGLDNIGTVIIMCRDEIPEESDLKNLIVGKPTRLESQFRLTYTMILHLLRVEELKVEDMLKRSFAEFHAQKNLPEKEKLLLQMLRQPTRTIECIKGEPSIEEYYEMTLDAEAHREYITEAIMQLPNSQQFLTPGRLVVVKSDSDDDHLLGVILKNPSALLKKYVVLVLTGDCSSSALAPEFNKNEKGPVDFQGGQFIVLKGKRGMDDEYFSSVSSRKASGVININLPYKGDASGMGFEVRAIENKEIISICSSKIKIDQVRLLEEPNKTAYSRTVQQLIKEQPDGTKYPPALDAIKDLKMKDMYLVESYRAYHILLQKMSENKCHGCIKLKEHISLMREQKMYKDQLNELKFQMSDEALQQMPEFQGRIDVLKVIHYIDSDLVVQLKGRVACEMNSGEELISTECLFENQLDDLEPEEAVAIMSAFVFQQRNASEPSLTPKLAEAKKRLYDTAIKLGKLQSEFKVPVDPEEYARDNLKFGLVEVVYEWAKGTPFADICELTDVSEGIIVRTIVRLDETCREFRNAASIMGNSALFKKMEVASNAIKRDIVFAASLYVTGI

SEQ ID NO: 56354 - protein, 100 aa, Zea Mays
MKLGNPRETTIHATFTNLTSSTFTDFIFQAAVPKFIQLRLDPASGNTVPANGSGSVTQGLNITNNQQGQKPLAMRIRMSYKVNGEDRLEQGQVSNFPSGL

SEQ ID NO: 56355 - protein, 188 aa, Zea Mays
MQILNSDDHANYLRKQNRNPADYRPDIIHQALLAIFDSPLTKAGRLQAVYVRTEKGVLFEIKPHVRMPRTFKRFCGLMSQLLQKLSITAVGKREKLLNVVKNPVTRYLPVGARKIGLSFSAEKSVNLFDYVAKSNDDEPLVFVVGAMAHGKIDKEYTDDYIQICNYPLSAACCLNRICSALEQKWNIQ

SEQ ID NO: 56356 - protein, 374 aa, Zea Mays
MVGVPNSDLLAFAQYQSNVDTWLKNSILPYYPDTMITYITVGAEVTESPTNVSALVVPAMRNVHTALKKAGLHKKITISSTHSLGILSRSFPPSAGAFNSSYAYFLKPMLQFLVENQAPFMVDLYPYYAYQNSRSNVSLNYALFSPESQDVIDPNTGLVYTNMFDAQVDSIFFALMALNFKTLKIMITESGWPNKGAVKETGATPDNAQTYNTNLIRHVVNDSGTPAKPGEEIDVYIFSLFNENRKPGIESERNWGLFFPDKSSIYSLDWTGRGNVDVMTGANITSANGTWCIASTNASETDLQNALNWACGPGNVDCSAIQPSQPCYQPDTLASHASYAFNSYYQQNGANVVACDFGGAGIRTTKDPSYGLCL

SEQ ID NO: 56357 - protein, 149 aa, Zea Mays
MCGQFGVPFWEFLFATLIGKAIIKTHIQTLFIVSLCNNQLLYLIEKELIWIFGHVPGFSATLPSVIARLHAAKDKYLSPPAPVSPSSQMGEKQWNFSFTSVWNSIVWLVLLNFFIKIVTSTAQDYLKKQQDTEMELISDSPIQDHSKTN

SEQ ID NO: 56358 - protein, 456 aa, Zea Mays
MAGRFLLVVAVALLLRPGDASVHEYRGLSFANKGNAFILHAGSEGLYAASHANTTAEDAAAVAEALIRFDKITFRRSEDTNNSVKETSSAKVQVLIFEIEDREMIGGSAYGGQKAICCTSDLAKLGACTEGSVIYRPSQVNPGWPKLFVASFDGSDLIATLPSRTIPITKTGIYNMYFIHCDPSLASLEIEGKTIWKNPTGYLPGRMAPLKNFFGLMSFAFVVLGIYWFYQYMKSWREVLPLQNCITLVITLGMFEMALWYFEYAEFNETGVRPKGITFWAVTFGTVKRTAAEVIVLIVSMGYGVVTPTLGGLTSKVVMLGGTFFLATEILELVENLGAVNDLSGKARLFLVYPVAILDAAFVIWIFISLAKTIGKLQARRLMAKLDIYRKFATALIISVLVSVGWIGYECLKLETRSVTLNCTFLLSRTCPFCIVWIHLFAPYLFMHMFHYFRSH

SEQ ID NO: 56359 - protein, 557 aa, Zea Mays
MRGVLDYIGSVDVSPELCYLHHELLNLMLVLMSTQLCSGPSPEPKDVHPFIDAAMLQDSSIVASVVQKLLLNFVTRPKIPLNASHPVFSDDGRPGVLQRVGSAAANFVLLPYYYLVSSTPEGATSQLADNSLLVLLIMIHYRKCISTNESIPTNNVYTMDSNTNDKDAPVFHDNPYCKALNSAKDIQYDRADVEGNAQDRPVVRLSFASLFDAFGRCLNDESSVLLLYSLVYGNCDFQEYVLVRTDLDTLLMPILEMLYNASRKTSNQIYMLLIILLILSQDSTFNASVHQLVLPAVPWYHERLMHQTSLGSLMVVILIRTIKYNLSKLKDVYLHTNCLAILANMAPHVHRLSAYASQRLVSLFDMLSRKYAKLAELKNDKSLKVIYDQMEADIADDMSIELHIYTDFLRIVLEIIIAILTYALPRNPEVVYAVLHRQEVFEPFKNHPRFSELLENIYTVLDFFNSRMDMQQLDGEWSVDKVLEVINKTCRSWRGEGMKMFTQLRFTYEQESHPEEFFIPYAWRLVLSRGFSFNPDAINLFPVEIHLEEAPAGGQKV

SEQ ID NO: 56360 - protein, 314 aa, Zea Mays
MWYEPYLRDDEEFSPGSNGRKTTMGVYVRDLILGQYYFDSLLPRIPLPVTRQITANLEKMKLPTKLSGATGDSSRQGSEDTARRPPSVKASLSVSFGQRAPHRASTRDSSPVRRTVTRDGHRSSYSPSRRSGSREGPDHDRSDRELDHSSRDRERARDRSNRDRYHSSRDLDRDKDARDYHRHERDSRDREYYRSRHSEERRDDRRDHESSRHRRSSSRHRSRSRSRSRSRSRSRRSRSRSTSRRSLNEQRSSPFRDANKEKAATVSSNLAKLKDLYGDITAKKEDSDAEKLHRDSCAEEVIRLGGPRWRKSPA

SEQ ID NO: 56361 - protein, 470 aa, Zea Mays
MTEAERRTHRFGGVSGSSLRPAHIKELEEVKLLKKLSHPNIVRYLVTVREEDTLNILLEFVPGGPINSVTFGEARFIPRAWHAQSGPISRLPLVTISYSSNLLRDVPVRQPLWHNPPPPQAQAQVDMDLPSLAVVLRAALSHVPEERKAAEESLNQFQYTPQHLVRLLQIIVDGSCDMAVRQVASIHFKNFIAKNWSPNDPDESPKVLESDKAMVRENILGFIVQVPPLLRAQLGESIKTIVHSDYPEQWPSLLHWVSHNLDLQNQIFGALYVLRVLARKYEFKSEDERIPLFHIVEETFPRLLSIFSKLVQIVNPPIEVADLIKLICKIFWSSIYLEIPKQLFDPNVFNAWMVLFINLLERPVPVEGQPIDPEIRKSWAWWKVKKWTIHILNRLYTRFGDLKLQKPESKAFAQMFQKTYSGKILACHMQLLNAIRGGDYLPDRVINLVLQYLTNSVTKNSMYQMMQPQI

SEQ ID NO: 56362 - protein, 606 aa, Zea Mays
MRGSRMNPGDRRTRSTMTIVIVMGLSCFFYILGAWQKSGTGRGDSIALRVNQETDCTILPNLHFETHHTISGANPLIMSNKMIEPCHIRYSDYTPCQDQNRAMAFPRQNMTYRERHCPVENEKLHCLIPAPKGYVTPFSWPKSRDYVPYANAPYKSLTVEKAVQNWIQYQGDVFKFPGGGTMFPNGANAYLDELASIIPLADGTIRTALDTGCGVASFGAYLMDRNVLTMSFAPRDSHEAQVQFALERGVPAVIGVLGTIKVPYPSRSFDMAHCSRCLIPWESNGGMYMMEVDRVLRPGGYWILSGPPINWKKYYQSWKRSKQDAEEDQHRIENIAEMLCWDKIFEKDDIAIWQKQGNSYSCHQKDGHASKMCKVQDSDDVWIGYKKLESCITPPIEAAQLKKFPERLSAIPPRILEGQVPDITEEVYEEDNKLWKKHVNTYKRVNKLIGSSRYRNIMDMNAGLGSFAATLHSSSSWVMNVVPSISERNTLGIIYERGLIGIYHDWCEAFSTYPRTYDLIHGNDIFSLYQNKCDAEDILLEMDRILRPEGAVILRDNADVLNKVRSMVAGMRWKSKLLDHEDGPHVPEKILISVKEYWVGSEEQNS

SEQ ID NO: 56363 - protein, 871 aa, Zea Mays
MAALVALTLALALTAAVTATAKECTNIPTELSSHTVRARLQAAPGGAAEWRWRELFHEHLNPTDEAAWMDLMPPPGAAAAAQHQQHHRQEELDWVMLYRSLKGQQQQQPVGGGTAAAGSTPFLEEVSLHDVRLDPDGDVAYGRAQQTNLEYLLLLDVDRLVWSFRSQAGLPAPGTPYGGWEKPDSELRGHFVGHYLSATAKMWASTHNGTLAGRMSAVVDALDECQRAGGTGYLSAFPAEFFDRFEAIKPVWAPYYTIHKIMQGLLDQHVVAGNGKALRMLVAMADYFAGRVRNVIQRYSIERHWTSLNEETGGMNDVLYQLYTITHDQRHLVLAHLFDKPCFLGLLAVQADSLSNFHANTHIPVVIGGQMRYEVTGDPLYKEIATFFMDTVNSSHAYATGGTSVSEFWSNPKRLAEALTTETEESCTTYNMLKVSRHLFRWTKEIAYADYYERALINGVLSIQRGRDPGVMIYMLPQGPGRSKAKSYHGWGTQYESFWCCYGTGIESFSKLGDSIYFEERGERPALYVVQFIPSTFSWRTAGLTVAQQLMPLSSSDQYLQVSFSVSAKTTNGQFATLNVRIPSWTSLNGAKATLNGKHLELASPGTFLTISKQWGSGDQLSLQLPIHLRTEAIKDDRPEYASIQAVLFGPFLLAGLTTGDWDAKTGAADAAASDWITPVPVESNSQLVTLAQESGGEAFVLSALNGSLTMLQRPKDGGGTEAAVHATFRLVPQGGAGAGAAAMLEPLDMPGMVVTDRLTVAAEKSSGAAFNVVPGLAGAPGSVSLELASRPGCFLVGGGEKVQVGCAGGAQQKRGDGAWFRRSASFARGEPLRRYHPMSFAARGVRRSFLLEPLFTLRDEFYTVYFNLVA

SEQ ID NO: 56364 - protein, 588 aa, Zea Mays
MGMLAAAVAPALLASPQASLVRRRLSGAWTLRLKPAAASHGVAALRVHNFLPKCYITNVEVDVSTVNKEETFDDHPSLAPGRNIPLVNLRGDILDSSPFPLHDRASCPSGFEELPVLSEGEQHTLASTPAHPAGLYALYASYLFGNLVEQLWNFAWPATLAILHPNLLPVAIVGFFTKLSVFVGAPIVGKLMDHFPRIPMYTALNAVQVGTQLISAATVIYALRNLSHASTTAVVLRPWFIALVAAGAIERLAGLALGVSMERDWVVLLAGTNRPVALAQANAVLNRLDLVCETVGASVFGLLLSKYHPVTCLKIASGLMICSFPVLVMLGQLINRVSCHALDSSRTATDESICADLLDVRRIVPNSLRAIKHGWNEYKQQTVLPASAATVFLNFNVALAPGAIMTALLMHRGTSPSIVGAFSGLCSIMGLVATFISSSLVKRVGILKAGAAGLIFQASLLSIALTVYWAGSISQTTPLLIFLASIALSRLGHMSYDVVGTQIVQTGVPASKANLIGGMEVSIASLAELVMLAMAIIANDVSHFGFLAILSVSSVAGAAWMFCRWLTNPTDEQRELFMVDPLYQVQAI

SEQ ID NO: 56365 - protein, 124 aa, Zea Mays
MNDSGITLKEKSSDPPINDKKQDSAAEPASTSPKRRKVLKTRIDERGREVTEVVWENEASADDKAEQNVNTIDATASGATVPSKPKPATNADKSKAPSKTAAGNKKAAKAGAKQGSIMSFFKKA

SEQ ID NO: 56366 - protein, 326 aa, Zea Mays
MELANFQQQPNQAPGPGGKQRTSSLEAPIMLLTGHQSAIYCMKFNPAGTVIASGSHDKDIFLWLAHGECKNFMVLRGHKNAILDLQWTTDGTQIISASPDKTLRVWDVETGKQVKKMAEHSSFVNSCCPARKWPPLVVSGSDDGTAKLWDLRQRGAIQTLPDKYQITAVSFSEAADKVFTGGLDNDVKWWDLRKNEVTEHLKGHQDMITGMQLSPDGSYLLTNAMDNELKIWDLRPYAPENRNIKTLTGHQHNFEKNLLKCSWSPDNRKVTAGSADRMVYIWDTTSRRILYKLPGHNGSVNETAFHPTEPIIGSCGSDKQIFLGEL

SEQ ID NO: 56367 - protein, 251 aa, Zea Mays
MWKNMHECHQVQNHIAQQVSLLGNRPGSEPTSDTHRQATSQLEIEVSGWHTAFCNLITSQREYVSILSQWIGLTDCLPDDGGLMRSSSGILSLSEELQRALDRLPEKVAAEAIKTFMSVIHSIVVQQSEERQLKKKSDNMDSKFQTQLEKHSENTMQNSAQPPNKNNYSASKNGTKLDAFIKQVEEEKARYLTSVRVSRAMTLNSLQTSLRNVFHALEGFSGVCVQAFEGISRCSEVAVIHSGAASPAISS

SEQ ID NO: 56368 - protein, 239 aa, Zea Mays
MHLLKLPGILSMMEVSNQMLELYEQNRVQPPPSQGNDTEGSSASVANQRVPGKVPGVADEPPAHDHNQAPRPSSQQNMLDHRGYDHPHPDKQNYRIPPNDARDGTANSNEGPNVSSSMMDAMKKVNKDKVKAALEKRRKSKGDFSRKVDVMDDDDLIERELEHGVELAAEDEKVKQERKQSWPHLAHHQSTNRENTEEGELSMDSQEYRSPEHDNRKRKDVREYRNYDRDERDLKRLRS

SEQ ID NO: 56369 - protein, 506 aa, Zea Mays
MTEAERRTHRFGGVSGSSLRPAHIKELEEVKLLKKLSHPNIVRYLVTVREEDTLNILLEFVPGGPINSVTFGEARFIPRAWHAQSGPISRLPLVTISYSSNLLRDVPVRQPLWHNPPPPQAQAQVDMDLPSLAVVLRAALSHVPEERKAAEESLNQFQYTPQHLVRLLQIIVDGSCDMAVRQVASIHFKNFIAKNWSPNDPDESPKVLESDKAMVRENILGFIVQVPPLLRAQLGESIKTIVHSDYPEQWPSLLHWVSHNLDLQNQIFGALYVLRVLARKYEFKSEDERIPLFHIVEETFPRLLSIFSKLVQIVNPPIEVADLIKLICKIFWSSIYLEIPKQLFDPNVFNAWMVLFINLLERPVPVEGQPIDPEIRKSWAWWKVKKWTIHILNRLYTRFGDLKLQKPESKAFAQMFQKTYSGKILACHMQLLNAIRGGDYLPDRVINLVLQYLTNSVTKNNIIEDLYSPRTAAMDFVSELVRKRGKNNLQKFIHFIVDIFRSIIDL

SEQ ID NO: 56370 - protein, 2091 aa, Zea Mays
MIRHQIRNEYGLADPEVYAAPGEEDDPEALLEGVAMAGLVGVLRQLGDLAEFAAEIFHDLHEEAMATASRGHGLMLRLQQLEAEFPAVEKAIISQTEHSNYPHDDGAEWHSNVQLKQNVITQGDMPRFIMDSYEECRGPPQLFTLDKFDVAGAGASLKRYSDPSFFKTEHASNMIEADVLIENKPRRIKKKAMRWRKGATLESLLTANSESQITPKDRTSRKVPPRTTKLKSRQPRSPDHKTTSRILREHLQEVILSQKKIISRYSVRHYYVKFGSPDSSETAPPFGEMDSFGALVQSSGKLDLTKVVPVNESDAVDTKSEPIDGSAYLELGDKRNLGKQHEPFQQNGMVHSSEKLPDCPYLDIGESNNRSHLTCEEKPRLAEVPADQKDVDGRRPDDIVSDQDNFIGASNDTDMENKEGLQMKTECDPSASVELVELNRHNKEGDKVLYAEPPEVGPAIDSSLGLDNASSGEEPTCVDLPLSSDSAPTVSATNGPNSGSQSGRQMNGVDWSTDEESSNDVDLIDVSSSSSVVSENGDVQNNDCLVSCLQHEEAIHSLSDDHAGAIHNSDEQSPNTSSNWDDMAIGCNNYTEKVHHPVEHVQDVVLDDISMILSKPNDVSEDEDKISSGNADDLSLHPTKLNQEEIQELKTESEEGRSLESGSSPSKASLPNKDHVSMNDVEADTVTIPKETVADTAPTGLDPDGIDERQDGVAPKYSSIHNSVLYESYDDKIAEDTHSLLDDGLSTTFDDDKHVAEDHQFVVLEQRTCPTSLNTCKDDSMQGCAVARDFTDAEKLPGVVSGVLASQLETESHVGETLASTSYAFSDDTEALEIGVPLAPGTSFLPNTSSSLVEKHELTETEEIAEVGEFVVAKESTTSVFAVDVVPPKEFIDANIHPEKVEVLATSLTEEATRLDLQLQSPSREVLETTEAIHRNFGAVDESREDISKKSMLQTDNSPLIVETTSEKCSDRDGDTQFLVKSDYQEELLKEGSHNAEDRSLCDLNKDGAVTLKSNAVEKQPVNAGQDLAWGMHAQDSSSTNPFLDPAYLMSHTQIYSSSSMSSQPCFPEEEDFLSELVIQHDNMGVTADALWEPATPPDDAPLPSEIMTEDDFRSFCQEYHEIDFSSVTNCSHSEPASDSNKIPNAFLIRESDFPCYNSALPVKLDQEACIHSKFCSECVEYSCAVERQGTTSMVVSGKEDRVGKDETPGVDFHLNFLEFSNDNRSPELNMLSVPVDLRQELHGLPEVDSRDSSPLLHKEKTSEECCFSLSNNVVEVKQELEIRADLVPHSSINEKVDGLDEAVPVEPEAHACALDEYDNQDVPHISTSEKNETLTLGKPVLVQGPEVCAFGGFECDPPIIPSPSVDETKDNLEVRMNMILQSFHHSLRTSFQAEQKSECYTSGEHDSQTVPFPLHDENINELDDPPLSNADELDRESKACVPHECDAQIAPCSTDEDIHELDHPPLSSPALVDLESEDHVSDDRDSEVTPCLVKDKIDESVDAQPNLLPGELEQETHAPPELDFRVAPQSAKESDCSTEFDSQAAPCSSNIPVLANTTVSTCISAMPSSEETYQLSPVPPPTVQFQNDSYKDPQALLADSYKDPQAPPPLPPLQWRLGKPRLGLLSRKGCMTEPARVIDPVLQISSQEMDIRPGLLDPTDRSIEPVSCQEIKEDRCESSLIDHNDQNVDFDRLSTRVAVTDVARTEHRLSLETSEDIKQQGHISSSATGVGEHLDAGFTSTMADEEHLDDSGMTHGTALYLSDPLFPLPTYELQDPQPDTRENSEHPSQTHGAASGDDKSMDAVGSMESTLTKGHVSGNRCYQQPQHGESSSETSDHKEHITNASEDGVKHQSGTSEAPSDTAKHSAPGTLLKGNVQESQILQEHNVGSSEDDQPGGLLYSLEPVAPQGENKNQVNNPGLLLEWPGDTSELVTGLEKSCYAHAEQPPVMGWTVGPQMLHPKYGILEEESQFEPNIADNHLIRKPISIKNIPRNPLVDAVAAHDRSSMRKVSELAPPTDKPKPNERNMLLEQIRNKTFSLKPVAPAQQTAMRSPARTSTRNLKVAAIIEKANAIRQAVGSDDEDADSWSDT

SEQ ID NO: 56371 - protein, 161 aa, Zea Mays
MDGDGFLNLTEFNDFLHPADTTNPKLIHWLCKEEVRERDKDNDGKLNFQEFFNGLFYSIRHYDDEGLTDDTGGSDAPAKKSFSHLDLDNDGLLSADELKPVIGNLHPSEYFYAKQQADYVISQADTNKDGQLSMNEMIENPYVFYNALFTEDDYGFHDELR

SEQ ID NO: 56372 - protein, 1090 aa, Zea Mays
MASDFDETDEAFFDKLVNSDDDDDPPAAAAVGGLAALSLTDQPDAPPPRESEPRDQPAAAAAAAAAPTEDAEREPSPEVYPAAVLLHPPPDLAATVGADPAGDLLPEDGEPFSGAAAVPEDHQGLEPSLSSSLSAGTGDGSAPDRTVSGHTESNASSQLDSSTAAEGSGHQSAKSQLEYTDPRYLESLYPGWKYDDATQQWYQVDTLSAQSYAAQNTGAAVADHRSDGDLQQKFGGSYLQNTSHAGTGLEHRQTASQPETEAGNQPAVAPQKEGEAQCEPKPMHTEVGYGESNATSQFDSRATAEGYGDRSADAQVEYTDPRYLESLYPGWKYDEATHQWYQVDTLNTQTYAARDTGGAVADLASGGSVQQHQQFSGSYIQNTSHPEPALELTEPTSESKPQLEPAAAPPQTDAYPAVASHKEEQKEHGSVPVHTKPEAQEIPANAGDTATVTEGGSPGSEKGIHTAVKQVQWNDFGASTGGADLFGDLLPDGAEDDFFEGTVPVSQDVSSLVGATNVSAPDHSFSAGVYNTAMISAGHSFSDGVDKNANSHFGPSGSSAGYGDQSTNAQLGSTDPKYLESLYPGWKYDEATQQWYQVDTHSAQSYVADNTGAVVAVGSDNTQQHQQQFSASYLQNNLHAALETIAEESSTNAMSWVQGGTNTGPPEYPPNMLFYAEYPGWYFDTNTQQWQTLESYQQSVAHVATTAAASDGFAGTCHNVAHYTEDSYASSYNQQSQWQPDSFGNTMQADVLGGKSLLGSSYGSNQQAGNQIGQQANVDSLNHEPHVNTFMPSTGQSTGSEGNQASYKSFGSFTGNQSWYSGLEHSTSKELRYKGFEPSTGFQTSRKEFQPPKDHQAGHMADEPLTRYGYGSSNGVVNTQNFVPKEGMHKTQMHDDSTAHTYAASNYWGTQTSMGSAQQQLTGTNGPSQQFGFSPHEQRSSAGRPPHTVVSFGFGGKLVVLKETSSMAANFDSGNQGNSGRTVSVLNIPEIVADKIDHSSIANGGAFSYFHALCRHPIPGPLVGGSAASKDLNKWLDDMSGVYESSQTEFQGGDVQKVLISLLKILCQHYGKLRSSFGSDPSQEMAQRWQ

SEQ ID NO: 56373 - protein, 89 aa, Zea Mays
MANLVAGNFSPSRSDAMNPSCAVAKLHPYLNAGKNTSIVIAMPRTPCSSVQFDCGARGRPIGATVAFSTVWPWRRLCAVPWGLKKSAGR

SEQ ID NO: 56374 - protein, 970 aa, Zea Mays
MADSRRTWSWDVSGFEPPQPATTQAASAPTAMPRAPPTAMMPRPSAGAPRASAGAVPVADQLDQLVDSVQLAREDCLELRQEASDLLEYSNAKLGRVTRYLGFLADRTRKLDQAALETEARITPLIHEKKRLFNDLLTLKGNVKVFCRCRPLFEDEGPSVLEFPDDFSIRVNTGDESLTNPKKDYEFDRVYGPHIGQGELFLDVQPFVQSALDGYNISIFAYGQSRSGKTHTLEGSSHDRGLYLRSFEELFDLSNSDTTSTAHFNFYFTACELYNDQVRDLLSESSSTVPKVRMGVQESFVELVQEKVENPLEFSAALKIALQNRSVNSPKAMVSHLIITIHIHYRNYVTGEHLYSKLSLVDLPASECLLEEDANRDNVTDFLHVSKSLSVLGDAFASLSAKKEPVLYGNSRITQILADSLGSSSKILLIVHVSPSASNLSRTLSTLSFSARARNAELSLGNRDTIKKWKDVANDSRKQLHDKEKEVLDLRQEVIGLKHSLKEANDQCILLFNEVQKAWRVSSSLQADLKSENLMLAEKHKTEKEQNNQLRDQISHLLKVEQEQNLKMQERDLTIQSLQTKLKSIESQLNEALNASDARSTIGSESASVISSPKITESTADSSSVTKRLEEELAKRDALIEKLHEENEKLFDRLTEKSGLGSAPQVLAAVIKAGAAREHEILAEIRDAVFSFIRKMEPKKVMDTMLVSRVKILYIRSLLAKSPELQSIKVSPVERFLEKSNTGRSRSSSRGSSPGRSPVHHHGHGSRTALVDEHVHGFKVNIKQEKKSKFSSIVLKLRGIEEETWRQHVTGGKLREITEEAKAFSIGNKALAALFVHTPAGELQRQIRAWLAENFEFLSVTGADAAGGAAGQLELLSTAIMDGWMAGLGTAQPPTTDALGQLLSEYTKRVYTSQLQHLKDIAGTLATEEADDPAHVSKLRSALESVDHKRRKKKVAHQFAILLLLRRMHD

SEQ ID NO: 56375 - protein, 464 aa, Zea Mays
MPELRSSTRQACLRSKKLEDLQLGEPPAKPVSPAPPRAGKRAPTRAARGRKGATGKGVPPAPTTRRKRGNIVDLEADPACEDPPKAVKGLEVAAAAAPKNLPLKEVAEVGVLKMNGVSAEKIIGAEDESTATPVPERVQVGNSPEYITDRKLGKGGFGQVYVGRRVSGGAARTGPDAYEVALKLEHRNSKGCNYGPPYEWQVYNTLNGCYGIPSVHYKGRQGDYYILVMDMLGPSLWDVWNSMGQAMTPNMAACIAVESISILEKLHSKGFVHGDVKPENFLLGQPGSPDDKKLYLIDLGLASKWKENNGHHVDYDQRPDIFRGTIRYASVHAHLGRTGSRRDDLESLAYTLIFLIRGRLPWQGYQGDTKSFLVCKKKMATSPEMLCCFCPAPFKQFLEIVTNMKFDEEPNYAKLISIFDGLIEAPASRPVRIDGALKVGQKRGRLHANLEDEQPKKKVPLQCG

SEQ ID NO: 56376 - protein, 610 aa, Zea Mays
MPSALYASTSDVFEASAYLALEDFLHAGVKGLWQTFWGPDEAMPFSVACVHSTSSRFYPAEKAISSGRLDGVCATAVLLKNLKPSQGRWDHIVVLALLRPDVGMVSAQGDEEPSPAVLGEALFFALRVLLSRSLSKSSTVLRNSDSVYVLLFDSQFGGVVKVQGDLNRLDFDLNNVYDCAAEWIKKHSRISVCSVDRVWNKLGNANWGDIGTLQVLIAIFHSMIQFYGEPKYSLDELATEHSSRLQSRRSERHLVDRQANGNGLFRFQQRSHSPEIVELQEEAAVDVKPHETLRLEIGSVVLMDDAYTQKGFQISDILTGSDPPIYTSAPVEEPTKTCLLYVGSSPSHLDPAWEDMDSWYQVQRQTKVLTVMKQRCISSRYIPHMESSGRVIHPGPCNNPNSNASCGHPWCSTPMLVTSPVGETISNLIRNGLFGAEEALRCCHDCLSALAAAASAGVRHGDIQPENVICVNNGSTHPYFVLIGWGHAILEDRDRPVMNLFFSSTFALQEGKLCGASDAESLIYLLYFSCGGVCPDLDSVESALQWRETSWSRRVIQQKLGDISAVLKAFADYVDSLCGTSYPMDYEIWLKRLRRTINEDHGKEVDTSSS

SEQ ID NO: 56377 - protein, 201 aa, Zea Mays
MGRSDQDDLTAAQIFYPCMQCADIFFLKADICQLGMDQRKVNVLAREYCDDIKRKNKPIILSHHMLPGFKEGQEKMSKSDPSSAIFMEDDEAQVNVKIKQAFCPPKIVEGNPCLEYIKYIVFPWFGRFEVIRKESNGGNKTFTCMNELISDYETGALHPADVKPALAKAINEILQPVRDHFNNNNEAKVLLNTVKKYRVTN

SEQ ID NO: 56378 - protein, 260 aa, Zea Mays
MDDVHDIHGLRLVVETEEDCYRALDIVHKLWPRVTGRFKDYICHPKLNGYRSLHTVIMCEGVHPFEIQIRTKEMHLQAEYGFAAHWRYKEGGCRHSFVLQMVEWARWVLTWQCETLSKERPSSLSSSVGIRPPCPFPLHSEDCSYSYSRQCNYEGPIFVIMLEHDKMSVQELPANSTVVDLMERVGANSPRWSPCSFPLKEELRPRVNHKPISDPNRKLSMGDVVELTPALPDKSLSEYREEIQRMYERGGFALATTPRS

SEQ ID NO: 56379 - protein, 779 aa, Zea Mays
MTSANKAKLQLQERVPLPRTAWKLADLAVLSLLLALLARRASSLVSSGGTAAACTWCWVAALICEAWFTVVWLLNMNAKWNPVRFVTHPERLAGYWAGDDELLPAVDMFVTTADPKLEPAVVTVNTVLSLLALDYPAGKLSCYVSDDGCSAVTCYALREAAEFAKLWVPFTRKHGAKVRAPFAYFSSSSGGGAAERGGGGGAADADAEFLRAWTSMKNEYEELVRRIESAEEKSLVRRGDGAFAEFVGADRGNHPTIIKVLWDNDSSKSESDEQAAGDGVPSLIYVSREKSRTQPHHFKAGAMNVLTRVSAVLTNAPIMLNVDCDMFANNPQAALHAMCLLLGFDDEVHSGFVQAPQRFYGGLADDPFGNQMQVIFEKVGHGIAGLQGIFYCGTGCFHRRKVMYGVPPGSGTGATKDSPSYKELQKKFGSSKELIESARSIITSKEAPAAVADLTSRVEVAKQVSACSYETGTSWGQEVGWVYGSMTEDVLTGQRIHAAGWRSALLSPDPPAFLGGAPTGGPASLTQYKRWATGLLEIVLSRHNPFLLSASKRLRFRQCLAYLVIDVWPVRAPFELCYALLGPYCLIANRSFLPKASEPGFVVPLALFLAYNAYNLGEYVDCRLSARAWWNNQRMQRITSSSAWLLAFLTVVLKTVGLSETVFEVTRKEQQQQQGSPDGDGADADPGRFTFDSSPVFVPPAALAMLSVVAVAVGAWRAVTGGGGGPGVGEFVCCAWLLLCFWPFVRGLVGGRGSYGIPWSVRIKAALLVAAFVHLSTRK

SEQ ID NO: 56380 - protein, 921 aa, Zea Mays
MLLSITTLAIADIIMEADSLCNETELNSHVNEKKAIGNLRNELMLSLQILGDYESLLVPPSCVIPAANQAATKAAMFISGISINNGYMDNVNGMNYTGNMRHLIVESCISRQLLDTSAYYWPGYIMNHANSTSHTLPSQLAGWSSFMKGAPLTQPLVNMLVSTPASSLAEVDKLFEVAVDGSDDDSISAATVLCGATLLRGWNFQEHTVRLVVKLLSPSDPIDNSGRESQLIKLGPMLNVILSGISAVDYAPIFSFHGLIPELAASLMAICEVFGCLSPSVSWTLRTGEEISAHTVFSNAFILLLRLWKFNHPPLEYCIMGDGAPVGSQLTPEYLLLLRNSQVLSSSSLSKQRNGQRQSQVSTSHPSSGNPIFMDSFPKLKLWYQQHQACLASTLSGLAHGTPVRNNVDSLLNQMFRKANKGGTSIGSLSGSSSISNSSSPGGDDSHLWPQLPAWEILEAVPFVVDAALTACSHGRLFPRELATGLKDLADFLPASLATIVSYFSAEVTRGVWKPASMNGSDWPSPSVNLSMVDEHIKKIVAATGVDVPKLVTGGSSSGTLPLPLAAFVSLTITYKLDKASECFLNLAGPALENLAASCPWPSMAIVAALWTQKVKRWSDFLIFSASRTVFHHNNDAVVQLLRSCFAATLGMSSTSVCSCGGVASLLGHGYCPGGFSPVAPGILYLRIFRCIKDCSILAEDILSLLMLSVKDIAETTVPRQRPDKLKKTKYGMRHGQVSLSAAMTQVKVAASLGATLVWLSGGTALVQSLIQEMLPSWFLSAQNLDQGGASGGVVYKLGGHALAYFAVYSGMLAWGIDQTPVSRRRERVMRSHLGFLASALAGKIFLGCDLSLWRAYVSGFLGLVVECTPCWVQEVDLRVLKRLSSGLRHWGEDELAVALLRRAGPEAMGTAAEMILGREL

SEQ ID NO: 56381 - protein, 1540 aa, Zea Mays
MVKTPRSPVTTGTRRCRAKPQKKEEESTENNKLENGSLDATEEVHHGVEKGDGHVTRKRPRRSAACSDFKEKSIRLSEKKSVVMVKKNRMEEEEVDAVNLTKLGPEDPPPCRKLIDFILHDAEGNPQPFEMSEIDDFFITALIMPMDDDLEKERERGVRCEGFGRIEDWNISGYDEGTPVIWVSTDVADYECVKPSTNYKSYFDHFYEKAQVCVEVFKKLAKSVGGNPNQGLDELLASVVRSTNAMKGYSGTMSKDLVISIGEFVYNQLVGLDETSNNDDEKFATLPVLLSLRDQCRSRVELTKLPSNFSNTSLKIKDSECDETAEDDDDAKLARLLQQEEEWKMMKKQRGRRGTPSQKNVYIKISEAEIANDYPLPAYYKPFSQEMDEYIFDSDDSIFSDDVPVRILNNWTLYNADSRLISLELIPMKSGAENDVVIFGSGFMRDDDGSCCSTAESVKSSSSSSKADQLDAGIPIYLSPIKEWIIEFGGSMICITIRTDVAWYKLRQPTKQYAPWCEPVLKTARLAVSIITLLKEQSRASKLSFADVIRKVAEFDKGNPAFISSNITLVERYIVVHGQIILQQFADFPDETIRRSAFVSGLLLKMEQRRHTKLVMKKKTQVMRGENLNPSAAMGPASRKKAMRATTTRLINRIWSDYYAHHFPEDSKEGDGNETKEIDDEQEENEDEDAEDEGQIEENISKTPPSTRSRKLLSQTCKEIRWEGETSGKTLSGETLYKCAYVRELRIPVGGTVALEDDSGDTVICFVEYMFQKVDGSKMVHGRILQKGSQTILGNAANEREVFLTNDCLEFKLDDIKELVMVDIQSRPWGHKYRKENSEADKVEQVKAEERKKKGQPMVYFCKSLYWPEKGAFFALSRDKMGLGSGLCSSCDNIEPDSDELKIFSKTSFVYRKVTYNVNEFLYIRPDFFAEDEDRATFKAGRNVGLKPYAVCQILSIPEGAGSKKLNPASANISARRFYRPDDISSAKAYASDIREVYYSEDVIDVPVDMIEGKCEVRKKNDLASSDLPVMFEHVFFCELIYDRASGALKQLPPNVRFMSMVQRTSALKKNKGKQICEPDQIDSGKWLDVPKENRLATLDIFAGCGGLSEGLQQAGVSFTKWAIEYEEPAGEAFNKNHPEAVVFVDNCNVILKAIMDKCGDTDDCVSTSEAAEQAAKLPEVNINNLPVPGEVEFINGGPPCQGFSGMNRFNQSPWSKVQCEMILAFLSFAEYFRPRFFLLENVRNFVSFNKGQTFRLAVASLLEMGYQVRFGILEAGAFGVAQSRKRAFIWAAAPGEMLPDWPEPMHVFASPELKITLPDGQYYAAARSTAGGAPFRAITVRDTIGDLPKVGNGASKLTLEYGGEPVSWFQKKIRGNMMVLNDHISKEMNELNLIRCQHIPKRPGCDWHDLPDEKVKLSNGQMADLIPWCLPNTAKRHNQWKGLYGRLDWEGNFPTSVTDPQPMGKVGMCFHPDQDRIITVRECARSQGFPDSYEFAGNIQNKHRQIGNAVPPPLAYALGRKLKEAVDKRQEASAGVPAP

SEQ ID NO: 56382 - protein, 142 aa, Zea Mays
MDERGEKEEEHGVVEEETAAVVLKEVEVEMEMVGGSEEASAAPLLLAHPCSLLQLLLRACAGCLVRLLHGHCSDGANDDPKAAADDDDAAPEAAAAAAAAAGDGGDKAATYLYMQEVWAVRRRPTTPGRPREGSGGNGGSHN

SEQ ID NO: 56383 - protein, 746 aa, Zea Mays
MENRDSFTRPPAPSYAHGTQTAKGVAVPTGGDTAATNLTSSSGLSSSLTLSPPHFLQQIHAAVKRQRPFGPMQSKLPRATRVLVSGGERANKIGANPSVSKDQERIVTQPQRGMLGPSMLPNVTPDQQKVDSTSKLGSSAPDELMLTAPSMLKSTTDTCAQRVGQQKNKANLLMDTEKSAFDALSSQITSCNALMGESFKKGQLDSVVNPQLTSQRDNFPANQGAQNDHQKNHQELQTVDIAADMDIEYDASNLSRRGIQEARNQNHGKHMIPFSAIGSSVTAMSLHSGPTVQSSQTPQVGGYTSPVQIPESAVESSKGALGHGAQKEHAGATGVGDWNPHNQQVQNLGNGATDKAVSSIGRLRSEGLPANDQSTSARDGGGSRPNKGEKERRKKNYDPNVFFKVNGKLYQKLGKIGSGGSSEVHKVISSDCIIYALKKIKLRGRDYPTAYGFCQEIEYLNKLKGRSNIIQMIDYEVTDKSLLLESTVSPRDGRIKDDHYIYMVLEYGEIDLANMVAQKWKERNNSTMKIDENWLRFYWQQILEAVSTIHEERIVHSDLKPANFMLVRGSLKLIDFGIAKAIMNGTTNIQRDAQVGTLNYMSPEAFMCNDTDSDGNIIKCGLPSDIWSLGCILYQMVYGKTPFADYKTFWDKYKGVTDRNHKIMYEPVDNPWLIDLMQRCLAWDRNERWRTPQLLKHPFLNPPVPRDLPPSDDDPYRLLIERIRVHWDNPMVQKLRSLIEELDGDQ

SEQ ID NO: 56384 - protein, 235 aa, Zea Mays
MASINTDLGAIFVASFYFCGSLAFFPPGPGHHHEGAHHPPIGSAPIPGLSTDYYRLTCPQADETVAPILKKAIAKEPRVAASLLRLLFHDCFVQGCDASVLLDDAEEVVSEKNAIPNKDSIRGFEVIDEIKAALEEACPQTVSCADTVALAARGSTVLSGGPYWELPLGRKTPTANMKLANKKQNSTKRNTAPSHQVLPKARAGQGGPCGTIRKPHHWKCQMREFQATALQPAQR

SEQ ID NO: 56385 - protein, 449 aa, Zea Mays
MYQKSIDDPAGFWSEIADEFYWKQKWSPDNVCAENLDVTKGPIMIEWFKGGKTNICYNAVDRNVEAGNGDKIAMYWEGNEPSQDGKLTYSELLEKVCQLSNYLKSVGVRKGDAVVIYLPMLMELPIAMLACARIGAVHSVVFAGFSADALAQRVIDCKPKVVITCNAVKRGMKIIHLKDIVDASLDQSAKNGVDVGICLTYENQSALNKVDTRWKTGRDVWWQDVVPDFPTKCDVEWVDAEDPLFLLYTSGSTGKPKGVLHTTGGYMVYSATTFKHAFDYKPTDIYWCTADCGWITGHSYVTYGPLLNGATVLVFEGAPNYPDPGRCWDIVDKYGVTIFYTAPTLIRSLMRDGTEYVARYSRKSLRVLGSVGEPINPTAWRWLYDVIGDSRCPISDTWWQTETGGFMITPLPGAWPQKPGSATFPFFGVQSLLTRKVGKWKENAVDIFA

SEQ ID NO: 56386 - protein, 218 aa, Zea Mays
MINTTIVDRSPSVKWDDVAGLDKAKQALMEMVILPSKRRDLFTGLRRPARGLLLFGPPGNGKTMLAKAVASESEATFFNVSASSLTSKWVGEAEKLVRTLFMVAIDRQPSVIFMDEIDSVMSTRLANENDSSRRLKSEFLIQFDGVSSNPDDLVIVIGATNKPQELDDAVLRRLVKRIYVPLPDPNVRRLLLKNQLKGQSFKLSNHDFERLAVETEVT

SEQ ID NO: 56387 - protein, 702 aa, Zea Mays
MAQSCSWGILLAVLVAGLAAAVAVPPATAAVASIDLGSEWLKVAAVHLAPGRAPIAVATNEMSKRKSPALAALADGNRLIGEEAAGITARHPSKVFARARDLLAKPFSYVQSVTESLFLPYDLVPDARGAAAVRADDGQVYSLEEIVAMVLHYAAGLADAHVGAPVRDAVIAVPPYFGQAERRALTQATQLAGINVLALINEHAGAALQYGIDKDFSNASRHVIFYDMGAGSTYAALVCYSAYNAKEFGKTVSVNQFQVKDVRWNSELGGVEMEMRLVNYFADQFNKQLGNVVDIRQSPKAMAKLKKQVKRTKEILSANTAAPISVESLYNDVDFRSSITREKFEELCEDLWEQALTPVKEVLTHSGMKIDDIYAVELIGGATRVPKLQAKLQEFLGRRGLDKHLDADEAIVLGASLHAANLSDGIKLNRKLGMIDGSTYALVLEIDGPGYFKDESIDQILVPRMKKMPIKMFRSIRHTKDFDVSLNYDKAYELPPGIPSHKFAEYSVSGLTDASENTPIDEGNVQEIIAENVLKKRTFRVPLKVVEKTTGAGTILSKELYSEAKNRLEALDKKDAERRKTAELKNNLESYIYSMKEKLEESTGILTVSTEQERESFAQKLSEVQDWLYMDGEDAQANEFKERLGQLKAIGDPILFRLSELKARPAACENARLYLDELQKIWRSIPQRTWVAVCANQEPLDE

SEQ ID NO: 56388 - protein, 424 aa, Zea Mays
MYVVRAKAGKRQSGKDATGKVAHSAGSSLRRYNEAALKKEVQELIVSWKSYFETCVCAFIYAPSRNRQMLFDGEKTQSVIQSCDVRPVPLTVHRPTMKEAKRVYCNLTQLYYEMECSTTDETLPDAGSVKNVEQGQGKKNEVTADPGESISDLSARLELLNKNEAATIPSSKNETTPLHEAAKCGNAQLTLELLEQGLDPCVKDARGKTSYSLASDKEVRNTFRRFMALNLDKWDWHAADVPSALTKEMEESQAAKQADKDAKRKARAKELKKLKKEREKEEKEKEKEKAKAQASQSQSDVKGTSSGQMANRTATAPGLVPKHQTPQQILIAKEEERQRKQAEEREKRAAAAERRLAALAVQSAGTSASGAAATNCSAKRAAPDDNSCSCCFGSLVGKVPFHRYNYKYCSTTCMHLHSEMLQDD

SEQ ID NO: 56389 - protein, 778 aa, Zea Mays
MFVWRTLMFKRKTLGKDKKKSSSPASSPSSSRLLRSRSIHHSKCFDYEVPDELAAHYHAMNNSGSIEMGSCHSEPTPLPHECPQHPTVQEPCRACGSMDGKGSIDMEAPSETAPGNLTDESEALATQKTRDAATHPSKEFLDFLELFNAHRELFLKILHDPSLLGTPEQQGQEASSSGSVPLNKLESFPRPGGSSGKRNPIFDRSDSEKNMPEIQRSPSRPTSDPEAAKVISTRMPTGVDSSAVSLAESRSLKKAGTASNRFKAIRRKIKDVVRENRKELARITKDGVFHKLPYGQKMTGLTRSSSMEKFVQEEKQIRRTYSIAESVDKYSTLYESISRDSRISLERLNITMEGGANLNDKKTPTSLKRITSLPEMRLCSSQLEVLPEVSASRIGSKIWNVESDRFSSRGTDAFSICAEGNSYPDDVTEKSENIHIELNCGGFLEEDFRSILRTPSSLGRSFSHRRINSLPSFDRSFFQDRTGSFTECSIADSEPQFENLQLEDEDWLVKPPLSAGAYAANFNDEEWLVTPLKRSRVMNGIDHEDEEWLVKATKLSGAKDADLEAEEWLVKSGQPNDALDSDFRFIHEFSEQGAAEPLHIYVSDKNEADFQYVKDILKKSGFSCGDVDWYASNQPVSPVVFDEAECSCQEVSMASDEPHSIVRRMLLFDLINEVLLDIYDSSLVIGPWHSRFDLRTRPIPMGYHVLEEVWAKVSCYLSLHWKEGQTVEDIVAHDLMRKDGWMNLVYDAECTALDMEDLMVEDLLDDVVIQIVLESIDE

SEQ ID NO: 56390 - protein, 74 aa, Zea Mays
MPMPPTLAATTLLPLPSRRHSFSLPLSLSSLSIAHLSPPPLPKPRHQEFAPEEAQPGGSAAAWLVVVEDRGRGG

SEQ ID NO: 56391 - protein, 71 aa, Zea Mays
MLHLIEACILRKLIDTSAYLWPGYVVPSGTLKDTALPQESPWLNFMKVSRLSGPLIDALVASPASSSSSAR

SEQ ID NO: 56392 - protein, 151 aa, Zea Mays
MAAATAVGGHDRVEAAASSAGAVLAVAVASQRLIGLLALAVQTVNCVAEIYNEDQQEIYKLLYGRIKSENVPEIKAGSDDDDDDEDDEDEDEDDDDDDDDDDEGGGSDDDDDDNDGDDDGNDDDDDEDDDEDEDEEDDDDEEEQPPSKKKK

SEQ ID NO: 56393 - protein, 81 aa, Zea Mays
MGGLENLQTAKKYYASTIQLTGGKNTRALFGVCLLTKGRNKEEEGSELQRLAAEVLLNNYKQQAPSKAPLISSLLKNMKLS

SEQ ID NO: 56394 - protein, 681 aa, Zea Mays
MLTFESLSETAEFARKWVPFCKKHNIEPRAPEFYFAQKIDYLKDKIQPSFVKERRAMKREYEEFKIRINALVAKAQKVPEEGWTMADGTAWPGNNPRDHPGMIQVFLGHSGGLDTDGNELPRLVYVSREKRPGFQHHKKAGAMNALIRVSAVLTNGAYLLNVDCDHYFNSSKALREAMCFMMDPALGRKTCYVQFPQRFDGIDLHDRYANRNIVFFDINMKGLDGIQGPVYVGTGCCFNRQALYGYDPVLTEADLEPNIVVKSCCGRRKRKNKSYMDSQSRIMKRTESSAPIFNMEDIEEGIEGYEDERSVLMSQRKLEKRFGQSPIFIASTFMTQGGIPPSTNPASLLKEAIHVISCGYEDKTEWGKEIGWIYGSVTEDILTGFKMHARGWQSIYCMPPRPCFKGSAPINLSDRLNQVLRWALGSVEILLSRHCPIWYGYNGRLKLLERLAYINTIVYPITSVPLIAYCVLPAICLLTNKFIIPEISNYAGMFFILLFASIFATGILELRWSGVGIEDWWRNEQFWVIGGTSAHLFAVFQGLLKVLAGIDTNFTVTSKASDEDGDFAELYVFKWTSLLIPPTTVLVINLVGMVAGISYAINSGYQSWGPLFGKLFFSIWVILHLYPFLKGLMGRQNRTPTIVIVWSILLASIFSLLWVKIDPFISPTQKAAALGQCGVNC

SEQ ID NO: 56395 - protein, 303 aa, Zea Mays
MSSSMESSYLPATTESLAQAQEAKDASESISILYRVIQDPSSSADALRTKEVAITNLTNYLTKENRAEELRNLLTQLRPFFAVIPKAKTAKIVRGIIDAVAKIPGTSDLQISLCKEMVEWTRAEKRTFLRQRVEARLAALLLENQEYTEALTLLTSLIKEVRRLDDKLLLVDIDLLESKLHFSLRNLPKAKASLTAARTAANAIYVPPAQQGTIDLQSGILHAEEKDYKTAYSYFFEAFEAFSALEDPKAIFSLKYMLLCKIMVNQADDVAGIISSKAGLKYLGPDVDAMKAVADAYSKISGS

SEQ ID NO: 56396 - protein, 528 aa, Zea Mays
MDRSTPDYNEPALKDEWKWNGTIAKGGTPICRARCFPVGKVLNFMLPEFLDCTARTSLDMLSKHYYQATGSWVVFFVPENDADMTAYNDFMSYLGDKQRAAVCKLGESSTLFLVPPSDFSEQVLRVPGNVSISGVILRFQQSNPDYSSPNRKPLDRAHPSSASNFNTDVRNCEDLHALRRLNPSDISTFPQGPDYVCSSGGSYTPANADFIPPYKPESAPPYVVPQSPQERPPAELPMGIAQGQHQQLPNRLPSGWSNNLDNPNPNPGSGNFSLAQGAISNRTQDPYTFAPGVVSTGTASGYASGEASNSMSWASMQYNSQQVARSDQPTIPVSLPPDQLAQLAALLARQNQPRKVGLPVDSSNNLSGFIQSPNPHGHATMMPGNSGSIPIQNSLPPVPSMQQLHANVPVSPIGSLPANPFNVPTSAPVLCNSTSPMLPSHALVNPAHSSMPMRPFIPPLPEGPPPFQQQTSSAVTVQPLGPSSQQSSQQLLAQDLDGDPQKRLQATLQLAATLLKQIQNQSNPGGQK

SEQ ID NO: 56397 - protein, 220 aa, Zea Mays
MAGLTLPLVAKPLVVDGTSKGHELYLAYDEASLSMLDPPLVLQEFINHGGILFKVYIIGETIQVVRRFSLPDVNTYDLLNNVGIYRLPRVSCAAASADDADLDPLIAELPPRPLLEKLGRELRGRLGLRLFNIDMIRELGTKDRYYIIDINYFPGYGKMPGYERMFTDFLLSLAQSKYKRYASPPRQCTFAGDISISGRLEEVGKSQCVCSKSVAHAGLE

SEQ ID NO: 56398 - protein, 628 aa, Zea Mays
MLASRIEELGKQRAILQDQPDISGIAELREAYREVGIDLIKLLKFVDLNATGIRKILKKFDKRFGYRFTDYYVTSRSNHPYSQLQQVFKHVGVGAVVGALSRNLAELQERQGSYLSIYDQPSSALKDPIIDMINSSVDKLTRSTNFLRFLGQHALIVDEESPSTAGEEEIEDQKYHFMSLMLNLVNTFLYMVNTYIIVPTADDYSVSLGAASTVCGVVIGSMAVAQIFSSVYFSAWSNKSYFKPLVFSSIVLFLGNVCYAMAYDMKSLTVLIIGRLLCGMGSARAVNRRYISDCVPARIRMQASAGFVSASALGMACGPALAGLLQWKFKIYMVTFNQSTLPGWVMAVAWLLYLIWLWVSFKEPNRATEVNEAPQNPASGQTVDIGQVENGLAQPLLMDSVDKQNEDEDEEVDESEEAADDSRKPATSIGSAYRLLTPSVKVQLLIYFMLKYAMEILLSESSVITNHYFSWNTSAVAIFLAILGLTVLPVNAVVGTYISNMFEDRQLLMVSQITLLVGIIFSFKVTSTYSVVQYVVSALVTFVSAEVLEGVNLSLLSSVMSSRLSRGTYNGGLLSTEAGTLARVVADCTITAAGYLGVGKLLNVTLLPSLVICVASIACTFLTYNSLF

SEQ ID NO: 56399 - protein, 390 aa, Zea Mays
MRPAGAGSSRAPCSWTSSPAPWTPCAPAPTARSSAPTTSSSASPAPATTGPRATTPRAPSSSTPCLTSSARRPRTATASKVCHSLGGGTGSGMGTLLISKIREEYPDRMMLTFSVFPSPKVSDTVVEPYNATLSVHQLVENADECMVLDNEALYDICFRTLKLATPTFGDLNHLISATMSGVTCCLRFPGQLNSDLRKLAVNLIPFPRLHFFMVGFAPLTSRGSQQYRALTVPELTQQMWDAKNMMCAADPRHGRYLTASAMFRGKMSTKEVDEQMLNVQNKNSSYFVEWIPNNVKSSVCDIPPTGLAMASTFVGNSTSIQEMFRRVSEQFTAMFRRKAFLHWYTGEGMDEMEFTEAESNMNDLVAEYQQYQDATAEEEEEYKEGDEVAA

SEQ ID NO: 56400 - protein, 472 aa, Zea Mays
MASEAKEMKYRRRGRVPGPPEHGQRSDRSGALDWAALKHDPAELLRKLDEVRDQITRSCELMGPPPPDRHRAMSRRTVSLRPSYAEPPHAAGRAPDHYRSRYADRNRTSLPPSSYDHRSQRSVPDDEAYSRQPFRQQYYHERQRESHGFGHGRRHHSSCQCAHCLQSQRAPVVAPPKDHVPMARYFAGQGSFRFDRSQPISSELDRRSVASSLYSHLSVSKRRVEYFRKKAEKFCRPTRGAAPFLVCTSCSHLLQLPQGKFAGRKKDQVQCGSCSEIIALEPKQVKVHPVITPPSFPVSKGVRSKGSSHRDTKSSGWYQHQDDDNFNFYKPQAQKKDFADNMSPSSTASYGRTDSEHGSNRSVQLKSVPASRSRFSNDPKDILCQGDTGGQVEASGQCTVSPQGPILVDKQMDPFSSQWKEKDYSGGNQIIRKECDRRSSGSFRTVYSQSTRSNFSGQTNGSVLQSMERERL

SEQ ID NO: 56401 - protein, 404 aa, Zea Mays
MASLGFSAYRFSISWARIFPDGLGGNVNDQGVAFYNDLINFMISKGIEPYATLYHWDLPNNLQKTLGGWISDKIVEYFALYAEACFANFGDRVKHWITINEPLQTAINGYGIGIFAPGGCQGETARCYLAAHHQILAHAAAVDVYRRKFKVAQGGEVGLVVDCEWAEPFSENVEDQIAAQRRLDFQLGWYLDPIYFGDYPESMRQRLGSDLPTFSEKDKEFMRNKIDFVGVNHYTSRLIAHLQNPNDVYFYQVQQMERIEKWNSGEKIGERAASEWLFIVPWGLHKSLNYIAKKYNNPAIYVTENGMDEEDDQSATLDQVLNDTTRVGYFKGYLNSVAQAIKDGADVRGYFAWSFLDNFEWAMGYTKRFGIVYVDYKNGLSRHPKASALWFSRLLRGEAGTGTS

SEQ ID NO: 56402 - protein, 209 aa, Zea Mays
MFVVGVNENSYDPKMNVVSNASCTTNCLAPLAKVVHEEFGIVEGLMTTVHATTATQKTVDGPSMKDWRGGRGAAQNIIPSSTGAAKAVGKVLPELNGKLTGMAFRVPTPNVSVVDLTCRIEKSASYDDVKAAIKTASEGALKGILGYTDEDVVSNDFVGDSRSSIFDAKAGIGLSSSFMKLVSWYDNEWGYSNRVLDLIAHMALVSAKH

SEQ ID NO: 56403 - protein, 817 aa, Zea Mays
MGDGGVACAVRAVEGFHAGALVRRGGAGEAMPDKGEKAHGHHHQQQHWKNQQSASATDLEEGELLSGEAETNGLPERSMPPKKWRKYEVIEEYLIVADVEEVQRKMRVSLPDDYSEKLLSQKNGTENLELPEVKDYQPRKVAGDEILEQEVYGIDPYTHNLLSDIMPSDLELSPTDKHIFIEELLLNALNKQVRHFTGLGNTPMTYNIRPVIEEIQRSAEDSGDRRTLKMCLGMLKSMRNRSDQNFVAYRKGLGVVCNKKGGFGVDDFVVEFFGEVYPSWRWYEKQDGIKHIQNNSEDQAPEFYNIMLERPKGDRHGYDLVFVDAMHKANYASRICHSCNPNCEAKKKRIYTYDYAKADMRAIVTAVDGKYQIGVYTLRPIAEGEEITFDYNSVTESKEEHEASVCLCGSQVCRGSYLNFSGEGAFEKVLMEFHGVLDRHSLLLQACETDSVSQQDLIDLGRAGLGTCLLAGLPVWLVAYTAHLVRFIYLERQKLPDEILRHNVDEKRQFLIEINMDSEKNDAEVQAEGVLNSRLQQIVHTLDKVRYVMRCIFGDPKNAPPPMVRLSGKSLVSAIWKGDSSIVAELLQSMEPHVEEEVLSDLKAKICAHDPSDSEDIEGGIRNSLLWLRDELRTLPCTYKCRHDAAADLIHLYAYTKCFFRVRDYKTVKSPPVHISPLDLGPKYADKLGPGFQEYCKTYPENYCLAQLIYWYSQNSEPESRLTRARKGCMSLPDVSSFYVKSLKPLQERVYGNRTVRFMLSRMEKQAQRPWPKDRIWVFKSDPRYFGSPMMDAVLNNSPLDKEMVHWLKTRPNVFLG

SEQ ID NO: 56404 - protein, 151 aa, Zea Mays
MANGGTEASPLRPRRRAGSRDPFLIVCRFFGVVTAAAALLCVAANVLSAVYSFRGGADIIGGVFRCYAVVFSVFVAVLETEWAPVIRLWKIFEYLPARGMLQIFVAIMTKAYPNVERSELILIQEIATYMLLVCGAVYIIAVSTIFCLGNL

SEQ ID NO: 56405 - protein, 355 aa, Zea Mays
MRGWGLLVLSLHVLSCLVSGVASGRTSSYVRTEFPSTDIPLESEWFAIPKGYNAPQQVHITQGDYDGKAVIVSWVTPEEPGPSEVFYGKEKLYDQKAEGTTTNYTFYDYKSGYIHHCLVDGLEYNTKYYYKIGSGNSAREFWFETPPAIDPDASYTFGIIVKYTPQWLWLKNEFKRVDREKTPWLIVLMHSPMYNSNEAHYMEGESMRAAFEKWFVKYKVDLVFAGHVHAYERSYRISNVNYNITSGNRYPVPDKSAPVYITVGDGGNQEGLASRFYNPQPDYSAFREASYGHSVLQLKNRTHAIYQWNRNDDGNPVPADTVMFHNQYWTSSTRRRRLKKNHLHLEDLEDLISLL

SEQ ID NO: 56406 - protein, 167 aa, Zea Mays
MHAWCACVVLISSGYDYKAVRRWTTKRRLGYSLIDCDKIFVPIHKEVHWCLAVINIRDKKFQYLDSLGGMDTRVLRILAKYIVDEVKDKSDQQIDALSWKQESVENLPLQENGLPNVLSLSLRWDCGMFMLKYIDFYSRDMDLIFGQKQMHYFRRRTAKEILSLRAE

SEQ ID NO: 56407 - protein, 252 aa, Zea Mays
MDDGDGGLSFDFEGGLDSAPAAGGPVPSSTDPGAGGGDGPGMHGRGRGRGSYRQTVCRHWLRGLCMKGEACGFLHQFDKARMPVCRFFRDFGECREPDCAYKHSYDDVKECNMYKMGFCPNGPNCRYKHIKLPGPPPSVEEVLQKILQMRSFNRYSQNRNSNYNQQGERPQHPQGSALPNQNSAENATAAAPPAGGQQAQTLNQQPPQQQQKPNTNDQAQGVSNGHQATRIATPLPQGPSSVLKTSPGCPDA

SEQ ID NO: 56408 - protein, 628 aa, Zea Mays
MVTGSMKHLVQVEPAREAAAEGGAPSAGPTYRCAAGGNAASPPAVPGLECCWDIFRLSVEKCPDNKMLGRREIVHGKAGSYTWLTYKQVYDTVLDVGSAIRSCGVGKGGRCGIYGANSPEWVISMQACNAHGIYCVPLYDTLGAGAVEFVLCHAEVQIAFVEEKKIGEMLKTFPNATKYLKTLVSFGKVDPGHKEKVEQNGLSIYSWEEFLQLGGKEKFELPPKEKDDICTIMYTSGTTGDPKGVLISNKSIVTIVSAVDEFLNNSNEQLNMDDVYISYLPLAHIFDRVIEEVFIRHGASIGFWRGDVKLLVEDIGELKPTVFCAVPRVLDRIYGGLQDKITAGGFLKKTLFNVAYKYKQGNMLKGNKHEEAAAMFDRLVFTKVKRGLGGRVRLILSGAAPLSRHVEEYLRVVTCSHVLQGYGLTETCAGSFVSLPNNMSMLGTVGPPVPYVEVRLESVPEMGYDALSSETPRGEICIRGDTLFSGYYKREDLTKEVLVDGWFHTGDIGEWQSDGSMKIIDRKKNIFKLSQGEYVAVENLENIFGQTPAVDSIWVYGNSFESSLVAVVNPNTQALERWAESNGVTGEFATICEDPRAREFILGELTKMGKEKKWPQQMILCIVVLLIL

SEQ ID NO: 56409 - protein, 424 aa, Zea Mays
MGTVSWSSLPATTSTRTPGTDYRDNQLRFSLLCQAALEAPRILSLNNNPYFSGPYGEDVVFVCNDWHTGPLSCYLKSNYQSHGIYRDAKTAFCIHNISYQGRFAFSDYPELNLPERFKSSFDFIDGYEKPVEGRKINWMKAGILEADRVLTLDNIMRLTGITGIVNGMDVSEWDPSRDKYIAVKYDVSTAVEAKALNKEALQAEVGLPVDRNIPLVAFIGRLEEQKGPDVMAAAIPQLMEMVEDVQIVLLGTGKKKFERMLMSAEEKFPGKVRAVVKFNAALAHHIMAGADVLAVTSRFEPCGLIQLQGMRYGTPCACASTGGLVDTIIEGKTGFHMGRLSVDCNVVEPADVKKVATTLQRAIKVVGTPAYEEMVRNCMIQDLSWKGPAKNWENVLLSLGVAGGEPGVEGEEIAPLAKENVAAP

SEQ ID NO: 56410 - protein, 57 aa, Zea Mays
MRFPFVQQSLRRHHVQLILISMYSLRWHMALPICSLFEPLFQVRLSSHHRAFPDPDA

SEQ ID NO: 56411 - protein, 59 aa, Zea Mays
MQIWVCSKTRWLRFCQYGSIYCSLSLVENVTRVLLQMNSVDAAIDRRISESRLAGRMAL

SEQ ID NO: 56412 - protein, 519 aa, Zea Mays
MADEGSEAEALEKDGGKASSPSGPGSWSGVPAALLPPVSSEEAANSTLESGGLEDEELQVQDAVASGSKRSKDSAAAAAATRSANVSSPSVVHSHHAILPAPAQRIPEVKQADSETTPAREREWKPLCDVTSNRRIDWCELDGDVRVVGANASVTLVAPPGADNRTFRAESWRIKPYPRKADPNAMRFVRVLTVRSVASGSGEAACTDGGDDDVPALVFSDRGYTGNYFHAFTDVILPLFLTARRYAGEVRLLVADLQPWWVGKFLPVFRSISKYELVDLDRDPRVRCFRHVQVGLTSHADFSIDPRRAPNGYSMLDFTRFMRAAYGLPRGDVVAAAPARRPRLLVVARARTRRFVNTEEIVRGAEAVGFEAVVSEGTHEVAPFAELANGCDAIMGVHGAGLTNMVFLPTGGVVIQVVPLGGLEFVAGYFRGPSVDMGLRYLEYRIEPEESTLVDQYPRDHPIFTDPNGIKSKGWESLKDAYLDKQDVRLDMERFRPTLQEAIAHLRKAKAKANGDGNN

SEQ ID NO: 56413 - protein, 291 aa, Zea Mays
MALSTFSVPRGFLGVPAQDSHFASAVELHVNKLLQARPINLKPRRRPACVSASLSSEREAEYYSQRPPTPLLDTINYPVHMKNLSVKELRQLADELRSDVIFHVSKTGGHLGSSLGVVELTVALHYVFNAPQDRILWDVGHQSYPHKILTGRRDKMPTMRQTNGLAGFTKRAESEYDSFGTGHSSTTISAALGMAVGRDLKGGKNNVVAVIGDGAMTAGQAYEAMNNAGYLDSDMIVILNDNKQVSLPTATLDGPVPPVGALSSALSKLQSSRPLRELREVAKSSGSSRRT

SEQ ID NO: 56414 - protein, 177 aa, Zea Mays
MPFVFDTVWDLVKLGDYLGEREDVDPCRVGITGESLGGMHAWFAAFVDTRYSVVVPIIGVQGFRWAIDNNMWLARVNSIRPLFEEARIDLGKSELDTEVVERVWEKIAPGLDSQFDAPYSLPLLAPRPLLLLNGAEDPRCPISGLGEAISKTAKAYEESGCAEKFMYYSLKEEFGEL

SEQ ID NO: 56415 - protein, 71 aa, Zea Mays
MTGGPHPGLPFPPAARARAQRAAATGSRTGRASHLLVLSPSLGSGALASFSLPSSSPLPLPIHSEGNGRRH

SEQ ID NO: 56416 - protein, 236 aa, Zea Mays
MPVLADKYHAIAFDWLGFGFSDKPQPKYGFDYTLDEYTSSLEFLVNAVAPDKLSIVVQGYFAPVAVKYASEHQDKLNHLVLVNPPITDKHLNLPSTLASFSNFLLGEIFSQDPLRASDKVLTSCGPYMMKEEDAMVYRRPYLVSGSSGFALNAISKAMKKDLKAYIESMRSILRSSSWKTKTTVCWGMRDRWLSYDGVEEFFGGLNQKIVELPMAGHHVQEDRGEELGNIIKSILR

SEQ ID NO: 56417 - protein, 604 aa, Zea Mays
MMSHQQQIAPPSRGSVNGFPHLKLDRVGSGRHESKIVRSSSGGFTNSGNDIKLGHGSHSRDRLIYVLTQLIGHHVNVHVKNGSIISGIFHATNSDKDFGVVLKMAQVIKDGSARGQRFASDVVKKPETMIIPARELVQVFAKDVALGGDELPKGPGHDKRKDLLIDSAISRSHYLEERELERWAPDEGDSECIELEKYDRKGNRSWDQFETNAALFGVKSTFNEEIYTTKLERGPHMRELEKHASRIAREIEGEDTKDIHLAEERGLFLGDDLDHDEEIKYSAVRRDTDNSKYKPPFTNVPSSTYQVDLFNRTVNIVPKDLLGCSSTMDEESSSHIFDDIDASATIQTNSVRQPTSDYLPDRLSSNDENRLDRKLSKGSNENMDKRKLQPENNLSDGARPLISEGSDGPPSSSYAYEPSSSGQGFKSPETPDLTVSVKHPSKTEHVINSQRPGSSTSSTSERIAANSAASALGLSPSSSIGSLTSEKSTLNPNAKEFKLNPNAKSFTPSASLRPPHPASSDASYYYTNNIPAAPLGPGLPVGMGFPPAYGTQPVMYNAQPGASQQGYMHPVGLQYGQQMMMGGGQNRPVYYYAPEMQQYRGRNF

SEQ ID NO: 56418 - protein, 513 aa, Zea Mays
MAAPGGLDQDCAQDAAIKLFGRSIPVLHSSVFAATAAAASEVSTKLSNDVRSNDGMPCLPNMSLIVKTNPFPSKSNMKNGLQAISSQHGKMEADSNSEEAKNSLQAIISQPGKRYDSKSEEAKTESGGSGQEKVLKKPDKILPCPRCNSMETKFCYFNNYNVNQPRHFCRNCKRYWTAGGTMRNVPVGSGRRRNKDPSHHHHFTKVCDYTIATNGDVSDATQRQSVAAKPCLLQGSGKQNETACKSVSPVSNIKEQNNADLISLVSGDNKEEKSCASSAVVSGSSENWMPENTVKKEEDNTSAYGNGVKVPDHKMQPHHAGPVSVFSRNPAAVMATNQCSEDGIHTPGNGTVSPLSLPPLPMVPTPGICAPAVPFPFPLVPAFVSCIPGWPSGLWGAPWPGSSAPTLLSLPPNGLALSGSNSGVLGKHTRVANLQEEQKAEKKFWVPKALRIDNPEEAAKSSIWASLGIKPDDRIIFKSFQSKDLKNSATKTPESLQANPAAFSRSQTFQERA

SEQ ID NO: 56419 - protein, 912 aa, Zea Mays
MHSDGRQCPKTQGGLLRVNCIMDSGNSSCSRTRSGLLRLKGLLDSSGVSSSRTRSGLLRIKSFVDSSDGSCSRSQSDHVRCSPPIVEAIINDEAVLKESPDGLMKKEIPVRTQNEFVRQNSADKAVTKDDSGMRTLPNGSLSEDMPSRTRSGLVRRSPTVKTLSKDQSVINGLADGSLKEDMPLGTRSGLVRGTLAAKTPDGWMKNDKAAGTRSGLGGGRLVAKTVSKDKRAVEGLPDGWRKEYRPRKNGSFLDVYYIDPVSGYEFRSFKDVHRYLETGDIRQCAVRPKKSTICEVHIIESQTHASASPQHTRPGTADKGIQCEILTSDGIMVPLGELIAPYNGNDTEHTVLPEPENLKAIQGSDNKLETSEHVSVQPVSARNGSRQTKSVKRKERNAEVKSKKRKTSSAVTAVRASPRLAALKVQLEVSIKHEDAMVSINHVDQVQTIEESAIDQAHKSQSGSVDEIHGNLESTFSQLQLSQADTANGMQAMQENTTIHSQPSQLDTLNPTHRSQENSGNQLQSVLTDSSIPKRTTQECTIDEPSQPGINHIHTDQEFTGNQFRSNLPDDTVISLRDIEECTAHSKPSNTDSTGQIQANEENTANQVQSSLTDTVIPVPVIQEYATGYSQLSKANTSNKKQANQEYIADQVQSSLTDTVIPVQVIKEYTTGYPHINKADISNQMQANQENTDDHLYLSQVGCVTQMQIIEENLPKQPQLSQSGTGGRIQIDLESTTNHLLPNYDENSMLQCGLSWAPEQNSGALSTDFWKNVETQASSVSMPINGAPVASFPANVRFHNAAAAAEPALPPQVAPAEAGSDQSGLAFQSVFGNIWSDPCIEFAFKTLTGDIPVLDDTTAVTDYFPEQQDLNKGPAPNRAGSVDNSRNHTQVDVNLPPPALDDFYNGNWFPPQ

SEQ ID NO: 56420 - protein, 773 aa, Zea Mays
MSRNQLTTEVSLLRTECSNLKQELEEIKSSKHLQNKFDVEGKTMTKYGKDILATESIHHLQTEWLQGLLLLESKLQQTRNNALHGLQASDLDFLLADLGALQRVIENLKQGVQPGQMKENHNAEHLVPIAGYLSNSGHDDTIKKSSGGSTGTMEEKMCELLQKLEDSKTEKENLLEKMSQMERYYESFIHKLEESQKQTTIELENLKKEHNSCFYTVSVLQAQKQKMHEEMNDQLMRFVEDRTALEAQNKEFERRAVATETALKRVRFNYSAAVERLQKDLELLSFQVLSMYESNETLAKQSLLEDFDSLPEEHSAVEDLCGNNEHEQYRPGVKQIRPEGLYAEKETDGQKNLIRALKIEDLRARSEFQAHTDSRGNHSNLEGPRRAYSAMESEHLEMFISNIEWQIFSDVLRESHYATLDIIKCMQGRLDVLEMQLHDSNDARQSLVLKLNSALAQAKSVKESEAGYVLKCDDLTVKNQILEAKLHDITVENALLMEKLTESERLVQEHKTCESKYKVCTEEVTRLDNLLIKETLLTNQLKDELTSLRESFEAMKDALNKQSSINNDIQMISTSLQDQLGDLCSKIISFNKEANISGLEEASLLHELESKNYAAVMKRLESFHQQTCDKVLHLLEEKEVMEKMCDALQRRSEKAETKLHGMEQQFICDMDATKQKLNLSEEIVEKLQQELQDMAHKLRICSDSQEKYSVTNGDLTSKLSQMEIELHHATSENKALVEKLKEFSVTVEELERTKWCLVQHEEDTRTFGPVITV

SEQ ID NO: 56421 - protein, 106 aa, Zea Mays
MVMEETIDDSEMSLSNMVLGFLEDFERDERRPENDDDNNEEEGSSGGDTAESKAFWQTQHLQLRASTATWRWRCRRGAASPCAWWWSSASAPSSRWRAPAPATARW

SEQ ID NO: 56422 - protein, 169 aa, Zea Mays
MQTFMIPGTIFMSLLAGALFGQLGGLALVIFAATAGASSCYFLSKLVGKPLVFSLWPDKLTFFQKQVAKRREKLLNYMLFLRVTPTLPNTFINFSSPIVGVPYHTFFFATAIGLVPAAYVTVRVFQLLMYPFHQSIAVLFLIGLVSVAPTLLGKNEKPTSASDMAANTN

SEQ ID NO: 56423 - protein, 113 aa, Zea Mays
MVFPILLGSHRLLRVRSCFSFDSLRGEIVDRDFPSNQFDRRQRDCRDLLLHWLCTVLPRVFAKHVCHSACLPLLPRKWEGSGDEAGSSTQCCEGSILTNRVCIYSTACVLFIV

SEQ ID NO: 56424 - protein, 235 aa, Zea Mays
MEVIKDQMNSMDPKSVQEGQAKMKALFKKHGVSPLTPMKGLLIQGPIFMSFFFAISNMVEKVPSFKGGGTLWFTDLTTPDSLYILPMLTGLTFLATVELNLQEGMEGNPMAGKMKYFSRGVAVLTVPFTMNFATAVFCYWTSSNIFTLLYGLVIRRPAVRKWFDLPALENTRSLTAKPVFNMFGGSKAIPAAQSPVAIAGAQQSGLDQPDASALGYKVKNLEKKVKSRGKSRKHR

SEQ ID NO: 56425 - protein, 157 aa, Zea Mays
MWEAVTWLAVLTFWVSFLSEYLVNAIEGASDSLNLPVAFISVILLPIVGNAAEHASAIMFAMKDKLDITLGVAIGSSTQISMFVIPFCVVIGWTMGQKMDLNFQLFETATLFITVLVVAFMLQDGTANYLKGLMLILCYLIVAASFFVHVDPQSSEG

SEQ ID NO: 56426 - protein, 200 aa, Zea Mays
MPDRAFSWNVLSLFTKSGMLFLEVSLIAFLLQGNDASGFESLARTFVISGAVVAADALLKTIYVFGFGVPLFIDADQGTGGKWGLWILHKLVLTGVYGLIVFMHHSRWRNRLPAKPAYYNYVCAMLLLNGVSLFGCFLVASGAGFGLWLYNLTIVCYHSLYLPLLYVTFLADFFQEEDMLLESVYYSEMKDAGFFDADWD

SEQ ID NO: 56427 - protein, 193 aa, Zea Mays
MFGEHVGIIGSTKELGSWKSQVDMDWTPNGWVCQLDVPGEALLEFKFVIILNKGKDKIWEDGDNRVVNLPKNGSFDMPCHWNKTKEPLDLLGSSEIKLSGDTEVIGEDAKLSENIALEEMGSICNAGVGDLTPKHESSTLGGQWQGSDTVFMRSNEHHNTENCRKWDMTGLDAVSLKLVEGDKASRNWWRKNL

SEQ ID NO: 56428 - protein, 157 aa, Zea Mays
MVKKEQKTFQGDIEQSRKQTAQDSPSSTDKPGHEAVGGSSQRAPQRRQSIAREGQDGWSSSSSNSKWNLAQKQYSNSPLIRGLHGSSRLEDFGGSIPPAASSALVKLTNRLNFLKERRALLASEMQSLDLGRPPAAAAAPSAKSPTPKGHERKKSRD

SEQ ID NO: 56429 - protein, 95 aa, Zea Mays
MFRTHKVIYRRYAGLFFSICVDITDNELAYLECIHLFVEILDHFFSNVCELDLVFNFHKVYLILDEFILAGELQETSKRLLDFSFQNPDFTSTPA

SEQ ID NO: 56430 - protein, 212 aa, Zea Mays
MDDPVERLKDGFHKFKTEVYDKKPELFEPLKAGQAPKYVVFACSDSRVCPSVTLGLQPGEAFTVRNIAAMVPAYDKTKYTGIGSAIEYAVCALKVEVLVVIGHSCCGGIRALLSLQDGAPDNFHFVENWVKIGFPAKIKVKKDHASVPFDDQCSILEKEAVNLSLENLKTYPFVKEGLANGTLKLVGGHYNFVSGEFLTWDNKQPSTWPSSA

SEQ ID NO: 56431 - protein, 114 aa, Zea Mays
MSAPAAQAVVALALAAILSTPAPQADTFSNVPPTLSGGDGKQERIKHPRSAKALQCTTKCVGTCIRGGGGAPGEGPLNVRRPLVVFKDGFRSRQYCLIECSDICNRIKDGQDGP

SEQ ID NO: 56432 - protein, 279 aa, Zea Mays
MTWELAESGKDFITSLVNRNDVVPAFSKVSSESLRSEVMVSSKLDDVQDHFHHGLFATISQRVAFIRSHMLSISHSTGKIADYGSSISEPLLKDTIPPTANGHGVDCSQQQQVVASEETVVVLVNNNDHFTSLKAADSGVTSQEGSDSNAASSDSPQRPPPPADEAPNQNGTGKDKQKEPVSAGCSSSRQLFPPGRIIHMVALPPQQPDPNSDDGTSSGEVVGIYETPRGLYGKIRLAPNMIKEHYMPSYIRTMESLLEQLQKDDDDGSVCTCTAPSDL

SEQ ID NO: 56433 - protein, 574 aa, Zea Mays
MPELRSSTRQACLRSKKLEDLQLGEPPAKPVSPAPPRAGKRAPTRAARGRKGATGKGVPPAPTTRRKRGNIVDLEADPACEDPPKAVKGLEVAAAAAPKNLPLKEVAEVGVLKMNGVSAEKIIGAEDESTATPVPERVQVGNSPEYITDRKLGKGGFGQVYVGRRVSGGAARTGPDAYEVALKLEHRNSKGCNYGPPYEWQVYNTLNGCYGIPSVHYKGRQGDYYILVMDMLGPSLWDVWNSMGQAMTPNMAACIAVESISILEKLHSKGFVHGDVKPENFLLGQPGSPDDKKLYLIDLGLASKWKENNGHHVDYDQRPDIFRGTIRYASVHAHLGRTGSRRDDLESLAYTLIFLIRGRLPWQGYQGDTKSFLVCKKKMATSPEMLCCFCPAPFKQFLEIVTNMKFDEEPNYAKLISIFDGLIEAPASRPVRIDGALKVGQKRGRLHANLEDEQPKKKVRLGSPAAQWISVYNARRPMKQRYHYNVADSRLSQHIEKGNDDGLYVSCVASSANLWALIMDAGTGFCSQVYELSPVFLHKDWIMEQWEKSYYITAIAGSTNGSSLVVMSKAIIQG

SEQ ID NO: 56434 - protein, 465 aa, Zea Mays
MASPPPGAGLTEYERRREENIRRNETILAALRRKAAELSASFIPTASSPKRPKKQHPLARTTSPVVLRRSLRTRGIPAGESSACDGANTSLNTPPSPTKPRSTRFSSSLASALRDATAAEPSPSVKSWIGAPDGFDPCRELVLRPVDVRKVVPGRILSLRILPLSDRTVVVAGNVHGHIGFWDVDRLVEDEDGDGVDGVFEYFPHRGSVGGIVMHPAMLHKIYSSSYHGEICLMDVEKENFNTVYLCDYPIFSLCQAPNSPSSLYFAEGNELKLFDERMGKVPTTWSLHDHRINSIDFRPENPYIFATSSTDRTVCIWDIRRMKKKGSESLKVLEYNKSIQSAYFSPSGNMLATTSLDDTVRIFDIDNFDDSCTLKHDNRTGRWLSTFKAIWSWNDSNLFVGSMKRAIDVISVDRRQKSISASYMAFLESEHMTAIPCRFTLHPCKVGHLAGASSSGKVFLWTRA

SEQ ID NO: 56435 - protein, 294 aa, Zea Mays
MALARLGRSLAGRLHRSIYRPPAPTDYHASVSRPFAPTHTGVCVRGFASLTYNASSMIGHNLEGPLPVHIVKVLDLVVHMNHARPMSTAAASKVPVGARKVGLKVAMMSPGFVYEPYSPRERIPFWKRWFTLSGWRRTKEDIILEMKNAYAVSRLRKKTGYTKNQFYDQALKIYKEVNTLMAHGDTSSLRKILTERMHSTIKNELKRRQSMWNSVHWELVEPAVSIRTLRARMIGLDKNDLDKAFIQLTLEFVTKQKFEAYNSKGAVVSGDKSKEGALGPLATVAVTGLLTVEG

SEQ ID NO: 56436 - protein, 199 aa, Zea Mays
MGLLNFRKYCTLVSYTHCIPRDKFIPPFRRIFDSLFCHHNYIVRSIRVPQLHVSQVPALVANFVAEPKPRHRPRRRRSTSSADLPPRLHLHDVHARDGRPAKCAAASSKQGSTPAHGTRRPPHPNGEPVWIFFRVADEGPARSASQGHERWPGSLTRKRRAVGMHRNRAPRRAVEQHHRRAGPGHTVARASASRAGARG

SEQ ID NO: 56437 - protein, 377 aa, Zea Mays
MEEHRQMSEFDMPVSQGSGQATIQFSSMNSSFSSPPVQQPQRPHQMSQSLHMFGNPHHSQIQGTSSSSQQQAYAVHLAKERQMQQHMAPQQHSDLSGASAVPNVQSNTQTLQQGQTSSANSAPCSKSQHQRQQAAQNLPDSSSSPNQPATFTQQKQKKQQEQQQSRQNEPQRNRGSQQAKLMKSLGRGNMMAQTPPIDCTPTNAASTPSKNHVSEKLVQHGQGHFPANTTPVPSMPQPRLVTSLPQSPTKVADIGNQGLKKGGSLSQAMLALQQPPHGSKSTLTTQLQQRQVNPPQNNNGRAVVQQNRQMNSDCRTDLHVGQVRHNQMVPTSMPQSADSCSPVLSSVNQQKREPSLNQTSVTSPSNLLRSPKDTSFG

SEQ ID NO: 56438 - protein, 913 aa, Zea Mays
MGANSVSSIEVENPCVIMSQDKSREFLHSGNDKDKFKFFFKATLLQQVNDLLATIRDNLNIAASIVEELEASIRPALRELDEIQEKIKNMEHIEEIAHEIENLNKKLAWVWVYDVDKKIGGQQEYLEKLKERIPACQERIDRNIAIIEELRKEFIVKKENFKSFLEKTQEARRMKEKMDHDIREAVKLKMDLEKEHARGRQTLNKMNARVVQLEEQVHEFELQHMQQTQAEVSQVEDSIRELQQEINSAHLNATRLSEKEKKSSEELRAIIKNIGDIGKEIEEDGRRINQLRSQIDDIRRRQQNKLTAFGGDRVPSLYKSVERHMSKFKCPPIGPIGYHLQLASDSWSVAIEYALGRLLDAFIVSCHKDSLVLRECAKEVNYRNLQIIIYDFTKPRVDIPDHLLPSTPHPTVLSVIHSEIPTILNVLVDQGHAERQVLVRDDETGKSVAFDQRIRNLKEVYTSDGCKMFCRGSVQTILPANRNWRAGRLCTSLEEKITEMEQEATEIKQINSERLDRKRKLFADRDSIDLELRQLKRKREDEELHVERKKAQLVDTKKISIDNSHAAAVDTSELVVEMMQVKEDIENQELVVQKINLKLTDALQEENNRRASYKDFIESVHAEMGSISDAERELQLVEEKIHDAEQEKAHYERVMETKVLGPITATESELTRLQQLHQEYFEKASTICAESEVEALGGVEGSTLEQLSARIKKLKQKFQQESRRYTETIDDLRALHDKKGQKILRKQQMYSGFRDKLNACQKALDLRWKKFQRNAGLLKRQLTWLFNEHLGKKGISGHINVDYKNEVLSVELTMPQDASRDTIRDTRGLSGGERSFSTLCFTLSLHGMAEAPFRAMDEFDVFMDAVSRKISLDTLVDFAVAQGSQWIFITPHDISMVKAGDRIKKQQMAAPRG

SEQ ID NO: 56439 - protein, 72 aa, Zea Mays
MLLLINALHTIKNTIAYFFFISFFIFYNPGCTSHATEFSYIYDTYKRKYFNEPKRLRRELQLKLVKIRGQGL

SEQ ID NO: 56440 - protein, 726 aa, Zea Mays
MIDSDKHTWQICTCSENSVPLSGIPESQADAQIDTDTGHRQTDVDSTADVLSMSDGDNSCIAKESETGTSASSISNEGPQDNATSRKKFRKDGTKECGVAATALIPIHSPNEHEFFPEQYVVDKVTNDVGVDDSSEPRRVGLVRGVNAKDRTATVSWFKPPLHPEEPKEIACNEIVSVYELDVHPDYDYCYGDIVVRLPPVKPVIESTNSKEQMELDKTLDSSEGFAASYSAPPDTSADEQLSQKESCLQFTSLSWAGNIVGFQDGEIEVIWGDGSISKVGPHEIYVVGREDDGASLDDGTASDGSSWETVDDNEMDVLHDSAKGDSQNVPENSIGRENGSFSSQDGSSVATGPLSVAFEFVTRLASDLFARGRRHLDGSSDAMDEVESHWSNEISEIGDDIDKCNKNHVESPEHAAVIENDSSVEKSVDVVMADNPVHSECFKHFDVLQCPLDHHYLENTTQGTGGKKWVKKVQQEWSILEKNLPDYIYVRVFEDRMDLLRAVIVGASGTPYQDGLFFFDFHLPLEYPLVPPSAYYHSGGLRVNPNLYVDGKVCLSLLNTWTGRGNEVWDPSSSSILQVLVSLQGLVLNEKPYFNEAGYEKQVGTVEGEKNAVPYNENTYLLSVKSMLYILRRPPLHFEDFVKSHFRKRGHYILKACHAYLQGNVVGTLTDDACTTDRSKEHSSSVGFKLVLAKILPRLITALKDTGADCDQYEHLGRTETVTES

SEQ ID NO: 56441 - protein, 312 aa, Zea Mays
MFPASNSTEESHTVCGDVEVNINNMNSFSRNINIEETSKLNQDMDGVSVSPTKILECTSNIVSSKFPLHRCMRIVPHDQNSGAFFIAVLHKLSPLNGSQIKDTKIQHRLGTDRTIQFQKEPKPETRPYETTLTRRQHNVSEVDDTEVLGRGQKLGTDSQTSKDKNSSEVEIVSILAESGDRMELQKQSRWEGVDPVLVLNDEAVIKSIQSFFGIKESFPLEGHLVTRSPDNARRIYYVSKSVKEILELNSKVGGQLKIASLGVKMKGIDQRIPVHVHIGCLMMDYRWCFHPSARGYYMHPHSSSTALYSTEA

SEQ ID NO: 56442 - protein, 352 aa, Zea Mays
MPPSKARRKRSLRDITATVATGTVANSKPGSSSTNEGKQQDKKKEGPQEPDIPPLPPVVVNIVPRQGLGCEVVEGLLVPSRKREYKPNSKYTVGNHPIYAIGFNFIDMRYYDVFAIASCNSVIIYRCLENGGFGLLQNYVDEDKDESFYTLSWTIDQVDSSPLLVAAGSNRIIRVINCATEKLDKSLVGHGGSIHEIRTHASKPSLIISASKDFHPTEVGIFASCGMDNTVKIWSMKEFWIYVEKSYSWTGHPSKFPTRNIQFPVLTAAVHSDYVDCTRWLGDFILSKSVKNAVLLWEPKPDKRRPGEGSVDVLQKYPVPKCSLWFMKFSCDFYSNQMAIDYKEQLSQSTRF

SEQ ID NO: 56443 - protein, 64 aa, Zea Mays
MAKFQGMLNRSLRVCQDKFEAANLQKLKSDATRELESCVNRSIDDSLRVLPHVVDQIKSTLKIN

SEQ ID NO: 56444 - protein, 99 aa, Zea Mays
MFRGTGLSSLPSRSSFLGSSSTWLALRVMIQENQCGQGSSSVAELADQRTLTDFISLCWIFLYRLLLSRHAFLIVLLLNYPVMSHPMGRSSLGYVHLIT

SEQ ID NO: 56445 - protein, 699 aa, Zea Mays
MSASQSSMSGAGEPGARAVVWFRRDLRVEDNPALAAAARAAGEVVPAYVWAPEEDGAYYPGRVSRWWLSQSLKHLDASLRRLGAARLVTRRSNDAVAALLDLVRCTGATHLFFNHLYDPLSLVRDYRVKEQLAAEGIDVQSFNADLLYEPWEVLDEDRRPFTMFAPFWNRCLCMPDPAAPLLPPKRINSGDLSRCPWDELVFEDESERGSNALLARAWSPGWQNADKALTAFLNGPLMDYSVNRKKADSASTSLLSPYLHFGELSVRKVFHQVRMKQLMWSNDGNHAGEESCTLFLRSIGLREYSRYLTFNHPCSHEKPLLSHLRFFPWVVNEVYFKVWRQGRTGYPLVDAGMRELWATGWVHDRIRVVVSSFFVKVLQLPWRWGMKYFWDTLLDADLESDALGWQYISGSLPDGRELDRIDNPQFEGYKFDPHGEYVRRWLPELARLPTEWIHHPWDAPESVLQAAGVELGSNYPRPIVELDAANSRLQDALSEMWELEAASRAAMENGMEEGLGDSTDEPPIDFPQELRMEVDRQPVQPAIHAPGVTGRRREDQMVPSMTSSFIRAETELTADFGHTSEDSRPEVPSNIHHLQARPEREETVDGGTGNAVRVHGNHHQQNLQNNMHRVLGIAPSISEASSSWTGRDGGVVPVWSPPAASGHSDSYAADEADISSRGYLDRHPQSHTMMNWSQLSQSL

SEQ ID NO: 56446 - protein, 320 aa, Zea Mays
MEGDRLRCTPALLPRIVVGRGGDIRNTVSGEDPVWPLGRSASLCPESRSSPTLSMEGDSVYRERIMVGRGGGIQSAASGEDLVWPLSRLASMCPGSRSSPTLCPGSRSSPTLSIEGDPVYRKQTVVGRGGGIRSMTRTPVSVRGYGDLRMKGQINGAQGDSGADQLNTTIDDSEEVREICFLCWASRDGSIVAVGYITGDTLLWDMTTKSSRQEKQSDVSSNVVKLQLVSGSSRLPVIVLHWSAGSAVHSNKGGHLFVYGGDDMGSEEVLMVLSLESTAGLESVRCMSRTDLKLDGSFADMILIPDTGVLDKSRILHLLF

SEQ ID NO: 56447 - protein, 238 aa, Zea Mays
MAPPAALHHRTPLLLPRRTVALGATATARAARAASLAVRAQPDTTAAAVSTTAPEPTPEFKPPPGFKAPEPKRFEVKSGQLGSVLGASLAIPLRLGTGVFVLGYSPSLVSASEIPSDQYALEFGAWKVKEESKIGQCKRPEKPIEIYEFEGCPFCRKVREMVTVLDLDVLFYPCPKKGPTFRPKVLEMGGKKQFPYMVDPNTGVAMYESDDIIKYLADTYGDGTVPIMLSLGLLTYAS

SEQ ID NO: 56448 - protein, 55 aa, Zea Mays
MLEGPWILQIQAKCFSIGIAVGRKTHLMWVVLLLLTVLMMIEYLRLALCSCDCTY

SEQ ID NO: 56449 - protein, 299 aa, Zea Mays
MLSNKGSTTRTAAWALSNLIKGPDSKAANELIGIDGILNAIIRNLEKADEELVTEVAWVVVYLSALSEKATSLIVRSSMPQLLIGRLLASENLQLLIPVLRGLGNLVAGDGYMVDSVLIVGNSVTDQALSSLIKCLKSDHRVLKKEASWAMSNIAAGSFEHKKLIFGSEATPLLMHLLRTAQFDIRREAAYTLGNLCVVPAGSGNPPTIIVEHLVAIVDGGALPGFINLVRSADIESARLGLQFLELVMRGYPDSQGPKLVETEDGIEAMERFQFHENEMMRNMANGLVDKYFGEDYGL

SEQ ID NO: 56450 - protein, 163 aa, Zea Mays
MGVYVRDSMQFVGEDGERENADIVFGCGYDQQGVLLNALETTDGVLGLTNKALSLPTQLASRGIISNAFGHCMSTDPSGAGGYLFLGDDYIPRWGMTWVPIRDGPADDVRRAQVKQINHGDQQLNAQGKLTQVVFDTGSTYTYFPDEALTRLISSVSVGSSID

SEQ ID NO: 56451 - protein, 407 aa, Zea Mays
MVSKDSLVLIDEIGSGTDPAEGVALSTSILKYLASRVNLAIVTTHYADLSRLQSVDNRFENAAMEFCVETLQPTYRILWGSTGNSNALSIAKSIGFDQKVLDRAQEWVEKLLPDKQKERQGLLYDSLVDEKELLESQANEAASVLSQVEGLYNEIRLEADDLESRVAALRARETQKVQQELKVVKYRMDTIIKNFEAQLKNSKLEQYNSLMRKAEAATASVVAAHQPSEIAFDDDDENRISFVSQVGDKVYVQGLGGETMATVVETLGEDESCMVQYGKIKVRVKRSRIKLVQRGTNNEATTSSSVKAKGRTPKQRSATTTDVSFGPVVQTSKNTVDLRGKRVSEAAFELRMAVDACRPYQVLFVVHGMGTGAVKDCAIDVLRKHPRVARFEDESPLNYGCTVAYIQ

SEQ ID NO: 56452 - protein, 506 aa, Zea Mays
MSDDLSPSPQIEYDRLLGGLLVEGFDDKSCRSRYRFARYHSSPSIPSPYLIERLRKQEALQKKCGPGTRAYREASKQLKSGQSMSINATDDCNYLFLIIHAGLGNRMLEITSAFLYALLTNRILLLDRYKEIADLFCEPFPGTSWLVPSDFPLNDDEFGQSSAESYGNMLQNKAFGGGTDRSLVGNRLPPYVYLHLDGNYGFHDKLFFCEDDQQFLRGVPWLVMRTDMYFVPSLFLVPAFQDELGRLFPEKDTVFHHLARYLFHPTNGVWYSVTRCFRSYLAKAEKRVGIQIRIYETKGILQRNGPFPHILNQILSCAQNEKLLPEISMAEGAADGTRNNRTAAGSGTRNNRTIAVLTTSLSAWYSEQIQEKYDEQSAVDGVSVRVFQPSHEEYQRSRNKGHNMKALAEIYLLSMTDVLITSGFSTFGYAAQGLAGLKPWIMLKSENHVTPDPPCVRAMSIEPCFHQAPFYDCKARKDTDLGKVVPYVRHCEDVSWGLKIVDQTHL

SEQ ID NO: 56453 - protein, 90 aa, Zea Mays
MPAAYIITYVQRGSAVYEFTPSSALGGRRAAQWLLSADLSVIGMAHRQELAASPPLPALEQNARHFKHQFFSPFVVSVKLWIQLSRCSVT

SEQ ID NO: 56454 - protein, 329 aa, Zea Mays
MSLDEIPDKALKSKDGSRLCQDFVSLVQEWLQKIQAANSLGGVFGDTNKSELAAFASYALAFPSNFLALVDTYDVMRSGIPNFCAVALALHDLGYKASGIRLDSGDLAYLSIEARKVFSAVEKEYNVPGFAKMLITASNDLNEETIDALNKQGHEVDAFGIGTYLVTCYSQAALGCVFKLVEINNKPRIKLSEDVAKVSIPCKKRCFRLYGKEGYPLVDIMIRESEPSPKAGERILCRHPFIESKRAYVVPQHVEELLQCYWPGTSDKPRAELPSLEKIRSRCMQQLEMLRPDHIRRLNPTPYKVSVSTKLYDFIHRLWLNEAPVGELQ

SEQ ID NO: 56455 - protein, 62 aa, Zea Mays
MELPCKLLAGHLAPLCAPGRISQPSPFPNRSSIPTSPPWRCHGFPCCALLAIASRGVPCVPS

SEQ ID NO: 56456 - protein, 422 aa, Zea Mays
MSDKKDVEAGTSPPAAPRVAAAAPKPSTYVPMFALRGEECANLLALVSAVSRPLEDAVVDFLARVPPERRFRFGSAISFVLEDKMMLQPAERLVAFAILHQGYSSQSANPFLPLLINVACDETSEAADQAFLQLLLSSSNGDNSEVLKQSAVDYLNGSDYASQVLLPREHLEKQCSYDAARPLPFSSNFRDATVRSVIPDPYVFQSFGSSSEVSSIIPNRDDMVATLLQQTSLGLPPQWIRPSPPRLEIFEGELQWLNIDNNHELLWDGTMCADTSRGAVIRDLFEQACKGPLSMAQREKIIEYLRKDGKLLNHCGMTPQKLPDLVEHNPLIAVDVLSKLINSPDVDAYFDAIVHMDMSLHSMEVVNRLTTAVVLPPGFVHDYISNCIRSCEDIKDKYMQNRLVRLVCVFLQSLIRNKIIDG

SEQ ID NO: 56457 - protein, 274 aa, Zea Mays
MAEANAGKEKKEVVRLERESVIPIMKPKLTMKLAYLIEHQSDREEFLKLCRRVEYTIRAWYHLQFDDMMELFALFDPVHGAKKLEQQNFLPEEIDTLEQNFLSYFFRVMEKSNFNIVNDDEVELAHSGQYLLNLPIKVDESKLDDKLLSKYFKEHRHENLPDFSDKYVIFRRGIGLDRTSNFFFMEKVDMIIARAWRRFLEKTRLQKLFSRKKNSKPKIDSKKNDDLASEIEDKELYVERIRLETMDLSFGNLFGKVTIQEPTFEEVIVLYRVH

SEQ ID NO: 56458 - protein, 340 aa, Zea Mays
MEWIEGVKLNQQAVIESQGLKVLDLVNIGIQCSLRQLLEYGYFHADPHPGNILATPEGKLAFLDFGMMSETPEDARVAIIGHVVHLVNRDYEAMARDYYALDFLEPDVDVSPIVPALKNFFDDALNATVSELNFKTIVDGLGAVLYQYPFNVPAYYALILRSLTVLEGLALYADPDFKVLAASYPYFAKRLLTDPNPYLRDALIELVFKDGKFRWNRLENLLVQGRQDREFAAKDALQPVLKLLLGPGGEELRALVVKEAVRVTEAIAIGTLVDSYNAAPSFLKPLISSGNLAEPFKFSETEQEQMMELRDQVFRVWGLLRSSNNFDPSLLQPIVQVDCS

SEQ ID NO: 56459 - protein, 255 aa, Zea Mays
MDIDASASVMCQLLSPEGDPLGSALYLPQNVGPPQLQEIVNQLLHNEEKLPYAFYVGDEELSVYLGAYMRQKNANVEVTLRIVCQPQALFRIRPVNRCSATIAGHTEAVIAVSFSPDGKSLASGSGDTTVRFWDLSTQTPLFTCKGHKNWVLCIAWSPDGKHLVSGSKSGELILWDPKTGNQLGTPLMGHRKWITAVSWEPVHLQSPCRRFVSASKDGDARIWDITTRKCVISLTGHTSSVTCVKWGGDGLIYTG

SEQ ID NO: 56460 - protein, 748 aa, Zea Mays
MHRVGSAGNTAGSTRPRKEKRFTYVLNDADDKKHCAGINCMAYLNGSTFSTSDYLFSGSRDGTLKRWELNNGDASFSATFESHVDWVNDAIIVGEKLVSCSSDTTIKVWNCFSDGACTRTFRQHSDYVICLAAAEKNSNIVASGGLGGEVFVWDLDAALAPVAKSVDAKEDEVPNGNSGPPLTTLCSVNSSSNIASSNSQSHGYSPIAAKGHKDSVYALAMNDTGTLLLSGGTEKVVRVWDPRTGSKNMKLRGHTDNIRALLVDSTGRYCLSGSSDSMIRLWDLGQQRCVHSYAVHTDSVWALATTHSFGHVYSGGRDQSVYLTDLSTRESVLLCTNECPILQLSLQDDTIWVATTDSSVYGWPAEGLTPQKVFQKGGSFLAGNLSFSRARASLEGSAPVPVYKEPSFVVPGVPAIVQHEIMNNRRHVLTKDTTGSVKLWEITRGAVIEDFGKVSFEDKKKELFEMVSIPAWFTMDARLGCLSVHLDTPQCFSAEIYAVDLNVSGAQEDLKINLAHDTLCGLLVHWSKRKQKSSSHGLPNGDSSIGKDVPSKDSHRSRTEVDDTTENHTTHVLPSFEFSTVSPPSIITEGSSGGPWRKRITDLDGTEGDLPWWCVDCVTHNRYPKENTKCGFYLHPAEGSPAPNITQGKLSAPRILRIHKVANYVVEKLVLDKPLDGGSDSTFVMGLSSAQSQLSQLDSSSRLGLKPWQKTKPCIEVLSPDMSLATVRTYIWKKPEDLILHYRVVQSR

SEQ ID NO: 56461 - protein, 445 aa, Zea Mays
MASRVASGLLRRRAVATLGLLRSHTHVRNYSSQLSALIPATSQCSNLTRRYYLPNPSLYQVWSRSFASDSGDKFEAVVPFMGESVTDGTLANFLKKPGDRVEADEPIAQIETDKVTIDVASPEAGVIEKLIASEGDTVTPGTKVAIISKSAQPAETHVAPSEEATSKGSSPPKVEEKSRVEEKAPKVEPPKMQAPKPTAPLKTSPSEPQLPPKERERRVPMPRLRKRIANRLKDSQNTFAMLSTFNEVDMTNLMKLRSDYKDEFVTKHGVKLGLMSCFVKAAVSALQNQPIVNAVIDGDDIIYRDYVDVSVAVGTSKGLVVPVIRDADTMNFADIEKGINNLAKKANEGALSIDDMAGGTFTISNGGVYGSLLSTPIINPPQSSILGMHSIVQRPVVVNGDILARPMMFLALTYDHRLIDGREAVFFLRRIKDVVEDPRRLLLDI

SEQ ID NO: 56462 - protein, 239 aa, Zea Mays
MVPEELTKANLSSALDGVDIVYFDVRLHDIALLVAEEASQRKIPILIDAERKREGLDELLNFASYVVCSAKFPQAWTGASSIPVALVSMLSRLPNIKFVIVTLGEKGCLMLERSSTDASEAGEIDAEALFESLEKSIDQSSTIPKCVASKSNLRISADGVSSISGRLLLGTAEVIPPGELVDTTGAGDAFIGAVLYGLCTSMPPERMLPFAARVAGCGCRGLGARTSLPHRADPRLAGY

SEQ ID NO: 56463 - protein, 2265 aa, Zea Mays
MAEPYQLNGILNGMPNLSHPSSPSEVDEFCKALGGNSPIHSVLVANNGMAAVKFMRSIRIWALETFGTEKAILLVAMATPEDLKINAEHIRIADQFIEVPGGTNNNNYANVQLIVEIAERTRVSAVWPGWGHASENPELPDALDEKGIIFLGPPSAAMAALGDKIGSSLIAQAAGVPTLPWSGSHVKVPPESCHSIPEELYRNACVSTTEEAVASCQVVGYPAMIKASWGGGGKGIRKVHNDDEVRALFKQVQGEVPGSPIFIMKVASQSRHLEVQLLCDKHGNVAALHSRDCSVQRRHQKIIEEGPITIAAPDTVKELEQAARQLAKCVQYVGAATVEYLYSMETGEYYFLELNPRLQVEHPVTEWIAEINLPAAQVAVGMGIPLYNIPEIRRFYGMDHGGGYHNWRTISAVATKFDLDKAQSVRPKGHCVAVRVTSEDPDDGFKPTSGRVEELNFKSKPNVWAYFSVKSGGAIHEFSDSQFGHVFAFGESRSLAIANMVLGLKEIQIRGEIRTNVDYTVDLLNATEYRENKIHTGWLDSRIAMRVRAERPPWYLSVVGGALYEASSRSSSVITDYVGYLSKGQIPPKHISLVNLTVTLNIEGSKYTIETVRGGPRSYKLRMNGSEIETEIHSLRDGGLLMQLDGNSHVIYAETEAAGTRLLINGRTCLLQKEHDPSKLLADTPCKLLRFLVADGSHVDADTPYAEVEVMKMCMPLLLPASGVIHFVMPEGQAMKANDLIARLDLDDPSSVRRAEPFHGSFPKLGPPTAISGKVHQKFAASVNSAHMILAGYEHNINEVVQDLLNCLDNPELPFLQWQELMSVLATRLPKDLRNELDGKYKEYELNPDFCKSKDFPARLLRGVIEANLAYCSEKDRVTNERLVEPLMSLVKSYEGGRESHARVVVKSLFEEYLSVEELFNDNLQSDVIERLRLQHAKDLEKVVYIVFSHQGVRSKNKLILRLMEALVYPNPSAYRDQLIRFSALNHTSYSELALKASQLLEHTKLSELRTSIARSLSELEMFTEEGERLSTPRRKMAINERMEDLVCAPLAAEDALVALFDHSDPTLQRRVVETYIRRLYQPYLVSGSIRMQWHRAGLIALWEFSEEHLKQRSGQDVPLQQVENPIEKSWGVMVVIKSLQFVATAIDVALKETSQYGIGVRSVSNSNHVHSNQSNMLHIALVGINNQMSTLQDSGDEDQTQERVNKLFKILKDNTITSHLNGASVKVVSCIIQRDEGRPPMRHSFQWSVDKLYYEEDPMLRHVEPPLSTFLELEKVNLEGYNEVKYTPSRDRQWHIYTLIKNKKDQRLNDQRMFLRTIVRQPSATNSFLTGNIDNEVGHTQASSSFTSNSILRSLMGALEEIELHAHSETVRSGHSHMYLCLLREQQLHELIPFSRMTGKIDKDEGTVCTLLKHMVLNLYEHVGVRMHRLSVCQWEVKLWLVCDGQASGAWRVVVTNVTGHTCTIDIYREVEDPTTHQLLYHSATTSAGPLHGVALNEPYKPLDAIDLKRYAARKNETTYCYDFPLAFETALKRSWKSSSYGVSEANEHNRFYAEVKELIFADSVGAWGTPLVSVERPPGINDIGIVAWNMKLSTPEFPRGREIIVVANDVTFKAGSFGPREDAFFDAVTNLACERKLPLIYLAATAGARLGVAEEIKSCFHVGWSDYESPERGFQYIYLTTQDYSRLSSSVIAHELQLKNGETRWVVDTIVGKEDGLGCENLHGSGAIASAYSKAYKETFTLTFVTGRAVGIGAYLARLGMRCIQRLDQPIILTGFSALNKLLGREVYSSHMQLGGPKIMATNGVVHQTVSDDLEGVSAILKWLSYVPPYVGGPLPIMKPLDPPERPVTYLPENACDALAAICGIQDGEGRWLGGMFDRESFVETLEGWAKTVITGRAKLGGIPVGVIAVETQTVMQVIPADPGQLDSAERVVPQAGQVWFPDSATKTAQALLDFNREELPLFILANWRGFSGGQRDLFEGILQAGSTIVENLRTYKQPAFVYIPMGGELRGGAWVVVDSKINPDHIEMYAERTAKGNVLEPEGLVEIKFRPKELEDCMLRLDPELIGLNTRLKEMKKQNASISEMETIRRSMTIRMKQLMPIYTQVATRFAELHDTSARMAAKGVIGKVVDWKESRAFFYRRLRRRVAEDALAKEVKEAAGEQLSHRSALDCIKKWYLASKGTEGDGEMWNDDESFFAWKDDPKNYENYLEELKAERVSNWFSHLAESSDVKALPNGLSLLLNKMNPLKREQVIDGLRQLLG

SEQ ID NO: 56464 - protein, 117 aa, Zea Mays
MVPIPDYLRMTLPYSHWAPMRKLEILPKLIMALRKLQQQNHSVDAPYLLHQLKIELMVLLSLWTLQRIMRMHPKNTKLHLKLSLIKLQRVMMCLPQELLRILLAIVQMVKLSLQNRI

SEQ ID NO: 56465 - protein, 144 aa, Zea Mays
MSPEDADVHVVLGVLYNLSREYDKAITSFKTAVQLKPQDYSLWNKLGATQANSIQSADAILAYQQALDLKPNYVRAWANMGISYANQGLYEDSIRYYVRAVTMNPKADNAWQYLRISLGNASRADMIAACDARNLDALQKEFPL

SEQ ID NO: 56466 - protein, 52 aa, Zea Mays
MPAHIKSSMFGCSLTIPITDGRLNTGTWQGIWLCEHRDHASPRKIVITLNGV

SEQ ID NO: 56467 - protein, 80 aa, Zea Mays
MVVATLAESGMNLSDDIIEGIIDKTFEEADTKHDGKIDKEEWRSLVLRHPSLLKNMTLPYLRDITTTFPSFVFNSQVEDA

SEQ ID NO: 56468 - protein, 885 aa, Zea Mays
MTLVPSLMEIILPTLAEKLSDGCNPLKILIFSGEVLSVSLWKRVYEFLPEATIINLYGTTEVSGDCAFFDCKKLPTILEQEELNSVPIGFPISNCEVSLVTNDGLSDEGEISVSGACLFTGYLADPMTSNCPEGSEVLAYYRTGDFARRLKTGELIFLGRKDRIVKIYGHRFSLEEVESTLRDHPDVSDAAVTFQSNGSLDFKAYLVLRSNNKFLKCTQGYSGLHSSRDIIAPLRNWLIMKFPLAMVPRLFIPMKSLPLTLSGKIDYVKLSSLVCAFEPCEIHPESSPADPHMQVIKKAFSDALLVHEVSEYDDFFSLGGNSITAAHVAHKLEIDMRLLYIYTTPSKLFHGLLGEHSHVIPPTPEFHNRKKLRKYASISDSFGPVSEYLDSNFHDQGQISKEGAYDHFAGNHVSDIDGQLSKSRTYNTYQAKNLCPDTCSNDEIFSGRPWILNFHLQKVWSIGRCNRFMHGSEGMVHLEDICSYVPYNKKGYLVKIWSILLDSCVDASPLLVINNGMMSIFIGSHSYLFLCIDGYSGSVRWSVKLEGRIECSAAITGDFSEVVVGCYKGKIYFLDMSTGKLSWTFQTDGEVKMQPVVDKMRNLIWCGSYDHYLYALNYKDRCCTYKVFCGGSIYGSPAIDMAQNVIYVASTSGLVTAVSFKEPSFRVLWQYEAGAPIFGSLAIDHQSGTVICCLVNGLVMTLNSQGSVVWKATVGGPIFAGACLSPTLPHQVLIPSRDGNLYSFDTVSGALLWVYKAGDPITASTFVDELLTSVSFGPSERFACICTSSGKVHVIRIRVDIRTRVDAKYNQEQGGDGVKSEELVQGLDAKYNQEQAGEGAKSEELVQGLASIDLPGDIFSSPLMVGGRIFVGCRDDRLHCLTVTT

SEQ ID NO: 56469 - protein, 185 aa, Zea Mays
MAMVTTSPATVQPSSCKHTSRGAARCCPPPLLSWKTRSFGQQVTTRATAASSRGQPAGVAQAGGEEGDSIRRLQNGSDVRGVALEGEKGRAVDLTPLAVEAIAESFGEWLREEELRLRGQEPEQLRVSVGRDPRLSGPRLSAALFAGLARAGCSVFDMGLATTPACFMSTILPRFNYDGSIMVVK

SEQ ID NO: 56470 - protein, 630 aa, Zea Mays
MVHGIPDNDMIAQYDGQLLDSEELNLMHSEPAWQGFVSQNSELGMLGNGKFLNDSERPHPDDLFVEDDQHGSVRSIGVGISSDAADIGSEVRESLIGGSSEGDIEYFNESSLSVSGKRHPHQDTEKKRVGAKGVKHDQIIYAADIQKGNLPPGAADVGFSFPPPLHSGKNHESDAKSLWSKKDEMYCINDPDDCQNGMVSDDMLATWRKKNSESSLRSSRDEMTSDVVRSRNSSASYDETEDTSNARHHKLDDAQEEDTGTNLDDEEAAALQEQVRQIKAQEEEFETFNLKIVHRKNRTGFEEDKNFHVVLNSVIAGRYHVSEYLGSAAFSKAIQAHDLHTGMDVCVKIIKNNKDFFDQSLDEIKLLKYVNKHDPADKYHLLRLYDYFYYREHLLIVCELLKANLYEFQKFNRESGGEVYFTMPRLQSIAIQCLEALQFLHGLGLIHCDLKPENILVKSYSRCEIKVIDLGSSCFETDHLCSYVQSRSYRAPEVILGLPYDKKIDVWSLGCILAELCTGNVLFQNDSPATLLARVMGIIGSIEQAMLAQGRDTYKYFTKNHMLYERNQESNRLEYLIPKKTSLRHRLPMADQGFIEFVAYLLEVNPKKRPSASEALKHPWLSFPYEPISS

SEQ ID NO: 56471 - protein, 517 aa, Zea Mays
MAATVASEHSIDRKLSALVEQARPSAAAMLAAAEAVDAVAELIKRVPQQQATPEAARGFLRDLGLETEKLSFTFRPPEVVRLAGSHAAGAVARPEVAADLLVRLPKECFHEKDFLNHRYHAKRCLYLCVVEKNLRCSKLIRKVSWSTLQDEARKPVLHVYPATEIVDLPGFHVRIIPTADSLFNVSKLNVSTRNNVRAYTKDGVNLPTPKYNCSILEDMFLEENANFISSTFANWKALQEALVLVKVWARQRTSIYTHDCLNGYLISAILVFLTVDSGGSMITRSMTTRQIFRVLMNFLATSKAWAKGLVIQSMKKRTVTKEDIATCLKTFDVAVFDISGHINLAFRMTRSAFLELQDEAVCALSCLDKCRDGGLEELFMTKVDFCAKFDTCLRINLKGNSKVTGLSYCVDDESWRILEKDVQSLLQQGLTDRTKMIRALWRSTPSEWKIVEGFSEFGSSPLLVGMMVSSLEKSFRLVDIGPNPENRVEAVKFRKFWGEKAELRRFKDGNIAESTEG

SEQ ID NO: 56472 - protein, 804 aa, Zea Mays
MALEAKQAALCFKEVLRLSIRKSYRFVSEHPILFGLGVFLYLFYRSSPRLFVFLLSSSPVNICTALLLGILLSYGEVNLPEASKDHRDTTEVSTSMVGNSSSDVHFEANQRPSVLEFRENASNFKERETKQKVSFRERASEHVDLDDYIPLLKRAGEEDERGDRGNISRTLTPFPSMVNIRQESVIGEDLTFTKKRQSEGSFFMQDRADCQTSLFDEACLCGLNDKDIPFGLFSSSENVNKNDEMEEKFNQQRVFADSTATKERDSSEAMPTEELAGTSKQAASVPIDQWENNGRLNVDTSNVFEDNLLDSSLGSPWARVSSHDGSSGFDSDQAESSPDASMTDIAPVLDEIDPLLRADSNHPDPVPNDDSDTDSHVSEDHQIDDDSNDEGDDIDAKDNVEGEKENDGKEAAFLWTADDEKNLMDLGYSEIERNRRLEILMARRRSWKNMAFEIDNNLIDVHSSGSGTSLDDLSRFRAQVPPIAVPRRNPFDLPYDSEEAAIPGSAPSILHARKNPFDLPLEQSNDSVVVHAHDILNSGEPATSRRDMIFRRHESFNFGRMDVIQEKRFSRLKPYFVPETVEWNASNFERQFNDKSESKMSSVTKSDIASSVADQEDHKDQDEKDLADVGSECSDGINSIDVELDHSDIDDREIALQQFVFERAQEREAHLVSTKGKGREEDYAPESAGSSTMPFHAVPDLLSWEDGDGDNSLGAKPSFQLNTEVKCSEWVSSSRPPVEGESDSGDLPEYLDTEVASSSNTAILGANNAAEKGTYTLSQRRELLRTSTCKKIMKQQFLLIQLLP

SEQ ID NO: 56473 - protein, 749 aa, Zea Mays
MGMLLISKIGEEYPDRMMLTFSVFPSPKVSDTVVEPYNATMSVHRLVENADECMVLDNEALYDICFRTLKLTTPSFCFWTVGDLNHLISATMSGVTCCLCFLGQLNSDLHKLVVNLISFPRLYFFMIGFAPLTLRGSQQYRALTVSELTQQMWDAKNMMCVADPRHGRCLTASAMFRGKMSTKEVDEQMINVQNKNSSYFVEWIPNNVKFHPFVPIIRDSSFDPSPPRSLPLPTPTRTRTGSRSGNHKTSVKAPEPPRAPPTTPRNPNAPPQRGISPITPYQFQFSKGRGGAAPPPPPPLTREETPPPRASPMLSDQELAQYVESLVQHTAAQGGTGISADAVVRQLGAQLGVDLSPKAQLIRSVLVALLGPAAAPAPDPTGSRKDPFDPATAAAAGGPRAETPPQQMHFSTAAASSAPAPSPAVPHFFPQQHQHQMQYFLSAPQQYQHQQQQQRAGASPSPFDIPASYRYGHQPLPQADQAQLQRLVQLQHQQQQLAAAARVAAAAAPTPGESPRAPEPPPAPAPAASKKNSSASVGAKRKGGPGGLNKVCGVSPELQAIVGEPAMARTEIVKQLWAYIRRNNLQDPNNKRKIICNDELRLVFETDSTDMFQMNKLLSKHIRPLESKNDSKPEAKKLKPQGDEPISSVETDVNQLPLMVSDALATFFGTGEREMVHSEAVKRVWDHIKSNDLEDPENPTVILCDSKLKQLFGRESLTAHGVSEVAFRPPLHAIYQYLTGDTIFWTRLG

SEQ ID NO: 56474 - protein, 221 aa, Zea Mays
MVVFQYGSIVLFNVSDHEADGYLKIVEKHASGLLPEMRKDDYAVVEKPTLETWMQGGLDYIVLRDLSIDGIRTIGSVLGQSIALDYYIRQVDGMVAEFTDINRGMEKTGTFTMERKKLFQLVGKANSNLADVILKLGLFERSDIAWKNANYAQIWEYLRDEYELTQRFGNLDFKLKFVEHNIRFLQEILQNRKSDFLEWLIIILISVEILISVYNIIQEQM

SEQ ID NO: 56475 - protein, 185 aa, Zea Mays
MGTCGLAAVVALLLASALLPGPDSASARSLLEGENPSSGEDAPAPAVSGQSSAAGQQTENKRHQESLPPVTSPPPPPPTQETNSQKAASPPPGPNVGTGQEDTGSQGRREETDKLKEAMEKCDASHKCSSGNEFSACLQVPDNALVGPYIIVHNEGQHDMDIDVKEPSSNTNNDKKPLHLVKGAF

SEQ ID NO: 56476 - protein, 495 aa, Zea Mays
MDPEQTFLRVHARLSGTLSQLLTPRIRLVLEYLYLAGAVALFCLLVVMHTNFVQQPGCSSEFSGIEFGEAQLVQIKIISGGLWSSRGASYIMDLQNLGRSAEKILEVNGDKFNILASKFWSTWVGPGARRSLPDLKAAGEGSVHHPLSAKESFKAAVTFLFRKWYLRAVSFWKNIKQLSENTLQLMVRSNWNDFLHIIKDLQLPSMDHLISTIVQWFERRSKAFEPTYLYGVEKGYFLLSEGAKTRHGVRTINITISARNPCFGNRWQQLLINSIVGYDTILTNSLVNSPGHGYLYNFQTKELYDLSYGHEPPEGPTRFGDYFVTKCGVLLMSLFVFFTTTMSVSFTLRETQSRMLRFTVQLQHHARHHLPTFQLIFVHVIESLVFVPIMIGILFFLFEFYDDQLLAFLVLTLVWLCELFTMISVRTSISMQFFPRFFLLYFLVFHIYFFSYTYGFSYLAFSATAAFMQHLILYFWNRFEVVERQVPGKSTSRTG

SEQ ID NO: 56477 - protein, 197 aa, Zea Mays
MSRANSLEVAVLKDRLVKLESEKARPYGTLQAIQEVYHESGVRGFWKGLIPTLIMVCNPSIQFMIYETLAKRLQSKRSGKQLPKRHLTAMEVFLLGALAKLGATVVTYPLLVVKSRLQAKQEIGSNVMSRYTGTIDAIIKMVRYEGLHGFYKGMGTKIVQSVFAASVLFMVKEELVKLAVLLVASSRTMLITTSKKQ

SEQ ID NO: 56478 - protein, 111 aa, Zea Mays
MPLVHRGARFRKLIDLVVLVPNYLKKHSACLSGLLLGHKHSCLARGTIQTIPYRACLDAVMRLGFAFACLCPADSWACKQTRPNYLNSELFTPRQDSSTQFFCEQSYCVTR

SEQ ID NO: 56479 - protein, 597 aa, Zea Mays
MCCDFCKVPVFDYHRYCPRCSYDLCLDCCHDIRHSRANVARGEYTEGYVEDKGRDSFNRRARLEPSAESVNDKSLSWPIDINNIDIKSLFPTWRVNNDGSITCGPHEAGGCGSSKLVLRRIFKINWIAKLVKSSEEMVNGCKVHDLEDGCLSCSDGRRSEFTGQQNLGLSKCSNSDEIGRNCLYSPVLEDLKYEGIIHFRKHWKNAEPIIIREAFEPSLSSSWDPLSIWRGIQEIMDEEMDEDVIVKAVDCSNQSEVDIELKQFIKGYSDGSKGGDGPLVDAEIERVAPTQWGLLNLAAKLPPDALQPELGMKLLIAHGSHRELGKGDSMTNLMINMSDVVHMLMHATEVHYQCPKRVRVQSDVSEMIANGTSVHVNAHTPVQNLNLDIEEQSHKHSKSHIEEPNTNNSEGSLAGAVWDVFRRQDLPKLNEYLAAHREECAARCQAVSSVKYPIYDQTVYLNDYHKKMLKDQYGIEPFTFHQHIGEAVFIPAGCPFQLKNLQSTVQLALNFLSPESLPESVRLSQEIRCLPNGHLAKLKMLEVKKISLYAASSAVREIQRITLDPKFNLDPSFEDQNLTRAVSENLARVNKRKVSCS

SEQ ID NO: 56480 - protein, 182 aa, Zea Mays
MHTVRYFDGKTYEWVGLSRQRSIMGKVKRSLSQFTPAQWDKDQWHPFMGPLRFIQVLFLCVVFMTVELNTFFLKFCLWIPPRNPLVVYRLILWWLIAIPTIREYNSYLQDSKPAKKVGAFCWLSLAICIVELLICMKFGHGLFHDPMPTWLIIFWSLVGIALVVFLLSWSWRSHRRFRRKRL

SEQ ID NO: 56481 - protein, 177 aa, Zea Mays
MEEAKEKFQEIQGAYSVLSDANKRLLYDVGVYDDEDDEESMQGMGDFIGEMAQMMSQAQPTRTAKAHQFQGPAKSRTCSTSPSSSPSPPPTTAKDAEVPSCNGFNKRGSSALDSGKPPKPVEGGAGQNQAGFCFGVSDTKETPKLPGQNASRRRNGRKQKLSSKHDVSSEDETAAGS

SEQ ID NO: 56482 - protein, 138 aa, Zea Mays
MGNEKANSHWEAELPPKYDRVGIENFIRAKYEDKRWVPRNGTLRLSSGVRDEKSQESPASANWSGHHRSSFEQNHASPALPSKVAPVASRIPSQRKSQSHLQTTIMPGMASSLHNQYLAPRKKILPNQQKARPSLHLE

SEQ ID NO: 56483 - protein, 763 aa, Zea Mays
MELRKLCCHGFMIDEPDLEPANPEEGLRRLLDSSGKMQLLDKMMVKLKEQGHRVLIYSQFQHMLDLLEDYLSYRKWTYERIDGKISGADRQIRIDRFNAKNSTRFCFLLSTRAGGLGINLATADTVIIYDSDWNPHADLQAMARAHRLGQTSKVMIYRLVSRGTIEERMMQLTKKKILLEHLVVGRLTKANNVNQEELDDIIRYGSKELFEDENDESRQIHYDEAAIERLLDRDQVDGDESVEDEEEDGFLKGFKVANFEYIDEAKAQAEKEEARRKAAAEAENSERNYWDELLKDRYDVQKVEEHTAMGKGKRSRKQMAAADEDDIHDLSSEDEDYSLEDDISDNDTSLQGNISGKRGQYSKRKSRNVDSIPLMEGEGRTLRVLGFNHAQRAMFLQTLNRFGFQNYDWKEYLPRLKGKSVEEIQRYAELVMAHLVEEINDSDYFSDGVPKEMMRVDDVLVRIANISLIEEKMAATGPGKITNIFPNYLLYEFQGLSGGRIWKAEHDLLLLRGILKHGYARWQYISDDRENGLFEAARRELHLPSVNEIIGAQLNEANGNLEGAQEGQANTTSMSHYKEIQRKIVEFLRKRYHLMERALNMEYAVIKKKIPVPDDITEQGVPAGHAPFIPDISELLRELPNLEPISTNELVSEGTAGQLQVPHLYNKMCGVLEESGAYALSSFFGDKSASSSLANSLRQFETVCENVVEALRPHQNGTGSAIKEELVDAATKAAAAAAPQQDSGHDAPHGQSSTAKADMEIDG

SEQ ID NO: 56484 - protein, 841 aa, Zea Mays
MAGSTVFPVLRSSEYFTSPSIDELVEREVADPGYCSRVPNFIIGRAGYGQVRFLGNTDVRGIDLNEIVRFEKHYVVVYEDETCKPPVGHGLNKAAEVSLLLNPKDHPEPSILVEVLRCRARKQGSRFLSFNPVNGRWKFEVDHFSRFGLVDEDEEDAVMDEAAVRQPITEVRERDPPSNSYEIELSHSLPAHLGLDPAKVQEMRMVMFSNEEEDEYMEDGFPSDKRYLSRERMNVDSPTSSSKGSRLRSLSPLHMSSQKAGRRSGMPVRKERQALLEYNLNSSELGSSNQGILMSGQNRGFPVSMTKVEGFKLPPEQETPVAGNTYTVCVVDAALFMGRSFRVGWGPNGLLVHSGSLVNSPGTGLSSVIHIEKVASDKVVRDDKDKIKDDLTELCFSAPMDLHKSLDHDFLETESDSFRLKLQKVMTNRLVLPDICRSYIDIIERQLEVNDLSMSSRVLLMHQVTVWELIRVLFSERATGSQLDSVGDDDQEGMVLDKKEGSVDIDPEALPLFRRADFSNWLQDSVCHRVQGEVGSLNDARYLENILVLLTGRQLDTATEIAASRGDVRLAILLSQAGGSMSNRSDLAQTLDQWKMNGLDFDYIEEDWLKYCESWSRDDAQRQYIVELGIPEEWMHEALCMKIITHEACVANELYIQALYHEYYGDKQGALENLIQCGNWKKAHTIFVTSVAHSMFLSSNHQEVWRITSALENHKYEIADWDLGAGIYIDFYVLKNSMQERNAMDDSDSLEEMSESCRSFFGRLNESLLVWGSKLPVESRACYSKMAEELCALLVDTPSETLNLPMGCLLTMLNAPVPDESRSSYLQDALSVFTEILCSDP

SEQ ID NO: 56485 - protein, 219 aa, Zea Mays
MEATQLLSNLEEMEVTEHNLKTQLENALKELEAAQHKASTATSGTAENALLEAKSVTDLKSKDLEEKKRELELLDNKVQTLEKEWSVVEEESLKKPTPAQREKVLERQLHSLIEQLTAKQAQAEILATDVHSKEKELERLNHLHRNLYGGANETGAPRSRLSRGLLSGPEDYYYDPKAGRKPYQAGARTEGQNRLMILRSAIVLYVLLLHVIVFIKISV

SEQ ID NO: 56486 - protein, 140 aa, Zea Mays
MPTPVPAARQCLSPPAVTALDAAVASARRRAHAQTTSLHLIASLLAPTAAPLLRDALARARSAAYSPRLQLKALDLCFAVSLDRLPSTPTSASTPTSHEPPVANSLMAAIKRSQANQRRNPDTFHFYHHQAAPTSPNAIK

SEQ ID NO: 56487 - protein, 68 aa, Zea Mays
MRGVPGVPKTTQPLPVSKWICSRVRASVPVSVVTTATILPPHRGQVTSRVSSVELCMFCALHKIEKLI

SEQ ID NO: 56488 - protein, 600 aa, Zea Mays
MGFERVELRCPRDLDPRPSWTLGDVLAELDALDATRRAAPPTPLKQPPHWVNGVGTREKAFVMRVDGYDEDDLEDEDDGTSAGKSRALMAKGARFSCNDLQSSDSEDELDGQVTPYNLMEKRDLAKSILLELESEHHLKVQEEVRSKLALLEVCHQNEIHRTISAFARLQKYAESRKEIDRRLDVHFQRRMAEVLDKHLSMVQRDHEQKSQIVERRIRDDAALEEAKRKEQAVKEEKLRQERAQQEAEARQKEAAKLAAEARKTAFEAAKKEAAEKQAAKLRDAAATSQSSPDLQNNIADIKVFGVKYALEAESRRYALVQNQVPENIHHNKEFSKYDRQIAKSISKLMPTTDSVRARASELIKALDGQDCPRPISCCLFANKIISIVKSRNTKDRTFGNLAFACGYVMLLVTNQVPDAMDYLLAEFNRVCIYTVPKHLHALNAEARNRDYYRLIGYQEENGQFESTESYLTYVVAYVKLYAAMIQTEIKGVRHPHGLAEGWKWLAMFLNSLPATTATACALHAFLKMAGFALHKKYGSQFMKILYVISRYFLPALKEQGNKMQAEAVNNLQNYLNDKIYLEEPEGQYLVQQLLSKELFM

SEQ ID NO: 56489 - protein, 640 aa, Zea Mays
MPKELLPTVIKVLCSRLLNKHSNKTEHYAVLVTVLSCLETAFSKVPPTLDVFAVLTEDCCAGPSHEQEESNVIAFLLHCIEEEMHYSVRHGAFQVLRSAVHNYPSCANMIWEKLRDNVLNLLQIQSFEDQKYDANFGPPGAKEESSIKGRCLVAGIKVMDECLRVSSGFTGADDIKECRLLDIQQISDCTINKTIKSAPHFEMEAAGSSQNCTLDITLGINRWIEVIETHLPQGLSHGSAMVRTASLTCFAGMTSDVFFSLPENKRDYVTSSSVHAALNDMVPSVRSAACRAIGIVACFPQILSSSSLPGKFIDAIEFNTHNSSTPVRVTAAWALANLCSCIRFRALEVHTDPYAGVGVLSKSSISLLVEVALRLAKDSEKVKSNAVRALGYLSRFIRFNYHAGTINDPSDSVFYGDPVWLERMVQALMSCVTTGNVKVQWNVCHALSNLFMNDTLRLQDMPWASSVYSILLLLIRDSNNYKIKMHAAVALSVPVSRLDYGSSFPDVVRGLVHALESLNSNNSSLPSNFKQRDNLEKQLTFTALHLLSFVSPNDDPSLKDFLTKKSSFLEDWLRSLCASFNSSERQPLPTEATNDEDGFSPNVTQKGMLSSALQSLLGVYAGRTQQVITQRFEQLARSVA

SEQ ID NO: 56490 - protein, 221 aa, Zea Mays
MAPNHNFVDPERIEHGSPLRLPGHPVNGQPMDLEGWSGIQTEASQHMGVLQASSMGWNGAPVLAATPVVKKVMRLDVPVDKYPNYNFVGRLLGPRGNSLKRVEASTQCRVYIRGRGSVKDSVKEDKLRDKPGYEHLNEQLHVLVEAEFPADMVDVRLNQAVSILEDLLKPIDESMDYYKKQQLRELAILNGTLREESPSPHLSPSVSPFNSTGMKRAKTGR

SEQ ID NO: 56491 - protein, 76 aa, Zea Mays
MSRPGSTRVLPYAPLSLAIALCASWFAQPCALCSPMEFAEFYFCSVVPLPSLPWPRPGICRSLLPSSRACTQLTPC

SEQ ID NO: 56492 - protein, 381 aa, Zea Mays
MVNNLLQVVQKYQAVVTESGSAGISNNDAQTICNMFVTASQQLAKNLEHHTLNEHGLSKRYVRSLQISEVVNHMKDLIEFSHKNGLGPKESLNSYSKTMAKFQNMHDSRQLMAAANLANNQSNTKLMGTKEEASASATNQTPGVGAIGNNALQHATPLNSYQNMLRSSSANPVLLQQEASSVFKGPTAMHSGIQLEAARSFRGPNQVQFQHPAAIQQQQPMPQQSNFQGFGGVNPQYQHHVLNQLLQEVKNNNHVKAQQLPPDAPKASGGLAPGVAIPNVAAAGEQGQHINSNTRDHNGAVKGAAPAGTGPSNVINNTASMPPGRNNSFKSVSSSPAAATGGIAVNSKVDDSFHQLEDLDLDGLITNELMESGLFGAGQGW

SEQ ID NO: 56493 - protein, 172 aa, Zea Mays
MLNLKDLCLITGKASWLAYLDIYCLNADGSLFDAALISAVAAFTHLEIPLVSVGDDGRLFTVGGNDGKNKFELVNREKRKLTLGAIPLSLTCALHKDEILADPTSEEESIIETYVTVVVDSSDRLVSLQKLGGAVTCMATIKECISLAKERRRSLREILLDSIKAMEVDQTE

SEQ ID NO: 56494 - protein, 1008 aa, Zea Mays
MDLPSLAVVLRAALSHVPEERKAAEESLNQFQFTPQHLVRLLQIIVDGSCDMAVRQVASIHFKNFIAKNWSPNDPDESPKVLESDKAMVRENVLGFIVQVPPLLRAQLGESIKTIIHSDYPEQWPSLLHWVSHNIDLQNQIFGALYVLRVLARKYEFKSEDERIPLYHIVEETFPRLLSIFSKLVQIVNPPIEVADLIKLICKIFWSSIYLEIPKQLFDPNVFNAWMVLFINLLERPVPVEGQPMDPEIRKSWAWWKVKKWTIHILNRLYTRFGDLKLQKPESKAFAQMFQKTYAGKILACHMQLLNAIRSGDYLPDRVINLVLQYLTNSVTKNSMYQMMQPQIDILLFEIIFPLMCFNDNDQKLWEEDPHEYVRKGYDIIEDLYSPRTAAMDFVSELIRKRGKNNLQKFIHFIVDIFRRYDEAPADLKPYRQKDGALLAIGTLCDKLKQTDPYKTELESSMGCWAVCPYQLFRPEQFSSGYALYVSGMRDPDLPVRVDSVFALRCFVEACKDLNEIRPILPQLLDEFFKLMNEVENEDLVFTLETIVDKFGEEMAPYALGLCQNLAAAFWRCMASSEADDEADDSGALAAVGCLRAISTILESISSLPHLFLQIEPTLLPIMRRMLTSDGQDVYEEVLEIVSYMTFFSPTISLDMWSLWPLMMEALNDWAIDFFENILVPLDNYISRGTDIFLASKDPDYQQSLWDALQSIMMDENMEDSDIEPAPKLIEVVFQNCKGNVDQWVEHYLRITIARLRRAQKPYLKCLLVQVIANALYYNPALTLESLNKLGVAADIFNHWFAMLQQVKKSGARVNFKREHDKKVCCLGLTSLIALPADKIPAEALDRIFKATLELLVAYKDQVAEAKKENEEAADDMDGFDADEEDDDEVDSDKEMGVDDEDGDEISSLQLQKLAAEARGFQPADEDDDSDDDFSDDEELHSPIDEVDPFIFFVETVQALQASDPARFQNLMQTLDFRYQALASGIGQHAEQRKIEIEREKSEKANAQ

SEQ ID NO: 56495 - protein, 400 aa, Zea Mays
MANLQCLPPSVEPRVSDHVDEIINMIKQILDNRCAYVVGGDVYFSVDNFPEYGELSGRKLDDNRAGERVAVDERKRNPADFALWKAAKDGEPWWDSPWGPGRPGWHIECSAMSAHYLGHSFDIHGGGEDLIFPHHENEIAQSRAACCDSTINYWIHNGFVNVNSQKMSKSLGNFVTIRKVIEMYHPLALRMFLLGTHYRSPINYTIEQLNVASDRLYYTYQTLRDCEEICQHQQSNTGNPLPANTLNYIQKLHDEFETSMSDDLHTSVALAAMSEPLKVMNDLLHTRKGKKQDKRLESLSALEEKIRVVLSVLGLLPSSYHEALQQLRDKALRRASITEELVVQKIEERTAARKAKQYEKSDEIRKELAAVGIALMDGPDGTTWRPSLPLPEEEAVLAKT

SEQ ID NO: 56496 - protein, 152 aa, Zea Mays
MEATYYVKVEEINCAYFDQVDKLNNYGAHNRDTVSRLLWSFFHYWAYEHDYTRDVISIRTGRIISKERKDWTRRVGNDRHLICIEDPFEISHDLGRVVDKFTIKILREEFERAANILQFDPNPSVTLFEPYVPPPSPSLLQEETANAAEIEL

SEQ ID NO: 56497 - protein, 205 aa, Zea Mays
MVYILHETTHSRCGAGFQRVGPCLGGASSAKMASEVHIEDEPTAGEHVSSDSDMPENSHEPLESGDSDDPFEPPYFVPCRSPLSKSQKRMVEQRVRAIRSEVPICVAVMKNNNVGIAQRWMLELCSRYASVYLPTKGQNILLQCKGKTWEAKMMFHNGRRWFLNGGWPDFARGNGLRVGDMCLFELKKKKSTLTMAVHIIRKEQF

SEQ ID NO: 56498 - protein, 499 aa, Zea Mays
MGSADLVLKMACEGCGNTSDLYGTGCKHTTLCSDCGKSMARSRARCLVCSAPITRLIRKNAENKWSLHKEGLQGRQIAENMREKYNKKPWILEDETGQYQYQGQMEGSQSATATYYLLMRHGKEFNAYPAGSWFNFSKIAQYKQLTLEEAEEKMNKRKTSATGYERWMMKAAANGPAAFGSDMKKLEATNGGEKESARPKKGKNNEEGNNSDKGEEDEEEEATRKNRLGLTKKGMDDDEEGGKDLDFDLDDEIEKGDDWEHEETFTDDDEAVDIDPEERADLAPEIPAPPEIKQDDEENEEEGGLSKSGKELKKLLGRAAGLNESDADEDEEDEDQEDDSSPVLAPKQKDQVKDEPVDSSPSKPAPSGHARGTPPASKSKQKRKSGVDDAKTSSGAASKKAKDAKASGLKEEASSLAKPASKTSAASKSGTSVSPVTEDEIRSVLLAVAPVTTQDLVSRFKSRLRGAEDKNAFAEILKKISKIQKTNGHNYVVLRDDKK

SEQ ID NO: 56499 - protein, 225 aa, Zea Mays
MDLKGVDLISGVTCDAPYEWLDKTDSEWEFKRDQSSETFHVVAYDFGIKHNILRRLTSYGCKITVVPANWPASEVLNLKPNGVLFSNGPGDPAAVPYAVKTVQDIIGKVPVFGICMGHQLIGQALGGKTFKMKFGHHGGNHPVCDLRSGRVDISAQNHNYAVDPESLPEGAEVTHVNLNDNSCAGLQYAKMKLVSLQYHPESSPGPHDSDTAFGEFIELMKSNRL

SEQ ID NO: 56500 - protein, 380 aa, Zea Mays
MVSNPAPSSAPRYSAYSLPSTHLPGEDILFCIDADLEVHAKMKSAAVASSGSTSTASPQSVGADGAPAVGTRTVVAREPPTLRLTHPKPDKDGYPHIFDYFAVQTHDFLVPLWLPPDLAFARIDHRAAAVTYHGALPRRARRDDGGRVPEDGTDDRRAEEEARRWHCARTLRGDDAHGGEDGVPGRPAGACVHGAVRAKMEKYAAKKSAAQAKEKRAVWEWDYESFVDVSWRFRRLFPPTRWACEFNTALTVPFFRWLVGPSEVEVGGLRQRSEVRIEKCRYLESSGCVGMCVNMCKVPTQDFFTNEFGLPLTMDPSASSVGRGPGVEASLLPEPLFHVDAVCPGLSQASIGPYMHAQSLPAGLGMEELSFVFFIQKCSL

SEQ ID NO: 56501 - protein, 84 aa, Zea Mays
MLIGYVIIGGEAIMVYRVLPTSNHDTTKLIHLILHGIALVLGAVGIYFAFKNHNESGIANLYSLHSWIGIGTITLYGIQVRPCM

SEQ ID NO: 56502 - protein, 165 aa, Zea Mays
MKKSIRRIMDDTELGEETKRKIAMEKARQDHLKSMQEQSATKLRSKNVGNPFETPLEICLQDAGDGHVVNLAREEDEEPVRIPSSMSSKLKPHQVEGIRFMWENVIQSVKKVKSRDKGLGCILAHNMGLGKTFQVCVGLLAYSLDIYLHFLQELFVHCMLHLLYP

SEQ ID NO: 56503 - protein, 428 aa, Zea Mays
MMGRKAPLGCATTLLLLLAAAVAPAELSVLGLGGGAAAASGAVTRADFPAGFVFGVGSSAYQVEGAVAEDGRKPSIWDTFTHEGYSLDNATGDVTADQYHKYKDDVKLLHEMGVDAYRMSIAWPRLIPDGRGAVNPKGLEYYNNLIDELLSYGIQPHVTIYHFDFPQALQDEYSGLISPRFIEDFTAYADVCFSNFGDRVKYWSTVNEPNVETIGGYDQGILPPRRCSFPFGFGCEEGNSTTEPYVAAHHLLLAHASAVSLYRDRYQAAQGGRIGLTLLGWWYEPGTQTPDDVAAAARMNDFHIGWFMHPMVFGDYPPVMRRNVGSRLPTFTDEEAARVRGSFDFVGFNHYIVVYVKADLGRLDDQVRDYMGDAAVKYDMPFLKSRNQFPFGALTSDFMTSTPWALKKMLRHLRVTYKNPAVMIHENA

SEQ ID NO: 56504 - protein, 578 aa, Zea Mays
MESQTDSQSDSGEHMLVDEMKNSDSWATALIAELDQFKNANNDTRNLVNNSVEIDLMDDFLEMEKLAALPEVDCVSSSFGAETDSDQGVSRDKSSKVKTEPLQCQVTDLHAKIEKIEGEKRELEMALADARVQLGTSCDALMVANNRLIDLQMQLDLANESKHAAFGEAERLNGERKDLALQLESRSSQVDELQLMVASLEKNVDRKVLELQLELVSVEAADLRKTVASLEEKIDAEITLSMQHKTNADLAEASKESLEAQLQSANTEIGKLNGIVQTLENEVRKETDSREELLKQIEAMKIESERSLSVVSTKESLEVQLQVANSEVAKLRGMVNALECDAANEKAYSSDLQMQLEAVEGIRKVLESELESSHQEVMRLKEKVSSLEARIKDQTSLLVEYTAKSEDAVSRKKAMEGQLEAANLEVTKLRNKVSLIQGKVEQEKLLSEEYEAKCRKLEAQVLRDSREAKLWRLTNSNGDLKEKELVSAAGKLAECQKTIANLGRQLKSLTDLDGVVADPEKLESRDTHLDFRDGGDVADGLYELGLPKRNGSCLSPLRSDPSPRGLPSLSSYLSKTKR

SEQ ID NO: 56505 - protein, 1544 aa, Zea Mays
MGVVDFSVLGALQKVRSFVAGATPAEAADGRLPATPRSRSGGPSPENSPPPAATRSGGRRAIALRRQISSPELLRCRAVRRADDEDDDEPGVQFFTHGNDFLHDFSDTESVSVSTPNDINRSLTPSPLESPTWMVKQNDSSPISRKNGRFSPDSPGYGTKASLGSDGSPQQINGSVTDSGDGSKTQYPVEFGANIWCPPPPEDEGDDIESRLFGFQDEDDEAGDSSGLLVSGSFSANKIAAIDEVTNTAQEECLKTAVLGHFRALVAQLLKAEGIDMGKDDGSKGWLDIVSSLTWQAASYVRPDTKKGGSMDPTDYVKVKCIASGDPRDSNFVRGVVCSKNVKHKRMVSEHRNAKLLILGGALEYHRVPNKLASIGRILEQEKEHMKMIVGKIESRRPNVVLVEKTVSSSAQELFSKDISLVLNVKRTLLDRVSRCTGAQIASSADSIASVRLGQCEAFKVQKVTEFPSAKQTNRRSSKTLMFFEGCPWRLGCTVLLRGSCREELKRIKRAVQLAVFAAYHLSLETSFFADEGATLPKLPSRHVVVDPDTRNCTNSNSAALTNVGMPHGRKSEHDKLSQTAMVNIMFENTPVSPSSLPSNGEGHMFVGACQHKETEYSVDHKNSCEHCVSRATGSCNGYETSLCSSDNDSMTQNQNLQNSAKLTSNAHQYEFPAKECQQVDHWDRQPHDDQSVDQRDLNKFSGEYFPGSDNHQSILVSLSSTCIPKGLVCERSHLFRIKFYGSFDKPLGRYLRDDLFDEAYRCQSCKEPSESHIRRYTHQHGSLTISVRRLQSRKLPGERDGRIWMWHRCLKCKPKDGVPPATRRIIMSDAAWGLSLGKFLELSFSNHASANRVASCGHSLQRDCLRFYGYGNMVAFFRYSPVDILSVNLPPPVLDFNCCSTQEWLKRVAVEIFGKMESLHVEVSEFLHCTEKNIVTEDEPVRECVQRQIIEMKDWLKMQRNEYEMLLLPVMRESNHPMQTSIDILELNRLRRGLLLDAYIWDRRLCHIDSVLNTHGHISKTNPDNLDILLCTRLKEWKADLLCGDTEIEKSLGSPKKSLLSREGHLNDNEYSVADTNLEICLEGHPVDDADDLDKVYNKFSGVKKRPTAEPTDGLEPVERLPSLASIFSDTIDLAWTGSCDLQHDLPQAFTKIDENVSFNLDSPKYSNLVTPVRIHSFSSTLGLRQRERTGLVPASLHLSSFKSAEYFGAMRSILKDPMPNMRRSCSQRSPGTIEKLNVVLARKPTYISSTSNIINDGARLLLPQTGYEHDVVVAVYEDEPTSIISYAMTSEEYVEQVTHRLNSSLSFSHQPNTNGISSHGLEASSPSQGDHLHSKGTHFKLSFDDDSPISPDKTKFSVICYFAKHFAALRKKCCPKDIDYIRSLSRCKRWNAQGGKSNVYFAKTLDERFIIKQVTRTELESFVEFAPQYFKYLMESLASGSPTCLAKIVGLYQVGVKSLKTGKEVRMDLMVMENVFFERKISRVYDLKGSLRSRYTAGDSKVLLDANLIEALHTKPIFLGSKAKRRLERAVWNDTSFLAWRM

SEQ ID NO: 56506 - protein, 122 aa, Zea Mays
MDQMRSSLENATKPPDWRRSSSDDPRCHNGIQLVGARRIVGGRRASSSHAHQGVPLLRHVSGQRCRSRLSRPPPRAPLENHRRAPCGGIAMRVHGNRHRRAPGGATATMRLGNHLRLCIGVR

SEQ ID NO: 56507 - protein, 462 aa, Zea Mays
MYLNTDVQRLSHGVHQEKHSHAQSAGSFGNHVNSAPHEYGKYHQSLQGNPSNVGSPYEVPSEAGSKHKCTVEELEKFCDDGNVKEALEVLAMLKENRIVLHAPQYFRLMQACGDATALSEARLIHSQISESSLTVDTDFQNKIMEMYARCGSMEDAKKIFSSMDHHNLTSWNTMISGFVHNVLGEEAIDFFERFKQTGDKPDHGMFRHVFLACGILGSVNEGMLHFESMQKDFGIHPTTEHYASIVTMLGQSGYIVEAYEFVERMPVEPSIEVWENLMNMCRLNGFLELGDRCAQIIECLDSSRLNEQSKMGLFPVDVSDLAKEKERKKASVAEARSKVHEYRAGDRSHPDTPKIYEELRYLLAHMKEAGYIADTRFVLHDVDQETKEDALLAHSERLAISYGLITSAPRSPIRVIKNLRSCGDCHTAFKIISKLVGRQIIARDAKRFHHFENGVCSCKDYW

SEQ ID NO: 56508 - protein, 367 aa, Zea Mays
MHSTGYTLHVVLMTWRTPSGCRRLAAAPASGDSLVRGSVTLSRQRVVNVGEAMGRLRDGRAFLHRALVLSSLLLLASGEIFFEERFDDGWDSRWVKSDWKKSQGQAGTFRHTAGTYSGDPDDKGIQTTGDAKHFAISAKFPQFSNKDRTLVIQYSLKIEQDIECGGAYIKLMSGYLNQKKFGGDTPYSFMFGPDICGDQKKKLHLILSYQGQNYPIKKELKCETDKLTHFYTFILRPDATYSILIDNREREFGSMYTDWDILPPRKIKDVNAKKPKDWDDREYIEDPDQVKPEGYDSIPKEIPDPKDKKPESWDDDDDGTWKPRMIPNPEYKGPWKRKVYLLYTSYNFLTFCSFEYLCTHDFSLSEN

SEQ ID NO: 56509 - protein, 229 aa, Zea Mays
MDEDFEMPPAGADEMMGDDEMGDFGGDEGPVMKVGEEKEVGKEGLKKKLLKEGEGWETPEVGDEVEVHYTGTLLDGTKFDSSRDRGEPFKFKLGQGQVIKGWDQGIKTMKKGENAIFTIPPELAYGASGSPPTIPPNATLQFDVELLSWTSVKDICKDGGIFKKILKEGEKWENPKDPDEVLVKYEARLEDGTVVSKSEGVEFTVKRVDQQLERKVLCRQMLRCSLTLS

SEQ ID NO: 56510 - protein, 292 aa, Zea Mays
MPMKHRRLQSLNLEAETQENVEQHEDVQDPQPELTIGFPEGEAPTRNKSFKIIWQNGVVREVFRNFRTAELWDLKGGRVLVETDKNGIPNQWSESILSSYLGELAQNSSFAPLHIPRWDNKLFKGPKERIIKDVEKKFIYSSETKWSTRDWILKTVNKRWRDYKSDLKKQYFNPDKRSFDQIEKDVPDGVNENQWSFLLGIWCSEAHQKLCRTNAESGKKQRHPHTSGRKSHARLKKEMEDKKKGSITKIDLWDESHKKRNGNYVNQNVQTLMGKAFDELENRRKGQGDTFY

SEQ ID NO: 56511 - protein, 713 aa, Zea Mays
MKYVRTFSRQILDALIIMKDAGIIHCDLKPENILIAPTVKTAVGVKVIDFGSVCMEGKTIYSYIQSRYYRSPEVLLGYPYTTAIDMWSFGCIVAELYIGLPLFPGASEYDVLCRMIEIIGGQPPDDLLREAKNTGKFFKHVGSIYPSSEARNGASSAYRILSEDEIEARDSKKPKVGRWYFPRGRLDRLIYTYPWKNLSEGNLPETEKADCLALVDFLRGLVEFDPNKRWSPLQASYHPFITGEAFTGPYEPVQETPRIPVGRAAVVDHNPGGGHLLGAGLSPQVGSINRCLRFNNALQPNMPFSYGSSCGSFGSHGSFNDNAGFSYGSYDFNSVDIYNSPMDPSGFNLRSQLGGSFLGSSPHIRRRPHLSHGGGIRLSPGGPGHMSLGASPSQFTPPNSQMQIPTGPNGRYGASPSRGGHGSSLGKVAVVGQYNRRRNQGYPPMPMPPHEHTSQLIQGHQGDGVSTARFGAYAQGNSTYLHNALPNSSHYSWRSQRGSGSGLPLDPSSSRGSFPPTNYYGFPLHSDASADTLPSTSSVSDPADWDLNSSDKSLLQEDRTLSAGLSDLRLIDASGQTNRSSRLAPFQSHDILSSNPSTMNQRNGHLFHASSLGESTHTPGHVTLDGYEHTTYSQRSFPIYRGQPFQQYNNMTSSYIRPMRAHHNGQPVWSNYRLTEPPPTTMGDGMLWGGRGGHSFAASGLPPTLRKDFGRIF

SEQ ID NO: 56512 - protein, 657 aa, Zea Mays
MDPSDSNSAAGGKTQNVSVPPVEGVAGGGTSYGWVDGGLRGTNIGAGVIDPTKVHSDDLLHVWSMPSTANVSQQEAPRPLEKVNLLAARNERESFQIALRPKVSWATSGIAGSVQIQCTDLCSSSGDRLVVGQSITLRRVVPILGVPDALVPIDPLSPQISIQPGETAAVWVSVNVPCGQPPGLYEGEIFITAVKTELDSRTESLPKSEKCRLYRELRSCLDLTGPRDYSSPEEMVQRLTSASTVLRRVLDNPALQDCQENNGFGDMMDEDVINNISVRLKLSLTVWDFTLPVTPSLPAVFGISETVIEDRFCLEHGTEGWYSALDHHFRWLLQYRISPFFCRWGDSMRILAYTCPWPADHPKANEYYSDPRLAAYAVPYAPILSCTDAAKNSLRREVEILKSKPHWSKAYFYLWDEPLNVEQYDMICNISNELRSYAPDVRILTTYYCGPSGSELAPSTFEAFAKVPNVLRPHTQIFCTSEWVLGTREDLVKDIVAELRPDLGEEWWTYVCMGPSDPQPNWHLGMRGTQHRAVMWRVWKEGGTGFLYWGSNCYEKAMIPSAEICFRRGLPPGDGVLFYPGEVFSSSHEPVASTRLERILSGMQDIEYLKLYSSRYGREEGLALIEKTGMYLGPDRYTLDHGPVDVMRGEVYRTCRS

SEQ ID NO: 56513 - protein, 112 aa, Zea Mays
MAVSSRFPSQPAARGLLRRTPQRILPVERTPRRLALVVTAVSGGPVPGGSPVPRRPPPPEDAATVAPTSVPSSAASAIDFLTLCHRLKLLLVTLPHRMVYLRLKKAGANKQH

SEQ ID NO: 56514 - protein, 2261 aa, Zea Mays
MGDGGVACAVRAVEGFHAGALVRRGGAGEAMPDKGEKAHGHHHQQQHWKNQQSASATDLEEGELLSGEAETNGLPERSMPPKKWRKVLAASAAAVEVEPGEIVSTKQAVPLKKARRNGEVDKVELLPERQRKVKSSGKSTRKSIKDDMEPGEIAPPEKRRDAKSQRADDNSRRPSSSAQKSSLRDSDEEPGEIKPESSTSGSLRKNQPTEPHSINHKHHTDTSDQSGSKSHRKGPKGEGKRSAARHLSGRNREISSPTRDRRDRHERSPGILGRFPHERSRHDRYDRSPSRLERSPHRERARHYESRDHSPYVSPRHRARQPHFRDNTPSRVDNFPRGRVQREDVRDRSPFLHDRSPSERFRPTDTHEASKKSRSGNNSEKSQHKSKSAKQSSKTKSGSNEKNEKISNEKPTESSKYTELPPPPPLPLPPPPPPPPPPPPLPPAVPPPLPPPPEPEPTGVLAEDMIEDMDICDTPPHTSAAPEPTDPIYDIGRWFYLDHFGIEQGPSKLAVLKKLVEDGYLLSDHLIKHADSNRWVTVENAASPLVPSDFPSFYSDTSTQMVNPPEAPGNLLDEALEEASNLASGSEDKQMVEASAEDSEEFYINDRVEALMDGSILVHGQELEIIGELLGADFQPADWQRLSHPEDFTRFHVHIEGDDEIIGGTEFLENRTTDAYGLVSVDNFHHYVESSEWFSGRWSCKGGDWRRNDELGQDTPFRKKLVLNEGYPLCQIPKGSYEDPRRPCKDELYYPVRGKKHDLPLWAFSSTEEDIDGVNDTTKNTVVPGRPGQTRQPPSEVKVMLQVVSINYHVIKDQSSVEPRTKPRGTDRPPSRSSRSHSIGAERSSIHDGSSHFRKHHDHDSQSFHKSKSVPNIPKDHVCTVDELSVNRGDWYYLDGTGHDQGPFSYSELQELVKKDTIIEQSSVFRKIDNTWFPVLKDLKPGSSVPSAAPSSNLIAAFTHPDQYNFGVNQGSSSFHELHPQFAGYTRGKLHELVMKYFKSRELTLAINEVLDPWISAKQPKKEFEAYFSHNSASRNFLPEDGGSAKRARLLPDQSDENIHLSEDIIASRKEDICFEELCDGASSVDNDSVNPRAGNASWGLLNDHLLARIFHFMRADLKSLISSAATCKSWNAAAKYYRNMCRFIDLSSVGPLCTDSVFCDIMAGFEKQNIRTLILAGCSNLSSHALGRVLEHLPQISYVHIQGCSHLGDLKNKFQHVKWIRSSLNPEGSYRKMKTLKQIGDGNNYASKVARNFDQLDDSDELDGYFADISKIEGASLFSFGQGFYKRSKLLDARKSSAVLSRDAEMRRLMQRQAENSYRKMEEFVINRLREIMRCNRFDFFIPKVSKIEGRLKNGYYARHGFRTIKHDIRTMCQDALRYKDGNDLDDVKQIVVSFIQLAKRLGNPRYISERNGAAAQDSLDISQYSFDTKLKKKQNKTRANLVAAGADNSSRAFDLEIKRSLSKLKKKDVCSGSETSDDDGYSEGDETESETTVSDTESDFDVNSGAWDLKGNCLKLTEHGESVIDDRILGARMTKASLVPPVTRKYEVIEEYLIVADVEEVQRKMRVSLPDDYSEKLLSQKNGTENLELPEVKDYQPRKVAGDEILEQEVYGIDPYTHNLLSDIMPSDLELSPTDKHIFIEELLLNALNKQVRHFTGLGNTPMTYNIRPVIEEIQRSAEDSGDRRTLKMCLGMLKSMRNRSDQNFVAYRKGLGVVCNKKGGFGVDDFVVEFFGEVYPSWRWYEKQDGIKHIQNNSEDQAPEFYNIMLERPKGDRHGYDLVFVDAMHKANYASRICHSCNPNCEAKVTAVDGKYQIGVYTLRPIAEGEEITFDYNSVTESKEEHEASVCLCGSQVCRGSYLNFSGEGAFEKVLMEFHGVLDRHSLLLQACETDSVSQQDLIDLGRAGLGTCLLAGLPVWLVAYTAHLVRFIYLERQKLPDEILRHNVDEKRQFLIEINMDSEKNDAEVQAEGVLNSRLQQIVHTLDKVRYVMRCIFGDPKNAPPPMVRLSGKSLVSAIWKGDSSIVAELLQSMEPHVEEEVLSDLKAKICAHDPSDSEDIEGGIRNSLLWLRDELRTLPCTYKCRHDAAADLIHLYAYTKCFFRVRDYKTVKSPPVHISPLDLGPKYADKLGPGFQEYCKTYPENYCLAQLIYWYSQNSEPESRLTRARKGCMSLPDVSSFYVKSLKPLQERVYGNRTVRFMLSRMEKQAQRPWPKDRIWVFKSDPRYFGSPMMDAVLNNSPLDKEMVHWLKTRPNVFLG

SEQ ID NO: 56515 - protein, 604 aa, Zea Mays
MLGVDRLDMIKGIPQKILAFEKFLEENPDWNNKVVLLQIAVPTRTDVPEYQKLTSQVHEIVGRINGRFGTLTAVPIHHLDRSLDFHALCALYAVTDVALVTSLRDGMNLVSYEYVACQGSKKGVLILSEVADRLCMTYNQGVEDVLFIYLFLLSLQFQFAGAAQSLGAGAILVNPWNITEVADSIRHALTMPSDEREKRHRHNYAHVTTHTAQDWAETFVFELNDTVAEALLRTRQVPPGLPSQMAIQQYLRSKNRLLILGFNSTLTEPVESSGRRGGDQIKEMELKLHPDLKGPLRALCEDERTTVIVLSGSDRSVLDENFGEFKMWLAAEHGMFLRPTYGEWMTTMPEHLNMDWVDSVKHVFEYFTERTPRSHFEHRETSFVWNYKYADVEFGRLQARDMLQHLWTGPISNAAVDVVQGSRSVEVRSVGVTKGAAIDRILGEIVHSENMITPIDYVLCIGHFLGKDEDIYVFFDPEYPSESKVKPEGGSASLDRRPNGRPPSNGRSNSRNPQSRTQKAQQAASERSSSSSHSSTSSNHDWREGSSVLDLKGENYFSCAVGRKRSNARYLLSSSEEVVSFLKELATATAGFQATCADYMHVLG

SEQ ID NO: 56516 - protein, 298 aa, Zea Mays
MVFNIVTIDYGCLPISREFYTVIPHDFGFRKMREFIIDTPQKLKAKLEMVEALGEIEIATKLLEDDSSDQDDPLYARYKQLHCDFTPLEADSDEYSMIKSYLRNTHGKTHSGYTVDIVQIFKVSRHGETERFQKFASTRNRMLLWHGSRLSNWAGILSQGLRIAPPEAPVTGYMFGKGVYFADMFSKSANYCYASEACRSGVLLLCEVALGDMNELLNADYDANNLPKGKLSTKGVGQTAPNMVESKVADDGVVVPLGEPKQEPSKRGGLLYNEYIVYNVDQIRMRYVLHVNFNFKRR

SEQ ID NO: 56517 - protein, 945 aa, Zea Mays
MDGEQAARWAAAQEGVPVGADLVAAALRQLRFLAAVDRRRWLYDEGPLLDRAIRRYKACWLPLLDKHTKGVVVDGPLVVPLDCEWIWHCHRLNPVQYIRDCKKVYGRILNNNNVESSTQTKSTLESEKVWKELYPEEPFELLFTRTFDTAVDVNPAGAEEDITYDLVSAVKRQSSFYYQVGTPTMHDPRFLQEALARYKAFLYLIKMNQEKGLQRFRVPTYDVDLLWHTHQLHPITYRNDMVKLLGKVLEHDDTDADRSEGKKLDVGFTETTEQFESTFGVRYWKAGCMYRGNVPSPVTSTPQTFSAEVGTGSYICKAQKDLNALDVTVVELYLQIVDIKNLPSAVQKENVYVRFAKNQSDMFISDGGRLDISTVTGKNTGVCLQCEPTGELILAVMVDQLSKKPEPIGKVSFPLHDLTGPDSKLSFEKWFELKAHGGHAASPPVSLRVAASATVPSSAQKVFTMVRMEPFSLKSCLLPHSIKDQNTGSWTRFVNDCGTELIRLQIREHKAKNSMAVVRELVGVLKSTKKQIQLAEFKENKWTLKDSNLPISHGTDGSLLDLKGDNHLIKLYRGRKLEYERKCCSAHSEDVSAVTAVKFCAEHPYGKAVALLDTEAQLIMVNEDWLLLPWISISVLFMDGDGGTKLGGGAMVQKGTVFGSDTSMVLETQTVGAGSVASNLAQCGTCSAVFGGDDKEMANCKVEHASSGASRTVVASGENGHTETAGCGGGCGSNCGPMMAEDPKAGNAKSGGCGSGCGGGCGGAGGCGTMANEGQSRSGGVGTLLSSNAMGGEGQQAHSAGCGSGCGGGCGSGMVIEGSKANNAMSGGCGSGCGGGCGALFNASTAAGEGLHNKSAGCGGGGCGSGCGGGGGCGSGMAIEGFKANHAKSGGCGSGCGGGCGTGSMVAEGSNGGNAKSGGCGGGCGGGGGCGGGGCGGGCGAVFNA

SEQ ID NO: 56518 - protein, 418 aa, Zea Mays
MGISFPDSRRLTEYKHFLEEAKKRDHRILGKSQELFFFHELSPGSCFFLPHGARIYNKLMNFMRKQYRDRGYQEVLSPNIYNMQLWETSGHAANYKENMFVFEIEKQEFGLKPMNCPGHCLMFANRVRSYRELPLRMADFGVLHRNELSGALTGLTRVRRFQQDDAHIFCREDQIKDEVKAVLEFINYVYEIFGFKYELELSTRPEKYLGEIETWNKAEQQLTEALNEFGKPWKINEGDGAFYGPKIDIGVFDALKRKFQCATLQLDFQLPIRFKLTYSAEDEAKIERPVMIHRAILGSVERMFAILLEHYNGKWPLWLSPRQAIVCSVSSGSVEYAKQVLAMLHEADFHVDIDVSDRTIQKKVREAQVAQFNYILVVGAQEAETGNVCVRVRDNADLATMSVDGLITRLREEIVAFK

SEQ ID NO: 56519 - protein, 381 aa, Zea Mays
MYQDSDWCFAGTMSSPWSPLSIEEDEEIQELGAEEQQVGEQLRQGDGQQQELTADARAQETGMKRARSVSSSSTNPSNSRKSEGKIKVEENAPGAATGVILSLRESLQDCKQSLASCQVELEAAKSEIEKWHSAFQSIPAVPSGTIPDPVSVVSYLSTLKSSEESLKEQLEKAKKREAAFIVTFAKREQEIAELKSAVRDLKTQLRPPSMQTRRLLLDPAIHEEFTRLKNLVEEKEKKIKELQDNVAAVNFTPSSKLGKMLMAKCRTLQEENEEIGTMASEGKIHELGMKIAVLKSQNNELRNQFDVLYKHMDGVTNDVERSNELVSILQEELEAKDLELTRLKEVLAQKGATQDAPVETSDDAGNGQEADSDTLQVKAES

SEQ ID NO: 56520 - protein, 175 aa, Zea Mays
MVNYVDEIRAQGFKLEYLNIGGGLGIDYHHTDAVLPTPMDLINTVRELVLSQDLTLIIEPGRSLIANTCCFVNRVTGVKSNGTKNFIVVDGSMAELIRPSLYGAYQHIELVSPPTPGAEVATFDIVGPVCESADFLGKDRELPTPDEVEEDGSIVKIRHEEKLDDYMKFFDGLPA

SEQ ID NO: 56521 - protein, 160 aa, Zea Mays
MAASFTAKGLTLDDLVTLSGGHTIGSAHCNTFRERFQQVANGSMTPVDGSMNADYANELIQACSANGTVPAGTAAVGCDSGSASVFDNTYFANLLGGRGLLRTDAALVQNATTRAKVAEFAQSQDGFFASWASSYARLTSLGVKVGADGEVRRTCSSVNG

SEQ ID NO: 56522 - protein, 245 aa, Zea Mays
MSRRWSRTIYVGNLPGDIREREVEDLFYKYGKIVDIDLKVPPRPPGYAFVEFEDPRDAEEAIAGRDGYNFDGHRLRVEAAHGGRGNASSHDRSSGFGGGGGARRGVSRHSEYRVLVTGLPSSASWQDLKDHMRKAGDVCFSEVYREGGGTVGIVDYTNYDDMKYAIKKLDDTEFRNAFGRAYIRVKEYNGKRGRSYSRSRSPSRSYSKSRSPSKSPRTRRSSSRSRSRSVSSRSRSPSKGRSPSR

SEQ ID NO: 56523 - protein, 610 aa, Zea Mays
MDLSRFASGVGPSRVAPRAGLQIGAAENGFRACSLRRARHRGGGNGNLTAAASTLRGRGGLFYLAPTRRSHPSLRLFYLLPTRGSHLSLRARWRPRCQGNDSLAYVDGPLETAKGSGEVDDNVPTSSGSDDDRGLADVDGLREMLQRSRNELEVARVNSTMFEEKAQRISESAIAFKDRADGAQRDVCAAVATVQEIISKEADAKEAVQKATMALSMAEARLQLAAEALEANRGSVGPTEVSIEGMEQEALLSAQEEIKDCRAALSRCAEELSRVQDKKMELQKEVDRLTDLAGKAQMDASNAEEDVANIMVLAEQAVALEMEASQRVNDAEMVLLKAEKAIASIDTVVELPSPAEEQRSTEEDSVSEGYEYSSDVTDDVYVRDEVSSIERLMVGDLTVQGFEQLEPSREIYDEESSNKMSVEPQKEAESDSDKSKQGKKQEMERKEHTKEPLSAPKALVKRSSRFFSASFFSSKVDGEFTPTSVFRGLMKSVQKQAPKLVVGILLLGAGAFFLNRAEKSQLFQQQGIATSIGKVTSTTKPIVLEIRRIPQRVKKLIELLPHQEVNEEEASLFDILYLLLASVIFVPLFQKIPGANTGLISCTCSFLWKD

SEQ ID NO: 56524 - protein, 347 aa, Zea Mays
MADTGSPKPSSSFRYDGVASSAGRHDRSGSMSDSHPSDNYVHDTVDPHAAIGRSITVESQRKDLNTIFLKLRIADPTGHAQNIHFPFDIEADTSISVATEMVVQLDLTDQDVTAIAEMIDAEIRSHIPDWAAEESIDNQGDEAAHSETHSSEGDEGTSELRDEIGASHNGFVQEQLPSGRKYWSDSPRRDGEISQSVVEHQIGDSSANGIPKRNKVDGIVICARDEEDQSFGSSIHPAEAMFERISSSVDLSNPSAVDSMSRDASVGGSPHSLDGEEEHNSDQHLAAGVTERLIDLLAQQQEELRALQRKHKADIEEMLKIVPAEDREETLTLCHLKAEQKNRAAEP

SEQ ID NO: 56525 - protein, 580 aa, Zea Mays
MMDLLIAQITTDLRSSDALRQSSALLQALQQCAAGRDVSALARTAATEILSAPSSAVCKRLALDLLRALPLPPDLLDPLLLSSLRSDLSFPDPDVAASSIASFPSLPSHLLPSLLSSAHAEIANALSSPAESLRLAAVTSLSSLLPRDDLTLMCSTNPSLMAHATTWWGRLAELALDSADAVSAGAFEALARLFQELEGRRMSRLAGDKLVDGEGALAVRAQWAADAIDFIWSRRNMLIARSMVMPVESFRVTVYPLVHAAKMVASGVVNTLRRVAKPGDTTIADSVESSAEKLVGVSDIVSHLLPFLSSLDPPLVFEVGINMLALADVPGGKPEWASAAIIAILTLWDRQEFSSMRETIVRAVVTNLHLLDLGMQVSLFKRLLQMVRNLRAESDRMHALACICRTALCVDLFAKESVRRGQKPVPGTDVISLFEDVRVKEDLNSVTSKNLFREELVASLVESCFQLSLPLPELKNSGTESRVIGALAYGTGYGALNWTEPALDVVEVCRPCVLWDCDGRTYAIDCYLKLLVRLCHIYDTRGGVKTIKAGASQDQILNETRLRNLQLQLIRDLREVWIPF

SEQ ID NO: 56526 - protein, 561 aa, Zea Mays
MRSAEDIAYAVLRFFAKGGSLVNYYMYHGGTNFGRTGASYVLTGYYDEAPMDEYGMYKEPKFGHLRDLHNVIRSYQKAFLLGKHSSEILGHGYEAHIFELPEENLCLSFLSNNNTGEDGTVIFRGEKHYVPSRSVSILAGCKNVVYNTKRVFVQHNERSYHTSEVTSKNNQWEMYSEKIPKYRDTKVRMKEPLEQFNQTKDASDYLWYTTSFRLESDDLPFRNDIRPVLQVKSSAHSMMGFANDAFVGCARGSKQVKGFMFEKPVDLKVGVNHVVLLSSTMGMKDSGGELAEVKSGIQECLIQGLNTGTLDLQVNGWGHKAALEGEDKEIYSEKGVGKVQWKPAENGRAATWYKRYFDEPDGDDPVVLDMSSMDKGMIFVNGEGVGRYWVSYRTLAGTPSQALYHIPRPFLKSKDNLLVVFEEEMGKPDGILVQTVTRDDICLFISEHNPGQIKTWDTDGDKIKLIAEDHSRRGTLMCPPEKTIQEVVFASFGNPEGMCGNFTVGTCHTPNAKQIVEKECLGKPSCMLPVDHTVYGADINCQSTTATLGVQVRCGGGKKGA

SEQ ID NO: 56527 - protein, 299 aa, Zea Mays
MSGRLDLGTGLLLLWISETCGHLAISSSWALGRTATASRPSQGQAMVESSGHRSTVPAAVGFFRVPGLFVRLSGKGGASNAVDPEDSVWSPTSPLDLKHVIRCSPPRACLGLADALTADGTGSLHSGGRSSFVDSIKPFLERALPKAACGKEAAAAASSSAGVVAATLGKQASEYADCEEYTCVISRGADPRTTHILAGETVEVRRGDVGGGCRKVVFIIEPLALSDRQPRASSSSSPAAPARVVASGRCCCCMKRLLEDRDIFIYLGEKAFCSDECRNGFIEEAAEEELMILDPARNL

SEQ ID NO: 56528 - protein, 177 aa, Zea Mays
MDFDPVLVSKLSEKKIIAPGSPSCSLLSEQKLRGVIENARQILKIIEEFGSFDKYCWSFVNHKPILSRFRYSRQVPVKTSKADAISKDLVRRGFRSVGPTVVYTFMQVSGMTNDHLISCYRFAECAASSAGAAKLSDGSLANSSDSSHGTAEQKMNGTNGLDSGLELSRTIDELSIS

SEQ ID NO: 56529 - protein, 192 aa, Zea Mays
MGGEAGMGLRVRASSLLLSLVLELAVALVSDRRRVRRHAGRGGARGRGRHGLGDRVAVQGRRRRARRHGAERRGVQRQPHAEGRRGPGHAAQARRARRRVRVRALQRGLEARAHVGAELRPALPRRLAGVRARRRRSGPGRLAQPVLHVHVLLLLLVRIGGGRNLFDGESGTITAAASNCNTPTITFVLLDC

SEQ ID NO: 56530 - protein, 241 aa, Zea Mays
MEAVRTMGGVRFPVLTPNLKGFEAAIAAGAKEIAIFASASEGFSKSNINCTIKESIARYNDVALAAKEKEIPVRGYVSCVVGCPVDGPVPPSNVAYVAKELYDMGCYEVSLGDTIGVGTPGTVVPMLEAAISVVPVEKLAVHFHDTYGQSLSNILISLQMGVSVVDSSVAGLGGCPYAKGASGNVATEDVVYMLNGLGVKTGVDLGKVMAAGEFICRHLGRQSGSKAATALSKVTANASKL

SEQ ID NO: 56531 - protein, 1921 aa, Zea Mays
MAAPGAGAGGRRASTSRTRRASTAAAESNENEDNAAAPSSSSSAFALPSAPHFSLPPRSPLSAIADPGRNPRSAPATPKSLAGTPRASAAGSGAKDRTCSVGAAKRVFDQRDVAAAEVPLEVPHFELDEDPAFWKDRNVQVLIRIRPISDAENATHGQKRCLLQDSSKTLSWTGHPETMFTFDHVACETISQEKLFRVVGLPMVENCMSGYNGCLFAYGQTGSGKTYTMMGELSKLGNELSKDAGLTPRIFEYLFRRINEEEERRREEKLKYICKCSFLEIYNEQITDLLEPSSTNLQIREDIKKGVYVENLMECYVSSVNDVMLLLLQGVANRKMAATNMNSESSRSHSVFTCVIESRWESDSMTHLRFGRLNLVDLAGSERQKSSGAEGERLKEAANINRSLSTLGLVIMTLVDVANGRSRHVPYRDSRLTFLLQDSLGGNSKTTIVSNVSPSICSSSETLSTLKFAQRAKLIQNNAKVNEDASGDVIALQRQIEELKDQLTCLKKQKDCPGSPSLLLNSYFANEFKTSCGVDEQLDCDLNILKQKVSHLEDVLVRSLRREKSAETKIGKLEAEIQHLNRLVNLMESDAHRLRKRLELRGEKQRLHSIGENAALSMEIQLLQEQINENPQLTHFALENKRLIEELTTLHNFYKQGERDMLLTEISLLRNHFLHILEQKYTTTRKEVEPQGDELIKELDSCRKELDACLENNVLLAREVNKLRCELIQYQKACTNQVAPEEKENVVATSTNAMQHDQAGKNFSYLSTDDVNRQFMQAEITTNISESFQLELPYEIDSEDPDSPHLHDPETHDFRDPRTASEYDGVLSQCLNLAMASSHDVLNKSTILTDLNFLEKDDTYHVHEKPPFRGIHLHDETLSCQEIETVNSSKHLSQDELENLKRTNEELKEKLFIMAEESNKLSEIIVAKDVEIASLSEEWEAAIFDLTSFLTDGCRSLDDAYQNIDNMISSFPHSNSSVSEHVEKAMKISIEKEKMIFKLQTELQTAQKIGREVKEKLHILKGATLAITEAQQLDNEENSQEELQLVGLLHQKDCIIQELRNNLKPEKFVFAERAKGHSRDDLLLPGSSVDMIEDHDENQPAASQASPDYQSKLDSVMHLVEDKSNKVLALFSNFEAAHETMEEAELMLSALLKANEGLKLERDNCRQAVELLLSEKSSLIGELKELEASSSCTSQKYDKLHQQINECVTEMTKLAATIRKSFQQIQSVSTVELFALCSEIITFGQDLKRYIIDSRSYIANMVSLIEEKSRSIEQFHHLSTHACGSARQQVESNSCQWGSRKLSQSDYSTDYASLRREFNRKSNVVEGLSFDLKLLQESASNAKDMKDKADEISIALSNTQRELDMKTSTMETMLKKQKVLEEELAENGARLINLRLELEQSQSLSSALLKENKGLRVMLEDETMKNSETKVLLEEKVKVIEGLESQILFLNRCEVGQLMSDIEELNNSIKIMSSDRDNLQAEIFKLRDKLEMALALAEENEAAAIEVRQTAEISKIYAEEKEEEVKILERSVEELEGTVTVLEEEVCNLKEEVRNYQIHKQSEAQFQAINDMLAEEKASKCDAAEESCQAKCHLEKRLQAEILAHQGVRKKIEGLKLEAKRKDDEIGQYKEHIAELVLHSEAQSLLFQEKYNEMEHMVSRQRFGPHESYSETVPKTEKPSGRARGSSSPFRCISSIIQQMNSERDQEILVARQRIEELEGLVSCKQKEICLLTSRLAAVDTMTHDIIRELLGVKLDMTNYANLVDQEELQKLLIASQQQIEQSKAKDTELEALKEQLGHLILERDSLLDDMDQRKTDLLEAQLLVEQLEQREQMLEAQIEMLQLEKDSLQQKTLEMDETIELLARSNQPDINPRMGDNHHRGSSEFSRRLAQSDMLLSHARHEHSRRHAAGSSRTHHGRHR

SEQ ID NO: 56532 - protein, 574 aa, Zea Mays
MVASPSPTPSAPSSSPCSCSSSSSCSPVTSGAAHRRRLPDLPAAADRSGGAARARALFFARRASGKRAAAVLDQAWARNAVACLLGAAVVVGLVTTTSRRGAVVGAGMGSRLVRRAVPAEALRLGEEENLAAVARRPLDDDDPPPSMMAQVWTKPDSEGYTKCTGRTKNRHGTNSTTAGYIIADANGGLNQMRLGISDMVAVAKLMNATLVIPALDHKSFWTDPSDFKDIFDVQHFKQTLEDDIMVVDSLPPDFKRFKPYTRAPKSWARASYYRAFTKTLKKARVVRFTHTDSRIANNGLPPSIQRLRCRANYEALRYSREIEELGNTLVGRLRNGSNHYIALHLRYEKDMLSFTGCSHNLTHQEAEELREMRLRVQHWKEKEINGKERRLQGGCPMTPREAALFLKAMGYPSSTRIYVVSGEIYGVRSMDALKAEYPNVYTHYSLATVNELESLRLYQNRLAAVDYNVALQSDVFVYTYDGNMARAVQGHRRYEGFQKTINPDRRKLVELIDKLDEGTIDWTGFASEVKMHHGNRLGGPYQRLFGRSPRHEEYFYANPLPGCLCRRNTQDQVA

SEQ ID NO: 56533 - protein, 83 aa, Zea Mays
MAWRGPATRAVLAAVRRPAAAARLHAPRRRVPPAFATTSSPLPSARPLAALMGSPVTVAAVMARLTAHPGASARACCELSQGT

SEQ ID NO: 56534 - protein, 103 aa, Zea Mays
MPMSPRDYIHRVGRTARASRGGLAISFVTQKDICLLHEIEDVVEKQLEAYECSDKEVTKDITKVFKAIRLSKMRRRDEGHDEKVEARKEQKRRDRARKRKHED

SEQ ID NO: 56535 - protein, 569 aa, Zea Mays
MVSMIEAYLRANKMFVDKHEPETERVFSSHLELDLSEVEPCVSGPKRPHDRVPLKEMKSDWHACLDNEVGFKGYAVPKEQQGKVVKFDFHGRPAEIKHGSVVLAAICSSTNTSNPSVMIGAGLVAKKACELGLEVKPWVKTSLTPGSVVATEYLKHSGLQDYLNQQGFHVAAHGCATCVGNSGDLDGSVSAAITENDMVAAAVLSANRNFEGRVNPLTRANYLASPPLVVAYALAGTVDIDFEKEPIGVGKGGKEVFLRDIWPSNQEIDEVVESSVQTHLFKKVYDSIMERNPRWNQLPVPKEALYPWEDRSTYIRKPTYLEGMSMTPPAAPPTVTEAYCLLNLGDSITTDHISYSGKIPEGTPAAKYLLEYGVEPKNFSSYGGRRGNNEVVMRGAFANMRIVNKLLDGKAGPWTIHVPTGEKLYVYDAAMKYKSEGHDMVIIAGSEYGSGSSRDSAAKGPMLLGVKSVIAKSFERIHRSNLVGMGIIPLCFKAGEDADSLGLTGRERYTIHLPTSTAELSPGQDVTVTTHDGRSFTCTLRLDTQLEVTYFNHGGILPYMVRNLAAQMK

SEQ ID NO: 56536 - protein, 441 aa, Zea Mays
MKTTFTASSFVKEIFTLGYPRLFSMVENLLERISRDTDVKGTLPALTPEGKDHMISAIEMFQTAFLALCHSRLSDYVNSIFPMSNRGTIPSKDQISRLVSRIQEEIEVVRTHGHLLVLVLREIGKTLLLLAQRAEYQISTGPEARQVTGTATAAQLKNFALCLHLQEVHMRISSVLSTLPNVASEVLSPSLGVVYGVACDSVTSLFQAMLDRLESCILKMHEQDFAGQGMDASMDNNASAYMEELQKCAVHFRSEFLSKLLPSSSSRSETICTIMVRRMASRVLIFFIRHASLVRPLSEAGKLRMARDMAELELAVGQNLFPVEQLGAPYRALRAFRPVLFLETSQLDKFPLLQDLPPSVILHHLYSRGPDELQSPLQRNKLTPLQYSLWLDSQGKDQIWKGVKATLDDYEMRVRSRGDKEFSPVYPLMLQIGSSLSQPNT

SEQ ID NO: 56537 - protein, 167 aa, Zea Mays
MDKYKDLHPRLPVIVAETLLYTDPEIELPLWLVQMFKANKAGNKISWGMSGKEADPAALFRLYINYGRHAEATNLLVEYLESFASSRPVDVLHRKKMSAVWFPYTAVERLWCQLGEMQRAGHSVDQCDRLKKLLHGALMSHLQQVVVDSDDVLSSVGDGQGMEDQSS

SEQ ID NO: 56538 - protein, 1463 aa, Zea Mays
MHGWRGAEGCDVRRRRLVRLMWPAARVEAEAPPPPAQGPATSPSGSSATHPRTTYRPESSAQKQECIDLPCPVSSDSFVKDGREIRVGDCALFRAVDVPPFIGLIRWIEKKEEGYPKLRVSWLYRPNDVKLNKGIQLNAAPNEIFYSFHQDEASAVSLLHPCKVAFLRKGVELPAGIASFVCWRVYDIDNKCLWWLTDRDYINERQEEVNRLLYRTRLEMRAALQSGGRSPKRLNSPSASQQLKTASDGTQNGGLSRGKKRERSEQGVDPAKRDRDRLLKVDDGEPGSFNLDDIKSEIAKITEKGGLPNAEAVAKLVHLMQLDRTEQKIDHSGRVILADVIAATDSPDCLGRFVQSRGLPVLDSWLQEAHKGKSGDGSSPKEADKPIDELLLALLRALAKLPINLSALQSCSIGKSVNHLRSHKNLEIQKKAKCLVENWKKRVDAEMKSNDVKPLVSGQSVSWSGKAGFQEISNVGTKRGGSSENSPKNSVPTLSSSKVLTDKPGGTDAAAKLNPGVSALSNLQHVQSTHVTTNLKEQPCKSTGGTGCPELPTVKEEKSSSSSQSPNNSQSISSEPSKDARSSTAASGGASKTSGSSSRSHRRANNGLVSGNLKEPSVGRSVSLDRSLLQDKSSQTGTASEKGIDMPSDHGNNHRLIVRFPNPGRSPARSASAGSFDDPSVTGGRASSPVVADRHDQTERRVKVKTENSRPHLASDANAESWHSNDIKGATGSEEGDKSPCAILDDDNSRTPDHSVKDAHASRAACSSYMNEKGVSETKVGTSFSPMNALIEIKYSEASHSLQAGDDTAMNLLASVAGEISKSELASSPSTSVKKLVCEGVNTGKVKVESDMGPSHPGQADAKKVAMGNEVKKADVVGNSSVLQNDTEKKEHVSPSSADVPKLVPAASPVGVANGNNEMKESNGSSSESNSHVKSEGVNSQQSEQSAKQSSKKSSDGVCGKEDHVLSDEEGSSLAAHTKSNATAKLDFDLNEGIPGDDGHQSETTASPVVCSSAIHLTGLLPFTSPTTSGLPPAPITVAAPAKGPFVPPENLLRAKPEIGWKGSAATSAFRPAEPRKILEMPAATRDIPVSHAAGKQSRPTLGFDLNVADDQALEEDFPQSSAQTTCSESGNTRSRDGSSRSAGIELDLNRADEVADNGQFVPNASHRVEVPLFSTRSLPRVLSNAGANSSRDFDLNSGPDLYDVGTEPAPRSLPSKNTSSIQFLPQVPVRMNSDAMSNNISPWLVSTSPCGPVAIQSFLPSREQPYPLEAAPGAQRIIAPTADGGQFGGDPCRPPVISTSPAMVFHPPAYQYAGFSFPPSVHLQTPAFSIGSATFNNSASAGVPYFPTLSSSLVGPAGALPSQHSRQYAINLAEGSSSSVRDGNRKWESQGLDLNSGPGSIDLEGKDERMPLPVRQNLIPPLHGFVEDQGRIYQMPVVGTKRKEPDGSWDSERSTYKQLPWQ

SEQ ID NO: 56539 - protein, 167 aa, Zea Mays
MDGFYRKIDANPDMYGPLWITTTLIFMLAVFGNYATYLVQTKKDMDIWNFDVGYFSWAASVMYSYAIIVPVVFFFLFQYFGSRPSLVRFWCMWGYSLFIFIPASVLLLIPVGFLQWVIIALAGGASSWFITLNLKECTEGADLMVLMASASVLQFALALFIKVYFFA

SEQ ID NO: 56540 - protein, 85 aa, Zea Mays
MVINRFKEKYFFVYTLPTARRGAVASPPPARRGAVAALPGVARWPSREQPWRREAWWRPCPARRENAKSQRKIDLEEDRDNRGRG

SEQ ID NO: 56541 - protein, 63 aa, Zea Mays
MATAAAGLAPAKEVVEKKVELLKEAVYQKAGNIFFRKSVKSVITTEQKQLDQAKARLSKLNQA

SEQ ID NO: 56542 - protein, 1061 aa, Zea Mays
MAAADGRSGDFRVRGGSVGGRIDRLVVENFKSYKGEQTIGPFVDFTAIIGPNGAGKSNLMDAISFVLGVRSTHLRGAQLKDLIYALDDRDKEAKGRKASVRLFYCQPNQEELCFTRSITGAGGSEYRIDRNQVTWDVYNAKLRSLGILVKARNFLVFQGDVESIASKNPKELTALLEQISGSDELRREYDELEEQKARAEEKSALVYQEKRTIVMERKQKKVQKEEAEKHLRLQQDLKLLKTEHYLWQLYTIEKDIEKIEAELVEDRESLQQVQEENRSSDYELTAKKKEQSAFLKKITLSEKSITKKKLELDKKQPELLKLKEQISRLKSKIKSCKKEIDKKKDDHKKHLGELRRLQSDLVEVTEAIEELNEQGQDTSGKLLLADDQLQEYHRIKEDAGMKTAKLRDEKEVIEKKLNADAEAKKNLVENMQQLESRKDEISSQERELQTKLSKILHSIPKLENELTHLHEEHNKIAKERQSSGSEYQMLKQRLDEIETQLRELKADKHESERDARLKETVGRLKRLFPGVHGRMLELCRPSQKKYNLAVTVAMGKFMDAVVVEDENTGKECIKYLKEQRHPPQTFIPLQSVRVKPIIEKLRTLGGSAQLVFDVIHFDRVLEKAVLYAVGNTLVCDKLDEAKALSWSGERYKVVTVDGILLTKSGTMTGGTSGGMEARSNKWDDSTIESLKKKKNLLENKMSELGSPRELQRKELAISEKITGLEKKLHYSNVEQNNLRGKLAKLASERSNIETEINRLKPGEEELETRIGKREAEARKLEKKINDIVDKVYRDFSISVGVKNIREYEEKQLKDAQALQERKLSLSNQMSKLKYQLEYEQKRDMHAPIVKLTETHESLEKELKGLQERESGAKAEAEQILAQMEELKTEADDWKSKSDECEKVIDELKEQNGNVASTLAKMDRQVKSKEGQLAQLISRQREVHEKCELEQLKLPTVNDPMDTGTSSQEPILDYSQLSKSHLQDIRPSERDKHEAEFKKRTGVLLADIERTAPNLKALDQYDALQQKEKEVTERFEAARKEEREISDKYNSVKQRSILACII

SEQ ID NO: 56543 - protein, 57 aa, Zea Mays
MEGEAAAAEAVARIRLVRCPKCDKFLPELPAYSVYVCGGCGATLQVQHPKWISSLSD

SEQ ID NO: 56544 - protein, 76 aa, Zea Mays
MLASGNTTSDKENKDNTDGKELVTRKSQIKIMAEARVLDFDESPAPARTADKKLGSCHRRSVSSPILPSPNLRSFR

SEQ ID NO: 56545 - protein, 446 aa, Zea Mays
MSLWAPVLLVYLMDTQIWYAIFSTIFGGMTGALGRLGEIRTLGMLRSRFHSLPGAFNTYLVPSDKSKNRRFSLSKRFAEVSPNKRTEAAKFAQLWNEVICSFREEDLISDGAAENFLLHREMDLLVVPYSSDPSLKLMQWPLFLLASKIPIALDMAAQFRPRDSDLWKRICADEYMKCAVLECYESFKLVLNLLVVGENEKRIIGIIIKEIEGNIGKNTFLANFRMSALPVLCKKFVELVSTLKERDASKFDNVVLLLQDMLEVITRDMMVNEIRELAEFGHGNKDSVPRRQLFAGSGTKPAIVFPPPVSAQWEEQIKRLYLLLTVKESAMDVPTNLEARRRIAFFTNSLFMDMPRAPRVRKMLSFSVMTPYYSEETVYSKSDLDLENEDGVSIIFYLQKIFPDEWNNFMERNNCKRESEVWGNDENVLQLRHWASLRGQTLCRTG

SEQ ID NO: 56546 - protein, 682 aa, Zea Mays
MMGNGGILPTDQEDLVNLKLQLEAGQVKLQSRLEQEEEAKAALMGRIQRLTKLILVSTKSSISSNVSGKTNFRRRHSFGEDELVYLPDRKREYFVDDDDVSLDSELSLEGKLDLNNPEESARFGRRNHKRGMLGWFKLKKSDQLSGLSSSVDGDSTASVSPSCSKSSQQKHLLLDLKDGRRKSMTRKGDDPSLADSFLERTQAGDLFSAAPRVRHPLPSGTTIVDQIDLLQEQVKMLAGDVALCTSSLKRLTEQAANNPDNLQIQEQIVRLKDEIAEKKSHIHMLEQRMVQSLETTEGPAIKTELSQTFSKLSTQLSEKTFELEIMSADNRILQDQLQAKVTENAELQETVAHLRQEISNLSKAAKSEDSFASVQSSEPSTASTDTRDQTNEISNRANMSSRTTDLNESGFISQVLKQASEIESLKQENLRLVEEKDGLEIHSQKLAEESSYAKELASAAAIELKNLAEEVTRLSYENAKLNADLAAARELNASMSRSNIHPDPKRRDHESGILVEELQKELVASCQREAVLEDTLSQKDRRESELLKIIDDAKCREHELKNELASMGALLSKIKKENSQQDVFEFKAKQNGFHSSKTDSGRLVSEMQASDNGCWDGLSTFEEARAAYNFERMRCKELESIVSKLKGEDLRGLDVKVLEELQNFHVEALSRICQEKMASQAL

SEQ ID NO: 56547 - protein, 979 aa, Zea Mays
MNPLPPPPGPRRVPTLLPVTAAVVSPVLFTNSEFHCAALLLPPSLSLRVRSLGSHAAAGCGGGGVRGLGFSVWRSLGVCEEEEEEEEEEEERMGTAGKGAWVVPAPAYREVEGWEGAGDDAPGFRCAHSLTAVAPTKGHGPRLILFGGATAIETGASSGLPGIRLAGVTNSVHSYDVETRRWTRLHPAGEPPSPRAAHAAAAVGTMVVFQGGIGPAGHSTDDLYVLDLTNDKFKWHRVVVQGAGPGPRYGHCMDLVAQRYLVTVSGNDGKRALSDAWALDTAQKPYRWQKLNPEGDRPSARMYATASTRSDGMLLLCGGRDASGMPLSDAYGLLMHTNGQWEWTLAPGVSPSPRYQHAAVFVGARLHVTGGVLRGGRAIEGEGAIAVLDTAAGVWLDRNGIVTSRTLKSSNEHDASSDLLRRCRHAAASVGSQIYIYGGLRGDILLDDFLVAENAPFQSEITSSMYNVDRVPRGETQNRNNNFHSDSPVHQSTNNSADKKSIDMLIEASTAEAEAVSAVWRAAKEASAASSEDSLSEGIGSESPLSETSPMPEDFDDGGSLEPDVKLHSRAVVVAKEAVGDLGCLVRQLSLDQFENESRRMHPSNNDQSYPGRRTLNRQRSPQGLHKKVISFLLKPRNWRAPADRTFFLDSYEVGELCYAAEQIFMQEPTVLQLKAPIKVFGDLHGQFGDLMRLFDEYGFPSTAGDITYIDYLFLGDYVDRGQHSLETIALLLALKIEYPENVHLIRGNHEAADINALFGFRLECIERMGESDGIWAWTRFNQLFNYLPLAAMIEKKIICMHGGIGRSINTVEQIEKLERPITMDVGSIVLMDLLWSDPTENDSVEGLRPNARGPGLVTFGPDRVTEFCKRNKLQLIIRAHECVMDGFERFAHGQLITLFSATNYCGTANNAGAILVVGRGLVIVPKLIHPLPPPVNSPESSPERGDATWMQELNIQRPPTPTRGRPQAAGDRNSLAYI

SEQ ID NO: 56548 - protein, 528 aa, Zea Mays
MESQRYNYGSGAGTGGKIRRYPPSRAVAASPYARPATAPTHAPGTATAAVSHEGGWLSRIIAAGTSRFLPSLFSFSTSQPQQAAPAPSPTRDQLPVVEPPSPLPPPLVDDRPECEENGGVAANNLCTENPQSCTKEEEENMLRNSDDHGGTALEELLKQRTFTRSEFEYLANLLWSKTIGANSLKLEDGNVRKMIVYDKENASEYSNLPLNFSTTTFSADDQVATPAEIAKAYMGLKSSKGSPLRLRLHDPSSMPITSMEVSMSQKAKPPTIPLAQGSRLHTSKTSDCLESNYTTPNGVICKMSSSPYFKSGVSSKELFGSVSSHYQTSNSVHTFGRQVLKRKSTVSNEFVSAGPIRRIHQRYNRTSPLLETQLGYRRYPVGYGSKLEGSEQLARTQKRRCLDKVGDASLGSVEDKTNVNYPGQVPEKSAEMATKILKQLDTLVPSQKENTSETKQKHESAIYFEEDVSRQKKVQAERDLLEPSPSEVPDGIASNKSISQITLNKEKPPAFSSRGFQNQFWEDQLHRN

SEQ ID NO: 56549 - protein, 506 aa, Zea Mays
MCIAARIHTCIVKLAMSMDYLAAAVPVTLALGVGSILLVLRWTYCRRRTSAEQVRLPPGSRGLLFLGETLHYLAASSTPGVLPPFFQRRLERYGPIFRTNLVGEDLVVSLDAELNAHVLKQEERGFQIWYPPSFMRVFGADNITAKLGVLHHHMRTLVLRLFGHQTVRSVLLHDVQRSARDELRSWLGRPDVEVRTATSRMIFGVTAKKLISHDDAASGETLWRCFHDWTSGLLSFPVSIPGTTFYRCMQGRKKVMTMLKQQLVERRRNAAERETTEDFFDLVIDELNKPDPMMDESTALDLLFTMLFASHETTSMVLTVILKYLTDNPKALQELTEEHERILESRANPGSDLTWEEYKSMKFTSHVIHESLRLANIALAMFRKANQDVHINGYTIPKGSKIMMCALASHLNTEVYEDPSVFNPWRWKDIPEPVGTSKDFMAFGGGLRLCAGAEFSKMQMAMFLHYLVTNYSWKPVSGGTMLFYPGLQFPEGFHIQLLPKIPNVVP

SEQ ID NO: 56550 - protein, 159 aa, Zea Mays
MRSSTQNPLRISRCRPERFRTHLCGCTRRRRYSSSWRRRGRSSSGAAWRCGSRRCCCPRCCTATPGTPRWSCGTWWSWCARPCRTRSRSSCSSASGGGPSTSASSGCRTSRPSDTLYIGIWLTTRREPATYGLLCVIACLVGWFTKCTSSGGGGVHACM

SEQ ID NO: 56551 - protein, 212 aa, Zea Mays
MNSGFPNKMPKPAMTKLSTTEKQKKNKPTNNWMTVLGLSPSKAHSVDQGSKNGLQQTQHEMSEDAKKLAAKALAAAKNAAAVASGRGKVEITEVRDFAGKDIEIKKLVDANSKEAIEKARAGGAAPSAVDNILEQIRKKQKLSVLDKTKKDWGEYKEENRGLGEELDAYKKSSNQYLDKQSFLQRTDYREFERERDARLSMMAKRRTDTRED

SEQ ID NO: 56552 - protein, 903 aa, Zea Mays
MAANNSDPIQDQLGEGGAGVRHEAEEEEVGEETSSAAAQATATTMLPRSSSRPQLDLSGAAIHGTLEDRNPTILLPNQSDDISHLALDIGGSLIKLVYFSRHAELSTEDKHKISTKRRLGMFNGGRRSYPILGGRLHFVKFETGKLNECLDFISSKQLHRGGIDSPSWRSGAQSDDIVIKATGGGAFKYADVFKERLGVSLEKEDEMDCLVAGANFLLKAIRHEAFTHMDGQKQYVQIDQNDLFPFLLVNVGSGVSIIKVDGHGKFQRVSGTNVGGGTYWGLGRLMTKCKSFDELLELSQRGDNSTMDMLVGDIYGGLDYSKIGLSASTIASSFGKIISENKELSDYRPEDISLSLLRMISYNIGQISYLNALRYGLKRIFFGGFFIRGHAYTMDTISFAVHFWSKGEAQAMFLRHEGFLGALGAFMSYEKHGLDDLRVHHLVERFPMGAPYVGGKIHGPPLGDLNEKISWMEKFVQKGTQIIAPVPMGVPATTGMGGFERPTAKGDILRSDASAALNVGVLHLVPTLDVFPLLEDPKTYEPNTIDLDQDEFKYWFKILSDHSPDLVDKAVASEGGTDDAKRRGDAFAHAFSAHLARLMEEPAAYGKFGLANLLELREECLREFQFVDAYISIKQRENEASLAVLPDLLMELDSMNEEARLLALIEGVLAANIFDWGSRACVELYHKGTIIEIYRMSRKKMQRPWRIDDFDMFKKRMLTDRKDQSYKRALLFVDNSGADVVLGMLPLARELLRHGTEVVLVANSLPALNDVTANELPEVIAEASKHCGILRKAAEAGGLIVDAMAGIQDDLKDETVSVPLMVVENGCGSPCIDFRQVSSELAAAAKDADLLILEGMGRSLHTNLNARFKCDALKLAMVKNQRLAEKLFNGSLYDCICKFEPVP

SEQ ID NO: 56553 - protein, 1139 aa, Zea Mays
MPLSSKCLKELEAGCNIVQRVFDRFTQNPSSTLLFLRSIIQVSLSTWEDGASQSTLNYSVLVDPSVASLRNPFSEKKWRKFQISRIFSSTSAAIKMQAIDVHVIESGCSYIDKWFVALSLGSGQTRNMALDRRYLAYNLTPVAGVAAHIARNGVSTNIHPSSCILSPLPLSGFISMPVTTLGHFIVRHSGGRYIFDSPRDASLPELKEDRVRLVEAWNKELMLCVRDSYVEMVLEFQKLKTDPLSSAIEPRSAQSVSAILQTYGDRVYSFWPRSKQNPTSFTGRVSTGTNMDSPRASKADWQSLIEQVIKPFYVRLADLPVWQLYHGNLVKVDEGMFLAHSGNGDDDNLPSDSVCSFIKERYPVFSVPWELVSEIQAVGVTIREIRPKMVRGLLKASPSILLRSIETYIDVLEYCFSDMDPYRFSDDLPDESRVNSQHVGTTNSSISHSMPSSSSSLSYQSSTQMAGTSGGDALEIMTYFGKALYDFGRGVVEDISKTNSPAFHRTQAAETNVLSSIISELKGVPFPTSTMRLTKLGMAELWIANEQQQLLMSPLLDQFIHYKCLEKPFLALLLSTQVIHRPLKLRSFSPHLLAGYLKRILDERWIRIVLENKSSWIPWDNNAESSTTPTPKWIRSFWKIFSSLNGDLSLLSDWPLVPAYLDKPVLCRVKERHLIFVPPISDSPDPPGDDVAGQLDTPDSPREDTRAEQNAVLDTAFRSMNSEFPWLTSLLNQLNVPIFDPSFPECGAMCNLFPPNGRTLGQTIVYKLVAAKNAAHLPSLISLSSEDCDKLFGLFVSEFILTNNHLYQREELDVLRTLPMYKTVTGTYTSLLGSDHCILSPTAFFHPSDARCLSCSSNAHLFLQALGVEQLNDHEILVKFALPGFGNKTAQEQEDILTYLYASWKDLQLNSAVVETLKETNFVANANEFCKEFFKPEELLDPSDALLTSVFSGERNKFPAERFMSDGWLVILRKAGLRTSTEADMIIQCARKIETMGHDIMSSLEDADDFEADFTDSKNEIPFEICSLAESVVNVLFANFATLYDSAFCEKIGKIAFVPAEKGFPSIGGKRGGRRVLASYNGAILLKDWPLAWSSAPILTKQTIVPPEYSWGAFRLRSPPAFSTVFRHLQVNVTKKLNK

SEQ ID NO: 56554 - protein, 458 aa, Zea Mays
MYRAAASLASKARQAGSSSAARQVGSRLAWSRNYAAKDIKFGVEARALMLRGVEELADAVKVTMGPKGRNVVIEQSFGAPKVTKDGVTVAKSIEFKDRVKNVGASLVKQVANATNDTAGDGTTCATVLTKAIFTEGCKSVAAGMNAMDLRRGISMAVDAVVTNLKGMARMISTSEEIAQVGTISANGEREIGELIAKAMEKVGKEGVITIADGNTLYNELEVVEGMKLDRGYISPYFITNSKAQKCELEDPLILIHDKKVTNMHAVVKVLEMALKKQRPLLIVAEDVESEALGTLIINKLRAGIKVCAVKAPGFGENRKANLQDLAILTGGEVITEELGMNLENVEPHMLGSCKKVTVSKDDTVILDGAGDKKSIEERADQIRSAVENSTSDYDKEKLQERLAKLSGGVAVLKIGGASEAEVGEKKDRVTDALNATKAAVEEGIVPVFVLVIPDFLLR

SEQ ID NO: 56555 - protein, 568 aa, Zea Mays
MASLPKPPPPPRPKTRGNYNCGRCGQPKKGHVCVGPGPGPGGAASPSSSSGAGGEHGLRRALSFDEAGTPSSPEKKPKVEDVDEAELDEEATVDVGARAVSREVMAEVLHRLGPRGVMAAAGVSRGWRDCAGRVWRAAEELRLRVLASSGAGLLAALLPRCPALSRLHLRMESDVDGTTLACIAFSCPSLRTLEITMAADAVNRMTGEDLSRFVSEKSSLSALKIGGCSNLDILNLCSSSLSILWLSDLCSLSKSVMNCPNMSELSLCFTEHSSDCTNLITLMDGLGRTCPNLEKMHISSKQLSNEAVCALENANLRGLFMLSLILGSKITDAAVASIVRSCASLELLDLSGSSISDNGVGMICKAYPRTLSRLLLALCPNVTTRGIQLATAQLPCLQLMDCGMSLCANVKNEKEGPYFGEINGGIRIIRKLSILKRQPIHQKLIIKHGNLKKLSLWGCSALDALYLNCPELNDLNLNSCTNLHPERLLLQCPNLKNVYASGCQDMLIGAIRNQVLNEFAAVEPSLPCKRLADGSKRVQLPQFLKQQPSKDNKLIELSQTQCTVHLGS

SEQ ID NO: 56556 - protein, 219 aa, Zea Mays
MAPQISRLDHLPTPQNFDYKTALLPWSSKKKGTKERDLDPHTSRLSSSRPKDNENIKQENQRKQSKSIALEAKRAPRRRRPATSHVRRTRTHRCIYGAPEPAVGRHGGRAAPGLRPRQAPQVRLLLPLVVVVGGGGGGGGGGLRAASGRRDAELDHAAAAGGAVRRHVAPQRVQLRAVVPVARKRRSGFALRRSCSDDAQGRGLDEEAARESQDGRRRR

SEQ ID NO: 56557 - protein, 101 aa, Zea Mays
MLNIFKNFTCKASILDDFDFYENRQKVMQDRRGKPLTSFGHPLPKAEKTAEVKRQTQLISATEVGRADTTKENEEKSSSVPEILNAACSNKEKPNKIATDG

SEQ ID NO: 56558 - protein, 102 aa, Zea Mays
MYTETRSASMLHSINWMGESLFFFLVPFEIWVYDLMLTEAKISHPFLWLMMSAHSWFYIYVSFSSLVIMCTFVVDHVRTVTDGHTPCEDLNTLTPRKNSSIP

SEQ ID NO: 56559 - protein, 223 aa, Zea Mays
MAASALLLSPRLVSFPPHPSLAPLFTKRPPPYPLGGAGARLRAVGDGPGAGLPPEQATVYDGAYGPWTLEDSDVREVLLYRSGLVTAAASFVAASSAAFLPEGNPAASAVTGAADLLYAAGAAGLGLSLVLIHIYVTPIKRFLQALWAAGALGSVGTYLVAARPLDEGLVQYVLDHPAALWFVGPTFAALTGLVFKEGLCYGKLEAGILTFLIPGLLLGHLVF

SEQ ID NO: 56560 - protein, 67 aa, Zea Mays
MGVAKHEETSKVEKDSVLRVTREGKERRKRWAQRRTSSKPDKKAPKEVEDEDTKKSKPSHQIPRKKM

SEQ ID NO: 56561 - protein, 63 aa, Zea Mays
MKSGERPKQMRGVRQESRRFRLLVIVAGFFLVSLTFVVISKPDSILSSLDANGSGPCHKQGVK

SEQ ID NO: 56562 - protein, 468 aa, Zea Mays
MHARFLSAPSPASAAPSPYVRLAFTGALPRRACWKPRGPASASAPPPRPLHSLCARASMQPASPAHDGHGGPPVHGVSNTVIGVLGGGQLGKMLCHAASQMGIRIVILDPLPGCPASSVCDEHVIGSFNDGDTVREFAKRCGVLTVEIEHVDAATLEKLEKQGVDCEPKASTITIIQDKYRQKKHFSRYEIPLPDFMEVDTLRSIEEAGEKFGYPLMVKSKRLAYDGRGNAVAKNKEELSSVVASLGGFERGLYVERWTPFVKELSVIVARSRDNSTVCYPVVETVHKENICHVVEAPADVSNKIKKLATSVAEKAIKSLEGAGVFAVELFLTEDDQILLNEVAPRPHNSGHHTIESCYTSQYEQHIRAILGLPLGDPSMKAPAAIMYNILGEDEGEAGFFLAHQLISRALTIPGTSVHWYAKPEMRKQRKMGHITIVGPSKISVKSRLDNLLQRNSSDPKEALVLLL

SEQ ID NO: 56563 - protein, 623 aa, Zea Mays
MWELGSVLNFLHVFRPLLNITGDFTAEELEVALITPNEILDDVHMPLLKSIPPVTRMAMGRGTWVTVLCRKLKDWWHWVAEGDLPIVASHGTEIETYKTIEPAIRLLILKAICDIRVEQEDIRNFIDSSLKHGQNFSTFRKDRIGGDSLGISYWYEDDEILGHRLYREIRRVEQVKKEPGKRSRGKGGSSAISVVSYQWETVASTFDEFDDVAEKLFSSRNRTEVSLGKKLKIEYLPEIEKIHKKKERLLKKQQREALLLDSYLTSDGLTTGRSLRDRKPVTYTFDDYDRSINEAIKITKKREENSAEPVATTANRRVLPPRAEAASNGKLNNGPSPTTNDSDDGNSSKSDDDRDSDGEQENEALDRSNRRRKRSQRYTQDFVEAVSDIDPNFDSDDDIMGEAVYDEEYLRSRKQNKTSSASEEDEEFRLEEDGEDDDEEEEYSLSTSEDLEEPQRHKKLETRGRRGTKLRSVDEIQTGLRRSKRSSRPRINYHQYDFSDSDTGPGKAKKSDASDSEAGSDAENDMELSTSSQEGEEEEDDSHDEENGNNVNDKMDEDHTVAENKVEPEEEEQKEQPPIEKMDAPSTESRRVGRTFLDLNELAPGGGFDESPSLTVKDDIDNI

SEQ ID NO: 56564 - protein, 535 aa, Zea Mays
MIVTLNAYNVIAARCAAEYLEMNETVDKGNLIYKIDIFLSSSIHRSWKDSIIVLGTTKAHLPWAEDLKLVSHCIDSVASKASIDVSKVEWSYTYNRKKLTVENGHDSPWNGVKQQQFVPKDWWVEDLTDLDIDAYKQVITAVKTKGTVPKDVIGAAIKAYTYKKLPSLSKVSMIHGDAKVRAMLVTITCLLPSEKGSVSCSFLLKLLKATNLLKCGEMCRKELMKRIARQLEEASVSDLLIPTVDGDTTVYDIDLILSIVEEFVRQDSKNAQRHNGGEVNDHVSAPSASMVAVAKTVDGYLAEVARDPNIPVYKFFSLAETVSGGSRPVHDGLYRAIDMYLKEHPSLGKSDKKRLCALMDCKKLSPDACAHAVQNERLPLRIVVQVLYHEQTRACAAATAIRADSIGIGSYESSRSGATTNTEDEWDGVMAVEDLSLSKTTKLVDKCDTAASTVVVGKDKDHGGNKGATGRVAKGGAGAATPKKALGKTVSGKGQTGERSSSDSSDSAVAVAVLTSQEHPKRTTRARNAAKSAAA

SEQ ID NO: 56565 - protein, 156 aa, Zea Mays
MKVLQELRSLKEIMKDSKQCPKCRMAISKTEGCNKMHCENCGEYFCYQCNRAITGYEHFRGSCVLFPQEELDRWEMQMNQRVGRQIVAHAHAAIHGQNGQAHPCPTCRQPSPKIGNNNHLFCWACQKHFCALCHKAVQKPAQHYGPKGCKQHTADP

SEQ ID NO: 56566 - protein, 407 aa, Zea Mays
MATGVAPAPLPHVRVHHGGVGFTRSVDFAKVLSAPGAGTMRASSSRGRALVAKSSSTGSETMELEPSSEGSPLLVPRQKYCESTHQTRRRKTRTVMVGNVPLGSDHPIRIQTMTTSDTKDVAKTVEEVMRIADKGADLVRITVQGRKEADACFEIKNTLVQKNYNIPLVADIHFAPTVALRVAECFDKIRVNPGNFADRRAQFEKLEYTDDDYQKELEHIEKVFSPLVEKCKQYGRAMRIGTNHGSLSDRIMSYYGDSPRGMVESALEFARICRKLDFHNFVFSMKASNPVIMVQAYRLLVAEMYNLGWDYPLHLGVTEAGEGEDGRMKSAIGIGTLLMNHQKKRLILAKGWQILGRRPQTFKLGWPHLKKSTGVILISSVGVVNCLCRRRVRKLTTEMSCIVMVLY

SEQ ID NO: 56567 - protein, 635 aa, Zea Mays
MKYGSVAETVAYDIVLEVAMKAQRIQQRNLVVHGSWKWLLTEFALYYGVSDAYTRLRYLSYIMDVATPTADWLNLVHGLLLPILMKSDGTATLSHQENRILGEVEEQIEQTLAMVCENYKSLDDSIPLGLAEDFRPPTGLAAAALEPAIKLYSLLHDVLSPEAQLRLCGYFQAAARKRTRRYMIETDEYVSGNSEGFRVDLVTVTTAYQKMKSLCNNLRSEIFTDIEIHNQHILPSFVDLPNLAASIYSVELSNRLRAFLVACPPAGPASPVADLVVATADFQKDLASWNICNIKAGVDAKELFHLYIVLWIEDKRRMLLENCRLDKVKWSGVRTQHMTTPFVDEMYDLLKKTLTEYEVIICRWPEYIFVLENAIADVEKAVIESLEKQYADVLAPLKDCIAPKKFGLKVVQKLTKRNSTVPYTVPEDLGILLNTLKRLLEVLRPRIESHLKSWSSCIPNGGNSAAIGEKLSEVTVTLRAKFRNYMQAVVEKLSENTRMQNTTKLKKIIQDSKELVIESDIRSRMQALKDQLIEAINHVHKVSEVHVFLAICRGFWDRMGQDVLSFLENRKENKAWYKGARVAISVLDDTFASQLQQLLGNTVPPKDLEPPRSIVEVRSILCKDAPRQKNSSFYY

SEQ ID NO: 56568 - protein, 253 aa, Zea Mays
MTTAAGMPGLPVGSAAAAGVPAAPEVAARDAVIGWFRGEFAAANAMIDALCGHLAQIGGGGPEYDPVFAAIHRRRANWFPVLHMQKFYPVADVAAELRRVADARAAAGSCCYSEEAASTVIHEPMEEAEAEAEAEPEPEQEHEQDPAPAAELADGAVEYHEPDVEVDSSGDSSERKPPSTEDDTVADGHHTDQGSQGEHSLPESYPICSDHEECIARPERIKIQKGFVAKESVKGHMASSNFTPLGNLSVQKD

SEQ ID NO: 56569 - protein, 396 aa, Zea Mays
MESMDKELRSSRLSEQLNKHYAAIAIPKGLYCLSLRLTDEYSSNALARKQLPPPELVPSLSDNSYYHFVLASDNILAASVVVRSTVRSSLKPERIVFHVITDKKTYPAMHSWFALNSLSPAIVEVKGVHQFDWLTKENVPVLEAIETQRTARDRYHGSHRPRTSASDNPRVFAAKLQAGSPTYTNVLNHIRIYLPELFPSLNKVVFLDDDVVVQHDLSPLWDIDLAGKVNGAVETCIGGDSRVMSKRFRNYFNFSHPLIAKNFDPSECAWAYGMNIFDLKAWRKTTIKDQYHHWVKENLKSNFTLWRLGTLPPGLIAFKGHVHPIDPSWHLLGLGYQEKTDVSSVEQAAVIHYNGQSKPWLEIGFKHLQPFWTKYVNYSNEFIRNCHIMEPQFRLS

SEQ ID NO: 56570 - protein, 57 aa, Zea Mays
MYGCFWLSFWEIFVRIFCVLRSTHRQIAGVGVRVNVFLNAHERKLKTYAYSRNRHVK

SEQ ID NO: 56571 - protein, 280 aa, Zea Mays
MRSNGQPVYNFCVTVDDATMQISHVIRAEEHLPNTLRQALIYKALGFAMPSFAHVSLILAPDRSKLSKRHGATSVGQYKNMGYLPQAMVNYLALLGWGDGTENEFFTIDDLVQKFTINRVNKSGAVFDATKLKWMNGQHLRSFPHDELIKAFEDRWTDTGILQESESGFAKEAAELLKDGIDLITDADAALTNLLSYPLHTTLSSEEAKPVVQDKISEVAWSLISAYDSGELGQALAEGRDGWQKWVKGFGKSIKRKVFIRMIKLLGTRALPVMDIDCWA

SEQ ID NO: 56572 - protein, 60 aa, Zea Mays
MYLDDVLLANTRCLQFVQPYGIKSFLKPDNFKWYQFAVFPRRYTGYIADTASSFLVCTCY

SEQ ID NO: 56573 - protein, 301 aa, Zea Mays
MTQFTTGVMALQVESEFQKAYDNGLPKSKFWEPTYEDCLNMIARLPPVASYVYRRIFKGGKSIETDNSLDYAANFSHMLGFDDPKMLELMRLYVTIHTDHEGGNVSAHTGHLVGSALSDPYLSFAAALNGLAGPLHGLANQEVLLWIKSVIQETGSDVTTDQLKEYVWKTLKSGKVVPGFGHGVLRKTDPRYSCQREFALKHLPEDPLFQLVSKLYEVVPPILTELGKVKNPWPNVDAHSGVLLNHFGLSEARYYTVLFGVSRSMGIGSQLIWDRALGLPLERPKSVTMEWLENYCNNKAA

SEQ ID NO: 56574 - protein, 133 aa, Zea Mays
MLEKYRNYDFGRCPRVYCCGQPCLPVGQSDIHRSSTVKIYCPKCEDIYYPRSKYQGSILTILLLYYLYACVSNFDLFVRTQTYGIFVPSLTQLPMFSCLSTHLPTALCWLIQKTIKHENSPLRPPITMFFQLP

SEQ ID NO: 56575 - protein, 670 aa, Zea Mays
MEQNGLLDMRKIHHASFFSMCKKQRAVLEALRFCRFIGNPKISTFNMLLSVCASSLDFDGALQVMELLKEAGLKPDCKLYTTLISTCAKCGKVDAMFEVFYEMVSAGIEPNVNTYSALIDGCARAGQVAKAFGVYGIMSSKKVKPDRVVFNSLISACGESGALARAFDVLSEMTAESSESKGWKPIVPDHVTVGALMKTCILAGQADRAREVYKMLQEYNIKGTPEVYTIALRSCSLTGDLGFALKIYEDMNRIGVKPDEMFLSALVDVAGHARRADAAFEIMKDARAKGLLVGTIAYSSLMGACCNADDWKKALQLYEEIKSIKLTPSVSMMNALITSLCDGDQVLKAVDILNEMNILGVHPNEITYSVLFVACERNGEAQLGLDLFEQLKMDGIDINPTIIGSLTGLCLQMFNIDFSLGNIIVNFSSGKPQIDNKWTSSAVMVYREAVSAGLLPSSDVLSQVLGCLRLPHGSSLKSTFIENMGVSCDIPQYPNINSLFEGFGEYDIRAFSILEEAASLGAVASISIKETRIVIDARKLKIFTAEVSLLRTLRSLKHRLAAGSRLPNVTILLPTEKKQVDIDEKEKTLKLAGRIGQAVGSLLRRLGISYQGEESHGRMRINGLTIRRWFNPKLNSKSSAAGPADLLPLPSRLAKGIAGQQRDIRNLSLE

SEQ ID NO: 56576 - protein, 608 aa, Zea Mays
MKYVLVTGGVVSGLGKGVTASSIGVVLKACGFRITSIKIDPYLNTDAGTMSPFEHGEVFVLDDGGEVDLDLGNYERFLDIKLTRDNNITTGKIYQSVIDKERKGEYLGKTVQVVPHITNAIQEWIERVAMIPVDGMEGPADVCVIELGGTIGDIESMPFIEALGQFSYRVGPGNFCLVHVSLVPVLNVVGEQKTKPTQHSVRGLRGLGLTPNILACRSTKELEDSVKEKLSQFCHVPAANIITLYDVSNIWRIPLLLCDQKAHEAILKVLNLERVDSIAREPKLDEWVARAAIFDTLHDTVRIAMVGKYTGLSDSYLSVLKALLHASVDCRRKLVVDWVASTDLEDSTAIEAPDAYKTSWNLLKGADGILVPGGFGDRGVEGKILAAKYAREKNVPYLGICLGMQIAVVEYARHVMNFTDANSTEFDPNTKTPCVIFMPEGSKTHMGATMRLGSRRTFFKIADCKSSKLYGNVTYVDERHRHRYEVNPDMVPEFEKAGLQFVGKDDTGRRMEMIEIPNHRYFVGAQFHPEFKSRPSKPSPLFVGLIAAASGQLDRVLQDRCNGHVGSAKHVLSNGSYTSAVHQNGNPKKLTNGLSNGTYYANGNGVHA

SEQ ID NO: 56577 - protein, 1215 aa, Zea Mays
MEYRLYLELLKRHGFNFHHQMKAANFRKIMDIIERNLRLSKIFGISTCEPGVFVVHFILCIIWQLIDVVLDDEGLLELTPEKNAQWPTRPEDVSTFEGTFTEQRTEKIKKLQKMNTVTTMELIEHLLRDKVITRILSLARENMQSHWGAFTNRLHLLATNSSTLQNSAISLEPFQHLILGDCDAYGETKHNVHKRFHQIVASNPLSSPNGRCLGASYSALWIPIDMYLEDCLDCSIAATNSIEILSGLVKALQAVNRSTWHDAFLALWVASLRLVQREREPIEGPVPHLDTRLCMLLSITTLAIADIIMEADSLCNETELNSHVNEKKAIGNLRNELMLSLQILGDYESLLVPPSCVIPAANQAATKAAMFISGISINNGYMDNVNGMNYTGNMRHLIVESCISRQLLDTSAYYWPGYIMNHANSTSHTLPSQLAGWSSFMKGAPLTQPLVNMLVSTPASSLAEVDKLFEVAVDGSDDDSISAATVLCGATLLRGWNFQEHTVRLVVKLLSPSDPIDNSGRESQLIKLGPMLNVILSGISAVDYAPIFSFHGLIPELAASLMAICEVFGCLSPSVSWTLRTGEEISAHTVFSNAFILLLRLWKFNHPPLEYCIMGDGAPVGSQLTPEYLLLLRNSQVLSSSSLSKQRNGQRQSQVSTSHPSSGNPIFMDSFPKLKLWYQQHQACLASTLSGLAHGTPVRNNVDSLLNQMFRKANKGGTSIGSLSGSSSISNSSSPGGDDSHLWPQLPAWEILEAVPFVVDAALTACSHGRLFPRELATGLKDLADFLPASLATIVSYFSAEVTRGVWKPASMNGSDWPSPSVNLSMVDEHIKKIVAATGVDVPKLVTGGSSSGTLPLPLAAFVSLTITYKLDKASECFLNLAGPALENLAASCPWPSMAIVAALWTQKVKRWSDFLIFSASRTVFHHNNDAVVQLLRSCFAATLGMSSTSVCSCGGVASLLGHGYCPGGFSPVAPGILYLRIFRCIKDCSILAEDILSLLMLSVKDIAETTVPRQRPDKLKKTKYGMRHGQVSLSAAMTQVKVAASLGATLVWLSGGTALVQSLIQEMLPSWFLSAQNLDQGGASGGVVYKLGGHALAYFAVYSGMLAWGIDQTPVSRRRERVMRSHLGFLASALAGKIFLGCDLSLWRAYVSGFLGLVVECTPCWVQEVDLRVLKRLSSGLRHWGEDELAVALLRRAGPEAMGTAAEMILGREL

SEQ ID NO: 56578 - protein, 911 aa, Zea Mays
MAEERWALVGGQGLDGEKQTEAGEKMSAGWKKARVKVYRLADGGKWDDQGTGYVSIDYIEGSKELGLTVLDEDDNDTLLMHNITSDDIYRKQEETIISWRDREAATDLALSFQEAAGCSYIWEHICDIQRNLQFSNLGALEVGPRQSSESLEASRIMHSNDDSFRSANGGEFRELPPVELSNLPFILKTVLEAGITDQMHVAELITQDNDFFPKIVDIFRMCEDLENIDDLHMIFKLVKGIILLNSPSIFDKIFSDEFILDIIGALEYDPEVPRVQNHRAFLKDHVVFKEAIRIENVSVVSKIHQTYRIGYLKDVILPRILDDATLASLNTMIHSNNASVISLLKDDTLFIRRLFARMRSSDISMESKRELVLFLHEFCTLSKSLPLVQQLRLFRDLSGEGVFEIISDVLQSQDRKIISAGTDILILFLNQDPNLLRSYIVQQEGNSLLGLLVKGMVTDFSEEMHCQFLEILRILMDSFTTSGAHRDVVIEIFYERHLDYLVDVIASSCPPRSLSRSSSNSVHVGGNAEGHCIKPEILLNVCELLCFCVVHHPYRIKCNFLMNNAIEKILTLTQRREKFLVVAAVRFMRTIISRNDDHLIRHVVKFNLLKPIIDVFVDNGERYNMLHSGVLELLEYIRKENIKTLIIYAIESFWDELAIFEHFGSIQAFKLKYQQYLESAEPRLNASVPDMRKKAEQRGLEKEEEDYFNEDSDEEDSGSGRRAKHAQNQNNKPKSKVPNGSEADDTDGASRPKSAGLVDYDDDDDEDFNPPPKEPSRPAEDDVPLNISPLKRKPVNAVDGKHSDGEGRRRQKIETRISCAKIAAVTSTAIKHTDLQNKYASHLLTSATPSTEANGIFSEHGTNYEEQQHPMENTETSRQTGGDCIKDVGSMSPEKAVNTTNTSDSEPYSVR

SEQ ID NO: 56579 - protein, 667 aa, Zea Mays
MPKRHRDSEGRQRSSSSRRRRSPSPSDSDAASSDYSGSPRRSRGRHRHRSRRRRDTPSTSSDASGSGSEDSRSDSGRRGRSGGRRRRNVTEEQIIEYMAKKAQKKAEKVAKKLKANSVSGYSNDSNPFGDPNLTEKFVWRKKIEHDVSQGQKVDFSVKSEKKKQLERMAEIEKVKKRREERAIEKAQHEEEMALIARERARAEFQDWEKKEEEFHFDQSKVRSEIRLREGRTKPIDVLLKNLSFSDEFDIELNEPYLVFKGLTVKEMEELCDDIKMHLDLDRESQTNVKYWEALMVVCEWELGEARKRDALDRARVRGEEPPPEVLAEERGLHASIEGDVKSLLDGKTSTELEDMQSQIESQMRSGTAKVVEYWEAILKRLHIYKAKACLREIHASILRKHLHRLEHPGAAEQDVDSEKEVDNKLEDEMHEDEDDKRYSPEPMPQQTDNEFEEADGSFSPQLMHGNEDEDAIDPEEDKAELDRKREAVVLEHQRKVQEAMKTKARVPDEMEMKAIKTMGAMEEGDAVFGAGAEVNLDSQVYWWHDKYRPRKPKYFNRVHTGYEWNKYNQTHYDHDNPPPKIVQGYKFNIFYPDLVDKSKAPTYSIEKDGSAGETCFIRFHAGPPYEDIAFRIVNKEWEYSHKKGFKCTFERGILHLYFNFKRYRYRR

SEQ ID NO: 56580 - protein, 200 aa, Zea Mays
MDLILPYKVGDLAESKSLVSGYRGAWFRCKIHNMRVRLGYLECYLEYIDYPGEKKEWVRLFRKNSARSNQNSSDSIHTMIRPSFPKWYFVHEVPEQFPNSDVTAIVDETWQIGDRVDWLKEGCYWSGTITKIINEDLVEIELPAPPIGEGKCYKAKCSDLRPTLEWSLARGWMVPLSQANGKGWHAARLLQHYKSGICWE

SEQ ID NO: 56581 - protein, 143 aa, Zea Mays
MAWMLTREGIDALGVATLSSATSAAASRLPFGGGPSPLTSLDDEDATNLRNLYRLLLLLSKVSQKENPSPIPEYNSAIEKEGGSTDELALALYGMTSLPEFLPVLSVIPELPPESQQQLLLLPADLTNRILSRALARTIRRLM

SEQ ID NO: 56582 - protein, 178 aa, Zea Mays
MLESAVAQNSASIHSLEASAANASSSAPRQNLKIQMATTSERLDAVEAEAASWVGALESVTVISDLRIVASLRRGRNRRHQVFRREIVWRLVQIGGSGASSAAHGLRPLHRGSPSCSIGRGAPICHSLQGRWPSWAPHESQLSGVWLWACICSKPSPAQWYVLLLVLFTIPSYGSYCR

SEQ ID NO: 56583 - protein, 547 aa, Zea Mays
MNSNIIVVLRSLQLVSNTFAHTLEEHDMLKVELGNKDAHNRAQESEVLSLQKDLRAMSSKCIYCVQQIEIVFDDMVDLGYAIDLATGSSSIGSELEVTVSDLKNEDTSDYSKVADTLLATIDTLKSKSEKLSTIKGLVITSLDDFKMKLKQAEAAAETASHEHQLSVERVCMLEKELKILQDECNKMELNIQEYKEREGALKARELELLSVEHTQISADRGLTDNAISKDQTEALVEKISKLNMLSGESNVQREEATSPLDKLFVVIDEFSALQHEVETLRYENEDLQLNIESYTREIEQLREVSRNSDLTNRELESKGSELLEVAVSMERMIQRLGYLGGKDVLEDNKPASTQALLSKLEKLIIASSTESGNSKSIIQELGAKLQSREKAVDELSTKVKMLEDLCHAQLSQPEPSKDRSFEASSSTIGSDMSDIEDAGPVGKTTSVSSVSTAAHARTMRKGSADHLVVNIGSESERLIAAQDSDDKGRIKSLHTSGFIPAQGKHIADRVDAFWVSGSQILMNRPRARLGLMLYWLAVHLWLMGSIL

SEQ ID NO: 56584 - protein, 789 aa, Zea Mays
MLQGNIVPPRDQGVYGTRCKTDDIDCFSYHIVFKGGDIAKENGSGGENIYSGKFTDETCVLLHDDRGLLTTADTGFKPSGSQFCITFKPNSHLDRKHTVFGKLVVGSDVLKRIEQVDVQSPDSTPVIPVTIVNCGELIERKDIGSMSIEIDKKRAAKSKLTRDITSDEESNEGQHKRRRNKSSKRRRKKRRYSYSESDSSSESETESSDYESDSDTYSSDSSDVSSSSDDRRRRRKRHSKKNKRKHSRRKRDHRRERRRRKRGRKSKQKSKRIVKGDSEAESTGDSSSEDARSKRHRRGRKFKASSQVSEENLAGVAALKDATSPQQKSGIQRSPAQDVSSLQNGEVHTNGVNDSKIERNAAVMPVLTGNRSKSRSQSMSVNHSMSKSMSISPRRSPMKRSSTSPKRSLSRSPVDNNHSRSPIRTPKRSVSRSPARRQIMSRSPARSPPRNSSRSLHISRSPVKAHRRSISRSSARSMQQRSPSRSLERTHVRKSISPSPPLEKGRSITRTSVVSPLRSVSRSPARISRSPHRPSRRSPMRSPRWNIRRSLSRSPARIPRRSVSRSPVRGGRPRRNISRSPSPHRRVVTPPNNGRSPSRSGSPDGSPKRIRRGRGFTQRYSYARQYRSPSADRSHRYGGRNDRDRYMGYRGSRHRSPPRRYRSPPRGRVSSPRYRRRSRSASRSPVYRERGRGGGYSKSPIRSSSPPARKPRSHGDRARSVSRSHLSGSVSRSPPVHHPSPPDSPSVKHASDEKSQSASPALSLSGSPNRGGKKGLVSYGDGSPDSAGK

SEQ ID NO: 56585 - protein, 481 aa, Zea Mays
MAVRWCLLLLVLVLAAAAACAEKGEWDPVIRMPGEKEPAGSHSHSGEGFDGEVDDAVGTRWAVLVAGSSGYGNYRHQADICHAYQILQKGGIKEENIVVFMYDDIANSALNPRQGVIINHPEGEDVYAGVPKDYTGDQVTTKNFYAVLLGNKTAVTGGSRKVINSKADDHIFIYYSDHGGPGVLGMPNLPYLYAGDFMKVLREKHASNSYAKMVIYIEACESGSIFEGLMPEDLNIYVTTASNAEESSWGTYCPGMEPPPPSEYITCLGDLYSVSWMEDSETNNLKEETIKEQYEVVKKRTSDFNSYGAGSHVMEYGDKTFKGEKLYLYQGFDPANANVTNKLLWSGQEAVVNQRDADILFLWKRYELLHEKSEEKQEVLREITGTVRHRKHLDNSINFIGKLLFGAEKGPSTLEAVRPPGQPLVDDWDCLKQMYGMRHMRAFANICNSGTPGASMKRASMGACGGYNSARWSPLAQGYSA

SEQ ID NO: 56586 - protein, 430 aa, Zea Mays
MPPRRGRRKGKGRAKPRAKATEPEPELEEAADSEIEAGDAKAEESGEAKEDESASDAESMDADANEEAVENGADEMDAEPEAKAEPEAVATEAEAKPDVSDAEDEEAGETCSDREADAKDVDSKAKAEESDGEDEEGATAETDGEDEEGATAETDGESEEEAAETGGENEEDGGDSDTEGDAEESPPPPPSRSRRRKRAATPDDEAEETPTPSRRRRRRKSRQRGDSPPPLPDHLRCRRSDGKKWRCSGRALPTVSFCEYHYARANKGKKLPADGELLAVALQRQKNKRKGRRRINPSTSPQAATSDRQTRDLPNGLMTILPGSSGPAALSTPVTTKVGVEISAPMQRCYRSKNAEPLPVGPVKVVPRAMSMTKAAPRMCHCCGVKKAARVANCKNCDTNFCNSCINKWNTYNNLFSVVDAFACVRSVEL

SEQ ID NO: 56587 - protein, 557 aa, Zea Mays
MLVRINTLLQGYSGIRFEILEAIAKLLNANVTPCLPLRGTITASGDLVPLSYIAGLITGRQNSVAVGPDGRKVGAAEAFRIAGIEHGFFELQPKEGLAMVNGTAVGSGLASTVLFEANVLAVMAEVISAVFCEVMTGKPEFTDHLTHKLKHHPGQIEAAAIMEHVLEGSSYMKLAKKLGELDPLMKPKQDRYALRTSPQWLGPQIEVIRFATKSIEREINSVNDNPLIDVSRGKALHGGNFQGTPIGVSMDNTRLALAAIGKLMFAQFSELVNDYYNNGLPSNLSGGRNPSLDYGFKGAEIAMASYCSELQFLGNPVTNHVQSAEQHNQDVNSLGLISSRKTAEAVDILKLMTSTFLIALCQAIDLRHLEENVKAAVKNCVTQVAKKSLSLNARGGLHNARFCEKDLQTAIDREAVFAYADDPCSPNYPLMQKLRAVLVEHALANGDAERAAETSIFAKVAEFEQQVRAALPKEVEAARAAVESGSPLVPNRIRECRSYPLYRFVREDVGTEYLTGERTRSPGEELNKVLVAINQRKHIDPLLECLKEWNGAPLPLC

SEQ ID NO: 56588 - protein, 697 aa, Zea Mays
MQPYLPSETPPGLRELRDKELKDLRGDGTGVRKLSDRIYDYATYNDLGNPDRGKEFIRPILGGDNIPYPRRCRTGRPPTDTNMLAESRVEKPHRIYVPRDEAFEELKQGAFSSGRLRAVLHTLIPSMIATISAETHSFQGFHHVDNLYKEGLRLKLGLQEHLFQKIPLVQKIQESSEGMLRYDTPRILSKDKFAWLRDDEFARQTVAGINPVSITRLTVFPPVSKMDPAIYGPPESSITEAHITGQLNGLTVQQAVDEAKLFILDYHDVYMPFLDRINAIEGRKAYATRTILFLTKAGTLKPIAIELSLPPSKAGEPRPSKVLTPPADATSNWLWMLAKAHVSSNDAGVHQLVNHWLRTHAVMEPFILAAHRRMSAMHPVFKLLHPHMRYTLEINALARQSLISADGVIESCFTPGPVSFEISAAYYRDHWRFDLEGLPSDLVRRRVAVEDASQPHGIRLLIEDYPYANDGLLLWSAIRSWVESYVQLYYPDAGTVQSDDELQGWYHETVHVGHADIRHAPWWPSLSTPGDLASILTTLVWLASAQHAALNFGQYPLGGYVPNRPPLMRRLLPDPERDAAEYATFMADPHRFFLNAMPGVLEATKFMAVVDTLSTHSPDEEYLGEERDEPWTGDAAAVAAHDMFTADVRRAEEAIDSRNADQRRKNRCGAGVLPYELLAPSSPPGVTCRGVPNSISI

SEQ ID NO: 56589 - protein, 799 aa, Zea Mays
MNIVLVHYLEIKGAKQSFNHAKEAEETAGLSNADSPACSNSFASQSQVASRSMDAESPISGQISEYEDAETDNSRASSRYHPFTEMQQPVDGTVMGNFFGASSPSVSVNNLAAGYLGEMQPTGANFTSHFATRNDIASVFNDTGSELGGGPKTSIDSVLLGEPFPEYPGGFMESTLYSSVATLGNSLEDGLQTFMSEALYTNNLTQKEVDALGAAGITSSKYLKNDAVGHWSLPISMSWYDVTLYFQTENDGYTDQSVRYPLLKQSSSDLFKMEPDGLKKFDSFSRWMSNELPEVVDLDIKSSSDAFWSTTETVNVADGSSIPINEPLDVFVVSPSLSQDQLFSIIDVSPSWAYNGTKTKVLITGTFLAKKEDVENCSWSCMFGDSEVSAEVLVDGSLRCYTPVHHSGRVPFYVTCSNRVACSEVREFEFRDSETHYMDISDKHTTGINEMHLRIRLDKLLSLEPEDYEKYVLSNGNKSELINTISSLMLDNNLSNLALPSDEKELCTVQDQNLEKQVKEKLYYWLIHKIHDDGKGPNVLGKEGQGAIHLVAALGYDWAIKPIVAAGVNINFRDIRGWTALHWAACCGRERTVGALIASGAASGALTDPTQQYPSGRTPADLASENGHKGIAGFLAESALTSHLSALTLKESPSGNVEEICGLTAAEGFAASSSSQLACVNSQEESLKDSLGAVRKSTQAAARIFQAFRVESFHRKKVIEYGDDDCGLSDERTLSLVSLRNPKSGHGDSHSAAVRIQNKFRGWKGRKEFMLIRQKIVKIQAKIKVCGGGGRSYLRRTSF

SEQ ID NO: 56590 - protein, 113 aa, Zea Mays
MTFRQGDKLRRRGAWENWLLPKLNYSAGSSSGSMTPVTSNIDALASQFRSVGLEGATYHPSMPGMSGEALLTRSATSVSLGYHASTFGGLQSNGSEPLFGPKSARNLLRSDTF

SEQ ID NO: 56591 - protein, 638 aa, Zea Mays
MAEDHLSSAPSAPSAAAAAAAAAVGSSVIPIVNKLQDIFAQLGSSSTIDLPQVAVVGSQSSGKSSVLEALVGRDFLPRGSDICTRRPLVLQLVHQPRRPADAEADEWGEFLHLSGRRFYDFREIRREIQAETDREAGGNKGVSDRQIRLKIFSPNVLNITLVDLPGITKVPVGDQPTDIEARIRTMIMSYIRHKTCIILAVSPANADLANSDALQMARVADPDGSRTIGVITKLDIMDRGTDARNFLLGNVIPLKLGYVGVVNRSQQDINSDLSIKDALAREEKFFRTQPAYHGIAQYCGIPQLAKKLNQILVQHIKTVLPGLKSRISSQLTAVAKELAVYGDPVDSKAGQGAKLLNILAKYCEAFSSMVEGKNEDISTIELSGGARIHYIFQSIFVKSLEEVDPCEDVTDEDIRMAIQNATGPRSALFVPEVPFEVLVRRQISRLLDPSLQCAQFIYDELVKMSHRCLAMELQQFPILRRSMDEVIGKFLRDGLKPAENMIAHIIEMEEDYINTSHPNFIGGSKAVEQAQQQVRSAKMSAAVVRKDGVDAQASEKTQKSRAILGRSGVNGVVTDHIQGVRPAAEAERPGSSVEAHLSGIKYLLPMRTEHILLQEITQQTNLMLCLHPIWNIHSPRYS

SEQ ID NO: 56592 - protein, 401 aa, Zea Mays
MDTCVDRIVLHWRFKDADPRRIYPRSSFCINCKGDVCRGDAVLFKQKVYEKSGKRHAKCIGNRIVAGKVIKESYGKQKQQHTFTIQVFWSKGPGKLPPLHLLLVKGRNLYRMMTFRQPWANEAERLKILEEKHNRGDDARRVRALNRPNSAGNTLKGKKKLHKEKHKSRSERPHRQSNITELDKGKKRPAQSSKSDLPNKRSKKEGSQVPSRKKDTGGRMAKKNGPCQDKSICTGQNSSLCKDNREKHSHATFQKKCHAEPLNNGPSGSGWNRTAGGHSQFEGRHITPASHVEANHGNFVSVQHPCVERLQRPTQSREVALAHPGGGHPYVLSSAAMGLRHQNGATAGVHAPAYFRGLPLSQQRAAFPSASTPQTGYHPHPEELFVAPHFRYPRGSAGFRR

SEQ ID NO: 56593 - protein, 268 aa, Zea Mays
MTDQERDDVPMLLRNVELPRFPLRSTSMCIPVRDDDYEEDTFVPHTGPLFVQPSTQTAPGISFTGRDTPDRLPKPSQGKQVSKPHAIMPEEIRGNKWSYSGQVPKNEHLMMSGPLGQCDNPDCVNCPPACKNRRHFQRGSNALDNKIHNILYGHSRGWKKKIEQIMACIPIMNPHAKPVQRWNQFFVISCLIAIFIDPLFFFLLSVRQDGNCIVLNWEIATALAVVRSVTDAIYFLHMLLQFRLAYVAPESRVVGAGDLVDEPKKVAI

SEQ ID NO: 56594 - protein, 451 aa, Zea Mays
MAGVAKAGDVVGEIGVLCYRPQLFTVRTKSLCQLLRMNRTAFLSLVQSNVADGTIIMNNLMQSFDIEKLLKQQKDNSVMVGVLKEIENMLARGRLDLPITLCFAVNKGDDLMLHQLLKRGLDPNESDNNGHTALHIAASKGDEQCVKLLLDYGADPNARDSEGKVPLWEALCEKHNAVIELLVESGAELSSGDTALYACIAVEENDAELLENVIRYGGNINNPTKDGTTPLHRAVCDGNVQMVELLLEHGADVDKQDSNGWSPRDLADQQGHDDIQALFKSRKAHRKHASNGRVAPMLIGRFNSEPSMPDMSHENARVRSEVVPQKLLRKRVSFQNSLFGVISSSHAHQDTGRLLSKGLAGTEGPNCRHDSLIRVTISCPEKGGNAAGKLVRLPRSMAELLELGAKKFGIKPGKVLTVGGAEIDEVELIRDGDHILLVSDEWVPDVEQIRP

SEQ ID NO: 56595 - protein, 740 aa, Zea Mays
MMAKMWKFRCVSRDEAALAVAQKVFKSLYDNTSNTTYVSWLLATLVAIRDVCKLVVKELTSWVIYSDEEKKFNIDIIFGLIRSELLNIGEYNVHLAKLIDGGRNKVATEFAMSLVQALFAHDPVGFTEFQNVLDALSKHTKRPGSPESLQQLIEIARNNVSTTTGFVAVKDEKVKLPKDKKVLATRANKEENTANEITLVDPNQVAVLFSEWCQMCNHVSASDAAYTRFVTQLQQDGLLKGDDISERFFRILTELAVTHSLVSEQIVAPGGSSQQSPQQPHISYFSIDSYAKLVVMVLKYSVEITPNKASILSKILSVTVRSIQKDAEEKKASFNPRPYFRLFINWLYDLTTTDGHHDSSNFQVLTAFANAFHMLQPLRVPAWSFAWLELVSHRSFMPKLLMCNSQKGWPFFQRLLVALLKFMEPYLRNAELPEAMDLLYKGTMRVLLVLLHDFPEFLCDYHFSFCDVIPSSCIQMRNVILSAFPRNMRLPDPSTPNLKIDLLAEISIAPRIMSDVDGALKSKQLKTEVDEYLKRPEGSSFLSDLNQKLLLPQNEASVAGTRYNVPLINSLVFYVGIQAVQQLQLNKANPSASVQQINHISPMDIFQIGTATDIFRSLITSLDTEGRYLLLNAIANQLRYPNSHTHYYSFITLYLFSEATQEITQEQITRVLLERLIVNRPHPWGLLITFIELIKNPRYNFWSRSFTHCAPEIEKLFESVARSCGAKVVDEGISVQDGSH

SEQ ID NO: 56596 - protein, 430 aa, Zea Mays
MVSVMEDNFSRMQTANHLLLITDYAALLSATMRRYGYPVGMLLDVLAKHRDKYHDLLLADCRRQVAEALTADKFDQMLMRKEYEYSMNVLAFGIQSSDITPAFPYVAPFSCTVPDICRIVRSFIEDSVSFMAHGGGGDTYAAVKKYLGRILSEVVDASIKKLLDSGSGLSVSQAMQVAANMSVMERACEFFTRHAAQLCGVPLRAVERGRRDFPLRRSRDAAEALLLRLLRAKVDEFMRQSDGINWMADDSPPGGNEYANEVIIYLETLTSTAQQILPLPVLHRVLVAVLAHISERIIELFLNDSVKRFNANAVTGIDTDLKMFETFAEGMSSLFVDSGQESAKNEMKAALVEARQLVNLLMSNSPENFLNPVIREKSYNKLDYRKVAIISEKFRDTSESYFSTFGTRGARQNPKKKSLDTLIKRLREAS

SEQ ID NO: 56597 - protein, 746 aa, Zea Mays
MHSSSTDNMTSRPPGSGTASGTSSQRQTVASPSANKHMVADGPAASLQSSSGFQHGGWSGTPGQLSMADIVKMGRPQGKTSIKPVVTADRGYAGQYPSLPSTNQNLKQSGSMVPPTELDKGLQPAQDSVQVKDHDHSTADSKLPYGTDWSPQDGPTFANQSSLPEPSGDPSLYEASFQSSTLVTDVVNSHENSHLDENDTFAMGPAPASERHLDPSDGISEYNDVILNNSSSYQPHNYSYTEQQEVEDSSADVSAAAANFQSLSLHNDELAAKKSAEDNPAVIIPDHLQVTNTECVKLSFGSFGSGAFSGLLPQNTTDSNVEFPAREESAPVDQIDARNQDYYESGAVTSPADENLEAMLGANMENVDAPSVSQANELRQDVLDPSELQYDVPSVPSHAYSNTDTLQPSTIEEPQGNNQAHTLSHLSNLMQANPLSTSSLLGSNQNHATLHGLEFDLPPYLGAKYNAGSTTNPRPPISMQQEALKAGVFSNAQSTQSLPSTSIQTGLPLPQQLAHHPYSQPTLPITHFPNMVGYPYLPQNYATYLSSGTFQQAYPSSGPFHQSAAAALLASGMKYSTPEYKNNLSATGLQQQHQPQPQPLSSVISGYGGFGSSSNIQGNFTLSQSTGSASALGFDEALSRQYKNTSQYMALQQGDNSGMWVHGSGSRAASTLPPNHFYGYQGQSQLGGFARAQQPQPSQFGGHGYPTVYQSQGQEHPQNLAEGSLNGFQVTPSQPSHPSWQHQHTY

SEQ ID NO: 56598 - protein, 669 aa, Zea Mays
MQQQQHGGGGGASGGGPAQQFCAQQVEMPLPFSPVGGAGQRISLAEAPSPISSRPPAPAPAQQYDELGPSGAGAVGFDAEGLAAAAAGEDGASGGSAGNRWPRQETLELLKIRSDMDTAFRDATLKAPLWEQVSRKLAEKGYNRSAKKCKEKFENVHKYYKRTKESRAGRNDGKTYRFFTQLEALHGTGAAPASVASQVGPAISGGVSGAARPSSAVRVPAEPLPAVSAGVGMPMTTTVGYPSISTSNTEDDYTDEDDSDDEGTEELVGGGADDQRRKRKRVSDGSGKMMRFFEGLMKHVMDRQEAMQQRFLEAIEKREQDRMIREEAWRRQEMTRLAREQEILAQERSMAASRDAAVLSFIQKITGQTIPMPSIAAPTINAMPPPSHPKPPPPPQPHPTPIASVSPAPPPPQPPASQTPPPQQQKSPMPATPQTPAPQRQSTDIVMTPAETTPHADTQGHEGSGGGATSSRWPKAEVHALIQLRSTLDTRYQETGPKGPLWEEISAGMRGMGYNRNAKRCKEKWENINKYFKKVKESNKKRPEDSKTCPYFHQLDALYRNKAAITSSSGAGAMVHANASSAPQEMVTVTAATPISQTPPPPTQPSQSHHAAKNGGSSNSAGTGTGNGSYASEHGSRGMQTQASNGSAAASMFVGLGGGAASAAKKRKS

SEQ ID NO: 56599 - protein, 68 aa, Zea Mays
MKHDLVSCAALRKGVFAAAAAMMIINLLASLVYYWSYSKAATGGFMKHQNEVGVGMTDYGLDKGVSGP

SEQ ID NO: 56600 - protein, 126 aa, Zea Mays
MSFAAFSWPFRRRGGAGSSGASKSAATAEEDEELGVTPQLLDFLRTLSPDAFKAAALQLQGGSTEAAAGDLTSWQERHAVLVLSKAKELAKIRYDLCPRHLKDKQFWRIYFLLAKSYISPLSVVDQ

SEQ ID NO: 56601 - protein, 643 aa, Zea Mays
MYFYPYILTVVKHAFRLYSLVADGNNKKICLFPFRRCTQVTQHFSLQIDLDTIEVSNLNRQFLFRQSHVGQSKAKVARDAVLKFRPNININPYHANVKDSHFNVDFFKQFNVVLNGLDNLDARRHVNRLCLAADVPLVESGTTGFLGQVTVHVKGKTECYECQPKPVPKSYPVCTITNTPSKFVHCIVWAKDLLFAKLFGDKKQDNDLNVHSKDDTSSKTDVFERSVDEDLEQYTQRIYDHVFGYNIEVALDNKETWKNRRKPNPIYIRDALPEDAVQQNGRSQDHVNEEQDPSAMVSLGLRNTQEIWSLADNSRVFLEALKLFFDKREKEIGSLIFDKDDQLAVEFVTAAANIRASSFGIPLHSLFEAKGVAGNIVHAVATTNAIIAGLIVIEAIKVLKGDYQDYRMTYCLEHPARKMLLMPVEPFEPSKSCYVCSETPLVLEVNTKTTKLREVIEKVIKGKLGMNLPLIMVGATLVFEDGEDLEEDEIANYALNLEKVLAELPAPVLNGTMVTVEDLHQELKCSINIKHRDEFDEEKEPDRMVLVGWSGPVDKQTTSNGETKSVPSSSNTEDVDGTAEDISATSGMKRKLNEILETKENFDALENLSGVDSSSAQVVEDDNDDGLLMFDEDPRQSKKKRLQ

SEQ ID NO: 56602 - protein, 350 aa, Zea Mays
MGGFCSKGSAVDKSPSDTTLGPGREVDRHDRLVVKEEKKAVVGEAAAKRMQEEQHQQQQQQQQPAAPPLPVSVSQTAVPGATADNTAAPWDGVPPLARLPSQKSGMGVANKVSEVSSILGRASTAGLGKAVEVLDTLGSSMTNLNISSFGSGTATKGNKISILAFEVANTIVKGCSLMRALSKDSIKHLKETVLHSEGVQNLISKDMDELLKIAAADKREELKVFSTEVVRFGNRCKDPQWHNLDRYFDKLTSEQTPQHQLKEEAESVMQELVTSVQFTAELYHEMHALDRFQQDYQRKQHEEDGSSVVQRGDNMHILKQEVKSQSKHVKSLRKKSLWSKNLEEENIQSC

SEQ ID NO: 56603 - protein, 382 aa, Zea Mays
MVRGSLINEAVNGDISGEGISSIGSELENVPSTVSTNEIGGSTSESGLGPSSMTSERIMSDSEVEISPQGTSSTTVMTSERSDASQSSLTSVFSNSSTASSVIVEPMPDPIPTTADVPIFSGPHGEAGGSILHDDMMSIFSNDGVGRSIDSSSSETRRSHRRILWDAFSRRGSRGYPESDADEMGFFSTWLDLGDDIFEELGESRYFHRRRHGSIRVSQYSRSRIREHRRAVFDSGNEQNTAACPLGIHQIGRCTCNSFFIAEESSARASISRIVMLTEALFEVLDEIHRQPASLSLSMVSVQAPESVVDSLPCKSYKKLETPQCSDDMEQCHICLTEYEDGDQIRTLPCKHEFHLQCVDKWLKEIHRVCPLCRGDVCEVAS

SEQ ID NO: 56604 - protein, 67 aa, Zea Mays
MAFIGGLKESDVYQCNNISESTIKNKVIKHGSRKQGPHPAKLNCWSVQIGRRSREGAGKRQKDPRNG

SEQ ID NO: 56605 - protein, 740 aa, Zea Mays
MAGRYHQDQGGDGGASMEVVSTPNQELALTNCAYVSPADLRRFPNGLALVADAWVFTLRDHNAVASGRIALNAIQRRQAKVSAGDSVTVSSFVPPDDFKLALLTLDLDYAKARANRNDELDAVVLAQQLRKRFLNQVMTSGQRVPFEFYGTNYVFTVNQALLEGQESSTPLDRGFLSSDTYIIFEAAPNSGIKVINQKEAASSKLFKHKEFNLEKLGIGGLSAEFTDIFRRAFASRVFPPHVVSKLGIKHVKGILLYGPPGTGKTLMARQIGKLLNGKDPKIVNGPEVLSKFVGETEKNVRDLFADAENEQRTRGDQSDLHVIIFDEIDAICKSRGSTRDGTGVHDSIVNQLLTKIDGVEALNNVLLIGMTNRKDLLDEALLRPGRLEVHIEINLPDENGRLQILQIHTNKMKENSFLSPDINLQELAARTKNYSGAELEGVVKSAVSFALNRQITMDDLTKPLDEESIKVTMDDFVNALHEITPAFGASTDDLERCRLRGIVDCGKAHKHIYQRAMLLVEQVKVSKGSPLVTCLLEGPAGSGKTAMAASVGIDSDFAYVKIISAETMIGFSESSKCAQICKVFEDAYKSQFSMIILDDIERLLEYVAIGPRFSNLISQTLLVLLKRVPPKGKNLLVVGTTSEVGFLESVGMCDVFSVTYHVPKLKKEDAKKVLHHLDVFDDGDLDAAAEALDDMPIKKLYTLVEMAAQGPTGGSAEAIYAGEKIDINHFFSILSDIIRY

SEQ ID NO: 56606 - protein, 318 aa, Zea Mays
MESAVEGKGRTASDGTDSESNSFDKRDDMSEDELVVLGGKIDDSVDNVNIDESEDNRSKQGVKRRRKRVKMKATAETERSKKAKSKVWDAFTKVTVPDTTEKGKMISKAKCNYCKKLYSYIQGSTTSHLSRHMRICAVYLKHVAKQQNQSLLNFAPSTAGESGSGLPTITSPKDYNHEKVKKLIAKMIIVHEYPFRMVEHTWFNIVMRYLNPSYEFIGRKTIRAECLKIYESEKESLAKVLKGVEYISLTTDLWTSNQTLSYMCLVAHYIDSDWKMQCRVLNFFELDPPHKGPVIGQAVYECVAGWKIEDKIVFHDFR

SEQ ID NO: 56607 - protein, 991 aa, Zea Mays
MSRFLAVKNVKNFWGQEYGEDLLPSVLDALNEIAFHPKFSSSRVEKERRAILSELQMMNTIEYRVDCQLLQHLHSENKLSNRFPIGLEEQIQKWDPEKIRRFHERWYYPANATLYLVGEIDDIPRAVREIEAVFEHTLSENEGNPVPSTSPFGAMASLFAPKLPSGFTTNLTGEKSPATDKIKPVKRERQAVRPPVEHKWSLPEVAQDAKPPAIFQHELIQSFSINMFCKIPVSKVQTYKDLRSVLMKRIFLSALHFRINTRYKSSNPPFTSVELDHSDSGREGCTVTTLTVTAEPQNWRSAIKVAVHEVRRLKEFGVTMGEMTRYMDALIKDSEQLAMMIDSVPSVDNLDFIMESDALGHTVMDQLQGHESLLAVAETVTLEEVNTVGAEVLEFISDFGKPNAPLPAAIVACVPKKVHVDDIGETEFEIYPEEITEAIKAGLEEPIYPEPELEVPKELITQSKLDELKLQHNPSFVPLTKEENAVKVFDSETGISQRRLSNGISINYKITQNEARVGVMRLIVGGGRATEDSESKGSVIVGVRSLSEGGCVGNFSREQVELFCVNNLINCSLESNEEFIFMEFRFALRDNGMRAAFQLLHMVLEHNVWLEDAFDRAIQLYLSYYRSIPKSLERSTAHKLMLAMLNHDERFVEPSPHSLQKLTLQSVKDAVMNQFVGSNMEVSIVGDFTEEEVESCVLDYLGTVRASSSPTIEERIEKISFRPFPSDVHFQQVYIKDTDERACAYIAGPAPNRWGFATEGNDLFNVIQRSDADAEISEPVSLDLTGKRHINVRSHPLFFGITLSLLAEIINSRLFTTVRDSMGLTYDVSFELNLFDKLDLGWYVIAVTSTPSKVHKAVDACKGVLRGLHSSRIVERELDRAKRTLLMKHEAETKTNAYWLGLLAHLQSSSVPRKDVSCIKELTTLYENATIEDLYIAYEHLKVDDSSLFACIGIAGAESGEDTNDDEPDVDLHGMGPMGGRGLSTMTRPTT

SEQ ID NO: 56608 - protein, 332 aa, Zea Mays
MRIVVAGGDGTVGWVLGCLSDLYKMKREPVPPTGIIPLGTGNDLARSFGWGGSFPFGWRSAVKRYLSKASRSPICRLDSWQTVIQMPEGEIEELPYALKKVEPVDRLEISQENGTELSEKASFYKGVFYNYLSIGMDAQVAYGFHHLRDEKPYLAQGPVANKLIYAGYSCTQGWFCTPCTASPQLRGLKNILRLSIKKANCSEWEQVKMPSSVRSLVVLNLYNYGSGRHPWGDLRPEYLEKKGFVEAHSDDGLLEIFGLKEGWHASFVMAELIKAKHIAQAAAIKFEMRGGEWNRAYVQMDGEPWKQPLLQEHSTIVEINKVPYHSLMINGE

SEQ ID NO: 56609 - protein, 185 aa, Zea Mays
MYRSAGVAMAWNVFRFCTALRGLGSIMILLVLAIVGVTYYAVVLCNYGPALLTGGGTTLAALAVLLLFHFLLAMLLWSYFSVVLTDPGSVPPNWNLDFDAERGETAPLTSSEFSSQMNSQQSVALGNTANPRARYCRKCNQLKPPRCHHCSVCGRCVLKMDHHCVWVVNCVGALNYKYFLLFLVG

SEQ ID NO: 56610 - protein, 84 aa, Zea Mays
MQFLFFIWSDYLYAIISSSPPQCHSMICSLFFFLREIVDRVFCCKRSSTVTNEQPLYLFLGEICVYSLSFFRWVRNQLRKLSHV

SEQ ID NO: 56611 - protein, 286 aa, Zea Mays
MMKSLLPQSQLRRSAAAAARSSAGGAAGADGAMSDGGGAGPRAPASSTFWFLLHALCCLISLFLGFRFSRLLFFLLFSTTALYRSSTSSSSAAVLRATTTTTTTTTTTTTTTNTFTLSFAAANTPPSTPANRTALDVADKGAASGNPQSHVVVGRHGIRIRPWPHPDPVEVMRAHRIMERVQEEQRRWYGVKEPRQVLAVTPTYSRAFQALHLTGLLHSLRNVPYPLTWIVVEAGGTTNATASMLARSGLTFVHIPFPDRMPHDWADRHATENRMRLHALRFPCAA

SEQ ID NO: 56612 - protein, 857 aa, Zea Mays
MKELLGGKGANLAEMASIGLSVPPGFTVSTEACQQYQDAGCALPAGLWAEIVDGLQWVEEYMGATLGDPQRPLLLSVRSGAAVSMPGMMDTVLNLGLNDEVAAGLAAKSGERFAYDSFRRFLDMFGNVVMDIPRSLFEEKLEHMKESKGLKNDTDLTASDLKELVGQYKEVYLSAKGEPFPSDPKKQLELAVLAVFNSWESPRAKKYRSINQITGLRGTAVNVQCMVFGNMGNTSGTGVLFTRNPNTGEKKLYGEFLVNAQGEDVVAGIRTPEDLDAMKNLMPQAYDELVENCNILESHYKEMQDIEFTVQENRLWMLQCRTGKRTGKSAVKIAVDMVNEGLVEPRSAIKMVEPGHLDQLLHPQFENPSAYKDQVIATGLPASPGAAVGQVVFTAEDAEAWHSQGKAAILVRAETSPEDVGGMHAAVGILTERGGMTSHAAVVARGWGKCCVSGCSGIRVNDAEKLVTIGGHVLREGEWLSLNGSTGEVILGKQPLSPPALSGDLGTFMAWVDDVRKLKVLANADTPDDALTARNNGAQGIGLCRTEHMFFASDERIKAVRQMIMAPTLELRQQALDRLLPYQRSDFEGIFRAMDGLPVTIRLLDPPLHEFLPEGNIEDIVSELCAETGANQEDALARIEKLSEVNPMLGFRGCRLGISYPELTEMQARAIFEAAIAMTNQGVQVFPEIMVPLVGTPQELGHQVTLIRQVAEKVFANVGKTIGYKVGTMIEIPRAALVADEIAEQAEFFSFGTNDLTQMTFGYSRDDVGKFIPVYLAQGILQHDPFEVLDQRGVGELVKFATERGRKARPNLKVGICGEHGGEPSSVAFFAKAGLDYVSCSPFRVPIARLAAAQVLV

SEQ ID NO: 56613 - protein, 281 aa, Zea Mays
MGSPDIDNWIRDAKESVAGFWDEHVEKPIISIRDELFETFKQRDKGVMEKQEVQLTEDSLRRMLVAFCEQTEGQKLLEDLPVQAMLETLTKRYEKELIHPIQNLFSGELARAMLIQIQKLKLDLESGLLEMDQILRANAINFAVLAALPAFGLSLLLLVLLRAWVQRDHGAEGRGNIARCQRRLLLVDVERRLMEFQHYRDNGMEEEARCKFGLVLYTLDRLCKAVESHAKETGEWLSLRQDIFDLSKLDMGMPDKMIVVSRLKWMYNCLLPFSSSRLPRL

SEQ ID NO: 56614 - protein, 168 aa, Zea Mays
MHRADKCVLASSGFQGDIKALHKNLAARELLYQHQHNKRMSCPAMAQLLSNTLYYKRFFPYYAFNVLGKGCVFTYDAVGSYERTGYSAQGTGSTLIMPVLDNQLKSPSPLLLPARDAVTPLSESEAIDLVKDVFASATERDIYTGDKLEIVVINKVGTKREYIDLRKD

SEQ ID NO: 56615 - protein, 101 aa, Zea Mays
MAFFSLRANIFMRLTAIGSCVALAFVSTPKHHEILIDQDGRFSTTTEPWHQPKSQTQMQIRFDHVLVPQSAGLRRHVKSMHAMCCACNITCFFYPSFPAPM

SEQ ID NO: 56616 - protein, 446 aa, Zea Mays
MPPTLGLLLAAAAAVLLLLLPPPPSAGAQETCWSGPAPRRGAWMSVASFGARGDGQTLNTGAFARAVARIARRRGARGGTLLYVPPGVWLTGPFNLTSHMTLFLARGAIVRATQDTSSWPLIDPLPSYGRGRELPGGRYMSLIHGHGLQDVFITGENGTIDGQGGVWWDMWKKRTLPFTRPHLLELMYSTDVVVSNLVFQDSPFWNIHPVYCSNVVIANLTVLAPHDSPNTDGIDLDSSSNVCVEDCYISAGDDLISIKSGWDEYGVAFGRPSSGITVRRITGSGPFAGFAVGSETSGGVEDVVAEHLSFSGVGVGVHVKTNSGRGGFIRNVTVSQVTLDGARYGLRIAGDVGGHPGASYNASLLPVIDGVAVRNVWGRNVRQAGLIRGIRDSVFSNICLSNVKLYGIGSDSIGPWRCRAVSGSALDVQPSPCAELASTSGTGFCT

SEQ ID NO: 56617 - protein, 168 aa, Zea Mays
MPPSASMPATHTAVYVAAVPLRAPKGPAQLLMSAGYSLGMWDLQHFMVLLRPDPALAQALVFDFQPRDPEDVLAALAVLSRREIPGVVRRRTLRRVPDGRCWLVGHCCDAVGAATRFSERWTTGLVVGEHDCRDYTNGLVEVLTGEKRVLESLRLRGNGSSTSGAAPP

SEQ ID NO: 56618 - protein, 313 aa, Zea Mays
MEQSSDGLPISQRRANSSTKHSSKSDEVAEDMLQSNIPHETVRLCQGVESEEIEGPPHKKIVQNFTESSSSKNKKHRWSSEEDEALKQMVKKYGTKNWRTIACAIPGRNANSCLSRWKYLLDPAINKEPWSQQEELRLIRAQQVYGNKWCKMVKHFPGRTNDALKEHWRSPMKRKLDSYLASGLLEHVPDLQDDVSFPQTQNNQSDIPKDCKAASDRNRFSSRLSTDPKLKQELTELDENGNTSARKSSDLFYAKAPDTHSAKISEMRMAKSQQCAGTRKKLAFLSTPVELKSVVPHETTKHCQDMEPEKTAI

SEQ ID NO: 56619 - protein, 778 aa, Zea Mays
MQRAPERRRGAGPLLLLALLVALAAAPRLVRAVTDATDVSAINGLYMSLGSPLLPGWTGNGGDPCGESWQGVVCTGSSITGITMNAANLGGQLGSLGNFTAITSLELNNNNIGGTIPEDLPVTLQSLFLSANQLTGSIPSSLSKLENLTAMSVNGNHLNGDLPDTFDSLNRLVNLDISSNNLSGVLPSSMKNLASLTSLHMQDNQLSGTLNVLQDLPLKDLNIENNLFSGPVPASLLNIPNFKKDGNPFNTSIVPSASPPSTGPAPTPAASKPAPTPAPTTSNSTPPAPAPSFPSRSPPPPKTTSNSSEGSTTRDSTSPSKKHSTSTLKIVGFVLAGVVLFIIIVLLVLFCLSKYQERRSRYDHNRSQQARVHHRVEPQIKPPPVQQSNDLKKGEVLDRRGHELSSSTAALAKKSPENQKEHVINFDRTDSDLFPVSLPPPPPPPPLPPIERVIANPIVPPEKRYSPPPKTSSSTSATSFSIASLQQYTNSFREENVIRESRLGKVYLAELPDGKLLEVLKIDNANGRISVDDFLEEVECILDIKHPNILELVGYCAEYGQRLLVYNHFSRTTLDDTLHDGEDTESALSWNARLQVALGSGKALEYLHASFQPPIVHQNFEPANVLLDKKFSVCVAECGLAELMPPSSVTQLSGRMRALLNYEAPELQDSGVVSERGDVYSFGVVMLELLTGRKPYDSSRPRHEQHLVRWASSQLHDIESLSKMVDPSIRGQCSEKALSRFADIISRCIQQQPEFRPPMSEIVQDLARLVNATGEESE

SEQ ID NO: 56620 - protein, 352 aa, Zea Mays
MWSEEAPQPRGGRRGSSIYKAEGGHEESCAPQVTAAGPHLTSILRRRAEVCGPSVPPAPVPVPVPDHALRRHRARPWRGRHGQGRHNGHHRLAHDKGAGLHQGGGAAGSRGRGRGRPTAEAPRRPGLGAVWRHHSPEAHAEEELVRRLQQQQQQQNRPRGHRRGVQAEEGLADEHLRLTDAAARRRRAGGPGPERRQGEEEGDERGRARRRGPGGGRQVRQPDEHEQPAQEARLLQAVADVCVASILCSGAWRGAEGKGPAPASELKGLLAAALSLRASSALEDICHVLDLVQQSFTNSVSVHSVRPCGLPLPSSSHLAVVAFSSCFFLHYVETAVALCVWMMCSTVGARAP

SEQ ID NO: 56621 - protein, 51 aa, Zea Mays
MAAVRRRVPMRAPAPCVAFHSPKPEFASRPCLPVCCCSSSDLAQVAAMVVQ

SEQ ID NO: 56622 - protein, 658 aa, Zea Mays
MMGSNNEFDAVKVRDDQMVLSTKILNLEKKWNEYCVRLHQGCNRINRDPCQLFPHHIGVRVDRERCANPNQSAQTIALQRDIIKPCALSSPYTNITAKSISAPDQINADLVLNLQVRQSRSNEPLQSGVVPFQHINSSNYNKPEESSAAPVTTDLVLATPRGSSFKDSSSALCKRVEDIEETIQLMPNKVDDLNLKPPHLSIQPYTCSKSSSSNWEQTSPSALHSTSLGGTSAFGQWQRPSPLATQSFDLSNYKLLMEHLFKVVGRQEEALSAICASIVRCRSMERRRGANKKNDIWFSFYGPDSIAKRRVGVALAELMHGSSGNLIYLDLSLNDWGNPSFRGKRATDCIFEELRKKRRSVIFLDNIDKADCLVQESLIHAMETGRYKDLHGGRVTDLNDSIVVLSTRMIQGCQDASLGVEEGNAFSEEKAVAARGHQLKIIVEPGTTNIGGGNVVVSSRHSLGSSEASSYSSKRKLHISDGQEKTEESASTSKRLHRTSSIPFDLNLPGDDEEAHDDGDDDKSSGSHENYLEGSVGNLLRWVDGSINFKPFDFGKLCEDILQEFSNTTSKILGTRGCRLEIDAGAMEQVVAAAWASDSHENEKRPVRTWVEQVFGRSLEQVKMRCENLSSCTLRLVSCEVKEDGFGALLPSRIILDW

SEQ ID NO: 56623 - protein, 111 aa, Zea Mays
MRIAMRKQYNLPRLLLLKRRKILVRAQKLTHSQIQKIQNPARNLMTALMRVLMKVMRNLHKRKLRILHLLVLQRLPLMFQRKKAAVMKMMKVQKKALMMRIQNKLKLRKLL

SEQ ID NO: 56624 - protein, 506 aa, Zea Mays
MAAMNGKVLGKCGRNMNSLKRKRENPAAYDADIFHNSELHQHPVNDSAVRFHVDKDRKAKIVCHFNKQVLQSYKNFMSSAPPKRILLRIGAVWKDFPEKIVKLAQADFRAKKTITETGYQNQLFLLDFAHMTFIDTKTGLQRPIAWIDENGNRYFPESFVQDQKIFMKKDFGNGYHDYISVESNGTREMNDQLGTSESSAESSNFGSSTEDVSSPKRARAENNSIIKKYCDMGEAIGENEPCTLLPTACNLLPRQANLGEVSRAQRTIEAVEKLLLQGMGSVIESKDIIGIYRTPLLDDHGQVRYHNHEKHVQVTRCHRGNANVRYAWLPCSKSTVHEMMLNSSLQVHKPPIKCAAYGEGTFLTPANRSDACVKFSAVDENGIVHMMLCRVIMGNVEIVHPGSKQHQPSSDYFDSGVDDLKNPQHYIVWDMNLNRHIYPEFVVTVKLPSKTKDYFVSQEDCQNSSDLSLVLNSSSPDCISERSQPKCLLKLWTWLLVAMKSLRVRK

SEQ ID NO: 56625 - protein, 65 aa, Zea Mays
MAEDVRIQYDDQEGFEQIARQFGIFEEWKDGIPRTAYKGVVVFRYNSSQRRIFLVSPDSLRQLGV

SEQ ID NO: 56626 - protein, 507 aa, Zea Mays
MARYTFETMEHHRRRGTFNRPPMHGIWAHRISGSFSQVRKALLAVSTCLQDNPRPDTHNIPIGRPFGLPGSGTGCPPGMDPHSQRSYLPPHIPDYHTRNYPSNAGPPGPRFFFEQEIVFRMIILNEMVGSIIGKGGSTIRALQSETGACIKILEPVADSDERVVAITARENSDMLHSPAQDAVVRVYSRISEASIDRSSHTPARLLVPSQHIGCLLGKGGSIISEMRKITGANIRIFGNEQIPRCAQRNDEMVQVTGSFQSIQDALLHITGRIRDVILPKPHPSGGMPPYPPVGNIPVHQSRQEQPPPHLHPSGGMPPYPMHPFRPDAPMGHFEMGDHRPPPVHSMEYMGADRMPYLYGVEQGGPRPFLEQPSPRTCPPEAPRTNSEVPRNMSDAVPATDFRKGPVAIENQVATPTGTTEVIIPCNYIGFVCGNNGSEIEEIEKMSGASITVHDPKAGDANSKVVICGDPRRNKEGTEPDSCLHILWSVSNIIDDLITVQYHRRLCS

SEQ ID NO: 56627 - protein, 983 aa, Zea Mays
MAGGGGGRGESSPAIKPISKAVVHRICSGQVIFDLSSAVKELVENSLDAGATSVEVSLKAYGEEWFKVADNGCGISPSNFRALALKHHTSKISDFSDLGSLVTFGFRGEALSSLCALGKLTVETRSKDELVGTHLEFEHSGVVVSERKTARQVGTTVTVEKLFSTLPVRSKEFSRNIRKEYGKVISLLNAYALIAKGVRLLCTNTVGKNSKMVVLRTQGSSSMKDTIITVFGPNTFKCLEPFSVTTSDGCQIEGFLSKPGPGTGRSSGDRQFFYVNGRPIDMPKVTKLVNELYRSSNAKQYPVVILDFHIPTTSYDVNIAPDKRKVFFSSESMILQSLRETVENLYSPQQCSFSVNHIKDPEKEGDAVTDRHNEDTNAIVMVNVPSYYNNDDNEETDNEDQVSPENQKLPSVARDASPLSGGTTTQADRSAWLPSFAYDQPKRSPKEGRSLVLGRNCFRTGLAAKPTHSSTVQSSLLNFVSLNKRKHEDDCTLISEAAVLRRETCSEHMRRSSLEANFVTPNKQNHEDDCIISESPVLRSGTCSELYKRTSLEVNFPSPNKQKHDDNCTLISEIPVLRRRTNSEQARGTSLEANSAPEFNLPLETNSLKQHSSQYFGSVRTDVSPQHSKQPNIVTIGAGVTGPCDVDTTESDMDQQCGRCHSASGAPNKYSESRHQNALADSPLPDAQDYGDGAAVCYASVQYPIIQFTVAELRRRRKNCFMISHINKSYCLEKTTRCYKAATLDITVPLADEAKSNSLAAATNELDRLFSKHDFREMEVVGQFNLGFIIGKLGQDLFIVDQHASDEKYNFECLSQSTILNVQPLLEPLRLDLSPEEEVIVSMNMSTIRKNGFVLAEDLHASPGNHYLLKAVPFSKNITFGVQDVKELISMLADSQGDCSIISSYKLDTADSVCPSRVRAMLASRACRMSTMIGDPLTKAEMKKILKNMAGLRSPWNCPHGRPTMRHLADLRTMKAKDIAFKR

SEQ ID NO: 56628 - protein, 121 aa, Zea Mays
MVPGVGLVHAPFSVRFPTSFFKQACELAPIFTELVDCVSLDGESLQAALSRTKQVHEFTARLLDIHDKMMLINNKEDIRLILHRSDYMLDSEINSLLQIENSRSYILPPTLQLSVVPSGPT

SEQ ID NO: 56629 - protein, 509 aa, Zea Mays
MNPSMPPPPPRNPNSFSSSASMPPSPLPNPSPPTARPEAASEPDLSSAEVNGRANPSTSSSMPPPPPQKPAPPAPQMEAKAAEAEGGAVPSPSVSGSSAKEAPNSSGASSGNNVMEEAAASPVERQRARAPYAIPEWSTAPSQPFFLEVLKDGTIVDQLDVSKKGAYMFGRIDLCDFVLEHPTISRFHAVLQFRNDGKVFLFDLGSTHGSFINKNLIKKKLYTEIHVGDVIRFGQSSRLYIFQGPSELMPPEKDLQKLRDARIQQDMLDREASILRAKTQAALAEGISWGMTDDAIEESAEDDADEITWQTYKGQLTDRQEKTRSKIVKRMEKIANMKKEIDAIRVKDISQGGLTQGQQTQIARNEQRMSQIMEELDNLEETLNDSIRESIGARSGKAKRGSYKASLEEEDDVLSDDDEFYDRTKKKSTQKSSEQQSVETADSLLEKKDFITNDIESKTKLLEEEKHKLSQSDTPDLRDDLDAYMSGLSSQLDDLFMCAEKGYKFLIGF

SEQ ID NO: 56630 - protein, 76 aa, Zea Mays
MPLHYHRASQLLTETTTTLVAVRAMTRSSRRSQSRRDGSLDPSLATLLLSVTSTTLSTCCCVGPSTDTLDPSSTIV

SEQ ID NO: 56631 - protein, 105 aa, Zea Mays
MATGLSNRRSEGKASERDGRPSRSHPTCRRPVGSARPPTAAPRALPATRRCGAEKDEAVAHAGRRRLRRARRRMPPSERFSGRAALARFTSRYLSRDSVHLSLAL

SEQ ID NO: 56632 - protein, 248 aa, Zea Mays
MATPPALLFPSPSSASSPPSSAQVEAVVLFNVCDSYVRRPDQADRVIGTLLGSLLPDGTVHVRNSYVVPHSESADQVAIDIDYHHNMYASHQKVNPKEVIVGWFSTGFGVSGGSTLIHEFYSREVQSPIHLTVDTGFTRGEASIKAYVSSNLSLGDRQLAAQFQEIPLDLRMIGAEKAGFEILKSTMVEKLPNDLEGMESSMEKLYILIDEIYKYVDDVVEGRVAPDNRIGRIATVLFLADGLTITDP

SEQ ID NO: 56633 - protein, 363 aa, Zea Mays
MVSSSSFGRDGLTHNMLEMIHCHWRRQEICKVRCRGVPTVDMKNLCYHLEEKSGGKVIHRVGGVVFLYRGRHYDPKTRPRYPLMLWKPATPVYPKLIKEAPDGFTKEEADEMRRKGRDLLPICKLAKNGIYITLVKDVRDAFEGSDLVKIDCEGLNPSDYKKIGAKLRDLVPCVLLSFDDEQILMHRGKEWKSRYSKPLTLIPKVPKNNLAMTSVMNSSDEVSDANTQVAIREVLRPKMFKLWKSAVDSSLALLLDDAEANNLTPDSLLTLVEEFSVTSQAVEHSFPALLVTNGDASTDSLSAEYMNDEPETSVAGNEEGQLEQSPDLRDDEHFDVDMFERLESSVPLGSLPIDSMIERLNSE

SEQ ID NO: 56634 - protein, 521 aa, Zea Mays
MAFAVSGAVLGGAVRAPRLTGGGEGSLVFRHTGLFLTRGARVGCSGTHGAMRAAAAARKAVMVPEGENDGLASRADSAQFQSDELEVPDISEETTCGAGVADAQALNRVRVVPPPSDGQKIFQIDPMLQGYKYHLEYRYSLYRRIRSDIDEHEGGLEAFSRSYEKFGFNRSAEGITYREWAPGAFSAALVGDFNNWDPNADRMSKNEFGVWEIFLPNNADGTSPIPHGSRVKVRMDTPSGIKDSIPAWIKYSVQAPGEIPYDGIYYDPPEEVKYVFRHAQPKRPKSLRIYETHVGMSSPEPKINTYVNFRDEVLPRIKKLGYNAVQIMAIQEHSYYGSFGYHVTNFFAPSSRFGTPEELKSLIDRAHELGLLVLMDVVHSHASSNTLDGLNGFDGTDTHYFHSGPRGHHWMWDSRLFNYGNWEVLRFLLSNARWWLEEYKFDGFRFDGVTSMMYTHHGLQVTFTGNFNEYFGFATDVDAVVYLMLVNDLIHGLYPEAVTIGEDNTRTFGFILSLDYKEDFS

SEQ ID NO: 56635 - protein, 402 aa, Zea Mays
MFVFSWICFFSPSSTCIYHTDQGSQGEHILPESYPICSDHEECIARPERIKIQKGFVAKESVKGHMVNVVKGLKIYEDVFTTSEIMKVADFINEIRQAGRNGELSGETFIFFNKQMKGNKREIIQLGVPLFQPTTEEANCHTEPIPLVLQAVIDHLVLWRLIPESRKPNSVIINFFDEDEHSQPYFKPPHLDNPICTLLLSETTMAFGRSLVTDSNGNYKGPLTLSLKQGSLLVMRGNSADMARHVVCTSSNRRVSITFARVRPSTPVDLSPLPSPTKALTPWQPQPATASQVPAPACMTQKPPVSGAIIGYAPTPQTVLAPAAWGMAMRAPVMMVAAAPARPMVMASLGTGGGNISKWMSRSGTGVFLPWTVGPKRYNKHLPPRIQKRRFSAMMSPIEAQG

SEQ ID NO: 56636 - protein, 1078 aa, Zea Mays
MAEEKGRSKTDPFFTLTISAANRNTQSRARSWRGLQILPLQDSTAEFAPTTGPAAMAAAADLEPQLGISPATPDIVRKLARPSGTTTAVGYCCTALYTSTAAGPGKVDGDGLASVPLHAHEHSQSAALDNLVQVDCDPVGTQESSTLPALVGESSGKVAQQEQQHKEGVDSARDAGAASPAPTSTPENMEPTPRRRGKKSTKGVQRLKVAKDKVMKLKVTTPSTVKKKKMTEDDIQHIGAHRSNSARRKLDLDLHSSESKTCFSRAELMINLKCIGKSYGLISELTTHKRSKRGKKRKMMVGNKESGQLALLPYNWTTTVAVSRPLTHVKKLRAKVLGLTDETMRVCAVLANWNGSDNESFEGFDIGNGPEWDTTRQMFEQFVDIFINAMFDLIGPRKYSQWGGSLIDSVVGTFLTQNSADNLSSQAFMNIAAKFPKSERHCQDNATQLIDGVDRKMKSKEAFDNFDLVHSHFDEYIKSEEEVDFDKKVKSQYGEDYNRIIGNFAASMKQKNISTWDSDLMNLVKDKYGNPVCDENNLRKILASLRQPVTASNWKELQEEAYKKGYNNKSQTETSDVVDWESVLNAPFSEVAKCIAIRGQHNILAVRILAFLDHVKKAQDGSFDLDWLRFVSREKAKKFLLSIHGIGVKSADCICLLSLRHRAFPVDVNVARIVTRLGWVKLQPLNGADFHLIDLYPILDDVQRYLWPRLCTIDKEKLYELHCLMITFGKVVCRKKNPNCGACPFSASCKYYNSSLAKKSLPLPEKHEQGEQQTSMVAYGSCTPSSQQMYRYQIAISSTTTETPPIHSCEPIVEMPPSPEYEYNETPNEQEDFYEDYACDIEDFAPGVQYDSEINICSNKHTLNNNSWTPNCGKDLAVINPKCSFGQSKKLKNTGRLRTEHNAYVLPDGHVILEEFEDRVPGDRCPYLLVVISCPDDYKVKGTVLIPCRTANRGKFPLNGTYFQENEVFADYSSSRNPITVPRECIGMLERSIVYFGSSIHSITKGQTRQDIQECLKEGYICVRSFHRKTRIPLRLCSTLHATNTKPAREKPMKRTRTSPEGKKNGTSPEGKKNESLF

SEQ ID NO: 56637 - protein, 767 aa, Zea Mays
MKISALLTSAGINIGLCVLFLSLYSVLRKQPANVRVYFGRRIAEEHDRLRGAFILERFVPSTGWIVKALQCTEEEILAAAGLDAVVFNRILVFSIRIFSLAAVLCVFGILPLNYFGQDIHHVRIPSESLDIFTIGNVEVKSRWLWVHCVTLYIISAVACILLYIEYKHIARLKLLHLTSATPKPNHFTVLVRGIPKADKESCSDVVDNFFTKYHSSSYLFHQVVYKVGKVQKIMTGAKKAYKKFKHFTDETVDQGCRTVTYRCCLCGASSNSFKLLNTECEQNKGKADNKSILDLDDEECTTAFVFFKTRYAALIASEILQTSNPMKWVANLAPEPEDVYWSNLWLPYKQLWARRIATLLGSIFFMFIFLIPVTFIQGLSQLEQLQQRLPFLRGILKKKYYMTQLVTGYLPSVILQIFLYIVAPIMMLFSTLEGPTSHSERKRSACCKVLYFTVWNIFFANVLSGTVISQLNVLSSPKDIPVQLAKAVPGQATFFITYVLTSGWASLSSEVMQLFGLIWNFIIKYVLRMREDTEFVPSFPYHTEVPKVLLFGLLGFTFSVLAPLILPFLLVYFCLGYVVYRNQLLNVYRTRYDTGGLYWPIAYNTVIFSLVLTQIICLGVFGLKESPVAAGFTVPLIILTLLFNQYCRNRLLPLFKTFPAQDLIDMDREDERSGRMDEIHHGLHSAYCQFADTVDVPLDKIEIVGGDEEQGSSSGQSSVKETCEDPKKHLAHPTLKGLPVNRLRHAVRSVTFLIRLQRRGLSEQKIG

SEQ ID NO: 56638 - protein, 244 aa, Zea Mays
MLEPAIRKAIGPAPQERIFRCKSCKSSFSTLRSGKFALFCDSCLESKGAKNNISSSKVGRSQTSSAKVYKSASPGAKSSSVGRLTRKDKGMHKVVFMSGILPEGTDVGYYVGGKRLLDGYIKELGIYCHCCSTVVSPSQFEGHAGRAARRKPYHNIYMSNGVSLHELSISLLKGQKMSNRQSDDLCSICSDGGQLLLCDTCPRAFHRGSMISAKRNSVPEPCCFVTNVVENIMLVASRNIIWLI

SEQ ID NO: 56639 - protein, 576 aa, Zea Mays
MHHLNDVKDMTLCSVEYVVFDEADSLFSMGSAKHLHDILKKLSDTRQTLLFSATLPSALADFAKAGLRDPHTVRLDLDKKISPDLRLAFFTLRREEKLAALLYLVRERISSEEQIIIFVSTKHHVEFLNILFREEGLEPSLSYGAMDQEARMIHISKFRARKTMLLIVTDVAARGLDIPLLDNVVNWDFSAKPKLFVHRVGRVARQGRSGTAYTFVTSEDMPYLLDLHLFLSRPLRPAPTEEELLKDMDGINMKIDQAIANGESVYGRFPQTVLDLASDGLKEVISGCTELIALEKPCANAFRLYLKTRSMPSKESIKRGSNQWLDVMKKKREVHEGIINLVHQKSSEDPRPEVEEVDDIPNWEKKEVCGKKRKLQNFRDEDYYISSVPQNHHLEAGLSVRDNEGFVENRLDAAVLDLVDDEASGMQAQRSRYHWMKNKFVKLNAGDRVTATGKIKTEGGAKIKASATGIYKTWQQKTHKSINIGGKSGNFAEERTPSSGGYQRGNKKHFAGPWPQIYTKCQRALRNKEPRANAEEQAAEGNGNHAVEEQIGERREIPEEQAARWERVQQRGWWER

SEQ ID NO: 56640 - protein, 1009 aa, Zea Mays
MMEEEERKKRMFRQLNSEHSSLSGTFTCFSVDGSKSLCKGNPSSASANSLLKIRNVQRGPQKRIAWDNELLYVPKEGITEMLRSFMDQFLSGAYNILMQSVCGDIMDEHHSIEKSDITTFFKVARFVLAFQHEKASNDQKSAKGIQPSGVSPSNEPDDNLPFHGDICGPVAATLNEDMFNIVISRWRETYEALKETNDYKTLSAAGSLMKNMIDMIYLVLKVLPEDSRESQTARVLLYKLFYDQTEHGLTQFLLNLFRSFDSHKQPKSDLVDLLETIHIMLQLMEKLQARGALRVAKKTKKVRRKKSTNDKKENSEPKVDNAEPNDANPTDGTKCSPETLPDLRSEGPALESSPSEPGKVDTSGAHVLDTLVDTVVNIESTAHAEGDPSCTDSGVMKRNLIEEEGETSDSSVDHQPATSEVDFNVSRLISSLANNSVVQNICWLLKHYKSNSYRTNHYIICMLRRFCEDLELSPMLYQLSLLTTFYDILAEQKLSSSKEYTNIVNFLSKVVRKMLRTIKKQPLLFVDILFWKTRKECHCIDADALLNELKNDVGSKDSEIGSSKGWRDRINIADSLGDDEVDVVIPQAPYDADKDGDLSAGEHTDDFRKSSTKYKRSRLSLSDSEADEIERNHVSRDSVPKVPKRRGRSLFTEEQERLIRDLYEKYKDGPKCSHIIAESLDPSGKISSAQVSRKLTQLGLRNVTRRKKVAGESLSTGDRTIEQQDNSLDDLNPMLGEQNHGSKAKSSRPRRKKLHTASDDHDDTSQRKSSDEDTLQVLKSRSKSKKVPLVDSSLSGSQHQEAQHDPDSDDATIGSMIRSRKKKRLSTSDFEGNVRNHQESSDNTKAKDCSPIISQHEKALQDIYPDDETIGSIIRSVKKKRSVTSNFSANIEAQESLRNINLQDETVVSNIMDASVNHGSDPVNNSDNTVEDELLDDFETELVNNGGNTVEAELLDDFEVELDDHEHTDQRITDDEIMTESGKATNSDAKGRAGLKRRHRMVIDDEDDD

SEQ ID NO: 56641 - protein, 731 aa, Zea Mays
MRDATRGTHAAAEALAARRPRRAMASPLLCGCALLLYLLGHLATCHAARDTITPSSPLAANETLVSGGDGNFALGFFTPPGANSTYLGVWYNKVSLRTVVWVANREAPIAGAVGDNPGATLSVSGGGTLAIAAGNGTVVWSVRSASSRRLASPAAQILDNGNLVLKDGAGGGGAVAWEGFDYPTDTLLPEMKLGIDYVKGKNRTLTSWKSPSDPSTGPVAMVMDTTGDPQVFIWNGGEKVWRSGPWDGVQFTGVPDTATYSGFTFSFINSAQEVTYSFQVHNASIISHLGVVSSGNYGLLQRSTWVEAARAWNLYWYAPKDQCDAVSPCGANGVCDTNNMPVCSCLRGFTPRTPAAWALRDGRDGCVRSTPLDCRRNGTTSTTDGFVAVRHAKVPDTERSAVDWSLTLEQCRQACLRNCSCTAYASANVSSGGGGRGGGAGGGSGCVMWTTGLTDLRVYPDFGQDLFVRLAASDLDVLEGRSRAARIRIAVGVSVSLLALLLAVAGLLIWLRKRRLTRTAGSSKWSGSRSTGRRYEGSSHGDDLELPIFDLGTIAAATDGFSINNKLGEGGFGPVYKGKLEDGMEIAVKTLSKTSAQGLDEFKNEVLLIAKLQHRNLVRLLGCSISGQERMLVYEYMANKSLDFFLFEKDTVVLDWQVRYRIIEGITRGLLYLHQDSRYRIIHRDLKAANVLLDKEMTPKISDFGMARIFGNEETEINTLKVWLHVSGVRN

SEQ ID NO: 56642 - protein, 565 aa, Zea Mays
MKQSPASTAVSDSGMLGRRLALLPAATVGRGGRTTRARMTMGCVLLDHVAPRLAVASATLVGAREVIAAAAAAGAGGSGAVHGAVASTLAQVAVTAVAIASGACLSTKVDFLWPRIDQLPDTLIFEGVEVTGYQIFEDPKVQKAIEFASTAHLGQFRRTGDPYITHCIHTGKILAALVPSTGERAVNTIVAGILHDVVCDTSESLKSIEEQFGADVASLVSGVSKLSYINQLLRRHRQKNTGGSTLTSEEANNLRVMLLGMVDDPRVVLIKLADRLHNMRTIYALPVPKAEAVAQETLAVWCSLASRLGVWALKAELEDLCFAVLQPQIFKKIQSELTLMWNRTGKSKNMRRSSIRNELLASMKDGNMVSINDLFSSCNQERPNMKDLLQAVLPFDIFLDRKRRSYFLSNLNSNSGESIPNPKIVDDAAVALASLASCEEELERELLISTSYIPGMEVTLSSRLKSLYSIYCKMKRKEVGIRQVYDARALRVIVGDKNGAMHGSAVRSCYSILDIVHSHYTQQFRHLIAHRWRSRLEPSECMSMQNMDLLLIGCIRRAKLSTEVA

SEQ ID NO: 56643 - protein, 110 aa, Zea Mays
MDKIQPLRIMAGHLSDVDCVQWHVNCNYIATGSSDKTVRLWDVQTGECIRMFIGHRSMVLSLAMSPDGRYMASGDEDGTIMIWDLSTGRCVSPLLGHSSCVWTLAFRVAI

SEQ ID NO: 56644 - protein, 96 aa, Zea Mays
MHRHAPTEHQCTSTLVKHIKAPVHLNYSSIITVHPESIDGRPGTLVIESFVVDVPDGNTKDETCYFVEAVIKCNLNSLAEVSEQLAVESPTSLIDQ

SEQ ID NO: 56645 - protein, 510 aa, Zea Mays
MTFPRDNMIYRERHCPPDKEKLYCLIPAPKGYVAPFRWPKGRDFVPYANVPHKSLTVEKAIQNWVHYEGNVFRFPGGGTQFPQGADKYIEQLASVIPIAEGKVRTALDTGCGVASLGAYLLNKNVLTMSFAPRDNHEAQVQFALERGVPAYIGVLGSIKLPFPSRVFDMAHCSRCLIPWSGNDGMYMMEVDRVLRPGGFWVLSGPPIGWKIHYKGWQRSKEDLRNEQRKIEHFAQLLCWKKVSEKDGIAIWTKRLNDKSCSMKQDNPNGGKCDLTSDSDVWYKKMEVCMTPLPEVNSVDEVAGGQLEPFPKRLYAVPPRITDGSVPGFSVESYEEDNNLWRKHVKAYKKINNLLDTGRYRNIMDMNAGLGSFAAALESPKVWVMNVIPTIANTSTLGVIYERGLIGMYHDWCEGFSTYPRTYDLIHSNDIFSLYQNKCQFEDILLEMDRILRPEGAIIIRDKVDVLVKVEKIANAMRWKTRLADHEGGPHVPEKILFAVKQYWTAEKTSS

SEQ ID NO: 56646 - protein, 172 aa, Zea Mays
MVILSGAHTVGRSFCTSFLARIYNGSTPIVDSGLSAGYATLLRALCPSNANSSTPTTTVIDPSTPAVLDNNYYKLLPLNLGLFFSDNQLRVNSTLNASVNSFAANETLWKEKFVAAMVKMGNIQVLTGTQGQIRLNCSIVNNGSSSVGIQQMTVPNSYSGATASLDDEIATS

SEQ ID NO: 56647 - protein, 214 aa, Zea Mays
MKLLIAHGSHQELGKGDSMTNLMINMCDVVHMLMHATEVHYQCPKRVRVQSDVSERIANGTSVHVKYPIYDQTVYLNDYHKKMLKDQYEGLKTIEQITMDSASVETNMFKLCKVRFVQFGQKGIPYLNTYDGRAIRYLDPLIKANDTIKIDLETNKIMDFIKFDVDNMVMVTGGRNTERVGVIKNREKHKGSFCCLELFAMSSFLLFVVQENLE

SEQ ID NO: 56648 - protein, 1249 aa, Zea Mays
MALFRKFFLKKTPDRLLEISDRVYVFDCCFSTDSMGEDEYRDYLSGIVAQLQEFFPDASFMVSNFWSGDKRSRISDILSEYDMTVMDYPQQYEGCPLLQLEMIHHFLKSCENWLSVEGQHNMLLMHCERGGWPVLAFMLAGLLLYRKTYTGEQKTLEMVYKQARRDFIQQFFPLNPQPSHLRYLHYITRQGGGSEWPPISRPLILDSVVLHVVPRFDVDGGCRPYLRVHGQDSSPGNKSAKVLYEMPKTSKHLPHYGQAEVPIKLSVFCRVYGDVVLEFIHIGDNIEHKETMFRIMFNTAFVQSNILALNRDDIDVAWNVNNQFPRDFRAEVHFSDPDSFKPAATVEEIADDGDETDVASVDTGEEFYEAEEDWHDARKDQETRSTDGGISLDDVADGGVATEERSSLEKHQFNEGVKIGVSQNLGSMNEKGASAPTPTFDNQEGLQQPREVLANGKLSSTNGQENSDVHDIQVVATSVDSEGHKFGSTCQEDMKGVIAQTLVTTVDPSCSDEIECQANEQTKISEYPDLDYTAFGSPRSLSRTNGDTHLRTTKNEGLQNGDIKIITENTISMDNDLVIYEEKTIVVNGNTVQEVKNIVNEKSIAAKIDKPIIESRNSLNNNNGKIQIAKPSDTSNGKLDGCRLESCLEEALPTKKTTVHDRIVVLPATDVGTEIKTKQEGLGDKQDFAPPPPPPPLASRAGPPPPPPPPGARSGPPPPPPPPGARPGAPPPPPPPGAPPPPPPPGGGGRGPPPPPAPRGHLGGPPPPPPPSGRAPGVPPPPRAPGVPPPPGNNPSLGRGRGAVRPLGSAYGAAASRKSTLKPLHWVKVTRALQGSLWEELQRNDDSQSVSEFDISELESLFPAAVPKSDDSSKSERRKSLGSKPEKVHLIELRRANNTEIMLTKVKMPLSDLVSAALALDQSTLDVDQVENLIKFCPTKEEMELLKNYTGDKQNLGKCEQFFLELMKVPRMESKLRVFSFKIQFGSQVADLRRSLNIIDSSCNEIRTSLKLKEIMKKILLLGNTLNQGTARGAAVGFRLDSLLKLTDTRATNNKMTLMHYLCKVLAARSPQLLNFYVDLVSLDAASKIQLKMLAEEMQAVSKGLEKVHLEYDASERDGPVSEIFREKLKEFTDNAGADVQSLSSLFSEVGKKADALIKYFGEDPVRCPFEQVISTLLTFVTTFRKAHEENLKQAELEKKKAEKEAEAEKAKNAQLTGKNDSKPSNPRRQAKQTLERTRSASRRGRDVG

SEQ ID NO: 56649 - protein, 319 aa, Zea Mays
MLPSTVGGRGRYLMLGIALALAALLALASASESDHKYKTEEPVKLWVNKVGPYNNPQETYNYYSLPFCQPSENPTHKWGGLGEVLGGNELIDSQLEIKFLKNVEKGFICTLELDAKKVQQFADAIESSYWFEFFIDDLPLWGFVGETDKNSENKHYLYTHKNILVKYNDNRIIHVNLTQESPTLLEDGKKLEMTYSVKWVATDVSFARRFEVYLDYPFFEHQIHWFSIFNSFMMVIFLTGLVSMILMRTLRNDYAKYAREDDDLESLERDVNEESGWKLVHGDVFRPPQSLMFLSALARGYHHNLHCVLCSYIFYFWIC

SEQ ID NO: 56650 - protein, 526 aa, Zea Mays
MTTALWQTFVGTPFWMAPEVIQNSEGYNEKADIWSLGITAIEMAKGEPPLADIHPMRVLFIIPRENPPQLDEHFSKPMKEFVSLCLKKNPAERPSAKELLKHRFIKNARKTPKLLERIRERPKFAAKSMDATQNGQTHDEEEDFGTGTIKVNRTKDTAPSLSQGTVRKSAVRDFSDRSEGTGTVRVVSRPPQIASTKDGRSDMPQSPKAPIRTADRENQWRSSGTGSEESLSLRDTQSGRGRVESSTDDNDHSVSGSGTVVLRSPRASQLYSTASNHSAKPPSRFSSYEDMSNSGTVVRTQNEDPETPRSSRSRLGIQEKTSNAPLEDSAINLAEAKAALQAGLRKGNARERPFINRHEKGSHEHRSSGVNSQEVQSEDVDTQKGHKLRQLPDGQSASRASSVASPAVSSLLLPSLKEATGDKFDRPAVHAFLDSLMDLERDIPGSCEVLVGRLLHRLGSSKDSSLQGLQETAMSIFTKEPEPPSEKAGDKKLANMPPLAAPTVSPLARFLLTRWQNQVSQDLNSV

SEQ ID NO: 56651 - protein, 186 aa, Zea Mays
MVKDKTGLTPAQLAADKNHRQIAFFLDNARRVHDRGCGANTRFGKLSKLGLAPFLWCTIIGMLITYVHSVILGQYVMTMTAPFGMFAWSGVFLATAGLVMFYKCSRKDPGYISINTRGSQNQRDDEPLLKMELENPALLFGNWSQLCITCKIVRPVRSKHCSTCDRCVEQFDHHCPWVSNCIGKDL

SEQ ID NO: 56652 - protein, 438 aa, Zea Mays
MSPSSTASYGRTDSEHGSNRSVQLKSVPASRSRFSNDPKDILCQGDTGGQVEASGQCTVSPQGPILVDKQMDPFSSQWKEKDYSGGNQIIRKECDINTKSDYEANARGESLGRKCIQKSKEGRKGGFEDEFSNGRTHGQKGRHGNTDSPEDGIVGNKYKHKADDVVISSLEDKDMSIKYEHNGSFRFEELSKRDEKCNKKDDNNILELESIARGCEQDRIKDDCGKLLHSDSRNGNTVAKNYSSVNEHTNSSSLVSSVAEVDDIQSSVGKNGDSSFFTGFLKKGLKDLSLFNQSVDSAKVYINGHPISERALRKSEKKVGPVGPGSYWYDYRAGFWGVFGQECRGIIPPFIKEFNYPMPKNCAGGSTGVFVNGRELHQKDFDLLVGRGLPRIPGKSYSVEISGSVIDDTTGTKLRGLGKLAPTFTHLESCQLMGVQVC

SEQ ID NO: 56653 - protein, 358 aa, Zea Mays
MAATAAVAGTGSSLSSRRSRSVVSSSFRAAASRFRSPRCVLGSEQLRVAHEGKRMSGAESRTAWAPKVPAPESRLAALPRELRDSRMKIFSGTANRPLAQEIAAYLGIELGKILIKRFADGEIYVQLQESVRGCDVFLIQPTCSPVNENLMELFIMIDACRRASARSITVVIPYFGYARADRKAQGREPITAKLAANLLTEAGSDRVIVCDIHSTQALGYFDIPVDHIYGQPVILDYLASKTISEDLVVVSPDVGGVVRARAFAKKLLNARLAIVDKRRQGHNMSEVMNLIGDVKGKVAILIDDMIDTAGTITSAAALLKQEGAEAVYACCTHAVFRFSSWLYRMYFWFWYFLWSHPI

SEQ ID NO: 56654 - protein, 245 aa, Zea Mays
MSFSGVDLTRLRAKKGHTAQCVCLVDASGNRTMRPCLSSAVKIQANEFRKEDFKGSKWLIVRYAQQNMEQIIEAIRIAKQEGLSVSLDLASFEMVRDSRSKLINLLETGNIDLCFANEDEAREVIGGGLESDPEEALAFLGKYCKWAVVTLASKGCMAKHGKQVVQVPAIGESNAVDTTGAGDLFASGFLYGLVKGLPLEECCMVGACSGGSVTRALGGEVRPENWQWMYKQMHARGMLLPELKN

SEQ ID NO: 56655 - protein, 788 aa, Zea Mays
MWKRLLETTKQVVSSKQAIPYAAVTPKPATPAAAPSASKRGAPVAAPKLSTLKSPSYRRRAAAGPATTVTQASLLRLKQAAASKKTNLPSSPPLNDAHALDEDDPPEALTKALMFVIDAPEEVECTTSPEALPEGSEDVGEVARGNKILDFEWFQAEPSRDPLMLWRREVAREKKKHYIFKNVESHHYTNLMRICANKLGMESTIEFLGNLGRETGVKEFNSMIKVCLGKAKACRDIDSAVEYIYRAYHLFNTMKDKGFTIEKDIYDPFLLYLMDTGMFEEFEVFSAFFKEANPKSFSRIAYYEMLLCIRVQDEEKIQELCHSVEDYDEKVHYDLAESYMLAFAESGRKEDLVALLDLVDLSKVSGSKYITNIFKSLGKLELENYVEKLLERMMSKGCADHDISSLILEYTANIPNIMVEDMLVAFHKWHEKFEVAPSIDAYDKIVSICCDSSKKNYNGAQMVMSQMQIAGVKPDSETFSYLIANCESEENISKYCDQLRQDLIPMTRNIYVALIVAYARLGNFDMAKQVLLDKEIPCKFLSDIKSALVGALALNGQVSDALRLHDEIMQSGGSLEPKAAIALIEHIRTEGELDRMHQLLDGLNDSNSWFDGCGRVLLYCVQHNYPDAAIDLLKQIREKDEMSTYMVVDQVFCQIWDMETTNLDFGMVFLDAVKELGLNVSRTSLDFLLSACVKAKDLRRAQQIWTEYESAGLPHNVLSSLRMYQAFLSSGGRKAAKKLLKKIQKEDAHVRYITYACRATYCSKDFKPSATVRLSSKGRARSKPTNEG

SEQ ID NO: 56656 - protein, 106 aa, Zea Mays
MHAHAQCTSYGLQRWRWDRDGGYHHRHHDRGRCDDGHPEPWRGHRRPQRHGDGRQHRPGTGGQHPGRRRARPAPRRRIPRRRRRRPLLARPAAALITWASCLLCGP

SEQ ID NO: 56657 - protein, 1515 aa, Zea Mays
MSSGAIGASDPGGGETKPVAGGDVTTSEAAGEVPAFAADVKVEGKATLATDVDREGGDTAVSDPLYANESAGMVGAEGHGDEPAEGLEAVNGEEEMLEAGARDLLTETEKNPVLVVHVPAAAAGGGSAIPEHAEAESNKVEDHVNVEPGTKNNESDNGIAHFDKEIQNNVPDDIEESSKEHEGDGAPVVDQTNNASEMLPQTGEQFPDVENSTDSNLEAASLGSVDQGARYCLPPHDKGGFQVADLVWGKVKSHPWWPGEIFDPSDASELALKHQKKGSHLVAYFGDNTFAWCDESQLKPFVTNYSQMEKQSSSDAFVGSVNNALEELSRRILSGMSCSCLPEELADNGMSYTVDNAGLKDGVTCSAVNRPEILNCFSPENLLHYIKELALFPGQGGDLLELVIACSQLTSFYRSKGCPELASFQTGDAWVEDGLDCTDTLSTQNVMVEEPVINEVHPTQDKPKRGRGRPRKQKPGGDQVVMEKRSISNQVNDTSYNEKQVGMDFDNYGNLQNKNKRNFESFEDSEKSSAPTGGSSFKIGECIRRAASQLTGSPSIMKAQNAAEGENGEFDIFSDDAGDELTVEKRAKRRSLHRNHTADPKELLSQLCLVATEPMNGYNFSVMIISYFSDYRNYIVSTTTEANIVDKGTSRRGRKRKEVLPSPDVETTDHMQDSYWSGLSLHNHPIHDLRKESPTTRPRRRRRSSSHAYVPLSELGEPVPKKQIQVMERSIIHVDEKMIDELKPTALVLSFARSASIPSELDLVKMFSRFGPLKEREAEVHRETNTVKVVFKKRADAERAFSAAGKYGTFGPSLRSYRLVSMPFSLETQSANNPVKHPENHGMEIPGSNQSEAPKDSMEVDLVQKTDEVEVAGEPSSEEVETVRQISQVQAADSTFVSQDRFDEAGNIDAELIDHVNQIGKAAQAASVSEESRDVEQVYTQKEVSANDLPTETEILNSDAITKELPQNAPDNVETDIVEDPKQNNAVFEAVTEAPSTAQDHTEDDTGNKVPEEHMVSLELQSQTPGDPPTETETLHSDAIVKELPHNAPDNMQTDIAEDPKQSHNPGDAVFEAVTEAPSTAQDHTEDDTGNEVPEEHMVSPELQSQTPGDLPTETETLHSDAIMKELPQIAPDNMQVDIAEHPNQSHNSGDNAVFEAVAEAPSTAHDHTEDDTGNEVPEEDMVSSELQGQTPGEKLVGQSATEQMVGSEDPKPQAENFVAEPVVLGAVGQVEIELESKTTVEVSGEQGYSIEQTVQVEALIEASGGQLEVGRQIPEDESIACATTEHSMVVDETVEAKVVLLDESIENNAAVIGVVEETAEGETKEEASDEKGKIENNEDADKLAPAGKGKIENNEIIIDAPDEKTENKADADTPAGETKEGEITVEETDEKIESKVTAEPVIGETTEGQTAAGEPVEEARTAEDMVEDVKVLDDKSTAAEKPVENATVVAHENSTTVENTLKDAIVAPPDANTTNAEKTAIGATIETQNEDAPAERTIEDTSVEAPDVQAGASE

SEQ ID NO: 56658 - protein, 117 aa, Zea Mays
MLLRIPRFFDPWGGYDMIGFGDIIFPGLLVGFSYRFDRANRKGVLSGYFLWLIVGYAVGLFITYLALFLMDGHGQPALLYLVPCTLGVIVILGWLRGELYELWNFGKSPGENFVNEP

SEQ ID NO: 56659 - protein, 148 aa, Zea Mays
MCKVSEGENAFSKIGEALDHLNSRGTGSGSSILGIRRIPPDSGQSNASYHDDCTAAPAANSSSRLPNGCDSEAQFPKELISSCVAMMLMIKNCTEKQYHPAEVAHILDSALSSVQPCSSQNIPIFREIEMCMGIIKNQMLALIPTPSG

SEQ ID NO: 56660 - protein, 82 aa, Zea Mays
MFAVGVNSSAKDLIETIKRPDAIAAGYIRQFVKLVTVDDPFITTDYMVSGGSTGSWPGSPSRNVGKIDEASELRRTVNTSKM

SEQ ID NO: 56661 - protein, 294 aa, Zea Mays
MVLAGLRRHVGQFLTSSNELMAASLSAVSCADEVQKAEGAGCRDDAAALRLKKVAMAAILVAGVLGVVLPLAGRKRRALRTDSAAFLAAKAFAAGVILATGFVHMLHDAEHALSSPCLPAAPWRRFPVPGFVAMAAALATLVLDFLATRFYEAKHRDEAARVKAAAAAALVATSSGSDEDITVVTVDEDERKAPLLQTHCHGHGHSHSHSHVHEPVQVEGSEAEVSAHVRSIVVSQILEMGIVSHSVIIGLSLGVSRSPCTIRPLVAALAFHQFFEGFALGGCIAQVRIAVNCG

SEQ ID NO: 56662 - protein, 1244 aa, Zea Mays
MRGSYRRSPYRGGYGSDFSRNHPEQPPPPPPRRSPLRSVAVPICYDSPGNRVDRGDRDNLPRVTPWRRRESRSEPADAVGLLSVGQTTRLSASGKEASAQPLSVSGPHGTEDEAPRKKARLGWGQGLAKYEKQKVQGPVDPAEAVADGSPADGELKTTSPVPVPVHPVPVPVPYVAPAPPAAPVLAPAPAPSAAPALLSAPMQCSSPVTGPPYCSSAPEDKSCEMMPNAVTNSTKDVLEADDTTFNNEFLIKLDQLGDDPVISLGNMLVELIQHEDSCSGDSNGPTSTYKLLLLKESISKEIEKTELEIDSLEGELKSVNTEAATTLEGSPTGVTHTENLSPSSGTSKVPGSVEICDTSDMIKEPGELIGSPKVPVVQYDDVKSADMMEIETAPVHNAKTVPSEAGAISPVVAEGKACAAADLSSLKASEEAGSQNDIDNGRLETSSRQANADSMKIEISDDLPVKKWTYHDHKSDLLSSVTSANSAIAKEINEVLFKSLPADTPRLDLFASSHLLSQRKSDLIVKERLGVCKTRLRLKEQMLTMKFKAYCHLWKDVQLFSANKQRSKSNKRTDQSNRTSQIGSQRQRSSNRSRLTMPAGNLSTFSTPEMSDVAMRLFSEFKIKRCRNYLKMPALIIDEKEKEWLKLMNKNGLVEDPVLVEKERVMINPWTQEEKKIFMELLAKFGKDFSKIASFITHKSTADCVEFYYKHHKSDSFREVKKLLDLRQQQPTSNFLGAKSGHKWNPESNAASLDMLGVASVVAAHGLEYAKQVEKISAKSLIRTAYGPNVTSVANKSSDKECIDHVPLHERESVAADVLAGICGTLSPDGMGSCITSSADPGQKISMKRVEHVLSQENDKTVEEEDTLSDQECEVDPVDWNDDEKSIFIEAMNNYGKDFARISSCVKSKSYEQCKVFFSKARKSLGLDLIHQGAADVSMPASDTNGGKSDTDEACAVEMDSAICSTQSCSKIAMDVCPTEGAIGGPNSVIISKQAEAYISNGCNADVKIEEDEKVADKNCSIVDAKRSSDATHEAGPIDINCPGSTDKLQGTDDVVDLVNMHSNSGISSSAKHAVAIHSEMRSTLHSVEVLQTDKGEGTGTDLSWVEECSHHALDNTPMKNGNSGAPAFLASDSGIKDNVRISNITAASTVSPAFTSSYQHSVPGDMPLPKPKPLVTPLTPKDLMPVQFSSVLPDPTAIRFEGIASITTPNFEDTGNRVSGALGAKEMSKYPAFRDPSELRVAL

SEQ ID NO: 56663 - protein, 274 aa, Zea Mays
MLLTPEESIHIQNNIGADIIMALDDVVKTTITGPRIKEAMYRTIRWIDRCIAAHKKPDVQNLFGIVQGGLDPVLRDICVRSLVERNLPGYAIGGLAGGEDKDSFWRVVAQCTAGLPENKPRYVMGVGYPLDIVVCSALGADMYDCVYPTRTARFGTALVPEGVLKLKHNSMATDERPIDHTCSCMVCKKYTRAYLHCLVTKDAMGSQLLSYHNLSFMMRLSRDLHMSILEGRFPEFVRGFLRVQFPTGDVPQWVRNAMEVAGIDISECCASTNV

SEQ ID NO: 56664 - protein, 315 aa, Zea Mays
MCMLAGEVDMTEIRHQASCKHVQEGSINQRSGKSKVQASPSENSGPNQCSSKGQPGRRNHQTDLSCGPSSKVKEQVAAAPTGSGDRQGQGRGKIEIKRIENTTNRQVTFCKRRNGLLKKAYELSVLCDAEVALVVFSSRGRLYEYANNSVKSTIERYKKANSDSSNSGTVAEVNAQYYQQESSKLRQMIHSLQNANTRNIVGDSIHTMGLRDLKQMEGKLEKAIIKIRARKNELLYAEVDYMQKREMDLQTDNMYLRSKIAESNETGQPAMHMTMGAPPTSEYDHMAPFDSRNFLQVSMPQHYSHQLQPTTLQLG

SEQ ID NO: 56665 - protein, 921 aa, Zea Mays
MYKQEAEESSHFVHKLGLYRLQCCLLMNGLVHEASEEATMNAMNDELPRIQEQVYYGHIQSHTDILEKFLSENSYKRYNPSITGKNAEKKFVSLFASYHQDSFIFNDMKYLQSPGTTDDAKPVTHLLAIDLSSKVGTKLLYEAILYLMDGSDRARVGLLLYVHTGGSSPILLLKDIFDRTISSFSYKEKVLVFLHGLLKFYDAQPLPASSVADDWTRTMMEKVYTLAAETALPVDDYKAWFKSFSADTVLKGMDKLSDFLFGQLGLVFGSNAVITNGRVFIMNEGKSFLANDLGLLESMEYDLRTKYIFEIIEEVEFASVDPDDLTNQFYSDIAMLISSSMSVRERTSERAHFEILHAEHSAIKLNNANSSIHIDAVIDPLSPTGQKLAPLLRILWKQIQPSMRIVLNPISSLADLPLKNFYRFVLPSMDDFSSTDHSVHGPKAFFANMPLSKTLTMNIDVPEPWLVESVIAIHDLDNILLENLGDVRTLQAVFELEALLLTGHCMEKDRDPPRGLQFILGTKQRPHLVDTLVMANLGYWQMKVSPGVWYLQLAPGRSADLYELPPKLIAIDSLRGKLMHIEVQKKKGKEHEDLLNAADDYHFQEKTDNKGWNKNLLKWASSLITGDASSKSKADKTTDRKDARQGETINIFSVASGHLYERFLKIMILSVLKKTQRPVKFWFIKNYLSPQFKDVIPHMAREYEFEYELVTYKWPTWLHKQKEKQRIIWAYKILFLDVIFPLSLRKVIFVDADQIVRADMGELYDMNLKGRPLAYTPFCDNNKDMDGFRFWKQGFWKDHLRGRPYHISALYVVDLAKFRQTASGDTLRVFYEQLSKDPNSLSNLDQDLPNYAQHTVPIFSLPQEWLWCESWCGNATKARAKTIDLCNNPMTKEPKLQVKLCTSGFFFCLDLLNLYCLFPGC

SEQ ID NO: 56666 - protein, 227 aa, Zea Mays
MVHLFAALPAVDGERVEVKRIHNCRRLSHECLTFISVKGIYYQAEVQGQKITWLTPHALQQVLTDDVDFNVMLSFLEFYETLLGFVNFKIYHSINVNYPPILDPRLEALAVELYALCRYMSAGSRRMIGNSQTDEVMEDKDEKSKAEEVIEEEKVVKNKASSKADESEFRLAQLQHQLPTNEPGALMNLVEESTADDADDDDTKDCKGLFKNLKFYLSREVGSPCYL

SEQ ID NO: 56667 - protein, 1485 aa, Zea Mays
MLAKSATCADKAVVRKRLVSSNNTHAKVESGTCNVCYAPCSSCLHPHIRVVDSNVECASSQTCSTRSEVKNNSLVRNEKGLCSKGENDDEFSATSGHVSDSVVARASIADDSSEVNMPSKRRRLLNENTRLPRAEYLEDSNSCVTGISAEGKLHVDKKKLSTSASSRDLTAKDYKVNSMANHSKLRNQCIDESKKGSDGRDMHPSSSGRFSPVDSSVMTKKMLRTQSSVSALSRLSPNRQAHEFGKALDNLSHQPCEKASLLKNNEQLRCGQLNPCIAGENNHGTLAGYSNRHADKDVFSLKDLDNGTLCSKDEIQEHGGIHSNDDVKKNVCGEQALDQDCSRDISSDRKLNIQHDVTDCGNSEGLIDVNVCDICGDVGREYLLATCTRCLEGAEHIYCMRVKLEKVPVGEWFCEECQLKEDQNNTSNYGISVVNVTEGKNQRTESRSKPKTLQIVVPDFDALEVTHSALTADRCDGNSKRLHLASTDTQTRQLKDTTPAAQRLDVKNKKSLSVTNRNKLQVLTSDLDTRPHNYGTSTSGVYTNKSQSSEFLLNHKKLRVSTDMQSPLSSEGLRSPPISCKRHAESMSSPKPRIVKAGTLGKQDVISRANSFKKSNKGGLSSVDNIPVRTTQAVKSSDSQTLSRSYSLGNMVNAKAPVPSPRGFLSKQLSFNSTNNGPKVKQLADGVSSKLRPAEHSPRDPRDKKSIKKIVQSGSFKHEGSDSIVAGSSKKKQTFHLSQDEKPGVLKVIKENNLTERRASFSLKKRNIPSSPRPDSCMKSGERKNDQDISRSGTSILKSSKKPGYAEKKQNNDLSRSDNGKEDVTVHPKTMEVSGKDAYVVKTSDPPVQPQCAKKDRPNDVEDDDLLISVNNVNIAPNEHAEVVPTTFAAMTYESDLQDVPRESTSDDSAPKVVCCQQKLLENTGDDSGKIVEVVQDSGDILSVTPHGLQMAHNLYPPDNKLHKPDLKKEAFADQSSALGNCLKDFVIPEQSYIWQGGFEVSGHGNSPEMFDGFQAYLSTCASSKVREVGEQLPDKIQLAEVPRHSSWPLQFNEVNPTEDNIALFFFAKDVESYERAYGKLLDNMLLGDLSLKANIGGTELLIFPSDKLPERIQRWNGLPFFWGIFYARKASSPLELPTNNCPLEQINEPVIQHDIGSPKAHQPLGIDLNECPNDYISDLSLSLGSESEKSGASLDRNIVLESKREDRSLNASEIHHEETAGTRQIIPGHPSVASCGTNLPTISTGGHDMIQDYLAAAKGSTGTPGGNKMEKTDQNETLFRFSQQLGATRSISHEIELNKHGLLPSHCHLSGSKICDDQTKSTPNSDMGPLDFDITNKRQKTYGKHSCIFGDAMTPMKCLSKIHPLPAGQDNPCDVLQHCHRGPSDPASLKKPLPDHFIHVLSSDDEDSPEPSTSLNKASSKADEGSSILCSLSLSMVATKRNLSGSDIVDDEPLSLSLGLPSVVGGRADQEMKQFLPEKPGINT

SEQ ID NO: 56668 - protein, 122 aa, Zea Mays
MKILVAVKRVVDYAVKVRVRPDRTGVETANVKMSMNPFCEIAVEEALRLREAGAAAEVVAATVGPAQSAETLRTALANGADRAIHVLHDPDPARPLLPLTVAKILRAVALQEKPGLVILGKQ

SEQ ID NO: 56669 - protein, 60 aa, Zea Mays
MEALAAEPRIEEKESKTRIEAVAQVLASSKFIQIVGLVAAKKRSNNVGDVTRVQAAMLVL

SEQ ID NO: 56670 - protein, 1061 aa, Zea Mays
MGKNEKAKRKNPRKAHERDLPASSSEVGPGDAASQDASHSAEEAAASANGREHCGHYGRDNAHLDKVLLEILSSKHVASCEHCREDAPRKKGGAGSREKGGKQKKKGGASKGATAKAQAKADTSHTWVCLDCGRHFCGGAADDTKPYGHARRHAKQDRHWWAARYDDPTVAYCLSCEKEVSVEMPKLETVVAPAVEDKVAGAADTDLCGLVNPDANVIKGLPNLGNTCFFNAVLQSILAVDRLRRKMLGPDVPTGALAMSLKKLFAETSASNHAGGMLSPKNLFSSICSKYPQFRGYQMQDSHELLRCFLDGLRMEETEARKLAEEASDAGVPTIVDSIFGGQLSSTVSSTECSHSSVKHDQFLDLSLPVPSRRPPTKSVSSPPVKRTKQSIRDRNKNRRYGKVPARASPSVESNKEQVHSIAERNSQIPGSELEQVVSEKDAEPSGCSESCGSVPNQEQNATTNVENSICWLDYVADADETKSEILDSADSTETGQIWECRDAAHGPLHPQDDALPKEQILGSEHSGENTVDDDASLQTVILLPYKEFGTTAKERDEAIENPYNSECTVPPLVVSPVRENNTQPEYCGDVEQDDYVGLGDMFNEPEVTSEVKKEAGKVEDIDVMAWSSNSADDEVDDSNAPVSVEGCLAVYTEPELLSEPWLCEHCTNAARINSNERENVMEMKDRANEIKDGEEMMADGDGKKDGEKLIVSCSKQVDIDQVMGTDGCKKHIDQIMATGDCSDNMHSDMHCKEGGCVNPSSADPEQKCDGNFPDIENTSMQRTDVVFTMNETEQSSSQTSHKEQCMDLKSLEPESSSLNNQQHDSSVQYNDCHNVDITVKGASAPLSCGDSVSCNATNNVEAQPVGGAEEVVSSSLPSDAQKTLLGAKDNEDAITKNQGRRKRMKMVGKAQLVQGNQNKQKEDETKVFRAALRRILISKSPPVLTINLNRFSQDSHGRYKKLKGHVRFNEMLDIQPFMDPRCKVNNSSTYRLVGVVEHLGTMTSGHYIAYARACKIGGRQQQSSGSKSWFYASDGQVREASLEEVLNCEAYILFYERVGD

SEQ ID NO: 56671 - protein, 210 aa, Zea Mays
MHRDLKPENILLDADGHAMLTDFGVAKEFDENTRSNSMCGTVEYMAPEIVQGRGHDKAADWWSVGVLLFEMLTGKPPFVGGNRDKIQQKIVKEKIKLPTYLSSEVHSMLKGLLHKEAGRRLGSGPGGSDEIKNHKWFKSVNWKRLEARQIEPSFRPNVAGKTCIANFDECWTNMPVLDSPVASPVAANSNFVGFSYVRPAPFLQKPSPLG

SEQ ID NO: 56672 - protein, 143 aa, Zea Mays
MQLIHEHLLGSGFTATAAMLQKEAGLAPLPLIAAVLPAHQVAALEASSVQQQWPSGRVQGFLSDKINMSTDQSAHRSDSIPPSSKKKALTFSSSFSRRAQTPHSVSGSRTSNILKSPVPIAADTRDAEMLNKTPLSLPLKRKL

SEQ ID NO: 56673 - protein, 382 aa, Zea Mays
MFVPVKLSDVRKEVQCPICLGIIRKTRTVMECLHRFCRECIDKSMRLGNNECPACRTHCASRRSLRDDPNYDALIAALYPDIDKYEEEELAFNEEENDRNKQIQASIAEAFRKQSEVIGRKSTAKATAAAFVRRSRRNIRPNGQNTYFRGRGKASSDDVALACSEDEEDGNGESCSKEASSAEESSPEKKQKRLPKWPTPRSSPARACNDEVASDEKDDVGISRENFSTSPLRAWGKNGTRSQTRHSSFSGSNGRMVKGGRMIKLVECLRNSDDNEGERDVHLCLLPLDGQTAPNLEKSYLCCGPTLSIKQLCQFVASQTSHKDEEVEMYALKPSCSKPVSTNTCGPDKARLAGEERLSDLRSSFTFPNGVLELVYAIKVAN

SEQ ID NO: 56674 - protein, 513 aa, Zea Mays
MSEFLDLELQDGIRMPWNVIPGTKQETVNCVIPVSAIYTPLKPISDIPVLPYSPLRCRMCRSILNPFSIVDYVAKIWVCSFCFQRNQFPQHYSSISENNLPAELFPQYTTVEYISSTETGPIVPPVFIFVVDTCMIEEEIGYLKSALAQAVELLPDNSLVGFITFGTYVQVHELGFGLLPKSYVFKGTKEVTKEQILEQMCFFAGKKMPTTGVIAGTRDGLSSESISRFLLPASECEFVLNSVIEEIQKDPWPVPADQRASRCTGAALSVAANLLGVCVPGSGARIMAFVGGPSTEGPGPIVSKSLSEPIRSHKDLDKDSAPLYDKAVKFYDQIAKQLVHQGHVLDLFACAVDQVGVAEMKVAIEKTGGIVVLAESFGHSVFKDSLLRIFQSTDDNLGLSFNGILEINCSKDVKVQGIIGPCSSLEKKSPLSSDTVIGQGNTSAWKMCGLDRKTSLCLVYDIAKKDGPDSIAQSANNQFYFQFLTYYQHNEGQMRLRSTTISRRWVSGDNHVE

SEQ ID NO: 56675 - protein, 294 aa, Zea Mays
MSLPAISMYTSPPGAVYSSEFDPASRGSSPCTTAAPPPPAASYRLPSGGGGLSCLFSSPAAAAAPPRAPAHDDLGALWHNRSDDLSVPADGGGYSYSHSHSSSQLKRRDLHHHHHSPVSVFQGPSTSSPSRSPPASWLAARDRDRLFAGFVRNALGSCVDYAPPTSPRPEVGASELAFELDENLAEASPACEPYAQELLASAQDRHRIFHEELVVKAFLEAEKAHRGQTRASGDPYLQHCVETAVLLAKVGANATVVSAGLLHDTIDDSFIDYDHIFHMFGAGVADLVEGLHCP

SEQ ID NO: 56676 - protein, 413 aa, Zea Mays
MLRRGVLLLAAILIAVAHSPLAYASEAEHKYKTEEPVKLWVNKIHWFSIFNSFMMVIFLTGLVSMILMRTLRNDYAKYAREDDDLESLERDVNEESGWKLVHGDVFRPPRGQVFLSALVGIGTQLAALILLVIVLAIVVMLYVGRGAIITTFIVCYALTSFISGYVSGGLYSRNGGKNWIKAMILTASLFPFLCFSIGLLLNTIAIFYRSLAAIPFGTMVVMFILWAFISFPLVLLGTVVGRNWSGAPNNPCRVKTIPRPIPEKKWYLTPSVISLMGGLLPFGSIFIEMYFVFTSFWNYKVYYVYGFMLLVFVILIIVTICVTIVGTYFLLNAENYHWQWTSFFSAASTALYVYLYSIYYYHVKTKMSGFFQTSFYFGYTLMFCLGLGILCGAVGYLGSTLFVRRIYRNIKCD

SEQ ID NO: 56677 - protein, 461 aa, Zea Mays
MEPPPDLNTHLPPRKRLLAGLRTAATAAEPLPPPPAHADLAARLREMALAANASASSPEETIEAARAAAQAAADAAVAARAVAAEKAAVAAKARAAARAAMEFIDSFSTRAGASRNGSGLQFKIRSRKKHVQVKMLYRPNGTLGPAEAPKPRRRKQSDEEVPHNLHRLMNSSPRISHAGLPKRPRTTAAGDAKNGAVAPGGGNGAGVCNGSSVQNSVFDYSVPSTPMQKSLFDSVPGTPVQRSVFDSVPSTPMQRSVFDSVPSTPTQKPFFDSFPSTPMQRSLFDSGPSRAESPTASSMYGKEQKGFFDSSVPSTPMYNSSFTPRYSEAGDDSFDTMSQYSSFGMHESNSFGQRDSLSRFDSFSSNADNGGNDTFARFDSFRSTSDQGGGNSFMRYDSMNSSSDHDGIGTFARFDSMKSSNYNSRGYSFDDEDPFGTGPFKSTETTSHSPTKHGTDTWSAF

SEQ ID NO: 56678 - protein, 254 aa, Zea Mays
MPQRSEAGTAGEGDEEQRLRAALRHLQAEAGVLERLVYKHRNQHRGAAYFQYLLKVRRDLKLLLGAGLAEVLNAVFPVLACRKPANTILVPNKQSKKKPVANHSHHQRLLGVARLLSQMSEPVMKAAIQITFLLARSFFVDLCTAVLSLLARVRVLIQQMLLDVVSIYNKVTDLTERKQAVKISISGVQAFREYYPSMNDACTVLECVWIKDKFVLHEKVKDISQETQVENQKCCGPESTVQYETIALISEDST

SEQ ID NO: 56679 - protein, 115 aa, Zea Mays
MLLCGLPNLKTVRSNSQTLRSQTDVDARYCDVDASSNVYIGVHRDQSQVHLAIDSIYSSQPKPRVGVTASHIWLEKLMLAVVFECARSSQGPGKTLKSVWTQGIGCLLFCNVWRQ

SEQ ID NO: 56680 - protein, 1006 aa, Zea Mays
MQAYDLIEVYCELIVARLSIIDSQKTCPIDLKEAVASVIFASMRCSDVTELADVRKHFKSKYGKEFEAAALEVRPDSGVNRLIIEKLSAGAPDVQTKIKTLSSIAEEHNIKWEPKAFEEKLQQPTEGHLYGSATYSGGNTSTMGSSTSSISTPQPTYSGVSAAPVDSATIHVPANKTAYGSANSNTFSKESIHNSSSASVPPISQHGPSAYSSAQVPGSNNISHGNPGGPPYPQYSATVPDAVSRNEDSNQNRERKPLVTGANWNVEFKDATSAAQAAAESAEMASIAARAAAELASRGNYSGDKGTGAYDSAAYSSKNTVRKQRAEHVVKDESFHDQSSGVNDPSEMPSNSRNFFGGTETSHVDSENISTAPYQQFHAYNPDSHPYVYEMPTEPPRAHSPDPRFDDLYERESDIGRSEVDPFDFPRENFQDTASVGHNFKDVEIRTPSYDQESTDDYYGNFNSSHDTLAHGSSTTAWDKQNDKAQDNSSPVVFDQYDSDVEQENLLDTFSSKHTEQLPAPGDHMRFSTADWSEQHTSESPSKQRTSALFSRTETQLSDNLGTNKSDIPSPHSYHNMRPAFDSDGGSSDEEIATTTHAVPLRSHSGGSASSVLNKGGGPDASPIFDYSGAHAVRNLNRVQSRDSDLSEEETDLDKFKGSSFARANEQQLLPSAIRTSATSDDKEDDISLNFGKLTPGLRNKPRQPPPYTKVSRESILPKQSLPKVSAGTEESVDSEENTTFKQDRSSPQSSFSARTSSGKDYDSGLYERNRSVGTHWEAKSTIARNSSGLDDAEKLSDLPTNISLPTTKSSERWNSSKVPYHEKPGIGTRREVRSTLARNYFDSDDSEEELEQQQIPQSKQSGVLIQSRRTREVTSDTKRDGRFQTGAQYGDETESVTSKTQVHQGFNSSSTERSERRDPSVYPRVAVQRSSSKAEQIESPMERGKPQGAEMRSTLFRGNEEDTETSSGTPKESTPKTPPAHVHPKLPTDYDSFAAHFRSLRTNRP

SEQ ID NO: 56681 - protein, 440 aa, Zea Mays
MDAKDILGLPKTPFSSSQEKKSRPPKEPQRKPDGVSREVYALTGGVGMPPLMPTIEASHLKRRPAAEKEKVAWQWLPFTSSARTDNLQLYHWVRVVNGIQPTGDYQFAKYNKRADVLKYTDEEYEKYLVDPDWSKEETDQLFELCERFDLRFIIIADKFPTARSVEDLKSPYYSASRALLIHRARSFEDVSGNPLVKDAYDAAHETERKRALSALLSQTKQQERKDAETLAEAKRIMESRAASKNVDVAVMPPNSDNAMVPVDGVSPSSSTHPSLAHPNTSANILIPNSLRTLRVYLRTHALDQMVQAVGASAGLRVIKRVDQTLQELAVNLKPKVPTKAVCIEHIELRNELLTLLNLQKQLQNKEAEVSANRESSFTEAPSTPKRSNRDIDRPFIPDTSGFTGERAGKRDHKRKSTGRFIDAPPSPPQSKRPRKLKGSD

SEQ ID NO: 56682 - protein, 283 aa, Zea Mays
MDLSQALTSSSDDETRALGTLLDMFSSSFSLDDIADAYIKANGDVNKAGDFLYDLQHSLPHTKDVESSVEANLSHTDKAVEENCMDNSSQPRTLLRTEQAVEENHFENSDHTKMPENLHKSSAAFGTVSSMLRKESIRATTTASRASKKGKPLRVELPEYMRDDFKVTSDESDSAPRRETLNNRDVEEFLFCMLGEGFKLSKELIHEVLGSCGYDIKKAADAFREGNQKEVDYLIQEGKRYYQMARLADEKSAREIIKPRETESKNEFCLDLRKQDAGNLLIT

SEQ ID NO: 56683 - protein, 131 aa, Zea Mays
MPLQPLEDENDTVISFLYPLEPPIVDEFDWEMDDYEDFADQKVQEGGLPEDEKEKFKEFLKEKVRERKRELKQAKEARRKAIDDMDPKVKEAFENIKFYKFYPVKTPDTPDVNNVKARYINRYYRNAHYLM

SEQ ID NO: 56684 - protein, 56 aa, Zea Mays
MVLGGIGSEKKACGRKLPVKVATPRNRMYYRLQQWYSLVDAVVFVWSVACCLLARV

SEQ ID NO: 56685 - protein, 64 aa, Zea Mays
MSKSGRRSSLKLDSKTTKFYPSSVTYQSSSRSILECFVNKDLHNKLKTMKVLIVYYDFLFVLYT

SEQ ID NO: 56686 - protein, 1805 aa, Zea Mays
MDDSELHEEENPTNSAVDDDDDEDYEEPGGGNHLLGFMFGNVDDSGDLDADYLDEDAKEHLFALADKLGPSLKDIDLMKSSPAPTDPSEQDYDEKAEDAVDYEDIDEEYDGPEVEATTEEDNVLSKKDYFSSSTVYASVNSTVSVFDDENYDEEEEPPNDNEPPGDSAAQNLSSVSIEQADTTTSSDNLAMEKIGLLSHPEENMDFEYEDLENEKGTGEGQLEPESATSLPVLCIEDGNAILRFSEIFGIQEPVRKVKTDHHKRPVDKELQIANVADNVEEDEELILRSTMQNFSTLKHIHVNEDFVESDSDESISDVTLRLKDSCLSEQPMKDVHMDIRIVQRSPTCPDFYPLEHYDWESDIIWNNSPATDQQAYAKICESEESEDTHGEDQGKDYGQASRCWDVQSKTNGSPVIKETFCCTEMPAPANYCPPGKSYPPLTNEDNLDHIMPNNLDDAVKIDTMVRLNNLSVLNRELLEGSWLDNIIWDPNEVTPKPKLIFDLKDDHMLFEILDEKNVDHLQSHARAMIVSQSTKTSTPTVDNFGDQPKPLSGRFNISNDKFYSNRKTPQQAKSHTKKRALMGIKVVHSAPAHKLQTMKPVLSNKEIANFHRPRAKWYPHENKIASQLQGPACSHGRMAVLLMSLGGKGVKILVNAEDTPVSVKLKASKKFELKPSEKIKLFCSGKELQDDISLAMQNVRPNSIVHAVRTEVYLWPKAQKLPGEDKPLRPPGAFRKKTDLSIKDGHVFLMEYCEERPLLLSNAGMGARLCTYYQKTTPTDQTAASLRNNSDGLGTVLAIDPADKSPFLGEIHSGSHQSCLETNMYRSPVFPHKVAPTDYLLVRSAKGALSLRRIDKLYVVGQQEPHMEVFSPGTKNMQNYLLNRVLAYVYREFRARERPDAIPQIRADELPIQSPLTEAIVKKRLKHCADLKKGPKGHFFWTQRPDFRVPSEEELRRLLTPESVCCYESMQAGLYRLKRLGILKLTQPVGLASAMNQLPDEAIELAAASHIERELQITSWNLTSNFVACTNQDRENIERLEITGVGDPSGRGLGFSYVRVAPKAPASNSVLKKKSAAAKGTTVTGTDADLRRLSMDAARELLLKFGVPEEQIDKLTRWHRIAMVRKLSSEQAASGITIDEIPVSKFARGQRMSFLQLQQQTREKCQEIWDRQVQSLSALDGDDNASDTEAHSDLDSFAGDLENLLDAEEFDDEDTSTADLRIDKADGMRGLKMRRCSTQAQINKEIEDDETEASLAKKLLEDDGNDVKRKKQPVELTNCGTSLVANKMKQSKTGQTIKSSGYAGALTPKENTPREGKEVENSFVEGGLSSKLKPKMALDVNETVLVKKKSVPGKDGPKEKKQGARGDSLVCGACSQVGHMRTNKLCPKYREDPEMSEMDANSVKPNSMDINHLQAKTPKRLITKVSSEVTETEGPEGIEKTKSVPVKFKVGAPDKSLERNMSVSVSLVSDKRVMDVTDSRSTGKVNKIVIPNKMKSDDFPPDTPKPSVVFRPPAEEKDVPRKKITIKQPKGIDQQRHVESRSVQEPTRKTRKIVELSSFEDKSREDDHWVGGEPSQVNSSHGRRLGLEGKISKATMENERSWRDFEERREMPQARLFDATIYASREEDHLKAKKKNKKKKKHEFKDDDLLDHRPYRNDRRVPERHRALKRSSPAPVVGYASSAKRRRGGEVELSNILEKVVDHLRGLSGSLLFLKPVTKKEASDYLDIIRYPMDLGTIRDKVRKMVYRNRDEFRHDVAQIQLNAHIYNDTRYPHIPPLADELMEVCDHLLYENADLLTEAEDAIE

SEQ ID NO: 56687 - protein, 2760 aa, Zea Mays
MAEDAHELFDSSPPREEGSDEQLAAVPLGDEAGDATGTGAPPTVMISSRAAVAAAELLPYLPEDDEPSPRTRTALGLHAALRACTRNRAMCSSAGLLAALLASAEKLFVEMDQGSRWDGTPLLQCIQMLGGHSLSVKDLHSWLDLVRKSLGTSWATPLMLALEKAMGSMEAKGPAVTFEFDGESSGLLGPGDSRWPFLNGYGFATWIYIESFSDTLSTATAAAAIAAAAAATSGKSSAMSAAAAASALAGEGTTHMPRLFSFLSSDNQGVEAYFHGQFLVVESVGGRGKKASLHFTYAFKPQCWYFVGLEHTNKHSLLGKDDSELSLYVDGSLYESRPFEFPRISKPLAFCCIGTNPPPTIAGLQRRRRQCPLFAEMGPVYIFKEPIGPDRMRRLASRGGDTLPSFGNGAGLPWKATNDQVKSMAEESFSLNNGIGGSLHLLYHPSLLTGRFCPDASPSGSSGTHRRPAEVLGLVHVSPRVRPSESLWALAYGGPMALLPLTIGNVHVDSLEPAPGDLPSSLATISLSAPVFRIISQAIQHPGNNEELCRTFAPELLSRVLHYVLQALPKLESGEEVLTDEELVAAIVSLCQSQRNNHELKVQLFSSLLLDLNLWSSCNYGLQKELLSSLADMVFTESACMRDAKAMQMLLDGCRRCYWVIQEPDSIDNFAFTGTKRSLGEVNALVDELLVVIELLLGAASSTAAADDVRCLIGFIVDCPQPNQVARVLHLIYRLNVQPNISRANLFSQSFITSGGVEALLVLLQREAKVGNKNILDHSSASENNVPKDGSSNRKADSADTSCQVDENQSAERHETVFHEEAIEHEATNAKDMLDSNIGSKVPGSENGLLKNLGGISFSITSDNVRNNVYNVDKGDGIVVGIIHILGALIGSGHLKFDSGAGSANIPGGSQTTLNEEGNTMSEDRVSLLLFALQKAFQAAPRRLMTANVYMALISAVINVSSADESLNLYDSGHRFEHIQLLLVLLRSLPYASRAFQARAIQDILFLACSHLDNRTTMTSISEWPEWILEVLISNHEMDTKKNADGVSIGEIEDLIHNFLIIMLEHSMRQKDGWKDVEATIHCAEWLSIVGGSSTGDQRIRREESLPIFKRRLLGDLLDFSARELQVQQTEVIAAAAAGVAAEGLSPEEAKIQAENAAHLSVALAENAIVILMLVEDHLRSQAQHFCTSLTGDSITSSTSMTSLAASRSNSLSTAGKEPMAAGVSRRASLSSDAGGLPLDLLTSMADSNGQISAAVMERLTAATAAEPYDSVKHAFVSYGSCITDLGESWKYRSRLWYGVGIPPKSDIFGGGGSGWESWRSILEKDSNGIWIEFPLVKKSVAVLQALLLDESGLGGGLGIGGGSGPGMGVMTALYQLLDSDQPFLCMLRMVLVSMREDDNGEGDAFTKDVSIKDVVSEGMGHQAGSVMPFDGNSYSSPRKPRSALLWSVLGPILNMPITESKRQRVLVASSILYSEVWHAIGRDRKPLRKQYIELILPPFVAILRRWRPLLAGIHELTSSDGQNPLIADDRALAADALPVEASLLMISPGWAAAFASPPVAMALAMMAAGASGTETRTPPRNTLNRRDKALPERKAAAKLQTFSSFQMPMETASNKPGSTLKDKAAAKAAALAAARDLERTAKIGSRRGLSAVAMATSGQRRSSGDIERAKRWNTSEAMSAAWVECLQSDDSKSVVGRDFSALSYKYVAVLVSCLALARNLQRAEMERQTLVDVLIRHRASTGLRAWRHLLHCLTEMGRLYGPFEHLCTPDRVFWKLDFTESSSRMRRFVKRNYKGCDHLGAAADYEDRKLLNTSAQSNEHNSEDANSSLTSTLPSSASVIMADAMSMNDRNVENEQLETDTTRSSVDDDQLQHSSAADQQSVKGSIGSRTSDICADRNLVRSTVLAPSYVPSEADERIIVELPSLMVRPLKVVRGTFQVTSKRINFIIDERSNDSNIDDAASTSGQCDQQDKDRSWLVSSLYQIYSRRYLLRRSALELFMVDRSNFFFDFADIDARKNAYRAIVHTKPPNLNDIFLATQRAEQILKRTQLMERWANWEINNFEYLMELNTLAGRSYNDITQYPVFPWVVADYKSRVLNLDDPLSYRDLSKPIGALNPERLKKFQERYSTFEDPIIPKFHYGSHYSSAGTVLYYLFRVEPFTTLSIQLQDGKFDHADRMFSDLSGTWDSVLEDMSDVKELVPEMFYLPEVFTNINGIDFGTTQLGGKLDSVELPPWAENHVDFVHKHRKALESEHVSAHLHEWIDLIFGYKQRGKEAIMANNVFFYITYEGTVDIDKITNPVDRRATQDQIAYFGQTPSQLLTVPHMKRKPLAEVLQLQTIFRNPSELKSYVLPHSDRCNVPASAMLVSNDSIVVVDVNAPAAHVALHQWQANTPDGQGTPFLFHHGRNSTNSTSGALMRIFKGSAGSAEDYGFPRAIAFAASAIRSSAVVAVTCDKEIITGGHVDGSLKLISLDGAKTIETASGHIAPVTCLALSPDSNYLVTGSRDTTVILWRIHQTGSSHKKNAQEPPPTTPTTPRSPLSGSTSTMSSLSETKRRRVEGPMHVMRGHLGEVTCCSVSPDLGLVASSSNATGILLHSLRTGRLIRRLDVDEAHAICLSSQGIILVWNGTKKTLSTFTVNGLPIANSVLLPFSGQVSCIEISTDGHFALFGTSLFNNYKCDNSTETGDHELGPNGTDDVSKNSEQSVHAPSICFVDLHTLKVFHTLKLAKGQDITAIALNKENTNLLVSTADNFFYSLY

SEQ ID NO: 56688 - protein, 823 aa, Zea Mays
MDDFQGLLARDFGLRPQGKAAPMSAARSSSPSGSAWTNTRSAVGSAAPSAPSYDELFGSAPPPPPKATPSLDNIFNSFKEPASTAPPPKPKHSSAPVFDKPVYDDDIFIGVPGVKSSSVPYDDVFGGSQSREAPPAFDDLLGGFGKSSQVREEVDDKRKPEAPTAVAATGFDYLIPSFGGRSSPRQRDAIGAKQKKVSMSTSKQSASLSDPFVVLETTSSSAHPFADPLDESGKAAKYQGKNRESTSVGSSLFEDSSTFNQAPKFEPFFTPEVDNGSKDRNESSRAQNSNPVQDFSKRNSSQQPSVEDFENIFPKSQSARYSDVHVDIGSEKYSGNGINDQSPRSDESEDEIWLTASEIPLFTQPTSAPPPSRPPPPLAVKQKHGSRSTRKDEHLRRSRKNNDHQRSFSNQAGVSTVDGLEDFTMGKSQNVHTFNEEEFERSTAAAAMKEAMDKAEAKFKHAKEVRERERDAKLRNREQQERDNVIRSYAQDREDKERNERLEQEREMKQKEEKEREQRRLEEERELERHRERERARQAVERATKEARERAASEARAKAEREARKRSERAAVQRAQQEARERAAADAKDRAERATAEANERAATEAKEKAASQARDRAAAEKAAVERAQQEVRKRAERAAVERAAAEARERQAAAAAAAREKTSKPDDLESLFGMGARANSAPKQRAPTVDSMFDSQTQNRGTSTSTSMKKASSTANVADDLSALFGGAPTSSNEFQEVDGESEERRRARLERHQRTRERAAKALAEKNERDMQQQRDQAERHRLAETLDFEIKRWAAGKEGSLARMWMATCIPYRFDHCCCC

SEQ ID NO: 56689 - protein, 54 aa, Zea Mays
MLKGLNRVSWERVDVSFKKSRQRIFAHSTIQVKTYFLNSDGADVINHMIDHFVY

SEQ ID NO: 56690 - protein, 69 aa, Zea Mays
MEWFHGHDLHLHTSFIYIAHVQFVGDHKHMGSPSYLTLDWFPLTRPVCCSFLQFRQALGLLVRARGKAR

SEQ ID NO: 56691 - protein, 252 aa, Zea Mays
MSLQYVAPPVRALAVLPAPGPPRRRTSHVSLYLPSRRPGLAVAPVRAAESSSPPTVPASAAGKAVVPDDEFSLAKVSFGVIGLGLGLSLLSYGFGSYFNLLPGSEWSALLLTYGFPLTIIGMALKYAELKPVPCITYADAFALREKCATPILKQVRSDVTRFRYGDEQHLDEALQRIFQYGLGGGIPRRNAPILQKIREEVTDDGKYSLVLVFEAKALELSDFEKRQTMSWPIPEHDHGEGDKMLAAGVAAE

SEQ ID NO: 56692 - protein, 61 aa, Zea Mays
MVARPRAWPVHLPAFARLDSSFSAISIAPCSPRPPRYPPPVLVKLTVDASSTSSCCRTPCS

SEQ ID NO: 56693 - protein, 651 aa, Zea Mays
MNFLYRTTQPAATELPRISEQDHRNALQKTTSTLEGLIADDSHHQPSSAHIEDGAANNGSRDISGDSSSVDLKSPVPLGTHADVMEDEGWITIPCKALPESWNDISEMVQLQALDRSFLFPGEQVPILACLSASKQDVQVISPFRIAAVMSKNGTSMQNFTNKSSPVSANGHDNGAAGESGYQDVEPNGEASPSGHDILETQSLLQMEDHKQQIEHVLRRFRESNFFVRIAESVEPLWSKKSVTSTTMADERSDNQGNSKSSRSNVYNTISDKGVFDGNTSGGVARDVVKCYSLQNGDIVVVLQVNVSVNKLEDPVLEVLQFEKTSSVQTPNNIRPPPISESQEFMPEKPAKTPDIINDGQLSFRGVPLEPERYSNIAPTHAKDIVVFIDAITIVFEEASKGGAPLSLPIASIEVGHGHSLPNLALRRGEEHSFILKPATMSSRERKTNSHAPLALSLPTMTGATLNTHTPKAGEPYADLSDQYAVLILTLEATNMTSENLTLTVLAPEASGSSSVVSLNSSPTTPNGSFDGVNESSKRSGLGKDGIGFRRLNSVLATPKEGDNGGNRMSNASGCTHLWLQSAVPLGCVPARSSTTVKLELLPLSDGIITLDTLQITAREKGLAYIPEHSLEIHATSVLEAESQIMARIER

SEQ ID NO: 56694 - protein, 70 aa, Zea Mays
MAGTSMEAALLLNLLKGFLVVLVVHVITTEEDLHQEQAVVLTVELMVTGQETVRLVTGRTNATVVAKGAI

SEQ ID NO: 56695 - protein, 683 aa, Zea Mays
MGKYAAGGELKPPTTACSRGSGKHPQLMPSTPRWAVANGAGVILSVCDEEVARYETANLTAAAVPALLLPPPTTPLDEHLVAGLPPLEPYARLFHRYYAIATPSATQRLLFGLLEAPPSWAPDALDAAVQLVELLRAAEDYASGMRLPKNWMHLHFLRAIGTAMSMRAGIAADTAAALLFRILSQPTLLFPPLRHAEGVEVHHEPLGGYVSSYKKQLEVPASEATIDATAQGIASLLCAHGPDVEWRICTIWEAAYGLLPLSSSAVDLPEIVVAAPLQPPTLSWSLYLPLLKVFEYLPRGSPSEACLMRIFVATVEAILRRTFPSETSEQSRKPRSQSKNLAVAELHTMIHSLFVESCASMDLASRLLFVVLTVCVSHQALPGGSKRPTGSDNHSHEEATEHSRLTNGRSRCKKRQGPVATFDSYVLAAVCALSCELQLFPFITKNGSHSNLKDSMKIIISGKNNGMNNELHNSISSAILHTRRILGILEAVFSLKPSSVGTSWSYSSNEIVAAAMVAAHVSELFRRSRPCLNALSALMRCKWDAEISTRASSLYHLIDLHGKTVSSIVNKAEPLEAHLTLTPVKRDNQHHREESNTSSLDSVKLENKNGSTSHKKNGFSRPLLKCAEEVLLNGDVASTSGKSIASLQVEASDLANFLTMDRNGGYRDVCRKYISSPRMEEGC

SEQ ID NO: 56696 - protein, 194 aa, Zea Mays
MSKNGPFSSCMLRGFSGKYTYNGQQFDATARPEGALYDKCRGEIAKAMNLKAPCKTAKNCTFCGVWKGGGGAGQNDIYVASGFYYLASHVGFIDSKAPSAKAPPAAFRAAAKKACKFDVNRAKVAYPDVSNSDVPYLCMDLTYTYTLLVDGFGLQPMKKITFVSKVKHGEYYIEATWPLGTAIEAVSPTRQIGN

SEQ ID NO: 56697 - protein, 130 aa, Zea Mays
MAFGHTCGRNYVRIQASCSGRKALRSLDAKKAAAAADGMLAQRNVEAELFRGRRVSEKSNREKLDAFAAELVKEQQRRARSPGLPTVVIRQARPTATATPRLSSATTASSATVRTASTVPSPASQGSYQH

SEQ ID NO: 56698 - protein, 572 aa, Zea Mays
MCAWCRSDSNDFVELLWENGQAVVHGRRKQHPQAAFPPFTCGAASSSRAQENQPGTTDPVSLFKTGGLFADFSSGLDAARGNGDLDDTVPWIHCPIVEEDSAAPAPALAEGYSPDFFSELHAAALAAAAAETNLSPLPPPVQHNRSTPVATTSRGPEPSKEAPRIPVPGPGSRPEPQSEFAATRKPRPESGGEGLMNFSLFSRPAALVRASLQRPPPPQTGTDKVSNVTTSTRVESTVLQSASGPRIAPVFTDQRTAWSQSKEVRFSCAPALAAGNLHQDMPLGRPGNNMTPQGKMETKKACEVAVATPSLCSGNGESWREQKRKSQAECSASQDDDLDDESGGMRGSGGRGTKRSRTAEVHNLSERRRRDRINEKMRALQELIPNCNKIDKASMLDEAIEYLKTLQLQVQMMAMGSGLCIPPMLLPRAMQLQIPSIAHFHHLGMGLGYGMGVLDMNSTAAVPFQPIPGAHYTCPMIPGTPPQGLGIGMPGTNTMPVFGLPGQAIHPSASSVQPFPSLAGLPVRPNLAPQVPAVMANMVQEQQQGVATQQQQSLNNEAQQKANTGDPQILQK

SEQ ID NO: 56699 - protein, 295 aa, Zea Mays
MATAHRLNTSTAPHVPVPPYLGALLLLGNIHLCPSLGDRDSTVMASPCGDAAAAAELTSLRISEGAGIPPLPGRRSVGGNAAEGEEEGDKNKKARKGKAGTQRIAGWGLREFSKIVSKKVETKGRTTYSEVADEICGELKLTLIGQEFDEKNIRRRVYDAFNVLIALRVITKDEKEIKWMGLSNFQYEKIKLEETRKELMIRIKNKKKLLQEIERQFDDLQNIKFRNQFLQRPAESVNGICLPFLLVKASRKARVEIEISENSKFAGLDFNCVPFTLHDDVSILEAIRCNSVKKS

SEQ ID NO: 56700 - protein, 266 aa, Zea Mays
MMVGSTPGFPHGLIDPIEELGELASRYDICLHVDLCLGGFVLPFAHKLGYPIPPFDFSVKGVTSISSDVHKYGLAPKGTSIVLYRNHEIRKHQFVAVTEWTGGLYVSPTIAGSRPGGLIAGAWAAMMSLGLNGYLDSTSRIMDVSKKIQRGIGEIPGLFVIGKPDMTVVAFGSDVVDIFEVNDIMSSKGWHLNALQRPNSLHICVTLQHTTVYDQFLKDLQDSVNTVKANPGPISGGKAPIYGAAGKMPDRGTVRELLVEFMDSSC

SEQ ID NO: 56701 - protein, 187 aa, Zea Mays
MRGSQMQVSPAQAQLLSMLVQILGARRCIEVGVFTGYSSLAVALALPESGHLVACERDDRCLEVAKKYYQRAGVAHKIDVKHALAADSLRSLLDCGEASSYDFAFVDADKRMYEEYYELLLKLVRVGGLIVMDNVLWYGRVADLLVDDQKTISIRNFNKKVLEDKRVDISMVPIGDGMTICRKLVDT

SEQ ID NO: 56702 - protein, 256 aa, Zea Mays
MVANPKTFPSGIKALADYVHSKGLKLGIYSSAGTRTCSNRMPGSLGYEERDAKMFASWGVDYLKYDNCYRDGTPETVRFGRMSRALVNSGRPIFYSLCEWGFMEVPKWGGMYGNSWRTTGDINDTWSGMLDNIDLNDAYARYAKPGGWNDPDMLEVGNGGMAYNEYVVHFSLWAIAKAPLVIGCDVTRVSNETLGILSNAEVIAISQGHHNHNASSSFSPAKPFASVLDSCSLRVCANYIACLCPTQIGWVSKDRK

SEQ ID NO: 56703 - protein, 161 aa, Zea Mays
MPTNPGGALGSLDYKPEDRRALAIKSREVPPKFGSPQRQKLIDEIHEQMLNKVDEGGNTSKSMSGSSSGHPVPEAESLAAENTGEASAVEVANHQVPEASRRESIPRVPSSLQNAAIATQKPKHDRLLTLAALGLTLAIMALVIKKFLKINGLGGFIEGKF

SEQ ID NO: 56704 - protein, 106 aa, Zea Mays
MLRRPWADGEWMGDCSPTPSSGFLCLRCPRPVPLAQSSFQANVASCSSGQPLHAATIQCWHRRPRARRCHAQDSWPHVCAPRALVAARASPMAPPCPGFLASCMCP

SEQ ID NO: 56705 - protein, 375 aa, Zea Mays
MRKKKVERWDQFVDVIEQIKKVASEIRPADFVPFRIHVDQSDQSLRKLEELTKELQSLQKEKSDRLKQVMEHLNTLHSLCEVLGVDFKQTVNEVHPSLGEADESKNLSNCTIESPASATSRLRELKVQRMQKLQDLASSMLELWNLMDTPLEEQQMFQNVTCNIAASEHEITEPNTLSIDFLSYVESEVLRLEQLKASKMKDLVIKKKTELEEHRRRAHLFGEEGYAAEFRDEAIELDDTIIKTIETAPNNELKKAKEIIQRIRRRELYKAGKKLLLITNSDFHYTNKMMNHAFNRFLPNDVGWRDLFEMVIVSTRKPEFLQLSHPLYEVVTDDGLMHPCFKVNSVLQPVFCSKGQTRAFQKYYCTGHSLFAEIF

SEQ ID NO: 56706 - protein, 173 aa, Zea Mays
MTTKTKERLQLGRRRRRRVGGGGWSQARGGRDARAPHRCRCSSHPLPSPPPHHPTTTSHPIRALLRSSPIRSARSPSPCPPRCRRRHRRRGPTTTTVRRRWAPAMGGRWATARRSTGTRGTWRRAARRTTGINATTRSAPSSAASRRRRPGSSWLAAAPHSCRRIWSLTAMWR

SEQ ID NO: 56707 - protein, 282 aa, Zea Mays
MHKSELERDRLAMELEDERKLRMTLEQHLTEQQKLEAISSDHFTDSIQLDLLKTPDSKSVPDGFVACRSRYSQDVEFSPIPENLDNIAEEDLWTRLNKGCVTDLDMLEMTPNLKRESSFLQEKSSAAPLEEPTNAICQRLAKECIYDQQQLEESKARCANLEKDCDVLRDENLSLQQELSESKLEADSLVAEKQAQLDDLRMRCVALERDLSSSRQEAHRLATEKQELAGQLGTERQKMDELKQDIRVICGDLLQREGQLTSIYTKSKAIIESCKASQGSDR

SEQ ID NO: 56708 - protein, 164 aa, Zea Mays
MGVHFIAGLRMLVGSEITSVSSISRHVDMALPPPDNICSLFQLENGCAGVFVFAVNSRSPKILWRVDGTKGTIQVERGVDSGKHGYQVLFSGENGQCQKTFYPFCGVNEELKTFVHDMLEAGKDGDHKAAPRGSYVEGARDVAVLEAMLESSAKQGAPVQVKRF

SEQ ID NO: 56709 - protein, 70 aa, Zea Mays
MLVEVHKSLDRKGIRIALTNPRLEVTEKLVLSGYIKDIIGEEWVFLTVKDAITACRYALQRSRSKDDGEV

SEQ ID NO: 56710 - protein, 52 aa, Zea Mays
MRACEPRRLADMLLAPCEDTLAACQTCQEHLAPYSSIYRAWSSKEYSLPIEL

SEQ ID NO: 56711 - protein, 562 aa, Zea Mays
MESTMEKPAVMDAARGGGGVGRAKSDHLAPSLSLSRTASAETVLGTAADAAKPAGFGRKRRSASVGGGNNNSHIRKSRSAQLKLDVEDLVSSGAALSRASSASLGFSFTFTGFTPPLQHMCSADPPSFSDDENLDIEAGTRRKKLVTEPTLPIYLKFAEVKYRVAGKGSPREILGGISGSASPGEVLALMGPSGSGKTTLLSILGGRAAAGGAVDGCISYNDEPFSKSLKRRIGFVTQDDVLFAHLTVKETLTYAALLRLPRTMTQQQKKERAMDIIHELGLERCQDTMIGGSFVRGVSGGERKRVCIGNEILINPSLLFLDEPTSGLDSTTALRIVQLLHDIAEDGKTVITTIHQPSSRLFHKFDKLILLGKGSLLYFGKASEAMPYFQSIGCAPLIAMNPAEFLLDLANGNTTDVSVPSELDDKVHMENHNLENNNSKIDYRPSAQDVHEYLVDAYETRVAFKEKKKLLAPLPISDDLKATITSSKREWGTSWWQQYSILFCRGIKERRHDYLSWMRITQVIATSVILGLLWWHSDPSTLKGLEDQCLLQSLHSLKRGQC

SEQ ID NO: 56712 - protein, 1046 aa, Zea Mays
MCTSYIVCHVIIFLQQGFRFNTQTLKKFRLLQSSKHALAPFVKPLVAAAMPARTVASDTPTRATHRASSVSPPTRRGGHAGRQSSAISLMSGTSSTPSVLPGQCIPVLLFVFEDDAVDVSSAAASPDDIGDASSSNQGSTPDGLPKQSLASKSSGSVIMLSRAANKSEGSSGKKLHSSLEGQIRVLIKKCRVLAGMEPGHIGPRGVSNMSHHLPLFSLDTSRVVALLERYINKKQEPLDTIAGLFEDSLCSKSPLDILSLENNYHPTNHDDFQLIKDFIFRQSDALRGKGGYSSNASAGSVAGVGMVAAAAAAAAASAASGKPVNAPDLPTFDKWLSISTSILTALLSGRNVLRCQSESKTHTSPTEKNGQLPVGSNAIEIALSCLESNNGLNMKFSSSWCQRVLPAAKEIYLKGLPAFYPTRMHEVQLQKALRSFGSMVKGPAVRVFSKKLEDECRAIWESGRQQCDAVSLTGRPCKHRRHGDFFSSDAMEQHSSGYVFLHACSCGRSRRLRDDPFDFQTANVSFNCFQNCDDLLPTLALPRGSNDGSFSVSSWCLVRLGGARYYKPTKGLLQSGFSSKERYLLRWIVSVHKGQVRNDIRSNTITSSARSGMNPQTPPIVTGEVKSAITQVTAQIKYAKLENSGKQAEVEPVSNLGINFGKGLPNFTMKKPFSEVVAGTTSKDTEFPALQQTRPPKPGGRKDEQRQMNIVDQTNGRGHVAVSQGSVAETESAKASRNKSSENADGKPFLQIGSNIVPVIAGNETRETSQPVQQFVVYIGFEHECPYGHRFLLSEKHMKEIESSCLQYQRPHLNKEAEVKHAQKLLQNASGLIASAVDINSARKNSKPLESSGRNSQQQSLQLRIDAETSQPSPRLSDPQNAKRWEHYFRSVTIDDGGEAFSLMNRNLPIYMRCPHCKVSERKEHQDVKFAGVVSQLQRIFIVTPDFPVLLASCPLVQFEGSCLPSNVSDHDREGSFSIGCRVILPPESFLTMRLPFVYGVETKEGSKFPLKYFERQPELTAWLVAGTALQIVSVGDVTEKETVMK

SEQ ID NO: 56713 - protein, 333 aa, Zea Mays
MDEEYDVIVLGTGLKECILSGLLSVDGLKVLHMDRNDYYGGDSTSLNLNQLWKRFRGEDKPPAHLGASRDYNVDMVPKFMMANGTLVRTLIHTDVTKYLSFKAVDGSYVFSKGKIYKVPATDMEALKSPLMGLFEKRRARNFFIYVQDYNEADPRTHQGLDLTRVTTRELIAKYGLSDDTVDFVGHALALHRDDRYLDEPALDTVKRMKLYADSLARFQGGSPYIYPLYGLGELPQGFARLSAVYGGTYMLNKPDCKVEFDMEGKVCGVTSEGETAKCKKVVCDPSYLQNKVRKIGRVVRAIAIMSHPIPNTNESHSVQIILPQKQLGRRSDI

SEQ ID NO: 56714 - protein, 230 aa, Zea Mays
MGVRKTWMSAVHKSPNMVARFFVALHGRMEVNAELKKEAEFFRDIVFVPFLDNYDLVVMKTLAICEYGVHVVSAKYVMKCDDDTFVRLDSVVTEIKKVPGGRSLYMGSMNIQHKPLRHGKWAVTYEEWPQEVYPLYANGPGYVISSDIADFIMSEFMKQKLMLFKMEDVSLGVWVEQFNKTRPVEYVHSDKFCPNGCVPDYYTAHYQSPRLMLCMWQKLLEGRPDCCNAR

SEQ ID NO: 56715 - protein, 609 aa, Zea Mays
MSRVLYQRAILYIRTLYAFTNETLAKYSYATSLQATLRYGILISLVQGIGLGFTYGLAICSCALQLWVGRHLIHRGKADGGEVVVALFSVILSGLGLNQAATNFYSFEQGRIAAYRLYEMISRSTSSTNQEGATLPQVQGNIEFRNVYFSYLSRPEIPILSGFFLTVPARKTVALVGRNGSGKSSIIPLMERFYDPTLGEVLLDGENIKNLKVEWLRSQIGLVTQEPALLSLSIRENIAYGRSGTFDQIEEAAKTAHAHGFISSLEKGYETQVGLAGVALTDEQKIKISIARAVLSNPSILLLDEVTGGLDFEAEKAVQEALDVLMLGRSTIIIARRLCLIKNADYIAVMEEGHLVEMGTHDELLNLDGLYAELLRCEEATKLPKRMPTKNSRERKSLQAEDTSVSQYFQESSSPKMAKSPSLQRTHGMLQFWRSDTNRNSHDSPKDPSPPSEQTIDNGIPMVAIETERTPSIKRQDSFEMKLPDLPKVDVHRIQRQSSKNSDPDSPISPLLTSDPKNERSHSQTFSRPQSERDDTSSEHSELDEVQHQKPPSFWRLATLSIAEWPYALLGTIGAAVFGSFNPLLAYTIALIVSAYYQIEIRDMRHEVR

SEQ ID NO: 56716 - protein, 305 aa, Zea Mays
MRCFTAAPNVEDSYPERPGEPDCPYLLNNRCKFKSKCKFNHPKDMVNALGTGTNNESLIADSAVLPVRPSEPICVFYAKTGKCKFGAICKFNHPKDIKTSPLIAKETIYTATTDAADAPTEACNAKGLPIRQGEVDCSFYMKTGSCKYGSICRFNHPDRPGPAADIAFMVPLVQATLPSSAPIVPAVVEPLPMIYPQRPGETVCDFYMKTGSCKYSQKCKFHHPISRFAPHSKENGDPQQPATLASLPRREDAEACAFYMRSGMCRFGAHCKFDHPPREEAISELQAAGKEGIEGPSLVQRDHDV

SEQ ID NO: 56717 - protein, 704 aa, Zea Mays
MAPTLLLVALVALAVAAATPMVMEASAFTEGCNNRSTPGGGGGTAVGNKLNVHLVPHSHDDVGWLMTIDQYYVGSNNSIQGACVMNTLDSVVDALAKDPARKFIVVEQAFFQRWWAQKSLTVQATVHKLVDSGQLEFINGGWCMHDEAVVHYIDMIDQTTLGHRVIKKQFKKIPRAGWQIDPFGHSAVQAYLLGAELGFDSVHFARIDYQDRATRKANKGLEVIWRGSRPVGSSSQIFTNVFPVHYSAPVGFSFEVLAENVIPVQDDMSLFDYNVQERVDDFVAAAIAQANVTRTNHIMWTMGDDFNYQYAESWFRNMDKLIQYVNKDGRVHALYSTPSIYTDAKHASNESWPVKYDDYFPYADSTNAYWTGYFTSRPTFKRYIRVYSGYYLAARQIEFLMGRSSLGLFTSSLEDAMGIAQHHDAISGTAKQHTTDDYSKRIAIGASKVEKGVNAALTCLTNSNKTCVSSVPKFSQCPLLNISYCPSTEEAISATKHLVVVVYNPLGWKRSDFIRVPVNDEDLVVKSSDGNTVVSQIVVVDNVTNNLRKLYVKAYLGVTANKAPKYWLTFQASVPPMGWNSYFILKSTGSGYNNTEHVPVVVPPSNNTIEAGQGHLKMSFSSASGQLERIFNSASGGDLPIQQSFLWYRSSKGDALDPQASGAYIFRPDGNTPTIASSSVTLKVIRGPLFDEVHQQFSSWIYQE

SEQ ID NO: 56718 - protein, 171 aa, Zea Mays
MMDHQLFDDPFGSSISSLEAEIFSAAAQLPPSPPWPDIDLDDDYDIHDLSAPAANAATSSGGGYGSGGSGGHRKLSHNAYERGRRKQLNELYSSLRSLLPDADQTSLRCCLTRQSPRQTQTSLTKPKTDQTRICMQSRMYREPESSLYLELVHQTESSMSLLDLFPPLGVW

SEQ ID NO: 56719 - protein, 66 aa, Zea Mays
MDVFYYYYPKRLGQVLFVDAPFVFQPMWQVVKPLLKSYASLVRFCDTETVRKEYFKEETVPPDFRD

SEQ ID NO: 56720 - protein, 78 aa, Zea Mays
MAVEKTLPGASAGRTVLVTGGAGYIGSHAVLQLLLAGFRAVVIDNLNNSSELAVRRVAALAGDHSRNLSFHKAENTLL

SEQ ID NO: 56721 - protein, 1748 aa, Zea Mays
MPDGLIRSPTRTRPRSVVAAAVAMGDHSDSDSSPKSSSSSSSPSARRRSSPQRSRAHTDETGSSDGVLVELPTQEARSPGADPDSGVLVNMPADDATSGETFDDAPEDLAAAGSLSARSLDESIAVIDFPEVSSTSAELRKYQEEKAVFAREAVALRRLLQEMLGQEASVALHGEDADETLLHSMLDDCSRLVLELNSMARAREQEIESLHARAAEAEVSSEVAHVYLGSWREGSEQAVGRMLASIDAVVRQDDASFEGADQDGISILERKTSLLVERYRQASMGIEQLEQILAEVKPGFAATGHGDLATTLSVLSDELVGSKRNEVDLLQKMNAFAEEKKAIADELEEVKAARNAVNAEASKAKAEFEQMEQKLSTTKEKLSMAVTKGKSLVQHRDSLKQALAEKTGELQSCMTELQKKSDALQAAESRVDELQIFLDEKTSEHEKCLDELRDTYSAWEAAKTSMEQLNESKSALHASLSLKDGVFERIEDIMSEATFPEDLLSLEMTDRLGWLVEQKKIADMIFSEHQKVKEILSSVDIPHSVLTSELDSQISWLASSLNQAKDDAVRLRDESAEMLAKMAAHESKLVSMHEEIDRLTIILLEEKQEKDILLNEHSELMSLYKAAVNKLSLVSSQNNELLKAFAEFFDVTLEGSQSMDIAKLVQQGLRNIQQRPKSSPIESGSFEKLQALLYTLDQESTLCKMILEEDMINRSERTGELQRMAEEIIVLKNEKVSLQKEVERVEERSALLREKLSMAVKKGKGLVHEREGLKQALDEKRSQIENLKQVLEGKSSEIEKLKHALDENKSVTENVKQVLDGKNTEIERLKHALGDSCVETENLKQAFAEKTSEAYKIKQELDAKNMDIENLRGAIESRESAMTDLREHVEHLLSSQVARLEKLQVDIVTLNDEKVKLESMLEEARASWDTLADSISSLTLPIDQPFEGPMEKFSQIAQYIQESQVAKSSLENELQKANEQITLHASRHSDALSTINMLEHELSKLKDHISSISEEKRQMQLNTSAVQEELEKTNEELAINFRNLESANTTINSLQDALSQARSNIFILAAEKNEAEAKYETEINALNAELTKCLEELDKTHGHLQSHSTEYHGYLEKLGMFMMDDSLLSLIAEEYGKTFNSLRDMCLIVKSMHEQLSVKSFQNDSIVEDSELSSLLSLPDYESFVRERLVKNINRKGNIDDTSSFSTIVEQLSNQTEYLSSFLKDLSTYMNSNIIVVLRSLQLVSNTFAHTLEEHDMLKVELGNKDAHNRAQESEVLSLQKDLRAMSSKCIYCVQQIEIVFDDMVDLGYAIDLATGSSSIGSELEVTVSDLKNEDTSDYSKVADTLLATIDTLKSKSEKLSTIKGLVITSLDDFKMKLKQAEAAAETASHEHQLSVERVCMLEKELKILQDECNKMELNIQEYKEREGALKARELELLSVEHTQISADRGLTDNAISKDQTEALVEKISKLNMLSGESNVQREEATSPLDKLFVVIDEFSALQHEVETLRYENEDLQLNIESYTREIEQLREVSRNSDLTNRELESKGSELLEVAVSMERMIQRLGYLGGKDVLEDNKPASTQALLSKLEKLIIASSTESGNSKSIIQELGAKLQSREKAVDELSTKVKMLEDLCHAQLSQPEPSKDRSFEASSSTIGSDMSDIEDAGPVGKTTSVSSVSTAAHARTMRKGSADHLVVNIGSESERLIAAQDSDDKGRIKSLHTSGFIPAQGKHIADRVDAFWFQLIS

SEQ ID NO: 56722 - protein, 1005 aa, Zea Mays
MADAGVTGVLAKLGELAAEEATALLRVDAEIRALRRKLAYLQALVRGADRQRRGRASELLLLWLRETREVAFEVEDAVDEFHLRVEACRPGARWRRRRRWWWGWHRDAVSLVQDLATQFFVRHGLSNQISKINERIDELNQNKETYQIESSPSEIWSSSSVEMDPEWYEDKYVIGSREREFAILKDLIINKEGDMPHRAVISIFGERGIGKTTLAKQLYNDPDIIKHFEVHAWVCLPPHVRFRDYVEIMHMQVNPQIPEASEKNDNTTFALGNEETTDMEFNLRQNLENRRYLVVLDGLVSISDWNSLFAVLPHTNANGSRILLTTHLNVKEINHIDPQIAPVKLPYLDEKHGEELFCQRVFGTIEPPQIYRSKVYYKKVHNISTGLPLAITVLAGILRSKFIPMEWDVIFEQLESNGQPKPVRSIWSLAFDDLPHYLKSCFLYLASVSENVILYPDRLVRLWIAEGFVMPKKAETLEDVGFDYLKELVARGLVQVVQKDAGGSIKLVAIHNLLHAFVESEAQDSSFLEIHHHANVVNPNAVRRLAIQNYVDAYVHIPNVFPKLRSLLCDFAEDQQRGSSSSGELQPQSLWGNLAELCSRACGTSENVGSSTLHGLHFLQGSRYLRVVDLYGLKTRKLPDEIGSIIHLRYLGIRNSNLVELPSSIYKLDSLQTLDVRKTNVAKAVDEFWDIEALRHVLAEKMILPDCSVVPLNNLMTLNGVVPCGPWDEKSCPLNSMIYLRSLSLSDISAAHTAALSAALRKMEFLLYLNLSGEFLPSSMFTSSSMRRLQTLILHGKLQGINDLPSDDRYVLPNLTMLYLHGSEVSQQFVHKLGTLPCLVEMELSAVSYSEGEMKLFLDGFPSLARLKLKNVSMLQEVEIRGGAMPMLSILAMYDCDSLKTFKNLNSLEHLQEVAIYNTPPEIVDNIKLEDEKLFSKIKLLTNPMMTADRDFPGHVVRMRIKMLDEPAHDLRVAVASEPHCSDMEGDYHGERKATDQVHYGPGLL

SEQ ID NO: 56723 - protein, 80 aa, Zea Mays
MQRPNKRRLSLFKGIIIAKHKAGVHTTIRVRRIIAGVGVEITFPVYSPRIKEITVIRHKKVRRAKLYYLKDKLPRFSTFK

SEQ ID NO: 56724 - protein, 1099 aa, Zea Mays
MHSRQSNLSMVIDVSGKEFKFTWASERGELCDIYEERQSGEDGNGLLLECGSAWRKVNVQRILDESTKNLVKMRSEEAERLSKSRKSIVLDPANPSVKSQAKSMAAAAVEGNPRRMHWKQKNEFFKKNKAAVITPTKSVSKVKLSNNIPKGNISSSPAPSPEQPGASNPSFPVGSDANNEVTTPFDLNKGENSKHEKSTASKMSNKGINRRASSHAANVDNNTKEVRSYLISVLSKNPKGMGLKALEKVAADAFPNASKKIESIVKNIANYQGPERYVLKPGLEVESSKRHASEGVRSISENIEESAPSLKIDDPDICERIDIVGSPLAVTDGKLSNDSEGKAGTSSDSGSDSDSDSDSSDSGSDSESQSRSAAETGSGSSSDSDSDASSSSKEGSDAIVDITSDDDKANTAHTKVVDDLNLSSSPRDLTRLNVDDEQIDIGTNLDYRSASPHIDLNNFNTGNDDAAAEGFSSGNLNKPSEMPGSKNMTNTRMDSIGVDNKHNEMSFVDNLFDDSMRAASENSPKGEAGQLTVQHGNKRKSTSKDESKLVPVNIAKPKLKRSSGSENSTAKPESAKKAKPDVTSPIGSLSEHKRSLPPEKHTNDRLNKETGNVSRDASRDSSPAMKGRPSAPGNLQRIDQSPNLPIPTMHSEGTKGNAVKSSSKKKSDKMQKPWHGIDGDFGSCYSHGVDHHANFDGSDDSSTRKRSRHENPLIDDKMLKHSKDTNANINSMNLTKSSREIVVPDEVTAFPESNESNGEPSNSQRDNVEKSPYGKKKLQRELSDLELGELRETSLENDDGRIRKQFERNSSSKSLDAKLTGVNNFYPSINDRKTPVTVFHDKRKPSPQEYGNRGHVNQEGFQRKAAVYAFDDNRPQQRENFPESLHLPKIDNSDSENIMYPDRSGEKTSKRETRMAHSGMLEYADMQKKKATSRLPQNGTNNVIVSRMQKSISTSDNEERSRNNSLIETKTGRKRRDSSSDDDNLFFSKYDKDAPELKGPIKDFSQFEDYVQEYNEKYGVYSYLSSQIDKTKSDFLRVQDDLNVAKERDKEQYYNTVERLRDMYHESGARHKLMKKVFLLLHEELQIIKQRIKDFSEAY

SEQ ID NO: 56725 - protein, 71 aa, Zea Mays
MTRWWHMNLWRWSFLLYSWKIRLMIASRWLWVLSKSVGQCCRTCLLKGFMVSYFRQLSEYGLLNLLAFGGA

SEQ ID NO: 56726 - protein, 166 aa, Zea Mays
MSAIILYCVFSMHDTAYLEVFSLWAVSSRKFRGLSLTSQDVGTVLAISGFGVLVYQLAIYPFLAKYFGPIKTFRPAAILSIILLTTYPFMANLHGLELKILINIASVLKNMFAATITIACNILQNTAVTQEQRGVANGISVTLMSVFNSVPPAAAGILKYLPYSLH

SEQ ID NO: 56727 - protein, 406 aa, Zea Mays
MWSNNAMGLWSKVKGSGTIFKNPNSIGQAIAKNLPSSDIIESASVAGPGFVNITLSNRWVAQRIQDMLVNGIKTWAPVLPVNRTVVDFSSPNIAKEMHVGHLRSTIIGDTLARMFEFSNVVVLRRNHVGDWGTQFGMLIEYLFEKFPNWQEIGCQAIGDLQIFYKASKHRFDSDPDFKARAQQGVVRLQGGEDKYREAWKKICDISRSEFDLVYKRLNVVLEEKGESFYNPYIPQVLEELSNKGLIKESEGARVIFIQGHQIPLIVVKSDGGFNYASTDLTALWYRLNVEQAEWIIYVTDVGQQQHFDMVFSAAKMAGWLPDPSEKKFPKTSHVGFGLVLGSDGKRFRTRSTEVVRLVELLDEAKSRSKSELLQRLTENGKIVDWTDEELEQTSEAVGYGAVKYVL

SEQ ID NO: 56728 - protein, 65 aa, Zea Mays
MERAPWRAPQPLIALRELTGEAKPLIPLNTHDNSTTAHIPDHDRTAARGRNGCRRHLVACGRGRG

SEQ ID NO: 56729 - protein, 258 aa, Zea Mays
MLFVIIAGSYIGFQTGWVGYKVAGGFFPYGANGMLAGSATVFFAYIGFDSVASTAEEVKNPQRDLPLGIGTALSICCSLYMLVSVVIVGLVPYFAMDPDTPISSAFAKHGMHWAMYLVTTGAVLALCSTLMGSILPQPRILMAMARDGLLPSFFSDVHKTTQVPVKSTVVTGICAAALAFFMDVSQLAGMVSVGTLLAFTIVAVSILILRYVPPDEVPLPSSLQASFRLSQENDEEKLRGTLGDDDHEQGSAEISDGF

SEQ ID NO: 56730 - protein, 409 aa, Zea Mays
MGIQGNKAATHEHDFLSLYAAAAAAAAAKDAPLLLHDSKTPPPSQGHQQQWALPFAGSLQVSPPPQQAQPDRKGRGGGGVMDSGSRSSGGAGFDDEDGLTTRREVSSSLQDLAVRVDWKGGSCSDGGTNQGPNTPRSKHSATEQRRRSKINDRFQILRELLPHNDQKRDKATFLLEVIEYIRFLQEKAQKYEATFPEWNQENPTMLPWSKGQIPGDSPPDPSHFVRNGSSPGSNFTGKLDDNHTSAAASGALDQAETNHVASGCYRSSETPANITNNAISQSQPQWTGPSPVDDSAVKSEMLNSQELAIDEGMISVSSTYSQELLISLSHALQSSGVDLSQTSISVQINLGKRAGKRSASAGGVSSNSKEPPADPASSNELGGHHVTTLGASADGLLPHATKRHKRDNS

SEQ ID NO: 56731 - protein, 756 aa, Zea Mays
MLVATFVSCGMLRNLQVRYRSSYTGSFPHWIRELDSPREASLLKQIYKSDPERVVQIFERHPSLHSNSAALSEYIKALASLDRLEDSPLLKTLQRGFATSAAEEERSTGLAAFGSVGRRTKDGALGTANAPIHMVTAGTGQFKEQLWKTFRSVALTFLVISGIGALLEDRGISKGLGLNEEVRPNMDSKTKFSDVKGVDEAKAELEEIVHYLRDPKRFTCLGGKLPKGVLLVGPPGTGKTMLARAIAGEAGVPFFSCSGSEFEEMFVGVGAKRVRDLFNAAKKCSPCIIFIDEIDAIGGSRNPKDQQYMKMTLNQLLVELDGFKQNGGVIVIAATNFPQSLDKALVRPGRFDRHIVVPNPDVEGRRQILEAHMSKVLRADDVDLMIIARGTPGFSGADLANLVNVAALKAAMDEAKAVTMQDLEYAKDRIMMGSERKSAVISDESRKITAYHEGGHALVAIHTEGAHPVHKATIVPRGVSLGMVIQLPEKDQHSVSRKQMLARLDVCMGGRVAEELIFGESEVTTGSSSDLNYATRLARAMVTKYGMSKRVGLVSYSENSVSGQTSVIDKEVKEILEKAYNNAKAILTTHDKELHMLANALLEHETLSGAQIKKLLPQVDNSNNKQKKAAKVPQKTPAARAKGVAQEAAGKAKGVAGTAAVAQEAATANTEGGAGTAAVPQEAATSVAAKAKGVAGTAAAAQEAATANTEGGAGTAAAPQEAATSVAAKAKGVAGTAAVAQEAATANTEGVAGVGS

SEQ ID NO: 56732 - protein, 829 aa, Zea Mays
MIRNDDVPDSVKNLNEKVSPKFKVDDVQDSVKSLNEKLSAALLTINDKDDLVKQHTRVAEEAVAGWEQAEAEVASLKQLLETASKKNTSLEDQVSHLDDALKECVRQLRQAREEQENKIHETVAKKSKELESEKFELQHHIAELSKQLQATKLEATTVRVQRDLQEKLQIVEKENKDLKVELLALSKDLKILARERDLSNQAAETASKLHLESVKKITRVEAECLKLRHLTRRTSLTNDSRLITNSACMESQTDSQSDSGEHMLVDEMKNSDSWATALIAELDQFKNANNDTRNLVNNSVEIDLMDDFLEMEKLAALPEVDCVSSSFGAETDSDQGVSRDKSSKVKTEPLQCQVTDLHAKIEKIEGEKRELEMALADARVQLGTSCDALMVANNRLIDLQMQLDLANESKHAAFGEAERLNGERKDLALQLESRSSQVDELQLMVASLEKNVDRKVLELQLELVSVEAADLRKTVASLEEKIDAEITLSMQHKTNADLAEASKESLEAQLQSANTEIGKLNGIVQTLENEVRKETDSREELLKQIEAMKIESERSLSVVSTKESLEVQLQVANSEVAKLRGMVNALECDAANEKAYSSDLQMQLEAVEGIRKVLESELESSHQEVMRLKEKVSSLEARIKDQTSLLVEYTAKSEDAVSRKKAMEGQLEAANLEVTKLRNKVSLIQGKVEQEKLLSEEYEAKCRKLEAQVLRDSREAKLWRLTNSNGDLKVKQEKELVSAAGKLAECQKTIANLGRQLKSLTDLDGVVADPEKLESRDTHLDFRDGGDVADGLYELGLPKRNGSCLSPLRSDPSPRGLPSLSSYLSKTKR

SEQ ID NO: 56733 - protein, 107 aa, Zea Mays
MWFYTVKTLKCVYSVSSLYVSNLLSMQVEGAKGFLAVLRDYLDTLCSNLRSHTITNVQSNNDKVSLLLKESFIGSFPSRDRPFMKLFVDTQLFSVHTDLVLSFYQKD

SEQ ID NO: 56734 - protein, 754 aa, Zea Mays
MSDEYVDLPVSDEDEEELEDEMDDGDGESGGGSSKKKAKQHVEQLKRLQQKDPDFYKYLEEFDKDLLGFDDDDDEIENDRETGVEEKEQYVSKEELKHVKPITMEMVDSWCNGVENEKIGSIRSILQAFRRACHYGEDHGDNSTPKLSVMSGSVLDKVMHFVLKHMDKVLRQLLGAPSYGGKKEVISELMLSKSWKRHGNLMRIYLANALHMITEMTDEQMIAFTVHRVRASAVFLAAFPSLLRKYVKALLHTWARGRGAMPLVSFMFLRDLCIQVGSDCLDTCLKGIYKAYLVNCKLSKSISGSKQQHIQFLGNCVRELYSLDPQSAYQHAFVFIRQLGVILRGALTERGPKSVKDKRQKESSKSSKKQAEKSYQKIYDWQYIFCLELWTSVVCGCSSEEEFRPLAYPLTQIIHGVACLVPSARYFPVRFRCVRMLNCIAEATGTFIPVSSLLLDMLEMKELRGRPDGVGKAVNLFSVKQVDKKTVKTRAFQEACIYSVVDELAKHLTQWSYSIAFFEMSFIPLVRLRSFCKTIKADRFRKEMKDLIYQIEANVEFIKSKRVGIAFSPNDPAVESFLQTEKEERCSPLSKFVATLHQRAQDRMDALDETSVIVGAESSTFSRRLSEAQKQQDEQDDDEGTIAFSKNWLSENKKPKTPKEDKKRPREDDDVATEEDRVEDLVLSSDEEDGNNEEADDGFVPVEGDSDEDFVDPDSEYKKQKKAKLKKRNKRQPFLHKAPSRTKSNSGPKKKARH

SEQ ID NO: 56735 - protein, 271 aa, Zea Mays
MSPERIRNENYSYAADIWSLGLTILECATGKFPYDVNEGPANLMLQILDDPSPTPPVDTCSLEFCSFINDCLQKDADARPTCEQLLSHPFIKRYAGTEVDLAAYVKSVVDPTERLKQIAEMLAIHYYLLFNGPDGIWHHMKTFYMEQSTFSFSENVYVGQNEIFDILSNIRKKLKGDRPREKIVHVVEKLHCRANGETGVAIRVSGSFIVGNQFLVCGEGIKAEGMPSLDELSIDIPSKRVGQFREQFIMQPGNLMSCYYISKQDLYIIQS

SEQ ID NO: 56736 - protein, 426 aa, Zea Mays
MNGLRSGSTSPSLVRVQSLGSSMSHTFASAVGSSISRSTTPDPQLIRRTPSPCLPPVGVRMGSSDKKVEASVSSLNHDGADIVATLSSLSLSGNKMSNVENEVQTHAYQNFGDQADVLFNVPKEHRQFSPRNLTQKTDEDLLNAPEYAVFPNGGSNFSNLHASKVASHSNSKFPMQSPHGNANKKGSLMSSAGSVSQYQHLNGDSHDIDVSGWHTHTGGFTSSMLNNQLNPDGDYGNVLSNHGGSSYQGQPTETMYAQCLQANPDSPLGAAASMSPFQGRGFTGSGHLDSPGYQKAYLGSLFGQQKLQYGMPYLGNSGALNQNIYGNDSAFGIGMTYLTSPPSTPYISSPQGHVGQGNRLTRLPAVVRNTAGGSMGSWNSENGLMDNGYGSSLLEEFKSNKTRSFELLDIVGHVVEFRYYFLEILT

SEQ ID NO: 56737 - protein, 864 aa, Zea Mays
MAVAPVVRQQSLTEGLISCRTDVQCLHRWQKVLNPELVKGPWSKEEDEIITQMVNKLGPKKWSTIAQALPGRIGKQCRERWHNHLNPGINKDAWTQDEEIRLIHAHQTYGNKWAELTKFLPGRTDNAIKNHWHSSVKKKVDSYRSSGLLAQSQGFTPVEYTAGGLNVDSSSAITNQISEGSGFNVFREAEDSMELSQSSFAKGSCSQEEQNDVTLGSHLHVHESLCPDGSTNDGNGASGLPDIHHRLCTSDMDQDKHLQEGMDLDKHLQHEFSQGTDLHLDVDEVPNNFVIKGSQSSNELAVQFHDTEIMNSSKNDGVSLVPHAITPCVPILPSVSGCVHNINVIYEMGIKNDNCFQSEKCQDISIQSGAYSSEAAGSFLAPLYPLQTSEPAIMMGGPVYYQSSVMSLPPGFISSDGASNASGVKSETSYYPVSRQNLEIKTCHNASGDPEQNSYISSEDDRNKTSEPMGRISESEKKQQVDVEQSCLEPAACIGKEALSSHGDTILSKKEDAGALCYEPPCFRSFEFPFVSCELVNSSDLPEYSPLGIRELMRTSLNFPTPVRLWGSPTRDGSPDAVLKNAAKRFMCTPSIMKKRHRDLLSPVSDIRTDKKPNTERDFMSSGISSTRVGKSCMDSADDSADLVSPKESAFQKKLKLCHENKENLNEIADQGENEANAKHSSGILTPSSVDNHNTHKHGPNFRIQELNTTVQALSNSKDIIFSRSKPSEHVEKSAACIDADYEYLNILADTPGIKRGLESPSAWKSPVFTPFQDAYFMSPASRAFDALGLVKQINEQSASAVEEAHEVLANGSPWKQHNKENSDKENIENTALKHEHVTSKPPSILMPSSSLRLLEISNKDYGC

SEQ ID NO: 56738 - protein, 1155 aa, Zea Mays
MATSLSTPSQLRTSHCHARRYGRLLGLHPRVSCARCPAPRRAAALSVRANAASTDGDAAVTVRRFPAAPTKAGRLAGVKKIMILGAGPIVIGQACEFDYSGTQACKALAEEGYEVVLVNSNPATIMTDPGLAHRTYIGPMTPPLVERIIDAERPDALLPTMGGQTALNLAVSLADSGALDRLGVRLIGASLPAIRAAEDRQLFKQAMDRIGLKTPPSGIGTTLEECLAIAEDIGELPLIVRPAFTLGGTGGGIAYNKAEFEDICRAGLAASHTQQVLVEKSLLGWKEYELEVMRDMADNVVIICSIENIDPMGVHTGDSITVAPAQTLTDKEYQRLRDYSVAIIREIGVECGGSNVQFAVNPADGEVMVIEMNPRVSRSSALASKATGFPIAKMAAKLSVGYTLDQIPNDITKKTPASFEPSIDYVVTKMKSVGEAMALGRTFQESFQKAVRSLETGFAGWGCGPIKELDWDWEKIKYSLRVPNPDRIHAIYAAFKKGMRVEDIHEISFIDKWFLTELKGLVDVEQFLLSKSLDQLSKDDFYQVKKRGFSDKQIAFATSSSESDVRSRRLTLGVTPTYKRVDTCAAEFEANTPYMYSSYEYECESSPTNRKKVLILGGGPNRIGQGIEFDYCCCHASFALREAGYETIMMNSNPETVSTDYDTSDRLYFEPLTVEDVSNVLDLERPDGIIVQFGGQTPLKLALPIQQYIEENKMVSASGTGNVKIWGTSPDSIDASEDRKRFNAILEELQIEQPKGGIARSESDALAIASEVGYPVVVRPSYVLGGRAMEIVYNDEKLIKYLATAVQVDPERPVLVDKYLIDAVEIDVDALADTAGNVVIGGIMEHIEQAGIHSGDSACSLPTRTVSAQCLEVIRSWTTKLAKRLNVCGLMNCQYAISTSGDVFLLEANPRASRTVPFVSKAIGHPLAKYASLIMSGVTLPELGFTKEVIPKHVSVKEAVLPFEKFQGCDILLGPEMRSTGEVMGIDYEFSGAFAKAQIAAGQKLPLSGTVFLSLNDLTKRHLAEIGSGFRELGFSIIATSGTAKVLQLEGVPVEPVLKIHEGRPNARDMLKNGQIQIMVITSSGDALDSKDGLQLRRLALAYKVPIITTVDGARASIDAIKSLKDKSIEILALQDYFQTADASADLQAAAQTTP

SEQ ID NO: 56739 - protein, 430 aa, Zea Mays
MRYSPSNAGFQLPNLICTKVLEEEEENSSEGRSLSFEAVTPEQDAPYNDDNEESQMPVEKHHHILEEVDGELEMEDVAPPSDIGATTKCQPEQSDTNRAPSDQRPSDAGPPLPVDRPPSPPPLPSSPPPVPVPQSAQMQPKLQMASDPMAPHPQRATYSVQSQQQHSIAEHPGNMNSSVAPLPPPPFNSSGYGGQQNQIPPPPPMAPLNPPGPHGSFPAPPAPYHGNNYHRPPTTSMPNEGYHQQPPPPPPPPNQFPSVPPEHQHRPHHWGNNCPPYPERYRYNGHDRGNHRHDRRHHGHDRQHHYDDRGYHYDDRGYHYDDRGHYFDDRRHHFDDRGHHFDERAIRGPMHNDAADQGRYSFPPGPPRIPDHFEAPPAPMHYGRPSDPPPRPCAGWSRPPRISDNYSPSRHSVEPPVSHTAGGHGGWRPR

SEQ ID NO: 56740 - protein, 642 aa, Zea Mays
MLDEVDEAAIEKEDNGKMEDIDCNHDIRIHEDLGHVCRVCGMIVRRADSIIDYQWKKASRRRTNGYGGHSKDADEIDCGTVKLSEDFIVADIAIHPRHARIMKPHQLEGFNFLVKNLIGDKPGGCILAHAPGTGKTFMLISFIQSFMARYPSARPLVVLPKGILGIWKTEIKRWQVQDIPVYDFYSVKAEKRVEQLQILKSWEDKMSILFLGYKQFSTIVTDDGGSNVTAACRDRLLKVPNLLILDEGHTPRNRETNVLESLNRVETPRKVVLSGTLFQNHVEEVFNILNLVRPKFLRMESSRPTARRIMSQVEIVGRSSKGLADGAFTKAVEETLLNDENFKRKAHVIRGLRELTKDVLHYYKGDILDELPGLVDFSVFLKLTPKQKDIIYKLEAHDRFKRNAVGSALYIHPCLSELSEVNAEHRANTFRDDLVDSLVDSITVRDGVKANFFMNILSLANSAGEKVLAFSQYISPMIFFERLLVKKKGWHVGKEIFMISGDTSQEDRELATDHFNNSADAKIMFGSIKACGEGISLVGASRVVILDVHLNPSVTRQAIGRAFRPGQQKKVFVYRLVAADSDEVKVHETAFKKEVIPKLWFEWSEHCTTEDFKLGQIDIDDSGDELLDTKAIRKDIKALYRR

SEQ ID NO: 56741 - protein, 529 aa, Zea Mays
MACRPAFFIRGDGLTSSLMWLRDRANPGFQSLNFSGLGMSPWMQPRLDNSLLGLQSDMYQTIAAAAALQSTTKQVPPSAMQFQQPQNIADRSALLSSQILQQVQPRFQQIYPQNLNENKIQGHTQPEYLQVQQQLQRCQSFNEQKPPMHPQQQQQEPQQQQCVQTPQDQQMQEQKHLHNFHSLPDALSAFSQLSPATHSPPSALQTVPAFSHQQNFPDTNISSLSPSTGPSMHGMLGRLPSEAASSLPCVAMNAPVSVSDPWSSKRVAVESVNPCRPHVSPHIEHLDMATCNMPQSSALAPLPGRECLVDEDGCSDPQNHLLFGVHIDSHSLLMQGGIPALQNDNSSGTIPYSTSNFLSPSENDFPLNQPLRSAGCLDESDYLPCAENAEQANQQFATFVKVYKSGTVGRLLDITRFSSYDELRSEVGRLFGLEGQLEDPLRSGWQLVFVDREDDVLLVGDDPWQEFVNSVSCIKILSPEEVQRMGKPGIQLLSSAPSRRLGNGCDSYASMQEPRGLDAGMAPVGSVEF

SEQ ID NO: 56742 - protein, 1839 aa, Zea Mays
MAPPRVTRKKGKGAGGKTDLRPDRKQFKRHHKEDAAAEQGDGNGERQQSAAPGSAALLAAASDEADFPRGGHSLLSKDEMAEARAEAEQDFEREAKKGKGKRKRSGGESSGFGVDDDLGILFGGATTGKLPRFANRITVKNISPNMKLWGVVIEVNQKDIVLSLPGGIRGFVRSEDVCDIALQENRKDSGNNLCAEVVHVGQLVPCIVLRVDDDSREGKVNKRVWLSLRLSLLYKGLALDGLQEGMVLTAQVKSIEDHGYILHFGVSSFSGFMQKDDKEDVKTERRQLMQCVVKAIDKTRAIVHLSSDEDLLSKSTIKDLKGLSIDHLIPGMMVNARVHSFLENGLMLSFLTYFSGTVDIFNLLNSFPSGNWKDDYSKNKKVNARILFVDPSTRAVGLTLNKHLLHLEVPPINLKAGDIYDKSKVLRVDKKAGLFLEIPSPTPSPGFISIRDVSDKDAKNLEKFKEGSSLRVRILGVRNLEGVAIGTIKDSAFEGSVFTHDDVKPGMLVRAKVATVEPFGAIVQFSSGVKALCPLPHMSELEHVVKPPKKFKVGAELLFRVLGCKSKRVTVTYKKSLVKSKLDVLSSYADAKIGLVTHGWITHIEKHGCFVKFYNGVQGFVSRSDLGLEAGTEAENVYHVGQVVKCRIINVIPASRKLNVSFVISHNRIAPIDTPKLGSIVSGVVERLTPAAVVVSVNGFSKGTILNEHLADHHGQAAQLKNVLKPGHEFNQLLVLDTEGQNLVLSAKHSLINCANDIPSEISQMHPGVVVHGYICNIIEAGCFVRFLGHLTGFSPKDKAVDRWIEKLSDAFYVGQSVRSHILSVNAETARVKLALQQSMCSSMDSSFIQGYFLLDQKIAALKYSSNDWARHFGIGSLVEAEVGAIEEYGIILNFKDHLDTVGLIEHHQLGGSSVEVGSSVKGLVLDLSDGVVNLSVKPELIDSVRIVGKKKKRQRAVVADLELHEEVNAVVEIIKDSYMVLSIPEYNYAIGFSPLMDYNSQLLPHHHYDNGQRITVVVGNIPSSDSSGRLILLPKASAQYSSLSDSKRAKKKSGYKIGSLVEAEIIDIKPLELLLKFGGNLHGRIHITEILEEDSAEHPFSELRIGQKLTARIVSEAEPSGKSGKKFKWELSIRPCIVNGEFAQKEQNHTTNGIVRAYVVKVDKEWVWLTVSRNVMAHLFLLDSSSEPSELKEFQQRFSVGQAVKGRVISVNQEKRLLRLKALDNQCTQPNIDETQEPKSSVFGQTKQGDIIGGRVQKILPGVGGLVVQIGPHLHGRVHYTEIVDSWVSEPLSGFHEGQFVKCKVLSVSRSSEGSLRVDLSLRSSNLIRDSNNSRLDDLETCTSRIEKIKDLLPGTEIKGYVKNVNSKGCFIMLSRMVDARITLSNLSDEYVENPQKDFPVGMLVHGRILSTDPSSGRVEASLRKTTGSKLEKLDDISYSDLHVGDIVDGQVKRVESFGLFVTIRRSELVGLCHVSELSDEPVVDINSCYKAGDMVKAKILKVSLDESEGSDLEDNISNTCLEIANGTEANAKKSDKQLKKEARKQRELEISAMEERALQEDIPQTPDDFEKLVRSSPNSSFIWIKYMATLLDLADVEKARAVAERALKTIIPREEEEKLNVWVAYFNLENEYGSPREDAVKKVFQRALQYCDPKKLHLALLAMYERTEQYELADELLDRMTKRFKTSCKIWLCRIQFALKQGKDVEYIKAIVNRALLSLPHRKRIKFLSQTAILEFKCGVPEEGRSRFELILREYPKRTDLWSVYLDQEIRLGDVEVIRALFERVTCLTLPPKKMQFLFKKYLNFEKSLGKDNERIQLVQQKAIEYVQSSLPSQDNS

SEQ ID NO: 56743 - protein, 699 aa, Zea Mays
MIQKLEQYNQILEGVIDTLRSLSKPGGTHENTLLLVMGDHGQTLNGDHGGGTAEEVETSLFAWSPRTPPDAVLSVLDDSSCTVNLHGEEVCVSTMQQLDFAVTISALLGIPFPFGSIGRVNPELYALSIGTWVNQRRGTNACTSQDDLEAWMGRYAEVLCVNCWQVKRYIDQYSATSVIGFPSEDLQHIMDLYSRAQENWSASLITSSSETCSQEKVEKGSVLLQQIDAYNDFLKSFAKLARSAWTEFDLWSMGIGLLLMMLSVIIQASMLVNMTISQSSDQKSSGSSIIHRLSLAFSLVVIRAASFLSNSYILAEGRVANFLLATSCITSVWHSVLKGNISIENFVFLLLNIFTRFGIEVGMSKQLPAPTITKDHPVSVIYKILGANSCNILLELFPIISLAFVAYIMLKCLSRAICQRFLKFFLLCGTMVSYLSIAFHWASETTLFAHAGTVQEFGRSLAPRIVYTIGGLSLAISAFSRIFGSTVHLKLNKRIIILSAVMLCSWSPTILILLGRQGPFVALICMTGAWCMIKLQQKHQRETELSVADPVSVIQWSLLAVCLFYMTGHWCTFDGLRYGAAFIGFDHFHIIRQGLLLSIDTFGISHVLPILSLPLIAIVWYNTISKDNELKDVILNNINKVLLMYGLITTITATLTIICVAIQRRHLMVWGLFAPKYVFDAIGLLLTDLLICLASIYYS

SEQ ID NO: 56744 - protein, 655 aa, Zea Mays
MEAIKEQRYHINVGTLCGQVRKRHPWGDAKAIKEEIDKRLAEILGPKTEADNIKPVKKKKEKPAKVEEKKVAVATAAPPSEEELNPYTIFPQPEENFKVHTEIFFSDGNIWRAHNTKEILEKHLKATGGKVMTRFPPEPNGYLHIGHAKAMFIDFGLAKERNGHCYLRFDDTNPEAEKKEYIDHIQEIVHWMGWEPYKVTYTSDYFQALYEHAVELIQKGLAYVDHQTAEEIKEYREKKMDSPWRGRPIEESLKLFEDMRRGLIAEGAATLRMKQDMQNENKNMSDLIAYRIKFTPHPHAGDKWCVYPSYDYAHCMVDSLENITHSLCTLEFDIRRPSYYWLLVALGLYQPYVWEYSRLNISNTVMSKRKLNRLVTEKWVDGWDDPRLLTLAGLRRRGVSSTAINSFIRGIGITRSDNSLIRVDRLEYHIREELNKTAPRTMVVLRPLKVVITNLEEGKVLDLDGKMWPDASDTDASSHYKVPFSRTVYIEKTDFRLKDSKDYYGLAPGKSVMLRYAFPIKCTDVISGDSPDDIVEIRAEYDPLKTSKLKGVLHWIAEPAPGVEPLKVEVRLFEKLFMSENPAELEDWLGDLNPHSKEVIKDAYAVPSLATAVLGDKFQFERLGYFAVDTDSTPEKLVFNRTVTLRDSFGKAGPK

SEQ ID NO: 56745 - protein, 732 aa, Zea Mays
MALDTGTAAGIDEAYEFSAPRFFDFVVEETEEAVRAAESWFEAARSHAPSPFNPRIKESRAEVKLAVLCDFAQAEEPAPEVNKQKEPADEMSGPPAAQEERDESPPSLEFLSATDLSVKSADGGSTSTLKMQTRYPAPPTNVAPASSTCDSSSVNTDARTPKMQVNMCRAGPTAASTNVKRSVMIKGGRDLVGTGKAATAGAEIAQENQAVKRQKLDDGRARQILNVKTKVLPHKARADLAGSEMRRSHEDMRSAKEADPYVSAAELVKKFESGTRELSITHSRCRSHEDAASQRSLRRPKLMLTRPKEPDFQTSQRVRTVKVKSSAEIEEEMLAKIPKFRARPFNKTIAEAPSFPPLPRRTPQIPEFNEFHLKTMERASRYADTCSEVSCADTIQSQNKTLKSRQAKPPQLHTAMRARPPSVKSFQELELEELEKAPKFKAKPLNKRILESKGDIGVFFHPKSQVTAPKKFHFSTDVRLGPPSVADLFDKLSLHSECSSNSNRQDVPRRTIPNPFNLQTEERGHLKERQLEAHLLQKKMEEEKARVHKANPYPYTTDYPTMPPKPEPKPCTRPEGFQLESSVRHELEQRRLMEEKQRMESEEAQRRIFKAQPVMKEDPFPLPEKERKPLTEVEQFVLHVDERAVQRSEFDTLIKEKEKTYKRLREENEFAHKIEEEKALKQLRRTMVPHARPLPKFDRPFRPQKSTKQVTRPKSPQLQVDERGARRHALIR

SEQ ID NO: 56746 - protein, 313 aa, Zea Mays
MTMMTPPPLEQQQGDEMLVPHQELPVAGPEPAPQPMEVVAQTEPANTAETQPPEDPQTSRFTWTIESFSRLNTKKHYSDAFVVGGYKWRVLIFPKGNNVDHLSLYLDVADSGSLPYGWSRYAQFSLAVVNQVHPKYTIRKDTQHQFNARESDWGFTSFMPLSDLYDPNRGYLVNDTVVIEAEVAVRRMVDYWTYDSKKETGFVGLKNQGATCYMNSLLQTLYHTPYFRKAVYHMPTTENDMPSGSIPLALQSLFYKLQYSDNSVATKELTKSFGWDTYDSFMQHDVQELNRVLCEKLEDKMKVNMKIMNYQYI

SEQ ID NO: 56747 - protein, 80 aa, Zea Mays
MGRVEDAIEILEHVLKVREEKLGTANPDVEDEKKRLAELLKEAGRSRNRKQKSLENLFGTNSQRAKKEAGRRWSNFGFRS

SEQ ID NO: 56748 - protein, 583 aa, Zea Mays
MWRGRPWRLWKSMVGYKVRLEGMRGRDTRLLFCTTGVLLRRLLVDRNLKGVTHVIVDEIHERGMNEDFLLIVLKDLLPRRPELRLILMSATLNAELFSSYFGGAPMIHIPGFTYPVRSHFLEDILEITGHWLTPYNQIDDYGQEKSWKMQKQALQKRKSQIASVVEDAVEAADLRDYSSRTRDSLSCWNPDSIGFNLIENVLCHICQKERSGAILVFMTGWDDINALKEQLQANPLLGNPSAVLLLACHGSMASSEQKLIFDKPEPGVRKIVLATNLAETSITINDVVFVVDCGKAKETSYDALNNTPCLLPTWISKASARQRRGRAGRVQPGECYHLYPRCVYDAFADYQLPELLRTPLQSLCLQIKSLRLGSISEFLSRALQSPESLSVQNAIEYLKVIGAFDQNEELTVLGKHLSMLPVEPKLGKMLIFGAIFNCLDPILTIVSGLSVRDPFLTPFDKKDLAESAKLQFSCRDYSDHLALVRAYDGWREAERDRAGYDYCWKNFLSVQTLKAIDSLRRQFLFLLKDTGLVDENMTMCNKWSRDENLVRAVICAGLYPEQGEIHLPQDNGRWTGYALFEFS

SEQ ID NO: 56749 - protein, 859 aa, Zea Mays
MASPQESNSLCLKRKLVDDCLSKDCKSRRVKSENEPSSDSFAKRCNCCCTRPNLANDCVNFLKSGAPNRVMYYKKGSWHNFPEQIMNSLIDEFKGNKSSVVSVMDDEPILVDFLSMTLVNLKTRKQRSVAWFDDTGKRFFPSLFFDEESDEMPKQDSGNVNNTAQGIMLDKVTSSPPEVVKQVVLESSPPVPQKPSTVDVLRKKITSVERGSEGFLFVQDLFLSGMNPFATPNNILHVHRYSPNDITAQCRFEAFERQMKSTKEARGDANVKYGWLGSRKSDIVRILINGLGTTANPVEKAGLSAGVYLSPENRAFTSVGLCDVDEKGVQYMLLCRMILGNVEAVEPGSQESFPSSEIYDSGVDDCSNPKCYVMWPSHLSTHIRLEYLVSFKLAPKVRNYLLDLKGLWFNPSLKELGTDICTLQPVMCETGEGPTSPWISFRVLFAVIQDNISSVARELIFHHYEELKESIITREEMVKKMIIVVGEKVLLEALKKLHYCPSLWYRPSVEAVSSDSVMAAPGKLSLDKAGGVFSLTLSVNHVDSHAPNGVSEQSTVLSTKGCETLAADMVPNGQDCPAPSGVPETSSSAVAMRGASTSVEPKRRDPPVQIVPPGSSATPCAKNQDSFVGRVTPIARDGLLRTICGSSSSPGGYASLAQANTSQTNGVSAPGVTPRGYESAVPSLSLGNSESTGVKQVNSAPRMTPEGQKFLSLGIAPRSPALRDLVKCQASSTLVAMPPAGLGKSRSMKIEGHDSLAPSVKEPKGNGGLAPSKTPKLHEPVIADMSIKSCDSLALGIAPNGHTHDGPASGSGEAKKEQAALVTGSQSKSSVPSLDASSHVTGAASALVALSTLREKGGR

SEQ ID NO: 56750 - protein, 334 aa, Zea Mays
MEAQIQQLEQEAYCSVLRAFKAQSDAITWEKEGLMTELRKELRVSDKAHRELLNKVNNDNIICSIREWRSTGGLQASMSNNPQPIHDPVPSPTTSGRKRQKTSQSVPALPAPPAMHSQQLATPTQPSSSTARKAVPPVPKGKKTKPGQKVPGGSAAKPMPSSAGPSGRGPHMNRNFPGGSAPEAQAQNVDPLVGRKVMSRWPEDNSFYEAVISDYNAETGLYVLVYDINTANETWEWVDLKEMGPEDIRWKEDDSGIDPVVYLRSRGAPSSGVRKPTGRGGPMPGSGRGRGLPKNMSRKDFPPPQNGVGKRSSDDIDILHTESLIKEVECLLLQ

SEQ ID NO: 56751 - protein, 971 aa, Zea Mays
MQLLFIFSDSFKLGCYVCSSEKPTAAVDALVFDPPSLRESSNARPAPCCTGNSSIVHVELSVKLRLLVALYSGCRIALCTIGKKGLRQPGSTRVERWLDTDDAMCTSVASEQQILAVGCSRGVVELYDLAENTRHIRTISLYDWGYSVEDTGPVACISWTPDNCALAVGWKFRGLTVWSVSGCRLMCTIRQTGSNSASSPMVKPSALKFEPLMGGTSHIQWDDNGYKLFAVEESLSERVLAFSFAKCCPNRGLSGTTYSHQVLYGEDRILLVQPDDADELKILHLNVPISYISQNWPVLHVVASNDGMYLAVAGSHGLVLYDLRNKRWRFFGDVTQEQKIQCKGLLWMRKIVIVCNYVESSNTYELLFFPRYHLDYSSLLYRKQLLGRPIVMDVFQDYILVTYSPFDVHIYHVVVSGELSPASNPVLKLSTLRELSIMSPKSPPVSMRFIPEQNDKGALTEDTHGFSDLLSQQPSRCLILRTNGELSVLDMDDGHEHTLTNSIELFWVTCSQFEEKGSLIKEVSWLDYGHRGMQVWYPSHGADRFKQEDFLQLDPELEFDREVYPLGLLPNVGVVVGVSQRMSFSTAEFPCFEPSPQAQTILHCLLRHLLQRDKIEEALLLANLSAEKPHFSHCLEWLLFTVFDADISRPSASKNQASQKVDSPKKSLLEKTCDLLRNFPEYMDVVVSVARKTDGRHWADLFSAAGRSTEMFEECFQQRWYRTAACYILVIAKLEGPAVSQYCALRLLQATLDESLYELAGELVRFLLRSGRDFENATSDSEKLSPRFLGYFLFRSPYKRQSSDLKSNSTKELSPHIASVMNILERHASYLMSGKELSKLVAFVKGTQFDLVEYLQRERQGSARLENFASALELIGQKLQMDTLQSRLDAEFLLAHMCSVKFKEWIVVLATLLRRTEVLVDLFQHDLRLWKAYSITLQSHDVFREYLDLLNILEEQLSSVSDLTLQNGPLS

SEQ ID NO: 56752 - protein, 61 aa, Zea Mays
MNDLNKQYPSQAQYVIPYDLIVKLMFWEVELHALQVQQPWCLQQSLGAKYLYNPSTKKKGA

SEQ ID NO: 56753 - protein, 255 aa, Zea Mays
MRGGTLQINWHDQQPVLSLDFHPVSRRLATAGADHDVKIWEVASDGKLPTATFKTGLVPNTTAHSSAVNVLRFSPSGEYLASGADGGGITLWKLHPADDGEAWKIHKTLLFHHKDVLDLQWSHDSTFLVSASVDNTCIIWEASKGTVQQKLEGHLHYVQGVAWDPLGQYIASLSSDRTCKIYAKKPQGKSKNAERLNFVCQHTLVKVEYQNHDESKPPTKSHLFHDETLPSFFRRLAWSPDGSFLVLPAANSLSP

SEQ ID NO: 56754 - protein, 80 aa, Zea Mays
MCVESICKIAAVIVCVVLIQLFFRRKHVLPSRDGWTGVATIRAVAGQYRVLSASLFLPLRDVVCNRGFVLHCLYSEVLFI

SEQ ID NO: 56755 - protein, 91 aa, Zea Mays
MKRIGNELDTVHFSLKKASQLVKEIGRQVATDKCIMAFLFLIVLGVIAIIVVKIVHPNNKNIRDIPGLAPPAQNYQIHNRRLLWAEASIGM

SEQ ID NO: 56756 - protein, 401 aa, Zea Mays
MYGETPLHMAVKNSSCGSTNLLLEHGAHIEAKANNGMTPLHLAVWHAIQAGDFSTVSVLLSYNPDCFVKDDEGKMPLNHIPGGAGSEKLLKLLTHHMEEQRKRKALMSCLEGKAMSEFEEAMSQIVGLQELKMQLRRWARGMFFDEKRRAMGLGIAKRRAPHMAFLGNPGTGKTMVARILGKLLHMVGILPTDKVTEVQRTDLVGEFVGHTGPKTRRKIHDAEGGILFVDEAYRLIPMQKSDDKDYGLEALEEIMSVMDSGKIVVVFAGYCEPMKRVIASNDGFCRRVTKFFYFDDFSTTELAEILHMKMKSPSDCSLLYGFKLHPSCSIEAIGELIAREITEEQRKQMNGGLVDTLLINARENLDSRLDFSCNDADTMITITLEDLEAGLRQISRQRHLQ

SEQ ID NO: 56757 - protein, 133 aa, Zea Mays
MIRRLLFQVNGSEFAIISLMASENDLRIPESLPCLHDKVLAAAAEAAMSFSTDQRRKQNPAAGIIGGFIKGMKGKAEENAKMRESLTLRAPSEQLESIFSKEPFAEPSIPDLDDPMEELSIGSLSPSLCIILY

SEQ ID NO: 56758 - protein, 341 aa, Zea Mays
MSVTVGVDEVPDFVFLAHVVDVMQSLHVPFVMRTFASTPFSVQLFLLPMWPFAFLVMLAMWVWSKTFVISCYNLRGRLHQIWAVPRYGFQYFLPFAKDGINRQIELAILRADKMGVKVLSLAALNKNEALNGGGTLFVNKHPDLRVRVVHGNTLTAAVILNEIPKGTAEVFLTGATSKLGRAIALYLCKKRVRVMMMTLSTERFQKIQKEAPAEFQQYLVQVTKYRSAQHCRTWIVGKWLSPREQRWAPPGTHFHQFVVPPIIGFRRDCTYGKLAAMRLPKDVRGLGACEYSLERGVVHACHAGGVVHFLEGYTHHEVGAIDVDRIDVVWEAALKHGLRPA

SEQ ID NO: 56759 - protein, 2447 aa, Zea Mays
MPAMAPEDDEALYEIHRHASGSHVIPHQEEYQGAATSCGSSDAGGGGVLSYLSLQGVSKLKEKWDRYRVLGKSRQRKKGDGVALFVSPNAEYVSVTVGNHIIILRKADGYASPCGVYTNNDRIAFFTNGAWLEAQGVFGVVDDLSTLYLIKENGELLARRTCDQLKLSSSIIDLVLQDGTSLLRPGFYIFTSDCLVHRFDYTEEPEACLCEVPISTKDAMSARTIQLPRSLSCIDYHQRHSLFVLVGDSNVSFSSNSYSGTYFMYLLHFNKNLELSLSFKSMQLEGVFCPLKDQRTFVSSPKIRISPQGKYIATLDLTGFVNFFSLDGDLRTVPLQTLGKARHLIDVKDISWWTDNVLMLVRKDGSISMYSITEDKIVSNDDPVLSTPILEKAKATEGHAFVLQSRRYGTNTPVNKRMDSDSEPCLLSGSGEHQQTEGDEMSWSLISFSKVTVAEMYSVLIREKRYKDALDFASRYNLDKDEVLKACWLHSDANTHEIDSYLAKIKDQVFVLSECVNKVGPTEADLRALLSFGLCITDCYRFSELDNSSKGSTWDSRTIRLRLLRHIDMLETFLGINMGRYAAGEYSKFRSMPLVETAIALAESGKIGALNLIFKRHPYTVSSDILRVLSAIPETLAVQTYSQLLPGKSLPSVVILRAGDWVECEQMASYINNCPAELDKVEEIKTEILVKHSKGFSWPSVAELCEWYKNRARDIDCLSGQLENSLAMIELACQKGIVELQPFFDDIKCLYQVVYSNELNEFTMNLLTWEDLPDYEKFKIILKGVKEDTVVQRLEENAIRFMKKLYEHKQESYLVSWLKEVAAKNELLICLAVIENGCGESPIYGLFKDLAEMIETSVHCIYMCSATNQWNTMSSILSKSLYKTKREKSLVASEEDCNLKDAKHALGSSMVSYEEMQCVCADILSGLGNAPEDFYHYDSVPDKPNDVKYLDILEKRLKVAEGHVEVGRLFAYYQVPKSMHFFLSAHLDEKNVRQIIRLLLSKFGRRQPVRSDNEWANMWRDLKLFQEKAFPFLDSEYMLAEFIRGLLKAGKFSLARNYLGGTSAVSLSTEKAENLVIQAAREYFFSASTLSGNEIWKARECLNLLPNSKNVQAETDIIDALTVRLPYLGVTILPLQFRQVKDPMDIIRMVITCQAGAYLHFEEIIDVAKLLGLRSEEEVADVEEAIAREAVVNGDLQLALDICLNLTKKSHGAVWDLCAAIARGPPLDNLDTGTREKLLGFALSHCDDDSVGELLNAWKELHAQGTFEKLMITTATNPPNFLIDGSSITPLPVQSVQDILDLRDDNGHDRRSDLVGIVKDMLSKVCLDFSNGDTHNWESMLEENRKLLCFGALVLPWLLKLFSNEACDGEIMDHLTRRCRFSTKVKAATSIIYWLVINGLAPNDNIIMILAKSIMEPPIDEEFDVLGCSVLLNLMDPFNGVKIIEEELKRRESYQEISSIMSVGMLYSSLNNSKKECSTPEQRRNLLLHKFHEKFTSADTDDLDQVDMANTTFWREWKSKLEEDKQLADQARMLKQILPDIDTSRFLSGDVNYIKIVVYSFVNSVKMEKKHILKEAVRIAEAYGLQRTEVLLRFLACSLVSEYWDNNDILNEISEFREDIVSSAKGVIDMIYSDVYLEIDGYNKQRLSYIYGILSACHSYLKRTNEIELRYPVHVHTHKLEPFQYYKVLEEECKKVCFIDGLNFKNIAGLDNLNFEHFNDEVCKNIHASTVTAIADMVQSLVSMYVDVLAKGLISQQGVYKHYVLGLLASLEGRSEAQSNNTDYEKLQASLCEFELNYDSCREYIQALPATDISYIVRRYCTLCFPSNLARSHPQEPSWRKPLATLLEFWSKVVDDIPGDSIDACSYGRTDYLNSNRLSLCMRAFRQLLIIDEIALHQGWDAISMYVKDCLRNGKMMETPCFCRAMILSGCSFESVVEVYFGGQGQLGSENADPSNYLDLLELYNAATEKCLSDLSEESCEYRILLHNLLSSLSRSTGKHAGALEMVRSGVWGKLIRYSEDMQLESQLRVYALQLMQCITGRNLKSLPNEMVCQVEPWESWYEHGAGAAIADESINSSSSITGTLVALRSTQMVAAVLPDANITPENLATLDSAVSCFLKLSERASGVSVAVFEAVLEEWEQLFSPKEEHVAPHESPKETSDWSDGWDDGWEALPEELESPKNKQEGVLLSVHPLHSCWMEIIRKRVELGELHKVLELLDRASLKHSVFLEEEEAHSLVELVSALDCFMALKTVLLLPYESLRLQCLQMVEVKMREGIVSTSSNADDQELLALVLSSGTMQKIITEEAYSKFFSYICHLVGHLARSFQTDLLVQWNEATSKINRSLLFARVLFPCFVSELVLGGQYLLAGFVISRWMHTHPSLGLMDITETSVRCFLQGQVAQLDEVGGSDAALTDGEVCVRHTISTLQPKLVSLLQSALALSNKEL

SEQ ID NO: 56760 - protein, 79 aa, Zea Mays
MKHGLPPDTPAVAVERGTTPQQRMVFALLKDLVDEVKSADLVSPTLIIIGKVVSLSPFWVESSEHDALKIESSYASEAR

SEQ ID NO: 56761 - protein, 216 aa, Zea Mays
MNSAGRQDRHNLGMHPPYMIRCCLGMKWRQEDAYRTAADARHESAWGQESISMHRIDRKKSTAWSSRNFKERGGGKTRRWRAELELLVAGSKGSSPDSPLGRSSIEVHLLKSISLPVIHTCDPLPSATRTAVVLVLQIAVAIHKYIRYAPASFCDIHTCPFASGLSAPIRPCLLSCFGSHESLSCLPLFIFVCSAFAHGWTGTCTLLSILCAAFTF

SEQ ID NO: 56762 - protein, 757 aa, Zea Mays
MEVEEPLPTSKNPRRARRRDLNALDPTLEESDGEDIGVPEVGMVFNNHTEVNRFYRRYARRVGFGVSVRRSSFSREGTCLYLELMCCKGGRPRYEPKFRKRASSTTNCPAKVRVKLWGDKLLHIELAILDHNHPVSPAMARFLNSYKQLSGPAKRRLRMGGPGTMPVEESSKMPMDKLGELEQLLFGESKHNSFVERGRLKLQPGDSEALRLFFTRMQAKNANFFNVIDLDDEGCTRNVFWADARSRAMCEYYSDVITLDTSYVASKYDMPLATFIGVNHHGQSVLMGCALLSDETAETYSWLLKSWIACMYGNLPKAIVTDYCRGIQSAVAEIIPGVRHRMCLFQIMRKAAERLGGLSEYRAINKAMHKAVYDSLTIDEFEEEWNTLITYSGLQSNDWLRSLYECRSSWVPVFIKDTFWAGMSTTQRNETITPFFDGYVDLKTTLKQFLVKYEMALQSKYEKEAQADFETFHKQRPPVSKFYMEEQLSKVYTHNMFKKFQDEIEAIMYCHVSLISVDGPVSTFNVKECIFFEDGKRTMSKIFAVTYKVDEKNISCICGGFQFSGILCRHSLSMLKFQLVREIPQHYILDRWKKDFRQLHVMRRPPSDLVPNNRMDRYDYLSIRCLQLVDSAVLSDKYRLALRLVRETEKFLLNSNTHDDTQPRIKSRVPKVNKPNIVTGQTMVGAATGNGNDGLKGPEATAVTQVPQSQKGGAEKGIVPTGYIGVPANLQQFVGNQTAFRPSIVYMVPPSPCVLHQ

SEQ ID NO: 56763 - protein, 690 aa, Zea Mays
MDRSINFRGIAGSAGNIMQGMGKFVFGNEGLDSKEDSYVERYLDRISNGTIPDDRRSAMTELQSLVAESRLAQMSFGAMGFPILLNIFKEDREDVELVRGALETFVSALTPIEMSQGPKTEVQPASVNSDLLSRETENISLLLSLLSEEDFYVRYYTIQLLTALLTNSLKRLQEAILLIPRGITVLMDMLMDREVIRNEALLLLTYLTRDAEEIQKIVVFEGVFEKIFSIIREEGYSDGGVVVQHLTPSLNSTSFDDWWEEMLLKETMGFDPLISILKIRRGSAFNFTQQKTVNLLAALNTVELLLMVGPSGEAGKDANKNANQTALAQKNILDHLLLLGVESQWAPVALRCMRNPNGQALLASTIAPHPNQGDIHEPASDMPFGSVLLQALVSSDVNGDMEACCRASSVLSHIIKDNLQSKDRVLQIQLETSTASLGRTEPVLHRIVTCLSIAASMEGENDQNNQLEEPYIQPFILRLLIIWLVDCSNAVNCLLESAVHLNFIIELASNKRYAACVRGLAAVVLGACILYNASREKGRDAFAVADAISQKIGLTTYFLRFDELRKSLAHPLSEQHHRKELSRSSANSMSDFQEIEEDETNKGDQHPVLSEIFDSQFVNLLTKLEADIRENIMDIFSRTKTATAVLPTELEQKNGEVDEEYIKRLKSFVEKQCNEMQCFSDTAVPESIRS

SEQ ID NO: 56764 - protein, 64 aa, Zea Mays
MLTLEVICIVTARSTTALVVGSKRSAVSERSELRTFGWQQRVFISRLTEASEKALSVFTSFNVN

SEQ ID NO: 56765 - protein, 455 aa, Zea Mays
MANQLKKLIEDMAEQSLRCIAFAYRNLDMKDVPSEEQRINWQLPDNELTLIGIIGMKDPCRPEVRDAVELCKKAGVKVRMVTGDNLKTAKAIALECGILDDSEASAQAIIEGRVFRAYDDTERENVADKISVMARSSPNDKLLLVKALKKIGHVVAVTGDGTNDAPALHEADIGLSMGIQGTEVAKESSDIIILDDNFSSVVKVVRWGRSVYANIQKFIQFQLTVNVAALVINVVAAVSSGNVPLNAVQLLWVNLIMDTLGALALATEPPTDQLMRRPPVGRREPLVTNIMWRNLFIQAVFQVAVLLTLNFRGRDLLHLTHDTLGHSSKVKNTLIFNTFVLCQVFNEVNSRKPEELNIFSGVSRNHLFLAVVSITVVMQVIIIEFLGKFTSTVRLNWKLWLVSVVIAFLSWPLAFVGKFIPVPRTELKDLIVRCWPKRGESAAQQTQDDRMEVPV

SEQ ID NO: 56766 - protein, 193 aa, Zea Mays
MYKFVGVAALSGCCEVTIPMENLDHHVSLSFVAAHGSDKFLLRNILDTYSLIQDQVVLASKLETAPVTNVDVDVNASELLKEKGNSAFKRRQWIKAIEFYSEAISLSDTNATYYCNRAAAYLELGRFKQAEADCDRALLLDRKNVKAYLRRGFAREVTLNYKEALQDFRHALALEPQNKTALAAERRLQKLLK

SEQ ID NO: 56767 - protein, 206 aa, Zea Mays
MLINAECALLLWGFYRILSGDPGIVACDSSYLEEAGCKDFVEAIYSSEKLPMLSRVRQCTWCKANIRGYDHHCPAFGTCIGQKNHRLFMALLTGFVVAESTYTMCSTKYITRCISSGTIRSENPVSLNIVISTTLFSILQVLWQIVFLMWHIYCICFNIKTDEWINWKKYPEFQMKEQPRSDSEVKFVNPYDKGMLCNIREFLKPE

SEQ ID NO: 56768 - protein, 257 aa, Zea Mays
MARQIATANGPTGYNRDYLFSMEKALAIISHEDDSILELANEVRKVLNRTKETKITERLCSPEYKSLRVYCSWRCRVRELFYYLKGEQVDYGEEHSKACGHNRFGRIYHTGHYPVCYEHNPVHFVGHSVGTQVVRVLHQMLADKLIALDMGALIAGAKYHGEFEDRPKAVLKEVTYSDGQTILFIDEIHKLQMPWLQKAKLLLRELKTVKADLSFAKERYAQLEEENKMLRESYDMGDNPEANDQLKMIHMMGRESV

SEQ ID NO: 56769 - protein, 291 aa, Zea Mays
MEAHASRGRRTLEEIRQKRAAERMQHALPIAASHVDSHGNQRAGAELLARVQELENGNTELVRENKMLLSKIDEKGVEKDALVNRLNDLERNVVPSLQKNLNDISLEKDAAVVAKEDALAQLRSMKKRLKEAEEEQYKAEEDSASLRAQLNTLQQQVMGHSYSGYTMGISTEESVAMEKEIQDLQAQLKQESLLRQQEQQKLAEESQLRQQEQEKLAKEQIHIASLEAEKQQLEDQITMLTKKATGMEDTYTYANLSFIMSGKTTVHASKHVSSLYLLACVFFHIYILQCL

SEQ ID NO: 56770 - protein, 550 aa, Zea Mays
MNFRDIFLYSHALEGITLSMILEAPKEEEVSLLLEIFGICLTGGKEVNNAIVSSIQDLAKSFSNYHDEVLVKREELLQFTQSAISGLKRNADIVRIDSEALDLWKKLHEKEASRAQSIGDPDKVTEKTSTIESFKEALNEVRFCSRMEELLLKKKTINTGDSLEIHSQKVEKLKVLATSLANSSSKAEKRILDHRRQKEEALNFRAKKENEVIAVEKDLTAEISELEKQKDELEAQLKKVNISLNAAICRLKQTREERDQFHEANNQMIFTLQAKENDLSKSIDSCNMEASVVKTWVNFLEDTWQLQLSYNEQKETKTNDELERCTSSFLKLTKHHLSYFKEVLSPSIERIRTYVDNLAVLNSREESIEHEGDDEISVQTSPQKSLEEEYLETEKKIVIAFSIVDRMKKMFYSEQAANSRQDDAEVRTLFSEIEKLKEVFESVERPTLDIEVRKAKDPMKDKSGSNRSAKDKSESSHSPVQVPSSPKDVPVESPKSPVKPEQTMDPDSEFAKLELEFGKVNRDHEEIGGWDFDELEEELRADLSKSTNPK

SEQ ID NO: 56771 - protein, 166 aa, Zea Mays
MDPKEKPNVSSSPPTPRLDCIKCFDMLWFCYSPFHQMQNYYRYGEFDTCFGKWGDLMGCLALKTKRKAEVEEILIAREKAKPHIWTYRTVDEASENWWRMYKHAVMMSPLPGSAQLPRVPKPTSECAACPSPDGSSAWASAEGGEARRPEPSVREVEVPRPSCSSR

SEQ ID NO: 56772 - protein, 186 aa, Zea Mays
MKTGIVESDLVLTVSPHYVKELTYGPDKGVELDGVLRTKPLEIGIVNGMDVYEWDPSTDKYTSVKYDATTVTEAKALNKERLQAEVGLPVDSSIPVIVFVGRLEEQKGSDILIAAIPEFVGENVQIIVLGTGKKKMEEELMQLEVKYPNIARGIAKFNVPLAHMMFAGSDFIIVPNSHLFITWRTC

SEQ ID NO: 56773 - protein, 551 aa, Zea Mays
MGNTCIGPSAPSDRHSFFNTVSLAVLWRPPAAADRAEPSPTAEPSSSTPCSPPSRAPNPVTISDSEHPPHSTSTALGPAAPPNPNGKPKPKPKVKRVQSAGLLAGSVLKRDSERLKDVYTLGKKLGQGQFGTTYQCVEKATGKHFACKSIAKRKLVTDEDVEDVRREIQIMHHLAGHPNVVSIVGAYEDAVAVHLVMELCAGGELFDRIIQRGHYSEKAAAQLAREDAPLKAIDFGLSIFFKPGEIFSDVVGSPYYVAPEVLKKRYGCEVDVWSAGVIIYILLSGVPPFWAESEQGIFKQVLKGGLDFSSDPWPSISESAKDLVRKMLNRDPRKRLTAHDALCHPWVCVDGVAPDKPLDSAVLTRLKQFSAMNKLKKMALRVIAENLSEDEIAGLKEMFKMLDTDNSGQITLEELKIGLKRVGANLKDSEITTLMEAADIDNSGSIDYGEFLAATLHLNKVEREDNLFAAFSYFDKDGSGYITHDELQKACEEFGIEDAHLEDIIHDVDQDNDGRIDYNEFVTMMQKGNNPLGKKGHCQMSFGLREALKLG

SEQ ID NO: 56774 - protein, 359 aa, Zea Mays
MRKPEEITKEEYAAFYKSLTNDWEEHLAVKHFSVEGQLEFKAVLFVPKRAPFDLFDTRKKQNNIKLYVRRVFIMDNCEELIPEWLSFVKGIVDSEDLPLNISRETLQQNKILKVIRKNLVKKCVELFFEIAENKEDYNKFYEAFSKNLKLGIHEDSQNRGKIAELLRYHSTKSGDELTSLKDYVTRMKEGQNDIYYITGESKKAVENSPFLEKLKKRGYEVLYMVDAIDEYAVGQLKDLRVCARSSRRFWATRLRRLWCLTVFKKTMEINPENPIMDELRKRAEADKNDKSVKDLVMLLFETALLTSGFSLDDPNTFGTRIHRMLKLGLSIDEDKSAEAEAEMPPLEDDAGESKMEEVD

SEQ ID NO: 56775 - protein, 88 aa, Zea Mays
MTSLLRPSSMFVEDLVLQQPYTKERYGSARKVYVVCTEDHAIAEGFQRWMVENSPVDEVREIVADHLVMLSRPSDLVRCLADIADKYA

SEQ ID NO: 56776 - protein, 78 aa, Zea Mays
MEVGIEDCLHIEFEYSKSKYHLNDVIIGKIYFLLVRIKIKNMELEIRRRESTGSGSNTYVETETLAKFELMDGAPVRV

SEQ ID NO: 56777 - protein, 1064 aa, Zea Mays
MCSSMDSSFIQGYFLLDQKIAALKYSSNDWARHFGIGSLVEAEVGAIEEYGIILNFKDHLDTVGLIEHHQLGGSSVEVGSSVKGLVLDLSDGVVNLSVKPELIDSVRIVGKKKKRQRAVVADLELHEEVNAVVEIIKDSYMVLSIPEYNYAIGFSPLMDYNSQLLPHHHYDNGQRITVVVGNIPSSDSSGRLILLPKASAQYSSLSDSKRAKKKSGYKIGSLVEAEIIDIKPLELLLKFGGNLHGRIHITEILEEDSAEHPFSELRIGQKLTARIVSEAEPSGKSGKKFKWELSIRPCIVNGEFAQKEQNHTTNGIVRAYVVKVDKEWVWLTVSRNVMAHLFLLDSSSEPSELKEFQQRFSVGQAVKGRVISVNQEKRLLRLKALDNQCTQPNIDETQEPKSSVFGQTKQGDIIGGRVQKILPGVGGLVVQIGPHLHGRVHYTEIVDSWVSEPLSGFHEGQFVKCKVLSVSRSSEGSLRVDLSLRSSNLIRDSNNSRLDDLETCTSRIEKIKDLLPGTEIKGYVKNVNSKGCFIMLSRMVDARITLSNLSDEYVENPQKDFPVGMLVHGRILSTDPSSGRVEASLRKTTGSKLEKLDDISYSDLHVGDIVDGQVKRVESFGLFVTIRRSELVGLCHVSELSDEPVVDINSCYKAGDMVKAKILKIDETRHRVSLGMKKSYFDSDLTADTNDDESALMDISVAPQMVEYHNRNLVHRKAEPRASVLPLQVSLDESEGSDLEDNISNTCLEIANGTEANAKKSDKQLKKEARKQRELEISAMEERALQEDIPQTPDDFEKLVRSSPNSSFIWIKYMATLLDLADVEKARAVAERALKTIIPREEEEKLNVWVAYFNLENEYGSPREDAVKKVFQRALQYCDPKKLHLALLAMYERTEQYELADELLDRMTKRFKTSCKIWLCRIQFALKQGKDVEYIKAIVNRALLSLPHRKRIKFLSQTAILEFKCGVPEEGRSRFELILREYPKRTDLWSVYLDQEIRLGDVEVIRALFERVTCLTLPPKKMQFLFKKYLNFEKSLGKDNERIQLVQQKAIEYVQSSLPSQDNS

SEQ ID NO: 56778 - protein, 466 aa, Zea Mays
METLTCQKLLATVVRRKHTCTYLVQLDSWRDLTRAFASGRSLLSLSGRLQRSLAETLASAASCIKDPEASAQYLRDLMGPVAGCLVENASRSDLKSVAQQADVIYMVCCLLERLRGAARATQPRTQKVLFEMAHTVMNPLLTLLEVYKNHSTVVYMILKFVVDFVDGQAVFLDAKETSALVSFCLQLLQIYSSHNIGKVMLSLSSSLRNESQAEKYKDLRALLRLLTNICSKDLVGFLSDCGGEGSPDIAEVIYIGLDIVTPLISLDLLKYPKLSRDYFVLISHLLELYPEKVAHLNSDAFTRIIGSLDFGLRNQDSDVVERCLAAVNALASYNFKERLGGRGRLNSQLMESEGSNGKLQESISSHFLRLLLQILLFEDFRSELAGYAADALLPLLFCEQELYQRLVHELLDKQQNPTVKSRLATAFHNLTSSNNLSSSLDRPNRQRFRKNLLSFMADVSGFMQIK

SEQ ID NO: 56779 - protein, 162 aa, Zea Mays
MAARCPYFAVEESSRGIRSGESPAAALRRILATPGAHQAPCCYDALGARLVERAGFPIGFMGGFCVSAARLGLPDVGLISYGEMVDQGRLINEAVSIPVIGDGDNGYGNSMNIKRTIKGYINAGFAGIMLEDQVAKKTAKRAVSEAKGRAYDDLYRRLSTKE

SEQ ID NO: 56780 - protein, 517 aa, Zea Mays
MSSTTSRLLAIKYEKGSFITSTGALATLSGAKTGRSPRDKRVVKDEVAARDLWWGKGSPNIEMDEHTFLTNRERAVDYLNSLDKVFVNDQFLNWDPENRIKVRIISARAYHSLFMHNMCIRPTDEELESFGTPDFTIYNAGQFPCNRYTHYMTSSTSVDINLARREMVILGTQYAGEMKKGLFGVMHYLMPKRGILSLHSGCNMGKDGDVALFFGLSGTGKTTLSTDHNRLLIGDDEHCWSENGVSNIEGGCYAKCIDLSQEKEPDIWNAIKFGAVLENVVFDEHTREVDYTDKSVTENTRAAYPIEYIPNAKIPCVGPHPKNVILLACDAFGVLPPVSKLDLAQTMYHFISGYTALVAGTEDGIKEPQATFSACFGAAFIMLHPTKYAAMLAEKMQKYGATGWLVNTGWSGGRYGVGKRIRLPYTRKIIDAIHSGELLTANYQKTEVFGLEIPTEIKGVPSEILDPINTWTDKAAYKETLLRLAGLFKKNFEVFASYKIGDDSNLTDEILAAGPNF

SEQ ID NO: 56781 - protein, 287 aa, Zea Mays
MLPCTFHISTVITELKQFLRGSIAIAMEAGRMDQPFMAAINSQPFVEDIEPVKKASGDMPATTGSGCFECNICLDFASEPVVTFCGHLYCWPCIYEWLRPGVESAASDNSSSARRQCPVCKATLSTDTLVPLYGRGGNSKKSLDGMAIPRRPMVHRETVEEQQNAQSNVNDQHYHQSMEDNSQRQPLLQAHHHPIPTGFDFIYPPAPVGRGLIHSTAGGVLGGMAEIVLPLALRGQMPASLYYTNPYHAATQNVNPRLRRHQMEIERSLHQIWFFLCVFVVLCLLLF

SEQ ID NO: 56782 - protein, 629 aa, Zea Mays
MAAANAPIAMREALTLTSLGIAPQFVTFTHVTMESEKYICVRETSPQNSVVIIDMAMPMQPLRRPITADSALMNPNTRILALKAQIPGTTQDHLQIFNIEAKTKVKSHQMPEQVVFWKWITPKLLGLVTQTSVYHWSIEGDSEPLKMFDRTANLANNQIINYRCDPAEKWLVLIGIAPGAPERPQLVKGNMQLFSVDQQRSQALEAHAASFATFKVVGNENPSTLICFASKTTNAGQITSKLHVIELGAQPGKPGFSKKQADLFFPPDFQDDFPVAMQVSQKYGLIYVITKLGLLFVYDLETAAAVYRNRISPDPIFLTAESSSTGGFYAINRRGQVLHATLNNLELAVNLAKRANLPGAENLVVQRFQELFAQTKYKEAAELAAESPQGLLRTPETVAKFQSVPVQAGQTPPLLQYFGTLLTRGKLNAFESLELSRLVVNQNKKNLLENWLAEDKLECSEELGDLVKTVDNDLALKIYIKARATPKVVAAFAERREFDKILIYSKQVGYTPDYLFLLQTILRTDPQGAVNFALMMSQMEGGCPVDYNTITDLFLQRNMIREATAFLLDVLKPNLPEHAFLQTKVLEINLVTYPNVADAILANGMFSHYDRPRIAQLCEKAGLYLRALQ

SEQ ID NO: 56783 - protein, 294 aa, Zea Mays
MSTRAAGSALLRHLGPRVFGPVFSPAAEAVEAAKEGDGKRDKVVSSYWGVAPSKLMNKDGAEWRWSCFRPWEAYKPDTTIDLNRHHEPKVLLDKIAYWTVKLLRVPTDIFFQRRYGCRAMMLETVAAVPGMVGGMLLHLRSLRRFEHSGGWIRALLEEAENERMHLMTFMEVAKPKWYERALVLAVQGVFFNAYFLGYLISPKFAHRVVGYLEEEAIHSYTEYLKDLEAGKIENVPAPAIAIDYWQLPADATLKDVVVVVRSDEAHHRDVNHFASDIHFQGMQLKETPAPIEYH

SEQ ID NO: 56784 - protein, 540 aa, Zea Mays
MKMKALACCRRRPQDLSIDMDQEPDRVMTYNGLETCIINCSAYDDDSGISATTCGDGCVTADSLDDEVSSCFSKDASGSSFSSHCLSKQEEHSLDELGTPIAIHLLPFKAKKPITYTLSASDIENMKKKFAKLLLGYDTSGGARGVCAALALSNGIINLSATVFGELWKLEPLCEDKKIRWRKEMDWLMSPTTYIVELVPRKQSGADGCTFEIMTPKARSDVHVNLPALQKLDTMLIEVMDSMIDTEFWYEESGSRADGPVKITGPRKSKKWWLPSPRVPEQGLSRFQRKRLVFQAKLVHQILKAAKSINEQVLFHMPIPAAVMDALPKSGRASLGEDLYQAITTEYIPIEEIFVSLSLKTEHSVLETMNQLEGAMFAWNQRILEERSKRSPGRHSWSFMKDSSSELDKMSACIERVDTLVQLLKARYPNLPPTFIDVLKVQYNVDVGNAIVEAYSRVLVGVAFSILSRVAEILLEDDLVKRPNTPMASLKFDLSSDVYLAGITETPPGHVRRSLMDQISMVDGRFNAAVKKKGAKQLRW

SEQ ID NO: 56785 - protein, 145 aa, Zea Mays
MTVSSSSECRRPPVSSSSSSSSLRRDEARRSGDETEEASTPTAAPATKHDEEPQPQPQECYDFPMDQLWNEIAAADAAAMSYLVVDACWGGAAVGGHCYYYGAAAASAASPPPPASPPWEYCGSDFSLWRIDDQEYYKKMLDSSS

SEQ ID NO: 56786 - protein, 147 aa, Zea Mays
MCYNRRMEKNTMFLLSVLRVVAAWSILAAYTIPFFIIPRTVHPLLGWPLYLLGSFALSSIVINIFLFHPITVLTTWFGFIGALLVMAFPWYLNGFVRALAVFAYAFCCAPLIWASLVKTMSSLQVLIERDAFRLGEPSQNAEFTKLY

SEQ ID NO: 56787 - protein, 120 aa, Zea Mays
MEDAKMGNGATIRAVLAILQWWGFNVTVIIINKWIFQKLEFKFPLTVSCVHFICSSIGAYIAIKVLRTKPLIEVASEDRWRRIFPMSLVFCVNIVLGNVSLRYIPVSFMQTIKSFTPATT

SEQ ID NO: 56788 - protein, 645 aa, Zea Mays
MRHLALLALLLAPVLGSTGTTLSPSPAATDSPANQGQASSPPQSAFALGPVAVPTAPTTPSASPSPEKAAAVSPAAPTEPRIAPAPVAPPKEYSAPPPVEVAPTDPTDEVPPPVAPPQAAVGNPTPILPGTPALLPYVQAPAPSVVLKPNPPVVVSPPPANNQPIPPYPPPASPPPANGIPPYPPSGRFPAIPPATSVPPPATSPVIAQAPQRRADPPSRDYKNGNAVPPANTYPPTNLKKHHVPHASPPKGSTGQTVPGHKSPVTGSAPATSPLPQNTNMPSIPKNASSVPHAHPSPPSIAPELAPTGRSHAQGWKSSNPNNKTNRLHAPSYPPPRAQGPEVSRTPRQTGTKNYTHHAPPPFPQGHPSFPVHSPSPSPASSRGPANAKKRNHISPTLPSIPPLPEPKAPSAHPIWTLPPPPPNSDCNSLSCPEPLTDPPAGAPCACVLPIRVGIRLSVDLYSFFPLVSDFAEEVASGVNMAQRQVRVMGANVAGDQPDKTMVLVDLVPVQVKFDNATAFSAFESLWSKKVSLKPSVFGNYEILYVVYPGLPPSPPSGQGVGDGAFGNNRNARAVKPLGVDVRSPKRKVNGSLIAIVVLSTVIALIICCLAAWSLILRFRGPSHTARGFPHTALPKFSRSSGTCN

SEQ ID NO: 56789 - protein, 253 aa, Zea Mays
MYGHGELPQAFCRCAAVKGAIYVLRMPVVALLMDEEKKHFVGARLVSGQDILCQQLIIDPSYKTILDVPFDGSDSHFPRKVVRGVCIISKSVKQGSSNVLVIFPPKSLEEQQVTAVRLLQLSSNLAVCPPGMFMSYLSTPCTDVSVGKQCIKKAIDALYSPQASDGSEDHLETASESTEDVKPTLIWSCVYVQEITQGTAGPLLSCPMPDEYLDYRNILGSTKKLFASIYADEEFLPKKSAPVYANDDSDSAE

SEQ ID NO: 56790 - protein, 2084 aa, Zea Mays
MLAPLPRLTSALRGHYDADQAYLLRKSALQALTLPRPHDEWKFARKIVPGWDDASSEVRQAYKQFIGAVVELLSGEAVSEELYQVAQTVYTLFGGDDTEYVGAKKVLSKRNELESLVGYTVQDSVLKKLAQLAQKLDSLQRASAYESVHRIADDVNENDRIEFGADFDFKPLARFIVDVSLDAPLESAELGSGPFEKWQYDAWSTSTTSHSTAVRGSVSLRWLKDQCALITKSGGSMLSGDELAMTLCRVLLSNKAGDQIAGELLDLVGDTAFEIVQDLLLHRKELVDAIQHGLSILKSEKMTSGNQPKMPTYGTQVTVQTESERQLDKIRRKEERRSKRSADSGNNDIGVDDFSSLLLASERKEAFDDVIGSGEGSDSFTVTSLPQGTTRKHMKGYEEVKIPPTPTASLKPNEKLIEIKELDEFAQAAFQGYKSLNRVQSRIFQATYYTNENILVCAPTGAGKTNIAMIAVLHEVKQHFRDGILHKNEFKIVYVAPMKALAAEVTATFSRRLSPLNLVVRELTGDMQLTKNEIEETQMIVTTPEKWDVITRKSSDMSLSMLVKLIIIDEVHLLNDDRGSVIEALVARTLRQVESMQSMIRIVGLSATLPTYLEVAHFLRVNPDTGLFFFDSSYRPVPLAQQYIGISERDYTKRSELFNTLCYEKVVESIKQGHQALVFVHTRKDTGKTARTLIDLAAKAGELELFSSADHPQFPLIKKDVSKAKSREVVEFFESGFGIHNAGMMRSDRSLMERLFGDGLLKVLVCTATLAWGVNLPAHTVVIKGTQLYDPKAGGWRDLGMLDVMQIFGRAGRPQFDKSGEGIIITTHDKLAYYLRLLTSQLPIESQFLGSLKDNLNAEVALGTVTNVREACTWLGYTYLFIRMKTNPLVYGITWEEVMGDPSMGAKQRTFIIDAARALDKAKMMRFDEKSGNFYCTELGRIASHFYLQYSSVETYNEMLRRHMSESELITMVAHSSEFENIVVREEEQDELEALARKACPLEIKGGPTDKHGKISILIQVYISRAPIDSSSLHSDAQYISQSLARIMRALFEICLRRGWSEMSSLLLQYCKAVDRKIWPHLHPLRQFDKDLSPQVLWKLEERNVDLDHLYEMEENEIGALIRFSHQGKLVKQYVGYFPYVNLSATVSPITRTVLKVDLHITPEFVWKDRYHGMSERWWIIVEDSENDTIYHSELFTLTKKMARGTPTKISFNVPIFEPHPPQYYIHAISDSWLHAETLFTVSFHNLTLPQTQITHTELLDLKPLPLSALGNKTYEDLYRFSHFNPIQTQAFHVLYHTDNNVLLGAPTGSGKTISAELAMLHLFSTQPDMKVVYIAPLKAIVRERMNDWRKRLVIQLGKKMVEMTGDFTPDLMALLSADIIISTPEKWDGISRNWHSRSYVMKVGLMILDEIHLLGADRGPILEVIVSRMRYISSQTERSIRFVGLSTALANARDLADWLGVTDDGLFNFKPSVRPVPLEVHIQGYPGKFYCPRMNSMNKPAYAAICTHSPNKPVLIFVSSRRQTRLTALDIIQLAASDEKPRQFLSIEDNSLDMVLSQVSDSNLRHTLQFGIGLHHAGLNDRDRSLVEELFSNNKIQVLVCTSTLAWGVNLPAHLVIIKGTEYYDGKTKRYIDYDITDILQMMGRAGRPQYDQHGKAVILVHEPKKSFYKKFLYEPFPVESNLREHLHDHINAEIVSGTISNKEEAIIYLTWTYLYRRLVVNPAYYGLEDTETNTLNSYLSRLVETTFEDLEDSGCIKVDDHSVKYLILGKIASQYYLSYLTVSMFGSNIGPNTTLEVFLHILSAASEFDELPVRHNEDNLNRILSGNVPYPVDQHHLDDPHVKANLLFQAHFSRAELPISDYVTDLKSVLDQSIRIIQAMIDVCANSGWLTSALTCMHLLQMIIQGLWFERDYESLWMLPSMNDDILDHLKSRGVSTVPSLLDLSREELRRVLQPFSASELYQDLQHFPHVDVKVKLHNEQERSKPPTLNIRLQLKNSRRSASRAFAPRFPKAKQEAWWLVLGNATSSELYGLKRISFADRVINTRMELPQTFNVQETKLILVSDCYLGFDLEYSLEHLTKG

SEQ ID NO: 56791 - protein, 142 aa, Zea Mays
MAGATTPASGALVRLCLPSLLLFLYRCCRCEAVEMERTLAMIKPDGLSGKYTEAIKEVILDSGFHIVKETEVQLDAERASVFYAEHSQRSFFDSLVKYITSGPVLAMVLERPDAVAQWRTLIGPTDAKKAKTSHPNSTLCHF

SEQ ID NO: 56792 - protein, 89 aa, Zea Mays
MATTKDPATTGGEPAIGIPYHPAAEAQGHYYYAPPPNPYAAGMPPPNAIYAGAPKGVPLQQTMFRDTPAPFHCQACGEAAVSSVRAWIR

SEQ ID NO: 56793 - protein, 238 aa, Zea Mays
MSSLIRLLFTLAAAIGAASLLVASLRRRAPPPGLPAKLVPSSHMAGRNRSFVLWLHGLGDSGPANEPIRNLFSAPEFRLAKWSFPSAPRAPVSCNNGFVMPSWFDIHELPMSAGSPQDETGVLKAVEKVHAMIDREVADGIHPENIFVCGFSQGGALTLASVLLYPKKLGGGAVFSGWVPFSSSVTERISPEARKLARLVHRFCKALVLTVSSRHIQIWVIRFPKKSYFILSRGSRVV

SEQ ID NO: 56794 - protein, 204 aa, Zea Mays
MKAIDQLSTLELLRQETASTFVKLCEKRLFYTKRTETLTVKLQEQQEWFSMKNKITRQEPHVAKSQSKQNFIEGEKHVIFNSEGSLDKFNKPGKLYTQLVSAQLKIQDIKSQRSALLLEISRIKQILEQEKNIIPGFPAALQQMDMKSLEEEYKALQGDKSGEVEYFQSLDETINGMKGILDPVKCQCGLEYNLKLDGEAMDIS

SEQ ID NO: 56795 - protein, 306 aa, Zea Mays
MRATFPEYVVALTTIVGSVLFTIFGGVGIACLPLGLIFSFVRRPKAVITRSQYIKEATELGKKARELKKAAEALHQEERSGNKGRKWRKNVKALEKELLLLEDDMKALEEMYPQGEQAEATWAFTVLGYIGKLLFGVVGLIVSIAWVAHIVIYLLIDPPLSSFLNEVFIKLDGVWGLLGTAAFAFFCFYLLIAVIAGEMMLGLKLVFITIHPMKWGGTLMNSFLFNVGLILLCSISVIQFCATAFAYYAQATAAQEIFGHTLQSLRGIKYNVFQYGFVALAILTLFYYAIFGWRKRKPTGRFQLSN

SEQ ID NO: 56796 - protein, 661 aa, Zea Mays
MAADHGEGVGRCILVGLHMDAVGRDLLQWALHQEVRRGDRIVAVHIYRKSDKTNTLKLIRTLDDYLAEYEALCNQKQVVLVGRVTPGSSIQKELVKEAKLCAAMVVVLGANKKYSFGGSSCLAKYCAKKLPPTTTVVAIQDGKAVFVREAPRPPLGAEPKPVLRTVLHPSVGLEPKVIIPNPNRRARSMSMDLDAPCCGHGAADAPASRCLDDATKGDGGVAPEQRLGWPLLRRAHAAAAASAAPVQTPGGKNHEPRKQSVVHWVMSLPRRSAPSESAEPHAGAGLESELKAMLGGSGARCRWFRYEELYDSTNHFSAENLIGNGGNSRVYRGSLACGRQVAIKLCKASAEASKDFLREVDIITKLQHHRIVPLIGVCVEGRNLISVYRYLPRGSLEDNLHGERSKPALSWENRYKAALGIAEALSYLHSGSPRPVIHRDVKSSNILLAEEFEPQLSDFGLAIWAPTNPTSVTHSDVVGTFGYLAPEYFMYGKVTDRVDVYALGVVLLELLSGRKSISSDGSSPKGQESLVMWATPVLSSGNICDLLDPRLDVKHDEVEVRRMASAASLCLRRSARLRPPISQILSILRGESAASIADQGATEPDCVDDEAYPAANVRSHLGLALLDVEDSESISSTEHSSGLSPLEEYLRERWSRSSSFD

SEQ ID NO: 56797 - protein, 409 aa, Zea Mays
MDSTVVGLKLVVLALSVAIWLFGTCCHADFTPADDYLINCGSTVDATVDHRVFVSDTSGAAILTTPTQSTAATTSPNLVSGFEGAMLYQTARIFVVPSSYAFMLKSHGRHFVRLHFFPFKYQSYDLTTATFKVSTQDVVLLDNFTAPSSSSPVFKEYSLNITRDMLILTFVPLGNNTPAFVNAIEVISVPDLITDSVLSLDPVGQYLGLSTQPLQTFYRINVGGPKVTPENDTLWRTWVTDQSSFVNSTPTTLANFPGKLNFQNGLATEEDAPDSVYNTARRLQNSTRSVSNMTWQFDVDARSSYLIRFHLCDIVSKAPYQLLFDVYVDSWSVVKDLDLSDKAFGNLATPYYIDAVLLSSDPSGKLSVSIGPSAVKIAAPDGILNGLEIMKMNISTGSVSIVAPPSVAR

SEQ ID NO: 56798 - protein, 303 aa, Zea Mays
MVEAIIGRNDEAIMNFEKVRLIDPNIMTYMDEYAILLKSKSDYIRLNKLVHDMLHIDPARPETCVALAAMWERKDERKALTYAEKSLRVDDRHITGYIMKGNLHLSLNRPDLAVTDFRGAQELRADLRSYQGLVRAYLALSKCKDALFTAREAMKVMHQSAKALKLVGDVHAISSSGREKARKFYESAIRLEPGFLGAALALADLHVAEGRNKEAVMLLERYIQQWSDDSLHIKVAQVHAATNMLSDALSHYQSALRINPQNEAAKNGLERLEKQMKGVDPDAPEDDEENEEEDVDVDRDDFI

SEQ ID NO: 56799 - protein, 314 aa, Zea Mays
MSGYLNQKKFGGDTPYSFMFGPDICGDQKKKLHLILSYQGQNYPIKKELKCETDKLTHFYTFILRPDATYSILIDNREREFGSMYTDWDILPPRKIKDVNAKKPKDWDDREYIEDPDQVKPEGYDSIPKEIPDPKDKKPESWDDDDDGTWKPRMIPNPEYKGPWKRKKIKNPNYKGKWKTPWIVNPEFEDDPDLYVLKPLQYVGIEVWQVKAGSVFDNILICDDPDYARHVVDETFAANKEAEKEAFEGAERKRKAREEEEARRAREEGERRRRERDRDRGRDRYKDRYKVHFFHFPYWVIIPCCNYVRLVLVI

SEQ ID NO: 56800 - protein, 120 aa, Zea Mays
MQDDTDDADFPFAVDDVYPDSRPGSSSGKDTGDQAGSSSHKSQDAAVGYLVHLLKSARPLRDSTYSSHTSRGESTEAGSTSSFLSRRTSDALEEFESFKETRENLLARSRSRLQDSLDKP

SEQ ID NO: 56801 - protein, 180 aa, Zea Mays
MSMKELLEAKHPTAWSEFEKGLIDENELAKKFFKDGRSFDLQGLKECMVRAYEYIDGVEDILCCLKKNNYEMHAFTNYPVWYQLIEDKLKLSKYLSWTFCSCRTGKRKPSPEFYLQAADQLNVDPASCVFIDDRMINIEAALSVGMVGLQFKSAEALQKDLCALGVELSPLVCEGEAQVQ

SEQ ID NO: 56802 - protein, 83 aa, Zea Mays
MAMRTALTSLPARLRAPAPPAATGGRRLLSDGKGRVLSEEERAKESIYIQKMERERQEKLKKRLEQEKADSDKAKPADADKVP

SEQ ID NO: 56803 - protein, 391 aa, Zea Mays
MGAASPAMWAGLVLVALLAVSGPAVAAGLPRFAEAPEYRNGEGCPAPVAGAGVCDPGLVHIAMTLDAHYLRGSMAAIYSLLKHASCPESLFFHFLAAAEGGGAPAASGLRAVVAASFPSLSFEIYPFRADAVAGLISASVRAALEAPLNYARNHLAGLLPRCVPRAIYLDSDVLAVDDVRWLWETRLPAAAVVAAPEYCHANFSRYFTDAFWDDPVLGARVFAGRRRAPCYFNTGVMVIDLRRWRVGNYRQRIERWMEMQKEKRIYELGSLPPFLLVFAGEIEAVDHRWNQHGLGGDNVFGSCRPLHNGPVSLMHWSGKGKPWDRLDAGKPCPLDHTWKAYDLYIGENDSSSSGPSRSALSSLAACAATAAAASQLPPSAVQDSEVRGGIQ

SEQ ID NO: 56804 - protein, 115 aa, Zea Mays
MDGRGSRGQPIEAMDAVAVIRNEALLLLTYLTRDAEEIQKIVVFEGVFEKIFSIIREEGYSDGGVVVQDCLELLNNLIRHNASNQMLLKETMGFDPLISILKIRRGSAFNFTQQK

SEQ ID NO: 56805 - protein, 331 aa, Zea Mays
MDGDHRRQAAAAVTVTQVSPARRLIAWLRLLFRAFVHRYGKVASWNAAGRPVFVVLAVFFLQRSLRRRYLSWKESSRLPLMAAAAVTVQTTVRAMAAQRELSVRKQTRAATRIQAQWRAHRAVWSYLTTKRAAVICQRAWRQSVARKELRKLRLCVQENLEREMLEEVCRLREMVDVLQQAVNDAETRAVNEREAAKDAMAQLEAASAIEETVVMVEDTEKVKSLSAEVDRLKDLLGAEMSETFAAKKALSEAELRNEKLARLLGVEEVKNKRLQDTLKRMEEKASSLDEENRMLRQAVASNPAIVRSPSGENHEAPGIQLLIMRNQGMVQ

SEQ ID NO: 56806 - protein, 303 aa, Zea Mays
MSTGTLMLLSSQSNYSKLTYDGVDLMGERLAEEVRQVVQRRRNLRKISFVAHSLGGLVTRYAIGKLYEPAMDETSSCDIDKPSDEQNVRDVGKIAGLEPINFITSATPHLGSRLNKQLPFLFGVPLLEKTAAGTAHFIVGRTGKHLFLTDNDDGKPPLLLRMVEDCDDGKFMSALRCFKRRVAYANVTYDHIVGWRTSSLRRQHELPKLKLTANDEKYPHIINVDKGNLEDHRQEGSVEDSLADSYEEVMIRGLTQVAWERVDVCFHKSWLRYNAHNNIQVRIHPINSDGEDVIYHMIDNFVV

SEQ ID NO: 56807 - protein, 1165 aa, Zea Mays
MQGFPGGAPDPQQLQATMLAIEQACSLIQLHMNPSEAEKVITSLHSSLMPYQVCRFILETSQKPNARFQAAGAIGDAAVREWGVLTDDNKRSLIIYCLNYVMEHASSPDGYVQSKVSAVAARLLKRGWVEFSDQEKAAIFFEVEQSIRGIHGPNRQFAAINFLETLVSEFSPSTASAMSLPKEFHEQCEYSLEVQFLKDFYCWAQAAVFNTADKILNSTVTIPDERACSAALRLMFQILSWNFKHTVEHESSDAKINFGLRIDTINLKKFERSLVKPGSMWREILISSGHPTWVLNFYTTLRQKYSYDTLWGDSPIAVSCRQLIVQLCSLAGSVFPNDNGDAQIKHLMLILSAVVLWIEPPDVITASIRNGGSESEFIDGCHALLSIASLTTGSLFDNLLKSIRPYGTVNLLSALTSEAVKSVLNNQSEEETWGIDSLDILLETWNVLLGDVDADKNPISTDGALASSSLFKMIVESHLKAAADSAFEDTDDTEYFHVSVSKRDEQLALYALIARASANTTIPFLAQLFSERFARLNQRNGESDPTQTLEELYWLLLVTSHVLTDSGEGETLLIPEALQAGFPNVIEAAHHPVVTLSWSIINFSRQCLDPGIRAKYFSPRLMEAVIWFLARWVATYLVPLDVSRGKVSREIDNVGTNGSQHSRKLLNSFAWENNQGELVLDFVVLISMLALTTYQGENELQTLTCQKLLATVVRRKHTCTYLVQLDSWRDLTRAFASGRSLLSLSGRLQRSLAETLASAASCIKDPEASAQYLRDLMGPVAGCLVENASRSDLKSVAQQADVIYMVCCLLERLRGAARATQPRTQKVLFEMAHTVMNPLLTLLEVYKNHSTVVYMILKFVVDFVDGQAVFLDAKETSALVSFCLQLLQIYSSHNIGKVMLSLSSSLRNESQAEKYKDLRALLRLLTNICSKDLVGFLSDCGGEGSPDIAEVIYIGLDIVTPLISLDLLKYPKLSRDYFVLISHLLELYPEKVAHLNSDAFTRIIGSLDFGLRNQDSDVVERCLAAVNALASYNFKERLGGRGRLNSQLMESEGSNGKLQESISSHFLRLLLQILLFEDFRSELAGYAADALLPLLFCEQELYQRLVHELLDKQQNPTVKSRLATAFHNLTSSNNLSSSLDRPNRQRFRKNLLSFMADVSGFMQIK

SEQ ID NO: 56808 - protein, 799 aa, Zea Mays
MVLYRISSNKDPGAGRGESLSMKEHAALLLEKKLLDLPKLLDICAIYEHDNGKLTSSLVTNVINVQPSVLDDINIVIPQFLNIFHTMHDRCMTSLQVLTSTGSIDNGYVQLQKDFMEVTSIHAVLDFINDAIVTLDSFVGAYQPAALLFCTNFEMSYGVEELLNALARLYSSLLPSLLHGFKVMPKSQSNAEASLDSTLSDIPLAIRMLSKRTARFGWRLLHYCYLNDQVREHDAQTSTKMFPAKVEDPMIRGDILVQTLKDINRESTYSSQVNHGNTFLQELESEFQLMSQIGDIRNKGWIYMDDEQFQFLSRLCGSTHTSWNGISDLPVSSHGGELQQKDEETAMVESKISQIRDLFPDYGKGFLSACLEAYNLNPEEVIQRILEGTLHQDLLALDTSLEEMPHEKPAPTAVKDKGKGILVETVPQITKKPHKVAETHYFVQDGLSSATSSASQGPSSAISPASLGPSSAISSAFQGPSSAISSASLGPSSSISSVPKGRFTRKANDDLPDTAILDSKNAKNAARSVILDSQYEYEDEYDDSFDDLGFSVVESSYEETDGVNDAEASSHGPRWSSQKKPQFYVKDGKNYSYKVAGSVAVSSAREAAVMRQTQKETIYGLGRGGNVPFGVPNRQHIDVEAEEVGDADNSGRGSNSRGRGRKGGREGNRPEENESSNGRGSGFGGKRGGWSQGNPAEENWNPNGQQGFGRGGRRGGWNQGGPAKEDGNSSGRQESFGRGARRGSMNHDQSAEDNEGHNNPAQDFTRGPAPRGGHGRGGGRNHHRRDRAMKKHMQGLTGL

SEQ ID NO: 56809 - protein, 426 aa, Zea Mays
MNHRSSRSHSILTVHVNGKDIAGNVSRSSLHLVDLAGSERVDRSEATGDRLKEAQHINKSLSCLGDVINALAQKNSHIPYRNSKLTQLLQSSLGGNAKMLMFAHISPDAESCAETLSTLKFAQRASTVELGTALANKESSEVRELKEQVDTLKKALASKELEKTTLKVKGSATTSERTKQVLDCTPPRPRRLSLENASDKARMPERKILKSPRSAVGITHDKECNTDAFRHANHHESLIQMSAACAEVLVREEEKIICTVDTVEFCQLPTEAYNLLKQSGLNTPEAAPCRSRNLRTEASCGDALSSTTKLEKIMAGTAVKKGSQLKKSIQSSIGRLIHGTERRNAQHSAQGTPTKIIASGCHNNVSPVTADIRLRRRQSLTGIPPPLPTMSRRSSLGGRSDTSSNDKRGAKTPPPVNSAAKAKRWL

SEQ ID NO: 56810 - protein, 455 aa, Zea Mays
MNLPTPLPPTSSPAAAPRASRAPVVPAARRGTGRRRRRQKPSSSPSTRETEAEYEQPDALARILRTEAAISGVSRKAAAARQQSTNLWPRAVLEALDSAVAACRWESALEIFELLRKQHWYEPRSQTYARLLMMLGKCRQPGPAAGLFREMLSERLRPTADVYTALIGAYGYSGLLEHALAAVEQMKGAADCKPDGYTFSVLVDCCAKSRRFDLIPAVLDEMSYLGIECNSVIHNAIIDGYGKAAMFEEMEGALSTMLESGSNVPDIYTMNSVVGAYGNHGRTDEMEKSYSEFQLMGVEPDTKTFNIMIRSYVIECFGRAGDIEKMEYYFRLMKIQGVKPNPITYCSLVNGYSKAGLLDKVAGVIRQTENTNVVLDTPFFNCVISAYAKSGDIKIMEEMLQLMKEKRCKPDRITYATMIQAYTAHGMDEAAMLLEIEAERFDKRLLGSVSDIDGK

SEQ ID NO: 56811 - protein, 461 aa, Zea Mays
MATELRSPLLPPPPPQRRLSPRAAAWAALAVSATVLLLPFLIGSTTRTTSSSSTRHPRPRSSPPSNPVELTLLTGARDKGAVCLDGSPPGYHLQAGSGAGSGSWLIHLMGGGWCDTVRSCSDRRTTYLGSSLFMQKVMDFTGILSNDPAQNPDFYSWNRVFVRYCDGASFSGDSQREAGPGNGTLFFRGLRIWEAVLDELMHKGLAHSKQALLTGCSAGGLATLLHCDDFRARFPPEVPVKCLSDAGFFVDAKDLSGQRSMRSVYSGVVHLQNVTKVLPKDCLLANKDDPTQCFFPAELIKSISTPTLIVNSAYDSWQVRFVVAPDSSSPDESWRGCRDDVRRCNSSQIQVLNAFRKTMVDDLVEAADGTNSSWFIDSCFTHCQTIFDTSGWNSAAAPRIGNKTLTEVIGDWYFGRSPSPVVRQVGCEYPCNPTCNSQPPVAGFYNKALPPRQQANILVLG

SEQ ID NO: 56812 - protein, 207 aa, Zea Mays
MGTFGYLAPEYAASGKLTEKSDVFSFGVMLLELITGRRPVNSRQADDNLVDWARPLMIKAFEDGNHDALVDPRLGSEYNDNEMARMIACAAACVRHSSRRRPRMGQVVRALEGDVSLDDLNEGVRPGHSRFVGSYGSSTSDYDTSQYKEDLKKFRKMALGGSGLQSSSAQTPTSEHGENPSVSVSSSDGDGGGGTGEEREDRRQAAS

SEQ ID NO: 56813 - protein, 227 aa, Zea Mays
MAQARVRLTPAGRTPAATFLSGSNPRPAHLTFFPKLTPTSLSAAAAANAPPPHIVVVGSANADIYVEVDRLPLIGETVAARAGRSLAGGKGANQAACGGRLALGPTYLVARVGDDANGRLLEGALADAGGVRTDRVARAADAPSGHAVVMLMPDGQNSIIIVGGANMEGWAAGIGSEDLELIRKAGVLLLQREIPDWVNAQAAQYSVFEIWGDIVAVSCGVTTTLTS

SEQ ID NO: 56814 - protein, 650 aa, Zea Mays
MENNWLTENTMQQLYCDMCQKFLADRLVEGTCPNKVCNASARGDQCETCSTLLNPTELIDPKCKVCKNTPRIRDTDHLFLELPLLRDKLVNYINETSVAGLWSQNAIQATNAWLKEGLKPRCITRDLKWGVPVPHEKYKDKWWKNPDNVELFQFMGKDNVPFHTIMFPSTLLGTGEKWTMMKTISVTEYLNYEAGKFSKSKGIGVFGNDAKDTNIPPEVWRYYLLMNRPEVSDTLFTWADLQAKLNSELLNNLGNFINRVLSFIAKEAGAGYDSVVPDAPNAGEHTLTKILAEKTSKWVEQYLDAMEKVKLKQGLKSAMGISSDGNAYLQESQFWKLYKEDPAACAIVMKTSVGLVYLLACLLSPFMPSFSDEVLRQLNLSPEENLSLSEEKGEIAKAKSPWDFVPAGHRIGKPAPLFKELKDEDVALHREKYAGSQAERSSKAAADAEANKVANQLKGTKLSDGGTKKGPKKQSGGSKSKTADADITVAKLDIRVGLIRKAEKHPDADSLYVEEIDVGEDTPRTVVSGLVKFIPLEEMQNRKVCVLCNLKPVAMRGIKSHAMVLAASNEDHTKVELVEPPESAAVGERVTFAGYSGEPEASLSGKSKTWEKLAAELHSNGELVACYKDVPFTTSAGICKVKTIANGEIR

SEQ ID NO: 56815 - protein, 1242 aa, Zea Mays
MLAARNPPPPPHDIAARLHHLRDLRRVPLPNRVARIADLHTDEASPVRKLVAEIIGELGSKHMRYLPDMIPCLLHLLNDETPAVVRQAVKTGTNLFAKVLQKLAIQGLFSNGGIDDALKSSWEWLLKFKSGVSHMAFQATGNEGVRLLAIKFVEKTVLMYTPDPDVPSDPPTETTEDMAFNVAWLRGGHPLLNVGDLAMEASQSLGLLLEQLKSPKVKSLSTSMIIVFVTSLSAIAQRRPSFYGRILPVLLSLDPASSIIKLRVPGAFHALKSAFSACLKCTHSSAEPWRARLLEAQNIINQGGSIEDAANAAKNFGDTSNREESWPLMERSTDGSNKRSLAEDMNHVTEDDVHSTKRARQSIDANEHSEEANKTNFESMSVDISSSQPSSIRTGNSEAVYQLIGMFAALAAQGDRAAGSLQILSYSIASDLLAEVVMVNMQHLPISRPEVDQQQLPSTSSGDGLPLSSFSSLLGILLKGANQIDQDEVSPAKEPALVSSVADDRMILPANSPVPSSVNLPIEENSNSPTVPLCIETTEAKVTSAGGNSSIDIPESSEASHASTEPQGTQEHASTFAGPFPADNFSVGFSLAQSSETRSPSSSTLEANHSQLSSLSSQYVLPKLVVNNIDLSDEAKDLLQKEAFVRILESDKKEASGGSIARLPLLAHLGVEFPLEFDPWVILQKHILSDYANNEGHELTICILNRLYHEAEQDHDFLSSRTATSVYESFLLNIAENLRDMFPASDKSLGKLLCEIPYLPEGVLKLLESLCSPGSNERQDKDIQSGDRVTQGLSAVWNLIMLRPSNRDRCLEIALQSSTHHLEEVRMKAIRLVANKLFPMTSISKKIEDFANEKLNSVLEMTPSGDCVTTEMATPEAHKDIGLENLTASVTGMQTLMSLYFALCTKKHSLLRHVFAIYGNLPQAAKQAVHQQVPILIRTIGSSSDLLGIISDPPADCRDLLMQVLQTLTDAAVPSKDLISSIKILYSKTKDVEFLFAILVHLPKDEVLPVFPSIVNLPIDKFQSAISRILQGSPRNGPSLDPSEILIAIHVIAPDKEGIPLKKVMDACSSCFEQRTIFTQQVLAKALNQLVEQIPLPLLFMRTVMQAIGVFPALVDFVMEIMSRLVSKQIWKYPKLWVGFLKCAILTKPQSYGVLLQLPAPQLENALSKNPTLKTPLAEHAEQPNIRSTLPRSTLVVLGLAEDQPQQPAVTQVQSSQNQAAETSSSAADTATEVTQESSGAS

SEQ ID NO: 56816 - protein, 67 aa, Zea Mays
MVIDTTAGAGEFFLHFILAAFASKNSVCENGWVGRRKASRYLYNVDSYAWPFIRTSLRVALYILSVL

SEQ ID NO: 56817 - protein, 259 aa, Zea Mays
MPYKKLIASVVLDKNKPKIQTVVNKTDVIQNNYRTMQLEVLAGNGSLRTMVIESGLRFQVDLGTVYWNSRLATERQRLVNIFRNLDVVCDMFSGVGPLAISAAKKVKYVYANDINPNAVGYLERNMVLNKLEKKIEVFNMDARRFVSAIYSSKHVQPITQIVMNLPNDAVEFLDVFKGILCNTKSELHCVMPMIHVYGFSKAEDPEHDFHERINLTLGENIDTVEMHRVRLVAPGKWMICATFTLPQSVASAQPNYITC

SEQ ID NO: 56818 - protein, 328 aa, Zea Mays
MERDWVVLLAGTNRPVALAQANAVLNRLDLVCETVGASVFGLLLSKYHPVTCLKIASGLMICSFPVLVMLGQLINRVSCHALDSSRTATDESICADLLDVRRIVPNSLRAIKHGWNEYKQQTVLPASAATVFLNFNVALAPGAIMTALLMHRGTSPSIVGAFSGLCSIMGLVATFISSSLVKRVGILKAGAAGLIFQASLLSIALTVYWAGSISQTTPLLIFLASIALSRLGHMSYDVVGTQIVQTGVPASKANLIGGMEVSIASLAELVMLAMAIIANDVSHFGFLAILSVSSVAGAAWMFCRWLTNPTDEQRELFMVDPLYQVQAI

SEQ ID NO: 56819 - protein, 462 aa, Zea Mays
MDSSNNSVLPWGLECLQHSTPCFLGSPKSASFAVDCGGSRAISGSDNSVYQADNANLSAASYYVAGAPTWAVSSVGLFLDADAPNASYIIYSSRQFENTLDSALFQTARMSPSSLRYYGIGLENGNYTVTLQFAEGERKEQNFDIRKAAGGKSFTAVKKQYVVPVTKNFLEIHLFWAGKGTCCIPYKGYYGPAISALSATPNFVPTVRSSEDSKSSHKTGVIAGVAVGVSVFALIALAGIFLWCQKRRKLLLELEELYTIVGRPNVFSYSELRSATENFCSSNLLGEGGYGSVYKGKLSDGKVVAVKQLSQSSNQGKMQFAAEIETISRVQHRNLVRLYGCCLESKTPLLVYEYLENGSLDHALFGKGSLNLDWPTRFEICLGVARGIAYLHEESTIRIVHRDIKASNVLIDADLNPKISDFGLAKLYDDKKTHVITNVAGTFWLSLRLYCHLVVISRLSTL

SEQ ID NO: 56820 - protein, 1014 aa, Zea Mays
MASCGGGVCLKRDRREEEENDDDKGETSGRNKRPSSGAYYTGAGVDAQRTDDDDSAAADYMYEYDDGYEEEESAAEQPKGDDASARDTEQRYAVLTEDDVRARQEADTARVAEVLSIPAGFARALLRHFKWRVGRAQEEWFSDAQHQQRVRGAVGLVPAACPDGDALVPAARSPRPRVCGICFDAFPAGGTRSAGCAAHYYCDGCWCGYVAAAVGDGARCLALRCPDPSCAAAVVRELVDEVARDDDRARYARFWLRSYVEESGGRIRWCGGEAHRPVSCGTVRAWLAKNASDSETANWVVANTKRCPMCRRPIEKNHGCNHMTCGAPCHHQFCWLCLDPWDHHRGCTRYDSRRRRRHGPVDEVEDEEEQAQRTLAKASLDRYLYHYERWEGNGKSLRKALADADELERSELQRMARLLDLPAMDLGFVTEAYRQIADGRRVLRWAHAYDYFLSLDPERDAAKRGLFDDLQSQANRWLECLHGCAELERKHLFGAADADAEDEPTVAAAAFMAYKERLANLTGVTRRFIGNLVRAFKTNLPEVVVTLTPPASDLQHIVKSGPTTERQTTVGIGGILSTEATVTLPVSNVSSLQGTSALRPSSSSLVVSQETDIANDSVQERHSPTRNLAQAQHPVRPGGHGGFLSNPYPSFFGEATSTAGPLQLYMPNMVVSGGTTSTPSLAFSLSALGQPITSTALGGSFGSNTRTAWGNSDMAAASSSQPDRMGMDQQAGTGSAMNLTIGLHPNAQQPPPKYVKIWEGDLYGQRQGQPVFISKLESWGGTVSRKVAEDWPETMQIVRLIAQEHMNKKYSESQYVGNTDFLIFRALNQHGFLGQLQERKLCGVIQLPSQTLLLSMYDKTSRMVGMLFPKNMLMFRPEALTQPSPVQQEELIHHQQQQLQQQQRNIHRLQRQLIQKQQQQHMQKLLPQRLQYQEQLHLQQQMTQQIQQQQQSLYQQHQQMQHQQQLWQQIQQQKHQLQHMDPQQQQLLSQMVGTELGSDDDTREDWVTGAGPHA

SEQ ID NO: 56821 - protein, 282 aa, Zea Mays
MAMEGPVLCRPAMQAKSPAAALVNNSLTRFGQLGTISKYRNVSRFISPISQPSTKNIGPCCSFSSSSDGNGYMAGNFSDSDEDYVNSTVLEAVEVRSGSEGYVIKMRDGKNLRCVHNNSQGRNIPESAPQPAIVLRIEDGSETLLPIIVLEMPSVLLMAAIRNVHIARPTIYQVVKEMIDKMGYEVKLVRVNKRIQEAYCAELCLTKIDDSTDSITFDLRPSDAINIAVRCKVPVQVHRSLAYSDGIRPVEPARMAVAAGLSDGLLFTELDRYSRRRIRILQ

SEQ ID NO: 56822 - protein, 213 aa, Zea Mays
MRLKAYPQEEVRKARILVSSFIRAGGDVEEEIEKAAERGELTELVLMVIWNRLDIARRDDERDAIRSLDLLYRRVETEILKSEATPAMRLLNDLLNLHDGGDNEKWLKKCRKRMLEVFPREDPFTVVFPAGFNMENREGRIELPPQDDDLLLRVDFVREVDELLKEVRAVEDKNKQQIGFDPESVAYMLKQQEKMQTMRQVESLLDLASSLKW

SEQ ID NO: 56823 - protein, 408 aa, Zea Mays
MKWKDFFPNKELKEPPYFDARAVCYPNLKTIRDYLAWRQVDCHINNQYNTCFWMLVKSGKSEQEAQLALKGTFAKDKNELLAKQFQINYDDELAMFRKGSSVYREKVETTVKIDDYGEPIKRPRLKVTVAHVDTIGTAFWENHPHILREGKFMHGFVKKFGINHIFSPCNWIIVRIIACQFDQFSTIHSFDKPNDETALRLMNESASLMMEQYPDIVFGYGFSNEYSFVFHEKSELYQRRESLILSSCSSYFTSLYMTKWKEFFPYTELMQTPHFEADALCYPKLKIICEYLSWRQAECHAGNQYNTCFWMLVKSGKSEKEAHEILKGTLSKDKNELLFQQFQMNYNNEPAMFRKGSCVYRRKVEELAGAEDGGNGTSRERWHVKVDHVDLGPGFWRKHPWLMTNCTQ

SEQ ID NO: 56824 - protein, 419 aa, Zea Mays
MPMEVVEEILKEASILHIEEEQPFDDLSRMLKEATSWEEKARLILERSASLSEFEDHMRCSEGIRVILPSKLHMKAEVDIAKLWIDKCQAYLRPGCNKLAFGDFLKVDDIKDLINQPANLKVILDTSELNSVLNNIEKWEHSSLSLLNNFRALLHLNSIGSTVDTLQRKLEELQGKMNTEIEVGLSLGFEFKVLWELKDSSLMLRWILNALSLCCMIPLLQDVDRLIEEAVHLPASLADCSLVTLLMRALSCLRKSLILLPGSGTSAKSKLEDVENILAEFKEVDVPYPIMTAKLEDAVNNHNSWIEQCNTFFMLSDGQSWAMLQNLRDNGQSVAFDCPEMDKVVDEVKNVEEWLNQCHCTLLLDGNNSSLLSILVKIRGLLDDVCTLYAEDCMKLRLCAVCSCDIGDRLASRCVTCQD

SEQ ID NO: 56825 - protein, 76 aa, Zea Mays
MATLIDHTGHRISPHMVMGGLLDSAALCATDLTSEVRGRVMKFNAKPAHGHWSVPGIINCIVCTVAAQCSCISCLF

SEQ ID NO: 56826 - protein, 219 aa, Zea Mays
MEAELNKRERELKRKEDAASRAGIVIEEKNWPPFFPLIHHDISNEIPIHLQRMQYLAFSSFLGLIACLFWNIIATTTAWIKGEGVMIWLLAIIYFISGVPGAYVLWYRPLYNAMRTESALKFGWFFLFYMIHIIFCVWAAVAPPFPFKGKSLAGILPAIDVIGKNAIVGIFYFVGFGLFCLESLMSIGVIQQVYMYFRGSGKAAEIKREAARSALSSAF

SEQ ID NO: 56827 - protein, 563 aa, Zea Mays
MAAAGRPWRVIPRPLLETVLHNYALHPRVPQPLLFHGPRGVGKSTLLLHRLLPRWSDQPHAVAFINFLHPSPSSPAAAPWSLLPADPASPHSLHDLRLRLESALEGLARAAVLCGAVGSKDVLAALSRNHGVSTALSRLLIPPATRSSATSVPARRSSSTSVPALWSRAVLAAVHRDDTAFCIGEGEATSCSMEEKAYMQEAMAALRVAKEVLGMQEGWRKEAIREMNRTGRFSRSLANSATDWPCLLLDVLSRAAEEEFFQPKLILNNVDVLRKAICEDETMVPAAMYHDSFIWRVIALGANEKCLPVIMSTSDGYYSSQAFVDFGFPNIFISRETFGWTPQEAKLHMVSEFFSEQEWKVVDEVLGPNPRQLSEIYMLKQKANSPEVLHDRNIEEIIDTYLAHLQVSVVNPAMEKALKMLQEFASDVREGKVPKIRSSFGAPWRHPPRDDNPDLSYKWAKIQLMDFIQSFVNTEFGVNYLADDSLEILDDPAAVAMMEVGLLYQQREPSFMRPITRGIQRCLARWLAEQRLQLNIQETLAFFWQRLIRGRSYRHLMKEVGYK

SEQ ID NO: 56828 - protein, 685 aa, Zea Mays
MELAGDVLHGGTPDLAMDTPDPGMGSPELASGDPQRRPGRHERSNPWGSQPRREERRAPPPSLHRRELPGRVLERRRGGVSDAGPVLDMMAVMLENIASTPVVARSTAAAVYRTAQIIASVPNLQYQNKVFPEALFHQLLLTMIHPDHEARVAAHRIFAIVLVPSSVSPSIQASPSSRPKKHDMQRTLSRAVSVFSSSAAIFDKMKKDKNSENSQGESKDNSMHSVGEGTGQSKSQNLHVSQSRRSMKAPNFSMKRGPSMAMRAPSVAIRAPSISLRGPSMSLRASSMSVKEDQSSSNKSDEETESVLVKLSARQITLLLSSIWAQSTSPENTPVNYEAIAHTYSLLLLFSGSKASTFEALTQSFQVAFSLRSYSLTEADSLQPSRRRSLFTLSTAMIIFSSRAYNVLPLIPICKQMINDRAADPFLHLVDESRLTAVKDSSNDPSKIYGSPEDNNNALKSLSEIELSESQSRECIVSTIMNNIANMLDAELHNVRSQLLSDFTPDDMCPTSTQFFEVHADNPSSGSYETGHHQEGLLIDLGNDHDAFGEASESAEASASSIPASDLLSIDQLLETVGAEPAPQAGVVSADIGFKDMTSHCEALTIGKQQKMSAFMSFQQSVQAAGLPSSQPNQMELDLSQDPQLPQYTKGPNGDNAQPGQDFQQQSLKLPAASPYDNFLRAAGC

SEQ ID NO: 56829 - protein, 293 aa, Zea Mays
MRLSIGQVHRNVLALASSRSCFVLGDRVSFRMLSQPRVAGFHQTAWRGSQILEDNRGGPLTLASLEVQSRVEYGKKGKMERTGGPKPSSRASSLYVKPKVSSNVKPAKSALMKPAGIKKTLKVDEALFSAKSFEELGLPPLLVDQLNKEGPLKRTMEQDHSEKRSGIEAVIVAPSRELGMQIVREVEKILGPNDKRLVQQLVGGANRSRQEEALKKNKPIIVVGTPGRISEISAAEFWSMLEGDLEAHLGIFLAHLRDDLSVRLSWFLQQYHFQLYEQQGVGVMIQFSLELKV

SEQ ID NO: 56830 - protein, 212 aa, Zea Mays
MKLRFQGPSSLVCSMAITDEMLFAGTGDGRIMAWRFPAKESNTEPVLILSGHQRPVISLSISARRLYSGSLDKTIKAWDLTTRQCVQTLSEHKAAVTSVLCWDEKLLSCSLDKTVKLWTLSESGNLQVKYTHAEENGLRTLFGMHRVGKTPVLLCSLHNSNRVRLLDLPSFDGIGTLLSTKEVRTIELAAGGLLFTGDCSGELKVWRWAPKD

SEQ ID NO: 56831 - protein, 550 aa, Zea Mays
MSAADPSAAPAAAADPDGPDSVRLTWNTWPRSKVEASRCVVPLAATISPTRVPDPSAASPPPLPYPPLRCKPPCSALLNPFARVDFAAKIWICPLCFSRNHFPPHYAAISESNVPAELFPQCSTVDYIVGGAGIPGVGGAPPPPPPVFLFVIDTCVIEEELEYVKMAMRKAVALLPEHALVGLVTFGTQVHLHELGFSDLSKIYVFRGTKEISKDQILDQLGLAGAGRPGFPKMPQQPGGPQVNGMHPPSTAGVNRFLLPVSDCEIALSTLLDELQPDQWPVEAGNRAIRCTGVALSVAAGLLGACMPGTGARIIALLGGPCTEGPGMIVSKDLSEPVRSHKDLDKDAAPHFQKAVKFYDGLAKQLVSQGHVLDVFASALDQVGLAEMKVAIERTGGLVVLSESFGHSVFKDSFKRIFEGGEQSLGLSFNGIIEINCSKDIKVQGIIGPCTSLEKKGAMCSDTVVGQGNTSAWKMCGLDRNTSLTVFFDVSPSERSSQPGNQNPHLYIQFVTSYQHPEGQMRIRVTTICRKWVDGSTNTEFCVNILDFLG

SEQ ID NO: 56832 - protein, 455 aa, Zea Mays
MAEHKGNVLLHKYEMGKLLGQGTFAKVYHARNTATSESVAIKVIDKEKVMKVGLIDQIQREISVMKLVRHPNIVQLYEVMATKTKIYFVLEHVKGGELFNKIQRGRLKEDAARKYFQQLICAVDFCHSRGVYHRDLKPENLLLDENSNLKVSDFGLSALAECHRQDGLLHTTCGTPAYVAPEVINRKGYDGAKADIWSCGVILFVLLAGYLPFHDKNLMDMYKKIEKADFKCPSWFSTDVRRLLQRILDPNPSRRISMEKIMENPWFRKGLGAKLLRYDLQNKNAPHVDKNADFDSLSANITTESKQHEEKKPINMNAFDIISLSTGLDLSGLFEESNKKRESKFTSTNTSSTIISKIEDIAKNLRLNLTKKDGGLLKMEASKPGRKGVMGIDAEVFEVSPNFHLVEIKKTNGDTLEYQKVLNQEMRPALKEIVWAWQGMLTLFRSAKHSTRTVA

SEQ ID NO: 56833 - protein, 491 aa, Zea Mays
MFHDNVNVESALGPALKAAFMVMSQIGGKLLVFQSTLPSLGIGRLRLRGDDVRAYGTDKEHTLRVPEDSFYKQMAAEFTKYQIAVDIFSFSDKYSDIASLGSLAKYTGGQVYHYASFQTPTHGDKLKLELSRDLTRETAWESVMRIRCGKGVRFTTYHGHFMLRSTDLLALPAVDSDKAFAMQLSLEETLMTTQTVYFQVALLYTSSSGERRIRVHTAAAPVVTDLSEMYRQADTGAIVSLLGRIAIENSLSDKLDSVRQQLQLKLVKSLKEYRNLYVVQHRIGGRLIFPESLRFLPLYILAICKSLALRGGYADVSLDERCAAGFCMMILPVKRLLNFIYPSLYRVDEVLTMEPNKVDDVSLKRLPLTFQCLDTGGLYLLDDGFTFLVWLGRMLPPELVNNILGVSLANFPDLSKIVLRECDNELSRNFMKILRSLREKDPSYHQLCRVVRQGEQPREGYLLLSNLVEDQMAGTSSYVDWIQQIHRQTQS

SEQ ID NO: 56834 - protein, 140 aa, Zea Mays
MSDEARRGPAGAAQVVLRASSEDRKPVGSGSPPPAATATAVAHKIQLKSADMKEEMRQEAFEIARIAFEKHSMEKDIAEYIKKEFDKNHGPTWHCIVGRNFGSYVTHETNYFVYFYIDSKAVLLFKSGVVCSQAWKPVIL

SEQ ID NO: 56835 - protein, 164 aa, Zea Mays
MGSQSDLPVMKDAERVLKEFDIPCELTIVSAHRTPERMYDYAKSAKDRGFEVIIAGAGGAAHLPGMVASLTPLPVIGVPIKTSTLSGFDSLLSIVQMPKGIPVATVAIGIAENAGLLAARILAARDPELQDRVTKYQDDLRDMVLETAERLEDQGPEEFLKGMD

SEQ ID NO: 56836 - protein, 356 aa, Zea Mays
MQPDANAPSHRLARVAAHLNPQRPQMEEGASALRLVVCRAKGGAPGFKVAILGAAGGIGQPLSLLMKMNPLVSVLHLYDVVNTPGVTADVSHMDTSAVVRGFLGAQQLDAALTGMDLVIIPAGLPRKPGMTRDDLFNKNAGIVRTLCEGVARCCPNAIVNLISNPVNSTVPIAAEVFKKAGTYDPKRLLGVTTLDVARANTFVAEVLGVDPRDVSVPVVGGHAGITILPLLSQVTPPSSFTQDETRYLTDRIQNGGTEVAKAGSGSATLSMAFAASKFADACLRAMRGEAGIVECSYVASEVTELPFFATKVRLGRGGAEEILPLGPLNDFERAGLEAAKKELGESIQKGIAFMSK

SEQ ID NO: 56837 - protein, 176 aa, Zea Mays
MQQDLRNSERRNPEQAHPVMSASSTNSAASPAVSGLDYDDTALTLALPGSSAEPAADRKRAHADHDKPPSPKLVKVAVDGAPYLRKVDLAAHDGYAALLRALHGMFASCLVAGAGADGAGRIDTAAEYMPTYEDKDGDWMLVGDVPFKMFVDSCKRIRLMKSSEAVNLSPRTSSRQ

SEQ ID NO: 56838 - protein, 90 aa, Zea Mays
MPFFILIHIPSHHPERWPHAPATDSVPGAGLFFFGRCPCKNLAACQRPCAVSVSVNLLQVLYGVTESVLCENQTAGHIVIAWGAAFADTM

SEQ ID NO: 56839 - protein, 1010 aa, Zea Mays
MAAEALGAMRSRYRSAAIEPLRLRLSNPSDSGCGRYVFRNLISAMLLAYMHMESGEENLQEKVQEGGKVNLTEKVQEGGEENLTEKVQEGGEENLTEKENEGIVEVSKPPQRRRKDPVADPSSLESSGFMRFRERRNASAVQEQGPKKRRITEDSNMCHQCQRNDSGRVVRCQGCVVRKRKYRYCVKCIKRWYPHLSEDDFANNCPVCQNNCNCKACLRGDITRANSRKKKKLLQINSGGYSVSEQDKIKFSMRIVHFLLPWLKQFHQEQMQEKSAEAATKGIDADKLEVPLTICGKKERIYCNNCRTSIVDFHRTCNKCNYDLCLQCCQELRRGLVSGNDAKVDGGGKQDFLSGVSHDKIISKGPSDGQNDMLIDSVVPGENNTSSLRQWSVNKDGTIPCPPNAFGGCGSSLLELKCLFKEKFIAELLEKANSALNNEMEVKIEGSKCPCFTESGDMDDGISRKSSCRENSCDNYIYCPTATDVQNGSLDHFQEHWLKGEPVIVRDTLALTSGLSWEPMVMWRALREKKEKVERLSVLALECLGWCEVDVNIHMFFAGYSSGLVGPDDLPLLLKLKDWPPHSSFEERLPRHGAEFMSALPFREYTDPKWGPLNLAVKLPDNVNKPDLGPKTYIAYGVSKELGIGDSVTKLHCDMSDAVNILTHTDEIKLKAKRIAAVEKKKRCLGMKILSTKEASGGLQRCADYFGMPTAPSESNKEPRPEECVNELGIKQPVQHVASEEQEGVQDDAKADANVMNVSFGKGKSEDSFGTINGTNSGDKIESPSGLAERTLTQPTTKGCSKQRGRSSNGRGNRTKKIEEGNASGLIAVAPESEDDDDDAAFIDGNQAEGGALWDIFRREDVSKLHDYLMKHAHEFRHCNFEPVKQVTHPIHDQCFYLTIEHKRKLKEEYGVEPWTFEQKLGEAVFIPAGCPHQVRNLKSCIKVALDFVSPENVRECIRLTEGFRLLPKWHKVNEDKLEVKKIALHAFNQAIKDITDESSNSNESKWIRR

SEQ ID NO: 56840 - protein, 289 aa, Zea Mays
MGVGFTGSLASSRPKHGDHRFYVSTWTHNCLRTSHVTLSKGLRSREEEDKVSSYFLLKAIADTCRVSATIQSDIHKSEIPEEIMEQFDEDQELQQVINGQVCMKVYNFAAPAESNLNRKIILPGSFNPLHDGHLRLLEAAVSMCDDGLPFFEISAINADKPPLSIAEIKRRVEQFRKAGKNVIISNQPYFYKKAELFPGSAFIIGADTAARLVNPKYYGGDYNRMLEILLECKSIGTTFLVGGRKIEGDFKVLENLDIPEELREMFISIPEEKFRIDISSTEIRKSQGL

SEQ ID NO: 56841 - protein, 682 aa, Zea Mays
MTFYTNMDLNASPVPDDDEQQPYDDSVEVGYAQTEHVESAVATLRREREERRKRLKREQQDDGSRLHSQQIRNDYAPQPKRHSRIKEAPQGWLDCPAFGEPIDKIIPSKVPLDETFNESVPPGKRYSSKQLVNKQRKAGREIGLVIDLTNTTRYYSPAEWTKQGTKYAKIACKGRDAVPDNESVNKFVYEAMMFLDRQKQSKNPKYILVHCTHGHNRTGFMIIHYLMRTHVSCVAEAISIFAQRRPPGIYKRDYIEALYSFYHEVPDNMMIACPPTPEWKRPDDLDLNGEAKQDDDDDNGDPGPLHNESEDKVITNDDVLGDEVPYDQQEALRVLCYRLLEMPLGRGHAHFPGSHPVSLNSENLQLLRQRYYYATWKADGTRYMMLIMRHGCFLIDRNFSFRRVQMRFPHRSLQGLQDMTLIDGEMIIDTVPDSGLKRRYLAYDLMALGSVSKTRLPFSERWKMLEDEIIQPRNNEKGLERGAKSNPLYKYDMELFSVRRKAFWVLLTVKKVLKVFIPSLCHDADGLIFQGWDDPYVTRTHEGLLKWKYPEMNSVDFLFELTNDNRQLVFLYERGKKKLMDGARISFTDDVDPSSVAGRIVECSWNKEEQCWACMRIRSDKSTPNDINTYRKVMRSITDNITEEKLLEETDEITLLPMYADRMNVRVHTKMAQHRRRLPPQC

SEQ ID NO: 56842 - protein, 143 aa, Zea Mays
MGYCWSRAVSNYYNRGAMGILLVYDVTDESSFNNIRNWIRNIEQHASDNVNKILVGNKADMDESKRAVPTSRGQALADEYGIKFFETSAKTNLNVEQVFFSIARDIKQRLAESDSKPEDRTISINRPEGGEASASQKSACCGS

SEQ ID NO: 56843 - protein, 249 aa, Zea Mays
MDAGVEKCGDAAAEGGGDLYAVLGLKKECSDADLKVAYRKLAKKWHPDKCSSSSISVKHMEEAKEKFQEIQGAYSVLSDANKRLLYDVGVYDDEDDEDSMQGMGDFIGEMTQMMSQRQESFEELQQLFVDMFQSDIDSGFCNGTAKGHQVQGQAKSRTCSPRSPPTTIVKEAEVSSCNGFNKRGSSAMDSGKPPRPVECGAGQSQAGFCFGVSDTPKPRGPNANRKRNGRKQKLFPKHYVTSEDDTAGS

SEQ ID NO: 56844 - protein, 986 aa, Zea Mays
MGAKVERESYMPGYYATGDLNLEPNGRWSPYYEEMTSNDQLCNGFTTKPTNDYSEFDKEILKHQILEHEAVFRQQVYELHRVYKIQKDMMKQHQSKEVYSYPTLAVASHTNSPSQVPQNGAKMMWQMPVPPMSTTYRKAIGEHNDTNQSSMKFLREGSVQSSPNGFISSDVGPRSRQGTFDLQLPADHYIDDDGTSDNKPIDFLGLASDTKPRNDAELTLVSAEGLGKFSDNSSSSGLQTTNNLGPRQVTDLNESNTGFHMGRANGSVSRGLPRTLENSWNQPILRANTTNFSFSKKHSKEKHTDEGTSSNFFDTSVKTIHDDKPSINKGKQVSSVTFLAPRYNDADPPKYFKAVDGRPATASYNHFVYQGQNSSVGWIAQSPLEPSVINNFARVDRPHHLNMGTFTAPVSIPQIDNPSIVSPMGSCTADPRSSVINNPALIPRFNGFSTVNSYTSLSAVTQSIGTSIPKLINVDNVDKRYRGFPLDSFSVSHSRHQVAVSSNLEQKNSQKLEDSDQQSHGKGMKNFNLNETLSDCQEDGLVEQDGRCASSFQHDKDGGSVLGISWLKKKLMSADPTAVEKPGKIFGHSLGTAIELKNTKDQNEPAVTIRNLSDSASTSVGCAIKKDRPSDNIVTGTLPVCNKAQEGATCLPLSCQKHVPKDGQAAEGATKKSGAPIRNFIDLNDDVPNDDNSEESVVSHECHVEPSRNNHPKRAFVIDLEVPACEEDASWDIDQECAQPKPDAYQEVDDGSDTSALAAAENIVALSRNTPTAAEASDDTLQWFADLAVLNINDLAEQAELQACTNDSSNYESDSFESLTLKLEETKIDDLWSRPLEPETATDEQTVSAAHLLTKPRRGQQRRRRQKRDFQRDVLPGLSSLSRPEITEDVQLLEGLVQASGGSWESSLTRRGRCGGRARGRKPRKTVVTVIVEEEEEEEVEVSPPPKPAGTGELEADGRGMIGWGRTTRRCRRARCPSGNSMATAS

SEQ ID NO: 56845 - protein, 112 aa, Zea Mays
MASVYSRSHYNMSLSKEFEGGITNGAFWYYVGCVFVGFESNNIIACGPDCKNGTAKQAKISMAYSFIHRPLSDEERRVTCNDQRREVFVAQDIANKEIDRTVAFDKVRWISK

SEQ ID NO: 56846 - protein, 265 aa, Zea Mays
MRTLVLPPKVGFPPSVPAADRLHKPAARSGVAGELQHRHVLRKEIASGDVRYPLRGVPGSGDGERFLLSPAHERRAPPPAQALYHEYYGDKQGALENLIQCGNWKKAHTIFVTSVAHSMFLSSNHQEVWRITSALENHKYEIADWDLGAGIYIDFYVLKNSMQERNAMDDSDSLEEMSESCRSFFGRLNESLLVWGSKLPVESRACYSKMAEELCALLVDTPSETLNLPMGCLLTMLNAPVPDESRSSYLQDALSVFTEILCSDP

SEQ ID NO: 56847 - protein, 868 aa, Zea Mays
MRVTRRDEHRAAAAAFLYAVTVLGVLAGSAGVRAFDDGTAVYIVTMKQAPVFHRRLNLEKFGSSRVANAAGRGGGGGGGGGGGGGGGGAGDTPTTSVLRKPRQGSPKPMNYGSYIVHLQNSLLKRTLRGERYIKLYSYRYLINGFAVVITPLQADKLSRRKEVANVMLDYSVRTATTHTPEFLGLPQGAWVQEGGPQFAGQGVVIGLIDTGIDPTHPSFADDLSTDSYPVPAHYSGICEVTNDFPSGSCNRKLVGARHFAASAITRGVFNASQDLASPSDSDGHGTHTASIAAGNHGIPVAVSGHQFGNASGMAPRAHIAVYKALYKSFGGFAADVVAAIDQAAEDNVDIISLSITPNRRPPGLATFFNPIDMALLSAVKAGIFVVQAAGNTGPSPKSMSSYSPWIFTVGASAHDRVYNNYIVLGNNLTIQGVGLAPGTDDDCMYTLVAAPHALKNNTVSPTELSFGECQDSSRLDADLIRGKILVCSYSIRFVLGLSSVKQALDTANNVSAAGVIFYLDPFVLGFQLNPTPMRMPGLIIPSSDDSKVFLAYYNDSLVRDETSGQVVSFGGVAKILGGLNPDYGNSAPKVMFYSARGPDPEDNTLSNADILKPNLVAPGNSIWGAWSSLGLDSAEFSGESFAMLSGTSMAAPHVAGLAALIKQKFPSFSPAAIASALSTTTTLSDRQGKPIMAQRTYSNPDSTQSPATAFDMGNGFVNATAALDPGLVFDCSYDDFFSFLCGINGSSPVVTNYTGNSCVASAMTGADLNLPSITIAVLNQTRSITRTVTNVAADESYTVSYSAPYGTAISVVPMHFLIPSGQKQLVTFVVNATMNSSSASFGNVGFYGDKGHRAIIPFSVISKAVYSS

SEQ ID NO: 56848 - protein, 734 aa, Zea Mays
MDPSTAKAAAPPNNADHVLHIQPDNLPPPHPSNNQQPNPPPPETPKLSQNPEKPPASSPSRPPLPPALLRRRSSIAKPKSRFVEPPTPMHPDSAHPSPVHPAATAAASLTATPTHRAASVSTPHTPAEADDDEDIFRNKDGSRAPASAARCRRRVRLGLELCVLVLFLGLLVVSLVVRPLQGRVLWGLEIWKWCVMVTAVFSGHLLSQWLVTLIVFVVERNFLLRTKVLYFVFGLKKSFQVCLWLALVLIAWSQLFDSEVGRSRKTARTLNYVSRFLASMLIGSVIWLVKTFLMKVVASTFHRKTFFDRIQESVFHQYVLQTLSGPPLMELAENVGREGSGLGRVSIGRAKEDKGVPEVIDVVKLRRMSQEKVSAWTMRGLITAIRSSRLSTISNTIESFDDVDGMEQKDKEINSEWEAKAAAYAIFKNVAKPSYKHIEEVDLLRFFTKEEVHLVIPMFEGAPETGKIKKSALKNWVVKAYLDRKSLAHSLNDTKTAVMQLHNLISVIVIIIIIIVTLLLMGIATTKILVVISSQLLVAGFIFGNACKTVFEALIFVFIMHPFDVGDRCVIDGTQMIVEEMNILTTVLLKNDNEKIYYPNSVLSTKPISNFYRSPNMYDTIDFAIDVSTSVESIGALRSKIKGYLESKPTHWHPVHTVNLKDILDVNKINMSLSVQHTMNFQNIREKNIRRSELVMELKKIFEEMSIRYHLLPQKVELTYVGSNPLPMGPSHTR

SEQ ID NO: 56849 - protein, 695 aa, Zea Mays
MPKMFGFSRRRMKLGRLKGHLHDHFHGPRSPSRTTKRSSSHHNAEDPLATSVSGRADDLAWRCSSDTFDLNGRDFESSENWAVLSTEGDKPAPRFDHAAAMVGSKMVVFGGDSGQSLLDDTKILSLDKLTWDSVAPKVRPPLNGRSLKLRPCRGHCLVSWGKNVILVGGKSDQPYDKISVWTFNTESELWSHMEAKGDIPVSRSGHTVIRAGPVLILFGGEDAKGKKLHDLHMFDLKSLTWLPLNYKGAGPSPRSNHVAALYDDRVLLIFGGQSKSKTLNDIHALDFETMVWSRVKTHGHHPSPRAGCCGALCGTKWYIAGGGSKKKRHPETWVFDVLESRWSVCVVPPSSSITTKKGFSMVPLYYRDKIVLVAFGGNKKEPSDKVEVLVVLQNEHCFSWRSAPEVEPLLYDESPPGSRELADHLSSCAPPYPTSSAARSGLAATAENSCGRKPLPDSLLRTSNLGGSSLRRQFRQEEECSSLAQKLQKPIDDDRYKDAADECSEHQPPSATNPKPRNDARRSSPEVVVDAKARRLLGRSSSDMNNHQDARVAALVRRNVALEEQLSAALASKDEAEKNLSLVIDSKDGLEKRLAEKDREVEALREKATGLELAQEEANSLSNTVHADNVRLEREVAFLKAVMDETQKELHSTRGVLAGERARAFQLQVEVFHLKQRLQTMEGRSPAAPRKPQNA

SEQ ID NO: 56850 - protein, 840 aa, Zea Mays
MQFVARLTAGIIQTYLECDPEFKYSEVLNPKRFLTNPSTPAHNDGLDNANWDLILYVNLELVNKMSNRRFIVKEMLGQGTFGQVVKCWDTETNDYVAVKVIKNQPAFYHQAIMEVSLLRTLNQKFDPDDQHNIVRMLDYLSFQNHLCIAFEMLGQNLYELLKRNHLRGLKLKYVQAFSKQILDAMVVMREAGIIHCDLKPENILLAPSVATAAAVKVIDFGSACLEGKTVYSYIQSRYYRSPEVLLGYPYTTAIDMWSFGCIVAELFLGLPLFPGATEYDVLQRMVKILGGQPPDELLREAKNTVRFFKHVGSIYAGNAAPIGLSSAYRILSEEEVEARDSKRQKMGKWYFPHLKLDRLICTYPWNNSELAETEKTDRLGLVDFLKGLLEFDPNKRWSPLQALHHPFITGESFTGPYEPIPETARIPVARAAAIDHNPGGGHWLHSGLSPQVGSVNRYLPLNNVYPPKVPFSYGSSYGSFGSHGSYTGNAGFGNSYGSIGDANAINMYYSPLGSSGLTQIGPSPDVRLRMRLSHDRGIRLSPGSLGPMSVGASPSQFTPPNYHMQIPANSTGTHGSGSPASGVIHGSPLGKAAAVGPYNMRRNLPMPPHDYVSQHGQGRFRDGVSFSHSDACAQGHTGHSHNAAVPSSYHSGWRPKIGSRSGISLEASSSHVPSKAPSQSFDFSASSTLDPANWDPNYSDESLLQEDNSLSADLSSNLHFGDATGQDHIFATSNPVPTNQRGDQLFHVSSQGVSAHSSVLINYGGYNPQNYPQQNARPRHGQPILHQRYNQATSSPMRPMGSHHNGQPAWPSSFGMGDGVPWGGTRGHSFTTRKDYGSIF

SEQ ID NO: 56851 - protein, 197 aa, Zea Mays
MSIIIRTSNLMILGTYFLFAIAKSNHVNFIVPIGAMSMYSYFCPEPLCKGKWKEMDWHTAGWIFLNTFIDRRRRRRRSSTSRLSTADRSFVSLAPGCMNAQYMLQHRRPWPCRLRRSLPCALRGPREWPTRTFIVLFLAEGSPAPVVVSEGANTMDVGRPVLVQNAPRTRLDAGTWGTMGIGLGAILDLASVQWRLR

SEQ ID NO: 56852 - protein, 313 aa, Zea Mays
MEQSSDGLPISQRRANSSTKHSSKSDEVAEDMLQSNIPHETVRLCQGVESEEIEGPPHKKIVQNFTESSSSKNKKHRWSSEEDEALKQMVKKYGTKNWRTIACAIPGRNANSCLSRWKYLLDPAINKEPWSQQEELRLIRAQQVYGNKWCKMVKHFPGRTNDALKEHWRSPMKRKLDSYLASGLLEHVPDLQDDVSFPQTQNNQSDIPKDCKAASDRNRFSSRLSTDPKLKQELTELDENEMRMAKSQQCAGTRKKLAFLSTPVELKSVVPHETTKHCQDMEPEKTEGPLCKRNSHCIKDGSSLKIPESTKGK

SEQ ID NO: 56853 - protein, 469 aa, Zea Mays
MDTHIGSVNGAASNQTVGCPASAPGCPMASTPAQPAATLSAGEASLGRHLARRLVQVGVNDVFAVPGDFNLTLLDHLIAEPGLRLVGCCNELNAGYAADGYARARGVGACAVTFTVGGLSVLNAIAGAYSENLPVICIAGGPNSNDYGTNRILHHTIGLPDFSQELRCFQTVTCHQAVVNNLDDAHEQIDTAIATALRESKPVYLSISCNLPGLPHPTFSRDPVPFFLTPRSNKMGLEAAVEATVEFLNKAVKPVLVAGPKLRVAKAGKAFVDMVDASGYAYAVMPSAKGLVPETHPHFIGTYWGAVSTAFCAEIVESADAYLFAGPIFNDYSSVGYSFLLKKEKAIIVQPERVIVGNGPAFGCVMMKEFLSELAKRVNKNTTAYENYKRIFVPEGQPLESEPNEPLRVNVLFKHVQKMLTGDSAVIAETGDSWFNCQKLKLPEGCGMVRLDGQWVHCSDMLRVRTTSV

SEQ ID NO: 56854 - protein, 312 aa, Zea Mays
MPPGSATQFRYTQTPSKVLHLRNMPWECTEEELVDLCKPFGRVVNTMCNVGANRNQAFVEFADQNQAISMVSYYASSSEPAQVRGKTVYIQYSNRQEITNNKGTGDSSGNVLLVTFEGVQPNDVTIEVIHLVFSAFGFVHKIATFEKAAGFQALIQYTDAPTALEAKNSLDGRSIPKYLLPEHIGACHMRITFSAHKDLNIKFQSHRSRDYTNPYLPVNQTAIEGIVQPTVGPDGKVKEPESNVLLASIENMQYAVTVDVLHTVFSAFGAVQKIAMFEKNGGMQALIQYPDITTAAVAKQALEGHCIYDGGY

SEQ ID NO: 56855 - protein, 943 aa, Zea Mays
MDVPTPPNRAGCNSNIGSPMQSFDDPFGVAAMTSFDGYSELCSPSVADHIFSLLNDPSAAQQMVAMWSSLGSSPRASAVREDMSFDTFPGPVDGTSSLAQRFNSAAASSPTGVDRGLKESDGLVLPSNGSQQGSSIIPRSVGNALADRMLMALSLFRKSLSDGVLAQVWMPVEHNGRVVLSTSEQPYLLDQDLAGYREVSRNFLFSVKEEPGLHLGLPGRVFISGVPEWTSSVIYYSKPEYLRMEHALLHEIQGSLAMPVYDPSKGSCCAVLELVTNKEKPNFDAEMDIVCDALQAVNLQTTTDRSNQKVYSENQKSAFTEILDVLRAICHAHMLPLALTWVPTSNGIANGFCVGKNIGIDPQPGKAALRIHESACYVNDAKMQGFLHACADRHLEKGQGIAGRALKSNLPFFSPDIREYSIEDYPLAHHARKFGLHAAVAIRLRSTYTSYDDYILEFFLPVNCKGCGEQQMLLNNLSSTMQRICKSLRTVSEAEIENVSATAAMFEKTSGTCLPTGNSESSSHDDQPITESALQDLSLGDKQGDREPDKRSSMRVADKKRSASEKNFSLDVLRKYFSGSLRDAAMSLGVCPTTLKRICRQHGISRWPSRKINKVNRSLKKIEKVIKSVHGVDRSLQYDPATGSLVPATSLPEKMPFSACDTLPTSSLGRAVEETCSPKSEQDFSSPDGWQRETSQFHVSGIPKRGGDEVRTLANNNKGRRNYVSGIANITQHSNSEGTHGPSYPNPIGAVNSLHTGETGNIDSLTSLHPSMDGIEGQTTVRNSPFVQQADVTMVDGHDTKEQTLPSTSGMTDSSSGSASSEPTFKGNPGRALKDRSSPALTVKATYNGDTVRFKFVPARGWYHLLEEIAKRFKLTAGAFQLKYKDDEDEWVILANDADLQECMDVLDSISSRNMKLQVRDLSCHVGSSGSSSSCLQVEAHSS

SEQ ID NO: 56856 - protein, 93 aa, Zea Mays
MIPGSKSSSGRGAKQTLSKPRRTLRPARFPIQIRPRHLLLFSATPMVYVDSWDEFVERSVQLFRGDPNATRYVMKYRHCEGKLVLKVTDDREA

SEQ ID NO: 56857 - protein, 265 aa, Zea Mays
MPQITKVATLKGHTERATDVVFSPADDCLATASADRTAKLWKPDGSLLMSFDGHLDRLARLAFHPSGKYLGTASFDKTWRLWDINTGKELLLQEGHSRSVYGVSFHPDGSLAASCGLDAYARVWDLRSGRLFFTLKGHVKPVLGVSFSPNGYLVATGSEDNFCRIWDLRKRQMLYSIPAHKSIISHVKFEPQEGYYLATSSYDTKAALWSARDYKPIKSLVGHESKVTSLDISGDGQKIVTVSLDRTIKIWSCRSSTQDNEMELD

SEQ ID NO: 56858 - protein, 65 aa, Zea Mays
MKNMENQLKYIKTLMFLILGSQVLCGLSARLVGLIFPRRIISIFILQLFWRQATIFCSSGLHEWS

SEQ ID NO: 56859 - protein, 173 aa, Zea Mays
MSLKSEHSSHPTTGIKQVDQITLGQGPEKSEDEGARVGGGRRRAAVRRAIESAAAAVLDDGGGCGACVVVDAVVGGDDVAGVVAVPLHPLLHAAALRRAAVNIWVYLGFGLLLTAFLPYFLHLNPSSKISTSDLVLNPILPSLFSPPPPSHHLIICFSLRSLRAPAKVGAGDE

SEQ ID NO: 56860 - protein, 561 aa, Zea Mays
MHLKQGGLNAGAGYLLCLHMCHLLYLLGDSSVNTLSDSEYSKMTSVQSVISELRERLQSHSMKSYRARFQKIYDSCMCANAPIFTGIEQLPQFSHLQELIGLTATDSVELGDIVDPPVIRTATSILPLGWTGLPGGKNAEPLKVDIIGHDLQMCTLFQAQINGNWYSTVIETLPSATSYSPNGELQPTLQKMRILVGQPLKQPPNYISGDFMIPVMAGADSTPDFGFESFFEDKDCCKGLSGFLIYGTSDFVTVRKEVHVRTRRVRLLGLEGAGKTSLLKAMLGQVKERNSTVLECIHVDLHGKGISNGLCYIDSTTVNLQELPLEVGRFKEELLLGLHDISRKTDLVIAVHNLAHRIPQYQRSNTSQPQPALSLLLDEAKALSIPWILAITNKFSVSAHEQNRLISSAMEAYQVSPEMTKVVNSSPFLMPSARNSLQQIRSATGKLKKDPANRSGYLPVNFGLSSFQRKDIVMHVEGVSSLRQLVHQVVLNNEETAFEELARERLLKELASEKAASLQVKQKPRKRDGSVTAAAVGASLGAGLGIVMAVIMGAASALRKP

SEQ ID NO: 56861 - protein, 140 aa, Zea Mays
MGAGIPGIYFFFLLRAVSHSVRLSGAADVRGSHQIGLRAGRARPLYRLTLARPPFPLPFPCPLSLSLPPGLTSPASLPHLFHPSTPPESPRRTADDPGSGADQRAQCPAHPASATSDPGSACPRRRGRFAYLPFSSLAGG

SEQ ID NO: 56862 - protein, 190 aa, Zea Mays
MDGGRDKLEQGGYGHCFMFVTLKDLYPSLFPYYHGIIAFNIILYINYSYRGGVDSEDALNNHAVPEPAQSSLFSLDIHEYPNLTVVLVLSWQKYLMHLFMFCNGTSLLKYPKAWEIAHALHAWRSLFEFPCSTIRFPTRCRCMKRNEGKPSPGYLHPLQATNIRDTELFGVHVYGTDLDVEILNAKIAAT

SEQ ID NO: 56863 - protein, 221 aa, Zea Mays
MQSESEWSQLAYVTFKDSQGADTAVLLSGATIVDRAVIITPAENYQLPPEAHKQLSGANVSTESAVRKAEDVVSSMLAKGFVLSKDALNLARSFDERHNILSNATATVASLDRQYGLSEKINLGRAIVGSKVKEVDERYQVSELTKSALAAAEQKASFAGDMTSMAKDKVERAEEERKAIMWEERNGLVSDYAKIHLDEPSSWEPAVLPLESVDEQKLQAV

SEQ ID NO: 56864 - protein, 445 aa, Zea Mays
MEGTAKYYEEDSKVKVSLMPEKEANTTVVSVSESTPKHKKRRKKKNKIQGQLDSAKASSSVVSMDIIAADKSENGCTDVVGASGHADINMDPINGDDLSSAQSKANDADVLLKNKDGNKGDKNCAENSVLLQESSARRKRRRGKRKWGSAGGGPGFSSDNGGVVAEHSLHSSANHGLSCICAPCLVEAHEKKIQNIYSPRGSLVRFQRKKLLILDLNGLLADINQDYHNAHLAHAKVRTKLVFRRPYCDDFLRFCFQNFELGIWSSRKRENVESVVDILMRGLKQCLLFCWDMSYCTVTGCKTIDNKDKPLVLKELKRVWNKDEPDLPWGQGEFSPSNTLLVDDSPYKALCNPPNTAIFPEPYNYMNQRDDYSLGPGGDLRVYLQRIAAADNVQNFVRDNPFGQKSITESDPNWNFYVKIVDKMEKQIVDQVETKIVDEVERSLG

SEQ ID NO: 56865 - protein, 1160 aa, Zea Mays
MMSQMEGGCPVDYNTITDLFLQRNMIREATAFLLDVLKPNLPDHAFLQTKVLEINLVTYPNVADAILANGMFSHYDRPRIAQLCEKAGLYLRALQHYSELPDIKRVIVNTHAIEPQALVEFFGTLSREWALECMKDLLLVNLRGNLQIVVQAAKEYSEQLGVDACIKLFEQFKSYEGLYFFLGSYLSSSEDPDIHFKYIEAAARTGQIKEVERVTRESNFYDAEKTKNFLMEAKLPDARPLINVCDRFGFVPDLTHYLYTNNMLRYIEGYVQKVNPGNAPLVVGQLLDDECPEDFIKGLILSVRSLLPVEPLVDECEKRNRLRLLTQFLEHLVSEGSQDVHVHNALGKIIIDSNNNPEHFLTTNPFYDSRVVGKYCEKRDPTLAVVAYRRGQCDDELINVTNKNSLFKLQARYVVERMDGDLWDKVLQPENEYRRQLIDQVVSTALPESKSPEQVSAAVKAFMTADLPHELIELLEKIVLQNSAFSGNFNLQNLLILTAIKADPSRVMDYVNRLDNFDGPAVGEVAVEAQLYEEAFAIFKKFNLNVQAVDVLLDNIRSIDRAEEFAFRVEEDAVWSQVAKAQLREGLVSEAIESFIRADDAAHFLDVIRAAEEANVYNDLVKYLLMVRQKAREPKVDGELIFAYAKIDRLSDIEEFILMPNVANLQNVGDRLYDEELYEAAKIIYAFISNWAKLAVTLVKLKQYQGAVDAARKANSAKTWKEVCFACVDAEEFRLAQICGLNIIVQVDDLEEVSEYYQNRGCFSELIALMESGLGLERAHMGIFTELGVLYARYRSEKLMEHIKLFSTRLNIPKLIRACDEQQHWKELTYLYIQYDEFDNAATTIMNHSPDAWDHMQFKDVCVKVAIVELYYKAVHFYLQEHPDLINDMLNVLALRLDHTIVVDIMRKAGQLHLVKPYMVAVQSNNVSAVNEALNELYVEEEDYERLRESVDMHDNFDQIGLAQKLEKHELLEMRRIAAYIYKKAGRWKQSIALSKKDNMYKDCMETCSQSGDRELSEDLLVYFIEQGKKECFASCLFICYDLIRPDVALELAWMNNMVDFAFPYLLQFIREYTSKVDDLVKDKIESQKEERAKEKEEKDLVAQQNMYAQLLPLALPAPPMPGMGGPPPPMGGMGMPPMGGMGMPPMGPGPMPAFGMGGY

SEQ ID NO: 56866 - protein, 369 aa, Zea Mays
MVQCVCLRSYFWIIEPFNAEPHRSELVASYITPVDFFYKRNHGPIPKVEDLSRYTVSISGLVNKSIQLSMADIWSLPKYNVTATLQCAGNRRTAMSNVRKVRGVGWDISALGTATWGGAKLSDVLELVGIPKLSSVTSLGGKHVEFVSVDKCKEEKGGPYTASIPLNQVLNRDHGYPLRVVVPGVIGARSVKWLDSINVKEEECQGFFMQKDYKMFPPTVDWDNINWSTRRPQMDFPVQSAICTLEDVDVIKEGQARIAGYALSGGGRGIERVDVSADGGKTWVEARRYQKDNVAYVSDGPQSDKWAWVLFEATLDVPANPEIVVKAVDSAANVQPEKVEDIWNLRGILNTSWHRIKIQRSSCVERSKL

SEQ ID NO: 56867 - protein, 115 aa, Zea Mays
MVIRVWSRSIVHHGRMHAWEMQQALASSVATAWIAEPKKKKGHVASSFCLFSLSSFIACSCCSLLYYLVVLFIWCLQSNSPLPCRDIFFSFNGRCLRHECFVLCVYRYAVVRALY

SEQ ID NO: 56868 - protein, 618 aa, Zea Mays
MEVNSSGEETVIKVRKPYTITKQRERWTEAEHKRFLEALKLYGRAWQRIEEHVGTKTAVQIRSHAQKFFTKLEKEAINNGTSPGQAHDIDIPPPRPKRKANSPYPRKSGLSSETPTKELPSDKSTKPNMPLSNENVLMAGDASLQKFQRKELSGKESCSEVLNLFRDAPSPSFSSVNKSSSNHGAPIEASKTKIRDMTIMENSSLNPNMQEDVKEINDQEMERLNGTQISSKCEHSHEGYLDISMQQMKLKPESVETTYVDKQTARASHSLAERTGTTSIPVTATEETHSVLTSDQVGINGSMNPSIHPMFPADPKFDSSATPQPFPHNYAAFAPMMQCNCNQDTHRSLVNMSSTFSSMLVSTLLSNPAIHAAARLAASYWPAAEGNTPIDPNQENLADGVQGRSIGSPPSMASIVAATVAAASAWWATQGLLPFFAPPMAFSFVPAPSAAFPTVDVPRPSEKDRDCPAENAQKECQEARKQGQFEGFRVAASSEYDGSGKGEVSVHTELKISPVQNADATSAAGADTTDAFMNKKKQDRSSCGSNTPSSSDVDVDNVPEKEGNGNEKAKQASCSNSSAGDTNHRRFRSSGSTSDSWKEVSEEVVIYQHYANSLCPNL

SEQ ID NO: 56869 - protein, 248 aa, Zea Mays
MALAAPSSLRLLPTTPSQAPSPPCASRPRHLRELRLCQRLATAAAAAAAAAAAATAPLASSPTTSADTERRKHELLRAVQETRRGFAAGPDQRAAIEEAVVAVEERGAGKGTPIDLAALDGTWRLCYTSASDVLVLFEAAERLPLLQVGQIYQKFECKDRSDGGTVRNVVRWSIENLLEEQEGATLMVSAKFVVLSKRNIFLQFEEVAVENIKISEQLQTLIAPAILPRSFLSLQHDGHENQPTSLET

SEQ ID NO: 56870 - protein, 331 aa, Zea Mays
MQIMTPKARSDVHVNLPALQKLDMMLIEVMDSMIDTEFWYEESGSRADGRGKITGPRKSKKWWLPSPRVPEQGLSQFQRKRLVFQAKLVHQILKAAKSINEQVLSHMPIPAAVMDALPKSGRASLGEDLYQAITTDYIPVEEIFVSLSLKTEHSVLETINRLEGAVFAWNQRILEERSKRSPGRHSWSFMKDSSSEVDKMSACIERVDALVQLLKSRYPNLPPTFIDVLKVQYNVDVGHAIVEAYARVLVGVAFSILSRVAEILLEDDLIKKPNTPMTTLKFDLSSDVYLAGITETPPGHIRRSLMDQISMVDGRYDAVVGKKKEVKQLRW

SEQ ID NO: 56871 - protein, 631 aa, Zea Mays
MQATAPAAEPDPEGETRRTTSSTSSRANCEEFLIQKNTLKRPRSPDGDNMLALGNFEGSVNEAAKILGVTDTKPSLDNSSRKKQGRGRGRAGTGRGRGSRAADQTRLTSTSSAAVTNGQLDKLTNKEPRSSVQLGHDDRAALQDELSTLRGKVAFLEEDLSKSHQEATNYHELSDRLAKELKDLKDHDQQMRLKQMKILSDLLIAVSKAERQEARMRIRQESFRLGNVAVMRAGTIISETWEDGQAIKDLNAHLKSLLETKETIERHRKSLKKRQSDKGDGSDAETGMSEEDILLQDEICKSRLMSIKREEEQYMRERDRYELEKGRLIREMKRLRDEDGSRFNNFQILHHRYALLNLLGKGGFSEVYRAFDLVEYKYVACKLHGLNAQWSEEKKQSYIRHAIREYNIHKTLVHPNIVRLWDIFEIDHNTFCTVLEYCSGKDLDAVLKATPILPEKEGRIIIVQIFQGLVYLNKRGQKIIHYDLKPGNVLFDEVGVAKVTDFGLSKIVENDVGSQGMELTSQGAGTYWYLPPECFDLSKTPFISSKVDVWSAGVMFYQMLFGKRPFGHDQTQERILREDTIINARRVEFPSKPAVSNEAKDLIRRCLTYNQSERPDVLTIAQDPYLSYAKR

SEQ ID NO: 56872 - protein, 430 aa, Zea Mays
MEIIETVKVCMKEAVGKAKDGKHNVVAGLKAIGITNQRETTVMWSKSTGRPLYNAIVWMDARTSPVCRRLENELSGGRTHFVETCGLPISTYFSALKLLWLMENVDAVKDAVRTGDALFGTIDTWLIWNLTGGVAGGQHVTDCSNASRTMLMNLKTLDWDKPTLAVLGVPVEILPKIISNSEKIGVVAKEFPFAGVPISGCLGDQHAAMLGQLCQKGEAKSTYGTGAFILLNTGEEPTQSSHGLLSTIAYKLGPAAPTNYALEGSIAIAGAAVQWLRDSLGIIQSAAEIEKLAETVPDSVLESMCFQVNDVLSSMHKDAGEAGEVKSAEGEFLLRVDGGATVNNLLMQIQADLLGSPVVRPADIETTALGAAYAAGLAAGVWTKEKVFAGLHKENTTVFRPKLDEAHRKKRADSWYKAVSRSFDLADLSL

SEQ ID NO: 56873 - protein, 784 aa, Zea Mays
MSIAAVRSSSPGPSPRPCCGLRRSADSSPFRPAVSPLDSPQRSSSVCKNSGRASPRTWGAEKENDPRDAAPAASARTHKVRSSGGGGGGAKSFMAPTISASSKAVAPAFTPRKKVFGERNNDAVPSSPVDLAHSSKPRAAHPLLPEEALGVPRRLRLSLDGASALPSAAGPVVSRGAPSFGGDEAAVMVENPAVSESHHDVALADAEVVAAPYDPKTNYLSPRPRYLRYQPNRRLEIYRHGGGSVRGLEDMFASQSSSEEVDTATTTEEEVSGEGQPDDSSEEETSAMAPPPEARAQSTAPALDRLLLPQPALDSPLARVLTPEPKESPRAGGVLIPERERAVSPARARPKKKRSPVRFLLAPLALVLLMAAAFVCVPPPPGYPVMLNTSMSKVSVLLSVQELHPVELAARLKQWSSSSLDFVTSYWEAIASYQERPVLGPHLAANVTAAAAEVDADYAVGFYYSAAQTSPTSLELGTHDVVSENDTEMIAGPDVEDPVTCDDPDAEPIDDIEMEQEDLSEVPSAMEEVNVDAVVEEFDDEMAEEVSGGSSGEETAAFIQNSDIPSQSTPEPEQAKGIDEVSLQQDVQTEDSEDHADGKEDQPAQHGQKLGSDMWSSYLDKVSDPAAIGAALAAIIVAAVVAFLYMRQKQTRVASNEPAEQVEQVEQVERVEQVEQVDQVETLSDSGSSQGHVVAKGSLFHSPGVEASGPSQYSSSLSSGLGRRRNTKGEGLEPVVSRRDSTAQSTSSYGSFTTYQKIPAKKEDEAMTPVRRSSRLRNVKTPES

SEQ ID NO: 56874 - protein, 230 aa, Zea Mays
MLNRDPQRRITASQALEHPWLKGGAPDRPIDSAVLSRMKQFKAMNKLKQLALKVIAENLTEDEIKGLKQMFNNMDTDRSGTITVEELKDGLAKLGSKISEAEVQKLMEAVRLLAPFHFHTQAWSTTSLVMHASVQVDVDKSGSIDYTEFLTAMMNRHKLEKEEDLFLAFQHFDKDDSGYITRDELEQAMAEYGVGDEASIKEVLDEVDKDKDGRIDYEEFVEMMRKGSYT

SEQ ID NO: 56875 - protein, 227 aa, Zea Mays
MWGYKRFYKRTLLEESDFLKNDCLVMNCTVGVVKNRIETPKDIQIHVPRSDMGRCFKELLSRCIGCDITFEVRDEKVRAHKWILAARSPVFKAQFFGPIGKPDLHTVVVEDVEPVVFKAMVNFIYADELPSIPELAGSASTWTSTVVVQHLLAAADRYGLVRLRILCESKLCDELTPETVATTLALAEQHHCAELKSACLKFIALRGNLGGKETNPKGLTRQRSCQK

SEQ ID NO: 56876 - protein, 75 aa, Zea Mays
MIMHISLVSANTTTIEAYEKKTTPHWIYDLGRKRNFAQVFGNDRKYWFIPAYSEEDLRRIPALQGLDYPVSETRF

SEQ ID NO: 56877 - protein, 139 aa, Zea Mays
MEGWDKGTKSTVGEIPLLSTRAGPRDGEAWRQRLKEEYRALIAYTSVNKAKDNDWFRIAAANPEGTRWEGTCWSPPRSSSPPSTARLTRCTAVGRSASPCTSSRCGPRTARGSAWRTRCASASRRGSRRKSRFWSTRAW

SEQ ID NO: 56878 - protein, 120 aa, Zea Mays
MVCLFPVHALPLHERRQAEANRIREKYPDRIPVIVEKAERSDIPDIDKKKYLVPADLTVGQFVYVVRKRIKLSAEKAIFIFVKNTLPPTAALMSAIYEENKDEDGFLYMTYSGENTFGLL

SEQ ID NO: 56879 - protein, 319 aa, Zea Mays
MIRYKGLTHFDVDNFVEEVFVKDIDWLPGSPEPISGSYVFVCSHQRRDIRCGICGPALIKRFKEEINGLGLDGQVAVSACSHVGGHKYAGNVIIFSSDAKGEVVGHWYGYVVPDDVPVLLHKHIGQGEVVDRLWRGQMGLSEEQQKQALELRSMTNGGKESLEETETDGASCNPAATGGCCQGNGGFTRALEQQKQALELRSMTNGGKESLEETETDGASCNPAATGGCCQGNGSFTCCHPDLPKEKRDKSIAIEQNPKSCEENGKEGGGAGSKKGNSKTCPMPTWFETWERADTYAALAVVAAAAAVFISFRIYKNLN

SEQ ID NO: 56880 - protein, 460 aa, Zea Mays
MPYDTPCEMQEDVRNFIDSSLKHGYHLSIFRKERIGGDSHGISYWYEDDPILGHRLYREIRRVEHAKDSTKKSKGKGVSTVPVISYNWEAVASNFDEFKVAAEKLFSSRNRTEVSLGKKLKFTYLPEIEKIHKKKEKLLKKQQREAILLDSCLTVNGLTSGRSRRERKHVTYTFDDYERSINEAIKTIRKNENAVEVGPSPLCKGFYGETPEKLYYKAKTDEGKAETLHRRQRKRSQRYTKDYVEAISDIDLDFDSDDDIMGEAVYDEEYLRRRKRYKASLSENDDEFQLDQVANDGDDEVGTSLNVNEDTKDLQWYKRFPLLTPQGTKLKSIDEIQTGIRRSKRSTRSRINYRQLDTFGANTKYGKSEKCNASDPDASSDALNDTELSTSQDREEEDGVNKAQQQYTEKPIVPVKESRSVRRKFLVLNELVPIAGFDDASVLVKDKHVNNNGGKCSAAH

SEQ ID NO: 56881 - protein, 320 aa, Zea Mays
MAFCSEVEDVISMSLTVVNSLLKKYKIDPKLIGRLEVGSETVIDKSKSIKTWLMQIFEESGNSDIEGVDSSNACYGGTAALLNCVNWVESNSWDGRYGLVVCTDSAVYAEGPARPTGGAAAIAMLIGPNAPISFESKYRASHMAHVYDFYKPDLASEYPVVDGKLSQTCYLMALDSCYRQFCNKYEKIAGKQFSICDAEYFVFHSPYNKLVQKSFARLYYNDFLRNCSSVDDDAKEKLQSFSNLTGEESYQSRDLEKASQQVAKHLHDIKVQPSTLLPKQIEWAKNCDVLLRQWFDIHYVFIEAKQWPASLQPIKHCFSS

SEQ ID NO: 56882 - protein, 538 aa, Zea Mays
MYSSRRSIDNGPIQCEHGKVPVSKLTSMKRLSAAAWQKLFSKYGGGPTLSGDDFCMVCLKDGAKNAVSADVYRDRKESFKNLAEAALAGSCSDSPSYFISKAWLTHWLRRKNAGILSDADNGPTSALRCRHGYLLPEHAPGAKRVSVPESLWLFLYQTISEKVDDVVTFPSDCQPCKICSQELSDVASVEGNLRAVKLEQRYKHEKLISGKSFALRPGEKYYLVPSSWLSEWRAYITTTGKNISSLPEPQSLEAVVSSLICEKHSRLLQKPLDLVCKRGSITQKTSNNDGLTIIPEYDWKLFSEEWSATPGKGISAEIAFSKDAQDKVHGSSEAMPITDGNLDQSLYGANDDFGAREPYVRTDPEVCEECVGERESCALVQKLNYQNEDIHVYFVRGKAPPKSIKEASKDVPVSDRRISKRSRRTSSGNSISLKVSGSTSVYQLKLMIWESLGIVKENQKLHKGNVEIEGDLATLADKSIFPGDVLWVRDSEIFENRDIADEISEQKGDILQVEEGFRGTLLTSSVSAQLCQGITFSE

SEQ ID NO: 56883 - protein, 679 aa, Zea Mays
MAEPVRPPLRAPPRRLALRAPLASPQVVRAGGGGRRPAADRPQELRGRAEAHPRRQHTHAHLSGAIALKDYSEAGFIVFLFTTAEWLETRASHKATAGMSSLMSMAPQKAVVAETGEVVAAQDVKVGTVLAVKAGEVVPIDGVVVDGRSEVDESTLTGESFPVAKQPESQVWAGTLNIDGYIAVRTTAMADNSAVAKMARMVEEAQNSRSRTQRLIDTCAKYYTPAVVVMAAGVAVVPVVVRAHNLKHWFQLALVLLVSACPCALVLSTPVATFCALLTAARTGLLIKGGDVLETLARIKIAAFDKTGTITRGEFSVEEFQAVGERVTTPQLLYWVSSIESRSSHPMASVLVDYAQSKSVGPKSDNVAEFQIFPGEGIYGEIDGEGVYIGNKRILSRASCETVPDMKDMKGVTVGYVACKGQLIGVFTLSDSCRTGSDEAIRELRSLGIKSVMLTGDSSAAASYAQNQLGNILDEVHSELLPEDKVRIVDELKAKHGPTLMIGDGMNDAPALAKADVGVSMGVSGSAVAMETSHITLMSNDIRRIPMAVQLARRTHRTIVVNIVFSVITKLAIVGLALAGHPLIWAAVLADVGTCMLVIMYSMLLLRSESNGGRKATTTARNNTMGSTAGRRKTAAAAAALLPPTALRARTAAASKVETPARACRPRVLGRPARAAGAT

SEQ ID NO: 56884 - protein, 192 aa, Zea Mays
MTISGWVFMISVGFNAAASVRVSNELGAGNPRAAAFSVVVVTLLSFVLSVLVSAVILLCRDYISYIFTEGEDVSQAVSRLTPLLAFTLILNGIQLQPVLSGVAVGCGWQAFVAYVNVGCYYIVGIPLGCLLGFYFDLGAAGIWSGMIGGTLMQTLILIWVTFRTNWNKEVEEAQKRLNKWDDGKAPLLSAQE

SEQ ID NO: 56885 - protein, 757 aa, Zea Mays
MPEPQAILPLRALPPDAPLPFPVPAPFHPQAPGPGGTAPATPPNPTPPQPLTPAAPPSSSSTRPPHPWEISARAWLESFPDGRPPTEPEVDAYIDVHRPELPSLPRSQLHQRLLALRGDQVLDADQSAFPYRFQRTDLWKPVYQWLESLELDSLVATQQISDWLTSNPKIMDRMVEKHSKYHLIHYTQRMHLKMLKKKGKLPKTLQLSAARATVRPIAAPFTPEENIVPLQKTITPVTGRLPSASSGRQQSGTTGRFSSASSGRQQSCTPGRFQGGNATLRDKKTSLSKKKEALLKYELLTDLQNQLTAVLLKQCRTVAIKETDSSYVESPNPETNMSIQGTTTANASAPSEAKNVFINEQSVPAGATESEPGHKRKRNPIIVTPAWCYSEASAGTLQNEINPSSNSDVSRNFNIWRGHANPLVSHRDTKKNILFCLEGRETGVSCSQAASYGGYAGRNCERWTPFLEGWNSPAFQFEGPAVHVVRKSYLSWCPTSCAYTSSAPSAQPHGRQGIRKVLDVKFHPEGLPQLVSSSNEAPNELLLFNLLSGRAIQLRGHNTKIQSIAFAVKGASVVSCASNLLKVWDCITGSCLYTLGGDDQNSVGHTQKINAMAVNKWQSCLVVTSGAKGDGKLLLWNALRGELASDLNSNLRSQDMIYPSVDTMEFYSENHLACGSDCDYGGSAVVQLWDIDSPESYLSFSASDSYITSLKVNPAGNTLITGSGDGTIGLFDIRTCSAISHLSVGSSCEVTSVSFSK

SEQ ID NO: 56886 - protein, 343 aa, Zea Mays
MSAATTGPAPSVATPMAPPPSYPASSTASSSISASAEEEEDLYGRLKSLQRHMEFVEIQEEYVKDEQKNLKRELLRAQEEVKRIQSVPLVIGQFMEMVDGNNGIVGSTTGSNYYVRILSTINRELLKPSASVALHRHSNALVDVLPPEADSSISLLGSSEKPNVTYNGPRMVRDVFRLAKENAPAIIFIDEVDAIATARFDAQTGADREVQRILMELLNQMDGFDQTVNVKVIMATNRADTLDPALLRPGRLDRKIEFPLPDRRQKRLVFQVCTAKMNLSDEVDLEDYVSRPDKISAADIAAICQEAGMHAVRKNRYVILPKDFEKGYRTNVKKPETDFDFYK

SEQ ID NO: 56887 - protein, 287 aa, Zea Mays
MPPSPPTPAAPKTIADFFARPAKRLRAAPAASLSSNSSPSSLSPEQRRRADTNLALARARRNLRLAESKAQASGGAPKLEELLVEETWAEALRGELRKSYALELCRFVAHERLHGPLPVYPPPHLVFHALNATPFDRVKAVIIGQDPYHGPGQAMGLSFSVPEGIKIPSSLGNIFKELKKDLGCTVPSHGNLERWAVQGVLMLNTVLTVREHQANSHAKKGWEQFTDEVIKTISQKKSGLVFLLWGNSAQSKTRLIDETKHHILKSAHPSGLSANRGFFGCRPNPNK

SEQ ID NO: 56888 - protein, 345 aa, Zea Mays
MTNDYAFEAGAMVLADRGICCIDEFDKMFTEHQALLEAMEQQCVSIAKAGLVASLSARTSVLAAANPIGGHYDRAKTVNENLKMSAALLSRFDLVFILLDKPDESLDKRVSDHIIALHTNDVDNFRPNKRTRTGSHFDGDPGLGVGGNSVASRLRLHPEKDKDFTPLSGQLLRKYISYSREHVFPRMSKAAAAILKEFYLKLRNRSASADGTPITARQLESLVRLAEARARVDLRDEVTEEDAQDVVDIMKESLYDKYVDEHGFVDFTRSGGMSQPKQAKKFLNALNKESELQQKDCFSRTELYTIADKISLQVPDLDTLVEKMNIAGYLIQKRSGMYQLVTAPY

SEQ ID NO: 56889 - protein, 307 aa, Zea Mays
MEASKAFELTSKTALTLSSTPLSSFSASRFLLLFFLSSPLSIPSSFGCSFPLPLSRAPVLLLKPQGEARFHLADPMAQPEIPAFGDWETTGNTPYTQKFEDARKNKKTGILAQPNDPRRDLEPPRKSPLHPTVYKTNPQDQGPRNPPHRPRPELDNQRHSDRPTHRESAPRRHSNLQREQGSNAGTPRSPYRTAAGSASPMQPNNQSKPKHRSTGMQTPERRASSEGLGQHTPGRSRMKPGGYEPEEVAVPPFGEWDDANAASGEKYTGIFNRVRDDRLSPTSSARQPSTTRSEENKVQQKCSCCIL

SEQ ID NO: 56890 - protein, 69 aa, Zea Mays
MSAPYMLHLQPVIIPSTAPDIRASEVFNSDDLDYVYKSVEDGMEHIFTSTTQLQFGHDLCLNEEVKISF

SEQ ID NO: 56891 - protein, 395 aa, Zea Mays
MDRVNMSIAILPMSSEFSWNPATVGLIQSSFFWGYLLTQILGGIWADRFGGKVVLGFGVVWWSFATVLTPLAAKIGLPCLLTMRAFMGIGEGVAMPAMNNILSKWIPVSERSRSLALVYSGMYLGSVTGLSLSPLLISRFGWPSVFYAFGSLGTVWFALWQSKAHSSPDDDPELSKAEKRHILGGSALKEPVTSIPWRLILSKAPVWALIISHFCHNWGTFILLTWMPTYYNQVLKFNLTESGLLCVLPWLTMAVFANIGGWIADTLVQRGVSVTNVRKIMQSIGFLGPALFLTLLSKVRTPAMAVLCMACSQGSDAFSQSGLYSNHQDIGPRYAGVLLGLSNTAGVLAGVFGTAATGYILQKGSWDSVFKVSVVLYIVGTVVWNVFSTGEKILE

SEQ ID NO: 56892 - protein, 350 aa, Zea Mays
MAVPPLLLVAVAVAALSILVLVVFAFRRCRRRRQRHPLQAAAVAPTPVAVQVQILLQNQRVPAGVGMASDPMVARRSGKKLPMEDISFCQCPLQGVEHFGLFGIFDGHGGDGAAKAVSKILPEHLGYILSHPETKERVQSYSDASDVLRYAFTLTEDTIDHQYEGCTGTALLIWFDQNKDCFAQCANLGDSACVMSVNGKTIDMTEDHRVTSATERARIARTGQPLRDGEARLSGLNLARMFGDKFLKEQDPRFSSEPYVSQAVRITKACTAFAVIASDGLWDVISTKRAVQLVVEGKERRSSGDATSAAARVASRVLDEARSLRTKDNTSVIFVDFDVLRRDPCISPVD

SEQ ID NO: 56893 - protein, 1212 aa, Zea Mays
MLAARNPPPPPHDIAARLHHLRDLRRVPLPNRVARIADLHTDEASPVRKLVAEIIGELGSKHMRYLPDMIPCLLHLLNDETPAVVRQAVKTGTNLFAKVLQKLAIQGLFSNGGIDDALKSSWEWLLKFKSGVSHMAFQATGNEGVRLLAIKFVEKTVLMYTPDPDVPSDPPTETTEDMAFNVAWLRGGHPLLNVGDLAMEASQSLGLLLEQLKSPKVKSLSTSMIIVFVTSLSAIAQRRPSFYGRILPVLLSLDPASSIIKLRVPGAFHALKSAFSACLKCTHSSAEPWRARLLEAQNIINQGGSIEDAANAAKNFGDTSNREESWPLMERSTDGSNKRSLAEDMNHVTEDDVHSTKRARQSIDANEHSEEANKTNFESMSVDISSSQPSSIRTGNSEAVYQLIGMFAALAAQGDRAAGSLQILSYSIASDLLAEVVMVNMQHLPISRPEVDQQQLPSTSSGDGLPLSSFSSLLGILLKGANQIDQDEVSPAKEPALVSSVADDRMILPANSPVPSSVNLPIEENSNSPTVPLCIETTEAKVTSAGGNSSIDIPESSEASHASTEPQGTQEHASTFAGPFPADNFSVGFSLAQSSETRSPSSSTLEANHSQLSSLSSQYVLPKLVVNNIDLSDEAKDLLQKEAFVRILESDKKEASGGSIARLPLLAHLGVEFPLEFDPWVILQKHILSDYANNEGHELTICILNRLYHEAEQDHDFLSSRTATSVYESFLLNIAENLRDMFPASDKSLGKLLCEIPYLPEGVLKLLESLCSPGSNERQDKDIQSGDRVTQGLSAVWNLIMLRPSNRDRCLEIALQSSTHHLEEVRMKAIRLVANKLFPMTSISKKIEDFANEKLNSVLEMTPSGDCVTTEMATPEAHKDIGLENLTASVTGMQTLMSLYFALCTKKHSLLRHVFAIYGNLPQAAKQAVHQQVPILIRTIGSSSDLLGIISDPPADCRDLLMQVLQTLTDAAVPSKDLISSIKILYSKTKDVEFLFAILVHLPKDEVLPVFPSIVNLPIDKFQSAISRILQGSPRNGPSLDPSEILIAIHVIAPDKEGIPLKKIPLPLLFMRTVMQAIGVFPALVDFVMEIMSRLVSKQIWKYPKLWVGFLKCAILTKPQSYGVLLQLPAPQLENALSKNPTLKTPLAEHAEQPNIRSTLPRSTLVVLGLAEDQPQQPAVTQVQSSQNQAAETSSSAADTATEVTQESSGAS

SEQ ID NO: 56894 - protein, 453 aa, Zea Mays
MAARAADENRRPAAGKPAPGVRDMASRRALTDIKNLVGAAPYPYAVAKKPMLQKSKRDEKQPALASSRPMTRKFAASLASKGQPECQPIVADPEPEVCQQKESVGDGTVDIDVELYELVDGSDSDIDMGATENKDIMNEDELLMDIDSADSGNPLAATEYVKELYTFYRENEAKSCVRPDYMSSQQDINSKMRAILIDWLIEVHYKFELMDETLFLMVNIIDRFLEKEVVPRKKLQLVGVTAMLLACKYEEVSVPVVEDLVLISDRAYTKGQILEMEKLILNTLQFNMSVPTPYVFMKRFLKAADADKQLELASFFMLELCLVEYQMLNYRPSHLAAAAVYTAQCAINRCQHWTKVCESHSRYTSDQLLECSRMMVDFHQKAGTSKLTGVHRKYSTYKFGCVAKILPAQFLLESGGTPPPSVILRLITNCPVILKNNERCSGMLLEPCKENKF

SEQ ID NO: 56895 - protein, 481 aa, Zea Mays
MAKGVGGGDPIPLSRFGALVAQLESVVASARQKTPDALLCFDLLSELSSAIDEAPKETIQLWQRKCEDALQSLLVLGTRRPVRRLASSAMGRIIEKGDVISVYSRASNLQGWLVDVKRAEATACAGAAQCLGEIYRLFGRKITAGLIETSSIVAKLMKYHEDFVRQDALLLLENALEGSGGGGAAAAYQEAFRIIMRGVSDKSFIVRAAAARCLKAFANIGGPALGMADFDSSMSYCVKGLEDSVSSVRDSFAEALGAILALAVNPDAQVKKGGKKQTASAKKIEDGVQKHLIVPFVKANGANAKELRIGLTLSWVFFLHMIHMKYGTPDSELQNYAIQTMEILQGNDSLDPHALACVLYVLRVGVADQMTELTQRDFLLFLGRKLESLNYTAATRVATLRILCYLLRSVGEVPAEFKDVLDNTVVAALSHSSAHVRVEAALTLRALAEVDPTCVGGLVSYGLTTLQALRETVSFDKVFCI

SEQ ID NO: 56896 - protein, 893 aa, Zea Mays
MADTVTGSSRRSQDDTATLIPHSGNLGGSSRKGVKAARFKDDDEVVEITIVQRDSMAIEDVRVVDDGGSGHGGGFDGLSLVSPSSSRSGKLASKFRQVKNGLKMNNSSNKAPQTQLGKNVRKRLDRSKSGAAVALKGLQFVTAKVGHDGWAAVEKRFNQLQVDGVLLRSRFGKCIGMDGSDEFAMQVFDSLARKRGITKQVLTKDELKDFWDQLSDQGFDNRLRTFFDMVDKNADGRITAEEVKEIISLSASANKLSKLKERADEYTALIMEELDRDNLGYIELEDLEALLLQSPSQAAARSTTHSSKLSKALSMKLASNKGTGPFYHYWQEFMYFLEENWKRIWVMTLWLSICICLFIWKFIQYRNRAVFHIMGYCVTTAKGAAETLKFNMALVLFPVCRNTITWIRSKTKIGAVVPFNDNINFHKVIAAGVAVGVALHAGAHLTCDFPRLLHASDAAYEPMKPFFGDKRPPNYWWFVKGTEGWTGVVMVVLMTIAFVLAQPWFRRNRLKDSNPLKKMTGFNAFWFTHHLFVIVYALLVVHGICLYLSRKWYKKTTWMYLAVPVLLYVSERILRLFRSHDAVRIQKVAVYPGNVLALYMSKPPGFRYRSGQYIFINCRAVSPYEWHPFSITSAPGDDYLSVHIRTRGDWTSRLRTIFSEPCRPPTDGESGLLRADLSKGITESSARFPKLLIDGPYGAPAQDYREYDVLLLIGLGIGATPLISIVKDVLNHTQHGGSVSGTEPEGSGKAKKRPFMTKRAYFYWVTREEGSFEWFRGVMNEVAEKDKDGVIELHNHCSSVYEEGDARSALIVMLQELQHAKKGVDILSGTSVKTHFARPNWRSVFKHVAVNHENQRVGVFYCGEPVLVPQLRQWSADFTHKTNTKFEFHKENF

SEQ ID NO: 56897 - protein, 1054 aa, Zea Mays
MPADTYKGHGFRKGLVSMLMDLKPRFLRFPGGCFVEGGWLRNAFRWRQSIGPWEERPGHFGDCWQYWTDDGLGYYEFLLLSEDIGAAPIWVFNNGISYNDEVNTATIAPFVKNLLEAVRIRHGALLEPKWGIPKPFPVKYVAIGNEDCERKFYRGNYLKFYNAIREVYPDIQLISNCDGSSGPLDHPADIYDFHVYADAKTLFSMKSTFDKSPRSGPKAFVSEYAVWKTDAGRGTLLAALAEAAFLTGLEKNSDAVEMACHAPLFVNDDIEKKWNPDVIVFNTWQHYGTPSYWMQKLFRESSGAMVHPTTTISSGSSADSLAASAITWKDSENNDSFLRVKIVNFGSDAIRVAISTAGLQATIDVLRSTATVLTSTAVMDENSFSNPNKPEAVACCSLCTGAAEARVKARADVAGARGRLCTGLSLKAKEKKRKKSSSEAQALEVESTWLHALNFYGNEDIHQESSAKFNRDQMHSVKWKGINVLLSHLCPKCSKKHDDTTSGSQTTGCTCWQWFFTPSTSNDTANVASANGGNTSQVEEKVLAPSYKLDNAETSVSAVGHHTKSSMHHRLKIWISSGHNGIMGKYGNKLELGMPHEARPLLLDEHAKPGWPDWLINVAPEAVRGWFPRRQDSFEKLDKVGQGTYSSVYKARDLKTDKFVALKKVRFVNVDPESVRFMAREILILRKLNHPNIIKLEGIVTSSVSRSLYLVFEYMEHDLVGLAATPGLKFTEPQVKCLFQQLLSGLDHCHSNGVLHRDLKCSNLLIDNNGVLKIADFGLATSFDPDNQQPLTSRVATLWYRPPELLLGATKYGPSVDLWSTGCIFAELLAGKPILPGRTEVEQLHKIFKLCGSPPDDYWSKLEVPQAGMFKPSRQYSGCIAETFKDFPNSVVLLDNLLALQPYARGTAAETLRSDFFRQKPLACSPSSLPKCPPSKEYDARLRMEEARRKRKAAESVSGFGSIETEDVNPLASGNTKVAMIRPESADARNAILGSQNNNLGLKGPAVNKGKSRIYQHSGSMITAKGNVEQMLKEHEKNIQEAVRKARLSKHREL

SEQ ID NO: 56898 - protein, 116 aa, Zea Mays
MPVVDLHIPTLCLVGSPNVGKSSLVRILSSGKPEVCSYPFTTRGILMGHIVSNQERFQVTDTPGLLTRHDDDRNNIERLTLAVLSYLPIAVLYVHDLSEDCGTSVADQMCQITCFT

SEQ ID NO: 56899 - protein, 394 aa, Zea Mays
MRPLIRTARCWLLRARVRGMATLPMALSPAAISPFTTLPLYYSSRPHRRLLARFFSVASAPGGAKGHRPAASAVEVGGVKIAREDVVKEDDPTNNVPDNIFSKIGLQLHRRDNHPLGILKNTIYDYFDKNFTGQFDKFDDLCPLVSVKQNFDDVLVPSDHVSRSYNDTYYVDGQTVLRCHTSAHQAELLRHGHTHFLVTGDVYRRDSIDSTHYPVFHQMEGFRVFSPDEWSGSRMGGTAYAAAELKKTLEGLARHLFGAVEMRWVDTYFPFTNPSFELEIYFQDDWLEVLGCGVTEQEILKRNGRRDHVAWAFGLGLERLAMVLFDIPDIRLFWSNDKRFTSQFSEGKLGVKFKPFSKFPPCYKDMSFWINDAFTENNLCEVVRGIAGDLVEEV

SEQ ID NO: 56900 - protein, 215 aa, Zea Mays
MKSMNVASLVEISDAYSLDRAIATPERALHTANLCVRLLLSKESIVIRRLIMTANAKSLARDLISRDALMFRVLLSKVIADVVYQWMLSATGLKRVMETKIQTPMTTGKNEGHLVLAEEPSTLMVLQAAVKDRRIQLMFTKFVRELREEPVLMIRVSWNVFLISVSSAAVGLHRFLVFFLKEDGARFLDDKVKKMKIWLMEFSKRTANLEIQGIL

SEQ ID NO: 56901 - protein, 65 aa, Zea Mays
MADDANRAAFMELQSRMIDTTAKIKQLQTQMRSKEGEKKRAYLTLEELRQLPDDTNTYKTVAVQL

SEQ ID NO: 56902 - protein, 1013 aa, Zea Mays
MDLLSLEHVSSFWMVQKQSQRRLRVSVEHDLGASDAAPKTLRLFVPYWIKNHSSIPLCYRIVEGESTESTEADSLSRPDSLSRVSKSSKFSLKYSSKSLVRRGTMSHRNMQVLEDIEDCSTDYVMLSPQDYLNRSAGMRSESRDNNFSPARVAISMAVGGCTQYSVGVSLFELENKEHVDIKTFASDGSYYWFSVQLKMASDRTKVVNLLPRALLINRIGRTIFLSEYHDETEEPLQPYEPPKVFQWRSEFGSELLKLRLEGYQWSTPFSINANGVMCVLMNSTTGNDQAFVRVNVRSGTKSSRHEVVFQLDCWSSPYRVENRSMFLPIRFRQFGGDDHSWRNLLPNSSASFFLEDLSRRHLLEVLVDGTDPMNSMTYDINVVMDHQPLTNSDALKKALRVTVLKEGKLNVIQIIDWLPDNRNRGQITERMLSPIFQPSEVDYGQSSPDLDSEFHVTLELTELGISVIDHMPEEVLYLSVQQLLLAYSSGIGSGVNRLKMRMHWIQVDNQLPFVPMPVLFCPQKIENQSDYIFKFSMTVQTNNSLDFCVYPYVGVQVPENCVFFVNIHEPIIWRLHEMIQHLKFDRIYSNQPSAVSVDPILKIGLLNISEIRFRVSMAMSPSQRPRGVFGFWSSLMTALGNMEHMPVRIAQRYREELCMRQSALMNSAISNIQKDLLSQPLQLLSGVDILGNASSALSNMSKGIAALSMDKKFIQGRMRQDSKGVEDFGDVIRDGGGALAKGIFRGVTGILTKPIEGAKSSGVEGFVQGVGKGIIGAAAQPVSGVLDLLSKTTEGANAVKMKISSAIMAEEQLLRRRLPRAIGGNSLLYPYDGHKATGQAILHLAECATFLGQIDIFKIRGKFASTDAYEDHFLLPKGKIFLITHRRVLLLQLPMMTQRKFNPTKDPCSVIWDVLWDDLVTVEMTHGKKDPPDSWPSKLILYLKAKPSNSKEIVRLVKCNRGSDQASIIYSAIDKAYKAYGPNSLKEFLRWKVPRPYAPRNSSGRSIQDLSFG

SEQ ID NO: 56903 - protein, 147 aa, Zea Mays
MRRGAALLLVAVFAVVAVAKGRADTPPAETNSDSSTAQPGLGKLEQHEQANPNKEHVTHQEGGVSNDIGDNNKKDNSTEVTNIRRDGSIQQPKHKDSIMTKSSQPLDFLEDSLIKECDPSHRCIIENKKFIACLKVSGEDTSESFCQ

SEQ ID NO: 56904 - protein, 1193 aa, Zea Mays
MPSHETKICHQEYNQPTCIFLGVQAGLSLLTSELTMIFGIALGFNLLFEYDDLITGICFATVVPNLLPYAISHLGKKMEGTINACIAGFALLSYVLGLLVSQPQIPLTMNVIFPKISGESAYSLMALLGANIMAHNFYIHSSVVQGQKKSSAVGLGALFHDHLFSILFIFTGIFMVNYVLMNSAAAESTNTLLITFQDVVELMNQIFVNPLAPTIFLVVLLFSSHIISLTSAIGSQVISHHLFGINLPLSGHRLLLKVFAIVPTLYWAKVAGAEGIYQLLIICQIIQAMLLPSSVVPLFRVASSRSIMGAHRVSLHLEILVFLAFLLMLFSNIIFVAEMLFGDSGWMNNLKGYTGSPVVLPYTVLVLVALISVAFSLYLAVTPLRSGSHEAESHEWSVHSQRELLNTSQEREDVKVDNVTYEEDQRSDVVPSPRDVPDSHPELALDYIDTSDTAVESDHDSQQSTAYASTAPETCSSPSFTREESKSVVAVNWPEPLEKVPTSTVMEESTVENVVSRITTERDVLVETDVVSGKDKEDIRTLESEKSIVDSTPYVSDDGPPSLTFSRGKGSDAGNGSGSLSRLSGLGRAARRQLAATLDEFWGHLFDYHGKLTQEASTKKFGILLGIDLRTPSTSVRTDKQAAEILKSPLVRDSMRGAAFLSSSVDMMSPKNETSNLELAYGLQRGPGMGLSSWSQGMQLPNTQLQSSSNSLLEQSARLNSNFSSSYSDNNQFYQPATIHGYQLTSYLKQMNASPSLYSSMPLDPQRLPKSSVSAVPNYADSMMHARNHNLLASLGGTTTQLPATSRVGSMMPERSYYDPSSVDGNENAGSPAYSKKYHSSPDMSGIIAASRAALLNEAKLGAAIGPQSYLSRLAAERSQYASSTARPAAPLAFDELSPPKLQSDIFSAQSSMRPSARSLWAKQPFEQLFGMSSAELSKGDFNLPGRSGGVAKDDFSYKESETKLLQSLRLCIMKLLKLEGSGWLFKQNGGCDEDLIDRVAAAEKLLMQGTAENQLLLHGGDLQQHSSDQAGIQYMRTLPNCGEDCVWRASLVVSFGVWCVRRVLDMSLVESRPELWGKYTYVLNRLQGILDPAFSKPRGALTICTCLQKDTRVRNSPPHSGLTAMGPVPTPIRGAFTTAGVVLEMIKDVEAAVSGRKGRSGTAAGDVAFPKGKENLASVLKRYKRRLASKGQ

SEQ ID NO: 56905 - protein, 832 aa, Zea Mays
MTLSLFTTLPSTPPSVLCHHHQLRSSSFAFSVMEGTTISIEIDGEAICLDSVGDNEQEAAENGEMHQTIYTDENGEQVAFDNQEQGREEDLAGNGEEDRDHNSIIPSREELTEELRNKVAYSEEEAYRLYCDYGHRMGFSVRKGKQYYFTGTKTIRTKDYYCSKEGLKDDEQLTEANFNKPETRTNCKAMVRFRVDSEGQWRVIQIIPEHNHELVRPEEIHLLRSVRTLSVPKSGVLNAMVNAEIQAMHDNLHINEDGTECHSQLSIRSYTLLEPKECEALVGYFKRRTNEQCMFYWDVEVDQEGRMTNFFWRDGKSRVDYDSFRDVVIFDTSYLTNKYNMICAPFIGLNNHRQNVMFGCAFLLDESLTSYEWLFKSFLESVGGRPPETIFTDQNEFISKAIEVVLPGTRHCLCQQLIEKKLMSHLGSINDSGTLHSLFSKCMRECESEAELDETWAMMHHEYNMQEHPWLTDLYQQRHKWCSALHKDAFDGGIESMDRNESLNNVLSNIDDESASLSTFVLELDKLAGSWRKTESLEDIQCNQAAPECTVKHNRILQHAAEVYTHKVYKSIETDFLDGCSATSYQAAQCNETLHKFEFLLENSPNVSVVFLNTSTMELSCTCKKFETMRILCSHALNALVLKNVDRIPERYILNRWTKYARKGTYPFPVDEFAEQDRTEVAFVYRNRAMWFVYDLLTKSKSHHNTRKLILDALENGEKSLESMCDLKRLHMNTLGKEKDGSRVEKRKKKSTKQEKHSRNVKQAVLPQTADPVFVDPPNQDQYFAAEDIASNQSVGRPFFYQGYPMTVVSTSQIQGHTNMHSEPQCASQVLN

SEQ ID NO: 56906 - protein, 1323 aa, Zea Mays
MGVMRKPMTCCTSAAHWVYSRLGSPDELSHFLLSLLESLPSLAIHGFVLPLALQWISPMLKRDSNSVLYAMAVRLLCKIWAVTDWAFPNLQVVLDPENFSNFISDREISASIATSIRDVCKQNPDRGVDIILSVSFCIESRDSVVQALGLESLSYLCEADVVDFYTAWKVISKQVLDYYVEPAVAHSLCILLRCGAMDAEAYSVISGNLVRTLWRIGTSKKNNPDPLWDKARGTAFHSLSNYKVSLIQDAIPDFWKLNYEFFTNEHNLAVLKAMEHLQDEIIRYEHICLVSLLTDEPCSHRNRRRVTTDKRTAVHKFEKLLEVFPRAVFKGMLSHHQLPGAALLTLNFTPKDILNEGKPKDLPRVHSAFEQAFVEIAESMYVSRNIVVALLALQSWKSFVSNWMQAVVALLDTKDSSKLNKAMKAANDIFKILCDQVPVSTPQVVVNIALVIGALALIVPPTAHLVVSSVSDFLLKWLLQYEHEHKQWSAALSLGLIFNCFHPTDKKSRLQVINGFLEVISKTESCLVKGACGLALGYVCHGLLTRAHNAVDSEVEAITQLNERASVEDILHALVTLLIQLCPSSCYSLKKLSIYGISSMGGMEENIHSFSDDPWAVAGLVIGLGNSVVALYRLGAYEAVTEVKDVLISWIPNVDSNSALFDEIDSVSLCMGSCLALPSVVAFCQRVELLNDDLDALFNRYTSLASELLNLNKSGIIFQNLLMAICIGAGSFLSSILNDGVHAMEFNGVKGFLDTLRHIYTHPFPPLVHLGGMFGVVNAFGAGAGDLTGVFSKPMTSQIKHEESSFVSGSLLTSPVGETLSTSMIQEIFLLAKDAKDKHIQDYAAWAISFLRSRWSKNQNQILYEDNGSNRSPDDHDQASSFSEQSLVWNLSLWLSDLKFEKSGDVVPISTVGTVLKCLSKAPRLPTTDWGAIVRRCIKAEAQISHKLTNQEDPKILKEACLYLTLAHAAHISPLLQFLDDLTDILRFQRLDINVQSILLKHLLHLMKLFSDSRLDKLHEDFTEYLYSPTSSYLNYSSEQKSMLRMSFWEGIYTCLVDVSEESGVFSFIEKCIQCLLPLLTLHSDGQPEFMKEWSVAILCLTNAQKKWLDDILQIRSTALVNEGHVDVAKKIILRARLCATGCGSTHELGNIKTAILCTKADGVWWSVLVEITSALNSAENIIKRQWLLDALDIGCVTAHPSTVLCFVGLLCGSCCIYMPLLLVNSINVLSDLPVTLPAFLSTIVSDDFRNSVADRLWLLTTDIYTWAEQLAHGHDQPGHDRIHRSETEIATFLANILLSTCITVEDYLSVDKRLKLANLEAL

SEQ ID NO: 56907 - protein, 2707 aa, Zea Mays
MDHRGGGGGGGNKNRTDLLAAGRKKLQQFRKKKGKRGPGNKADADADAEAGEGAPKAAEESVPEPKSPVGLKLLAGEGGGGSTPFEEAERSQAEQCNGEGPGTAESSSVESSNAVQEQETVQEQETDDVSDAHHVGPSEQGISEHPESQTAGGRDLSLQATSGDSIGDDNVGRAQLGDVDSMELNASSEGNGADGDCNQLGEHQQVEMDAVERPTSSSFEEFTELPIHSQGIEADNIHGEGAQEMVMDVSGRPLDGDIQHDIEPTASAEIDAETALEESTVAASIVIPESTARGTEYERDTGYETDGVDKEALLEDPSMVHVSDEAVTIDDLSVQAKPTASADMPLCEQKGDPALSRSAVLQGIMPLHFEDIQNHMFSATLSRDFLQLQLDEAAGLYSDFTQQSSDNTTQLRVLLKETEESKLAVDRELHQCRHELSKVNIEKGQLELTMASLKEEINTSNTRCTYLESELHSSKESTEQIHSELANSRLLLEALQKENMELTASLAFEKEAKKEVEEQRDHLSSDNRKLLSELSGLELSLASVKEEMDASSSRCNVFECELRSSNENMNHTLTELANCQALLETLQKDNLELSANSASEREAKMKLQEDNLYLCNEKGKLSSNLRELNDKLEVSYAKHKQLESHVKDTETYFGQLTEQLIEENLYTSISIDIYQSTTKDLDTKYNIVLGQFQNIMRQELHLDSSEVTTENAERAIMTPRHDSHGNNQCLLNLVNANDSCNSTALLSLKGHLEVAKSDLHNLEKLLERISSRSDGRVLVSKLIKSFESKGSDDDTGLSEGEHDNLQKSTREMLSCLGEKFIAMSSDITKTEEYLAELCNKIELYVKSTVQHDRDRQCTVVLEAKMDELAGKLSNYKETIDNLHNQVAIVQQDANSNAGKLIDQAELLQKDAVERISILENERMSLSDLLSEVTNKLTSLGDAVFPSGSSEIEGLNFCTLSCVDLVARSFQSLQEKLEAAQIDNAQLNSSLVELRKAIGVAQERSEHADGIVKKLYDSLQELLCDSLGSSNEFGARYSVEEPIESQYGRLIAHLKNLLHDHHSALSTNAELELSLLSKCEEVEELNMRCSSLLKKLDEVCILNEELKSASSSKNVTLDKLHSRCLTVAEMLASCSANHSSTVQLISDIGEGSSKEDHILTTLLPCIEADVASCIEKFENAAEEIRLSKICLQEISIFDQISFEKWSYPLPTLIKEEVLPKICDLQDRFDQLNALNIQLETEVAVLKDGMKELDEDLGTSRSELQKKVSELEQLDQKFSSVKEKLSIAVAKGKGLIVQRDSLKQSLLEKSGEIEKLTQELQLKETLLKELEAKLKSYTEADRIEALESELSYIRNSATALRDSFLLKDSVLQRIEEVLEELDLPEQFHSRDIVEKIELLSKMAIGTPFTLPDGDKGSSVDGHSESGVAMNVIDDEQNSNSNSVSDEVKSKYEELNRRFCELAEQNNMLEQSLVERNSLIQKWEEVLGQISIPPQFRMLEAEDKLAWLGNRFLEVEQERDSLQLKIEHLEDSSEMLIADLEESHKRISELSAEVVAIKAEKDFFSQSLEKLRFEFLGLSEKVVQDEFVRDKLRMDLSELRDKFAEKTEESRHYHEMDTEVHKLLNLVQNTLQDSTNSEISSGGISAVLCLGKMLKKLLDDYGTLLYKSTEGNFAERDIQLEDIKPSKDASKSDTGAYEKEMELNSLNNELDHAHNNLALAQQECDEAVEKAQSLMMEIETLHAQISKLQESDAEQMQKKEMELNSLNNELDHARNNLALVEQERDEAVEKAQSLMMEIETLHAQISKLQESDAEQMQKYQSLVLELESVGKQRDNLQERLNQEEQKCASLREKLNVAVRKGKGLVQHRDSLKQTMEEMNVVIEKLKSERKQHIESLETEKSSLMDRLAENEKSLHETNQYLSGLLNALNRVDVAREFDMDPITKVEKMAKFFLDLQSTVASSQNEVMKSKRATELLLAELNEAHERADNLQEELVKAEAALSESSKQYIVTESARADAVRQLELIMHAQSQTRRRQADHLLELNSTSSQLREVCFELSHCLVNTFSKDVDLICYVVNFMRSSGKLMDDTNTMDIPIASKHVLSNRTNNKKAHIPNAPLEIKTDDTDDSQFLHHLAIACHALSDCVKDCNDLKRNIDEHDFSVEQKATELFDVMSTLKNRFTSQHNELESLRAKFVELQSEMEERDKEIIFAQRNMSLLYEACASSVAEIEGISDIYPGKHSYAVEHSADECIKSIVEQLVMAVKTSQNSNEGSTKELKAIVLELQQELQAKDVQISTISSDLSYQLRVAESSAKQFSVDLEDARMELQNLEKQVDVLQNQKKDLETQLNELKNMESMASEQHGRIEKLTDELSRKDQEIEGLVQALDEEEKELEILENKSLQLEQMLQEKEFALKTSEVSRTKALAKLATTVDKFDELHSLSENLLAEVENLQLQLQERDSEISFLRKEVTKSTNELLTTEESNKNYSSQLNGFMKWLERELLQFGFHSESANDYDYTQFPVYMDMLDKKIGSLIAESDDLRVTVQSKDSLLQVERAKIEELMRKSDGLEASLSQKDSQIGLLRRDRASNQQSRSINLPGTSEIEQMNDKVSPAAVVTQIRGARKVINDQVAIDVEMEKDKPFDDEDDDKAHGFKSLTMSRFVPKFTRPVSDRIDGMWVSGDRLLMRQPTLRLGVLIYWIALHALLASFI

SEQ ID NO: 56908 - protein, 626 aa, Zea Mays
MKYVLVTGGVVSGLGKGVTASSIGVVLKACGLRVTTIKIDPYLNTDAGTMSPFEHGEVFVLDDGGEVDLDLGNYERFLDIKLTRDNNITTGKIFQAVINKERRGDYLGKTVQVVPHITDEIQDWIERVAVVPVDGKEGPPDVCVIELGGTIGDIESMPFIEALGQFSYRVGPGNFCLVHVSLVPVLNVVGEQKTKPTQHSVRGLRGLGLAPDVLACRSTEPLEEHVKAKLSQFCHVPVSNIVNLHDVTNIWHIPLLLRDQKAHEAILKVLDLQYDGKVPREPELTKWTKRATKFDKLKTPVKIAMVGKYTGLSDSYLSVIKALLHASVAMERKLVVEWVPSCDLEDSSAKETPEAHKKAWKLLKGADGVLVPGGFGDRGVQGKILAAKYARENNVPYLGICLGMQIAVIEFARSVMKLRGANSTEFDPATTSPCVIFMPEGSKTQMGATMRLGSRRTYFHVSGCKSAKLYGNASSVDERHRHRYEVNPDMVPDFEKAGLQFVGKDESGKRMGIVELPSHKFFIGAQFHPEFKSRPGKPSPLFLGLIAAASGQLEPLLQRSNPTTKACSISKVPKLKLYPTGPVNNPLNSLVNGYYPNEKRRLRFSKPPAPATHGSDIFNEERLPVR

SEQ ID NO: 56909 - protein, 331 aa, Zea Mays
MQELVRLRQQQQTTDHQLQTLGKRLQGMESRQQQMMSFLAKAMQSPGFLAQFVQRNENSRRRIVAANKKRRLPKQDGGLESESSAASLDGQIIKYQPSINEAAKAMLRKILNVDSSHRFESMGNSDNSNNNNILLEDYMPAAQAFESSSSTRNSGVTLAEVPANSGLAYVGTSSAICSPPAAPEMQCPVVLDNKAYKQVASMSAVPPVSSDMGIIPEFSDLADLVSVDILGGAFEMMPGPEFPLPEEGDDGTTMYNNNDEEAQSLPGIINSIWEQFLVGSPLSTDNEEVDSAGGLYAQEDGWSKVGNIANLTEQMGLVSSTNHRDSGNGLY

SEQ ID NO: 56910 - protein, 881 aa, Zea Mays
MPVVSSPFHLIRICLELEARVLMASPQESNSLCLKRKLVDDCLSKDCKSRRVKSENEPSSDSFAKRCNCCCTRPNLANDCVNFLKSGAPNRVMYYKKGSWHNFPEQIMNSLIDEFKGNKSSVVSVMDDEPILVDFLSMTLVNLKTRKQRSVAWFDDTGKRFFPSLFFDEESDEMPKQDSGNVNNTAQGIMLDKVTSSPPEVVKQVVLESSPPVPQKPSTVDVLRKKITSVERGSEGFLFVQDLFLSGMNPFATPNNILHVHRYSPNDITAQCRFEAFERQMKSTKEARGDANVKYGWLGSRKSDIVRILINGLGTTANPVEKAGLSAGVYLSPENRAFTSVGLCDVDEKGVQYMLLCRMILGNVEAVEPGSQESFPSSEIYDSGVDDCSNPKCYVMWPSHLSTHIRLEYLVSFKLAPKVRNYLLDLKGLWFNPSLKELGTDICTLQPVMCETGEGPTSPWISFRVLFAVIQDNISSVARELIFHHYEELKESIITREEMVKKMIIVVGEKVLLEALKKLHYCPSLWYRPSVEAVSSDSVMAAPGKLSLDKAGGVFSLTLSVNHVDSHAPNGVSEQSTVLSTKGCETLAADMVPNGQDCPAPSGVPETSSSAVAMRGASTSVEPKRRDPPVQIVPPGSSATPCAKNQDSFVGRVTPIARDGLLRTICGSSSSPGGYASLAQANTSQTNGVSAPGVTPRGYESAVPSLSLGNSESTGVKQVNSAPRMTPEGQKFLSLGIAPRSPALRDLVKCQASSTLVAMPPAGLGKSRSMKIEGHDSLAPSVKEPKGNGGLAPSKTPKLHEPVIADMSIKSCDSLALGIAPNGHTHDGPASGSGEAKKEQAALVTGSQSKSSVPSLDASSHVTGAASALVALSTLREKGGR

SEQ ID NO: 56911 - protein, 443 aa, Zea Mays
MSQSFDINVLREEARSRWLKPSEVYYILQNHERFPITHEAPKKPPSGSLFLYNRRVNRYFRRDGHTWRRKKDGRTVGEAHERLKVGNVDSLSCYYAHGEQNPCFQRRCFWMEKMVAALLAAGASATAVTDPTAQDPVGKTAAFLASERGHTGLAGYLSEVSLTSYLASLTIEESDVSKGSAEVEAERAVEGISQRNAQRHGGTEDELSMKDSLAAVRNAAQAAARIQNAFRAFSFRKRQQKTARLRDVYGMTQEDIDELAAASRLYHQAHASSGQFYDRAAVSIQKKYKGWKGRKHFLNMRRNAVKIQAHVRGHQVRKKYRTIVSTVSVLEKVILRWRRKGHGLRGFRAEQQPMVEAIEEDDEEDDDFDDDEAVKVFRRQKVDQAVKEAVSRVLSMVDSTEARMQYRRMLEEFRQATAELEGSNEVTSIFDSDLELLGINNFM

SEQ ID NO: 56912 - protein, 1158 aa, Zea Mays
MDDVCEGKDFSFPEQEEGVIELWAKLDAFHEQLRRTEGGEEFVFYDGPPFATGLPHYGHILAGTIKDVVTRHQSMRGRHVSRRFGWDCHGLPVEFEIDKALGITNRQQVFDLGIGKYNETCRSIVTKYVSEWEAMVTRTGRWIDFKNDYKTMDLNFMESVWWVFAQLWEKDLVYRGFKVMPYSTGCKTALSNFEAALDYRTVPDPAVMVSFPIVGDADNAALVAWTTTPWTLPSNLALCVNANLTYAKVKDKSNGAVYVIAESRLGQLPVKAKASGKKQAPSKGSNIEAVQDGLDKESYELLSKIPGVSLVGLKYTPLFDFFIELQGTAFRVIADNYVTDDSGTGVVHCAPAFGEDDHRVCLAAGIFETAGLVVAVDDDGCFIEKISDFKGRYVKEADKDIINAVKDKGRLISKGSIEHSYPFCWRSGTPLIYRAVPSWFVKVEKIKDQLLECNKETYWVPDYVKEKRFHNWLEGARDWAVSRSRFWGTPLPLWISQDGEEIVVMDSIEKLEKLSGVKVTDLHRHYVDDITIPSKRGPEFGVLKRVDDVFDCWFESGSMPYAYIHYPFENRELFEKNFPGNFVAEGLDQTRGWFYTLMVLSTALFGKPAFKNLICNGLVLAEDGKKMSKSKKNYPPPKDLIDEFGADALRLYLVNSPVVRAESLRFKRTGVFAVVKDVFLPWYNAYRFFVQNAKRLEVEGLASFSPMEQVVLLKSSNVLDHWINSATESLVSFVHQEMDAYRLYTVVPYLVKYIDYLTNIYVRLNRKRFKGRTGEEDCRISLSTLYHVLVTTCVVMAPFTPFFTEVLYQNLRKVSSNSEESIHFCKFPSTTGERDERVEQSVKRMVTIIDLARNIRERHNKALKTPLKEMVVVHPDNDFLEDITGKLKEYVMEEINVKNVTPCNDPLMYASLRAEPNFSVLGKRLGKDMGKVSNVVKKMTQEQILAFEKSGEVSFFGHCLKLDDIKVVRQFKRPENVSEKEIDAAGDGDVLVILDLRTDQSLFEAGVAREVVNRIQKLRKTAQLEPADPVDVYYESVGNDKNTLEEILKSQDQYIRDALGSPIVPKEMAPTDVVVLGEESHNVHDMSFVICIARSTPIISPDLLSHASGNSNHVEALRVYLLSKSLSRLKNQFQSGNGVITVDCIEGYPLIREGRTTD

SEQ ID NO: 56913 - protein, 386 aa, Zea Mays
MNMTTPLQGTHPSSHRRLAPSSARQVSTRAQTLPRRAAAVPRLRAAAPDATDAAAALMVARAEAGDFAEAWSLWAQLLHSSAAPCLPAVAPRLLPAYARLGRFDEILLAVRELSARDRGAARTLYPLAVSCLGAAGELARMEDAVLEMGRLGLRVDSATGDAFVRAYAAAGTIPQMEAAYRRHRKSGLLITRGAIRAVASAYISRQKYYRLGAFAADAGLRRRDVGNLLWNLYLLSSAANFKMKSLQRAFLEMVAAGFRPDLTTFNIRAAAFSKMCMFWDLHLSADHMHRDGVAPDLVTHGCFVDAYLERRLARNLTFAFDRLDGDAKPVVATDPIVFEAFGKGGFHASSEVLLETAGGKGRWTYYKLLGVYLRKQHRRNQVFWNY

SEQ ID NO: 56914 - protein, 149 aa, Zea Mays
MESHCLIYRMEAQVALLTHMQFRGSKRLGKDLKLTGHRIHGKAYTITERIKRTRKGSATSSMMTIMCTLMTSLKLSSGHIMVLLGLKYRGKGFTSGTNRSDLDGAAVNHAERKFHVTAKMKKARMRAEKQPALVHMLTGSSLDYNHVVH

SEQ ID NO: 56915 - protein, 204 aa, Zea Mays
MDNIITTRLLVPASEIACFDGREGSLSDIQRQTSANVQILPREDLPSCALESDELIQIVGEIKAARNALIQVTTKLRSFLYREMPDPIQVGNINLHGAISPVAGSPRGPYQGNDIPMGAYHQASQLATSWHSKDSGGSASGSFEQGSNINDDIRQSATKRFAVPLVTRSTLEIVIPNSAVASLTMRAGSKLAQISEVRLYPEFY

SEQ ID NO: 56916 - protein, 195 aa, Zea Mays
MGCCFMFGKKAKQAVEGDEDLHSVKVFSYNDLRKATQDFSDANKIGEGGFGSVFRGVLKDGTLVAVKVLSATSRQGVREFLTELTAISDIKHANLVTLIGCCAEGSHRILVYNYLENNSLAQTLLGDTLLCLMPQHVVYIFMVFVLTDVSAMPTQDPDTVTFGSIGGLVSKLQLALPVDLRFSMRKSVLTLSIGT

SEQ ID NO: 56917 - protein, 151 aa, Zea Mays
MPLALTPENDPGKEELKQLQVQLEDINKLAHKQVRRILWSGLGFLITQVGLFFRLTFWEFSWDVMEPITFFTTTTGLVVGYAYFLITSRDPTYRDFMERMFESRQRKLIQRQNFNLDKYLELQRRCKDPLEKACGTTNPDTAHLHELSVHK

SEQ ID NO: 56918 - protein, 360 aa, Zea Mays
MLELVPKGKGGDEVAKKLIVDGANGIGGVKLEQIKVELSGIDISVRNSGKEGEGILNHMCGADFVQKERVTPHGFNPEDVGVRCASLDGDADRLVYFRLSSASDNRVDLVDGDKILSLFALFIREQLDIVNNNGGQANKSLSARLGIVQTAYANGASTLFLKSLGLEVVFTPTGVKYLHKRALEYDIGIYFEANGHGTVVFSEDFISQLESLSNELSSQADIGSAQYHAVMRLLAASQLINQAVGDALSGLLLVEAILQYKGWSFQDWCGLYSDLPSRQLKVKVKDRSVIVTTDAETKVSQPSSLQELIDKETANYTHGRCFVRPSGTEDVVRVYAEASTQVEADGLAKSVAHHVERLLG

SEQ ID NO: 56919 - protein, 185 aa, Zea Mays
MEENNVIGLKQGKQSISLEPGGQFELSGAPLETLHQTCAEVNSHLYQVKAVGEEMGIGFLGLGFQPKWALSDIPIMPKGRYEIMRNYMPKVGTLGLDMMFRTCTVQVPSTGLKTPFRDGYVRDLAEEVLKLAKNGLERRGYKEVGFLREVDEVVRTGVTPAERLLNLYETKWQRNVDHVFEHLLY

SEQ ID NO: 56920 - protein, 319 aa, Zea Mays
MMEEHKHHELRQLRSDTSLELGCDARGHSRAGNDAAIWYCVIVAGRPGAELSKKRQILRKAQDKLLGDVDRSAGNVDNSVETSSAATAFKDDRLTFVWLDGEVQKQICAFYLATDYTGACGPRDFGDDNDKPEIFIVRFQRNATYEALKAEKKNNLVDVLQGQHADASQLVARYKGPVEIEEINRWISQIIKDGDTREIPYFTSKVPDLVPEETSKAWNSKSIRSAGKSLKENIGFHFQDYLTHPMIGSTLLMCGCISMGILWFRNNTPTQSTRQEKARKDKAKRPRPKLSTSLFGEPSVPDVDPKDARQWEMSSSDSD

SEQ ID NO: 56921 - protein, 404 aa, Zea Mays
MASLLRRSAVPARQLLLLLPRHLAAAGSAPASSRSFSRFHPRDDDDSSMFDPPEPPVNWGMNIVPEKKAFVVERFGKYLKTLDSGFHLLIPAVDRIAYVHSLKEETIPIPDQNAITKDNVTIQIDSVIYIKIMDPYLASYGVEDPIYAVLQLAQTTMRSELGKITLDKTFEERDALNEKIVSAINEAATDWGLKCIRYEIRDITPPTGIRQAMEMQAEAKRRKRAQILESEGKKQAQILESEGKKTAQVLESEGAMLDLANRAKGAAEAILAKSEATARGMRLVSDAMTTEGSAKAASLKLAEQYIEAFSNLAQKTNTMLLPGDSASPASFVAQAMKTYQQIHSHSQALKYHPQIEGLEESGETSPAAPSSEASKTPPFVGEADSNHTFSLQRPRIRSELPSSA

SEQ ID NO: 56922 - protein, 566 aa, Zea Mays
MAASLAAAASRLAATGGELSWSARPCPGSLVASFPSAGRLRRPASGVRCGGGVLPAAAGTGAEAEEGGRFVGWFREAWPYIRGHRGSTFVVVISGEVIAGPHLDGILQDISLLHGLGIKFVLVPGTHVQIDKLLAERGKKAKYAGRYRITDSDSLDAAMEAAGRIRLTIEAKLSPGPPMLNLRRHGVNGRWHEISDNVASGNFLGAKRRGVVGGIDYGFTGEVKKIDVSRIRERLDRDSIVVVSNMGYSSAGEVLNCNTYEVATACALSIEADKLICIVDGQIFDEHGRVNRFMSIEEADMLIRTRAKQSEIAANYVKVVDEEDINHVRCLPMKHGTEHGFAIGGEERLSRSNGYLSELAAAAYVCHGGVQRVHIIDGTVGGALLLELFTRDGVGTMIARDMYEGTRMAREEDLSGIRKIIRPLEESGVLVRRTDQELLEALTSFIVVERDGSIIACAALFPFLEDKSGEVAAIAVSEECRGQGQGDKLLDYVEKKALSLGLEKLFLLTTRTADWFVRRGFKECSFDSLPLVRRKRIDLSRGSKYYMKWLQAAEVGHMAADGFAMR

SEQ ID NO: 56923 - protein, 296 aa, Zea Mays
MRSIIKPGMLMVDLCETLENMVRKLIKENGLQAGIAFPTGCSLNWVAAHWTPNAGDKTVLQYDDVMKLDFGTHIDGYIVDCAFTVAFNPMFDPLLQATRDATNTGIKEAGIDARLGDVGAAIQEVMESYEVEINGKVFQVKSVRNLNGHSIGPYQIHAGKSVPIVKGGEQTKMEEGEFYAIETFGSTGKGFVREDLECSHYMKNFDVGHVPLRLAKAKQLLGTINHNFGTLAFCRRYLDRLGETKYLMALKNLCDNGIVQPYPPLCDVRGSYVSQFEHTILLRPTCKEVISRGDDY

SEQ ID NO: 56924 - protein, 1153 aa, Zea Mays
MGRKKRTSTPNPTSPPSYAPRRPAGAKVAGNGGEDDGVRAEVEKALACLQRGNHARAVRLMRDAIAHHGEASTPLLLRAHGTVLARAASVLDDPAARARRHRAALQAAQRAVELAPDSIELSHFHAMLLFDAATDTRAYEEVVAECERGLSIEAPSDPAPHSLRLPGPDVDQVQSELRNLIQKANLASVSTWFKTLRSAGDDKFRLIPVHRFADEPMEARLVPSAPSPRRSNEIKKATKTSEERRQEIEVRLAAMRLLQQQKEQSNGVVSATPASSQSQGDEAPSSSLSLVGGHRADRRKGGSRKATGLSASERTDQARAYWGSIPVDQRLAFLNTSISELKSHYASAIHKEKDVASAASDVLNEVIRFANKHGNWEFMVCGRCRGQFTDVEAHRWHVMGEHVGLLSSELQEMVPQEIDADWVEMLIGWNWSPLDATAALKLFEEDQTDNLGTDRGKESDPTDNWSNKDNPDMSESSASPHNGECNGFGVVVREGDGTWPLSDDDERAKILERIHSLFKILVKNHNLSVCNLNRVIRFAVEELRGLSSGSLLLNHSLDKSPLCICFLEASSLWKVAKFLQDLVQASGINRNLENDGLGDRDSSPQNHNVLEKVILSSDSSELIIDGQTFGGKFDSESVDTDTLFSWLYAGSSIGEQLLAWNRMIDERSNQCMDLIRALGREFNNLQNSCERKLEQLRNEEAFISVEDLLCEEQTRREQVEQYGFQSFEEILRKRQAELLERNTEVQSDSNRSEIDAISAVLKKLHTSHFGYDDAFSGMAPRLFDLDGVEDEWRLHDFIHPNDSMVHTVISKMKEKVTVEISKIDAQIMRNLSVMRHLEHKLGPASALDYRMILLPLMRSFLQSHLGELVDKDAKERSDAAREAFLAELSLDAKKNASKGADMKQSHEKSKDKKKFKDSRKSKELKDSSWSNQSLIHQDSTDEGTSETSQMLADCDDLCCKCSTSEDYFNEQEEELRHRVQLEAEERKLEEALEYQRWIEEEAKQKHLAEQCRSTHASSVIGIKFGDFSYTENENNFSQKLNGIEFDSSDAHALTSSDMSVSMLTLKMNGVCNNAQPIKPLGNFGTQNPKRSSSEPQRYSQGHSAGIEKPNFEKVVQYHQRMCASRMILIKGFKKILMKQCAKALDAMLILLVQ

SEQ ID NO: 56925 - protein, 318 aa, Zea Mays
MIWIVIAEVLPDAFKEATPSQVASAGTLAVAFMETLSTVLLGFTDGNNVEDASGFLVSLVFGLGPLIGGIILVTFSLGFSMPHPLLTGVASGIAFRLAAWRPVQLLMTSKMGLFTTLFLLIGGSLAYHAATSSILRLFNRKRSSVNVIASSSGLSLSALTVQSLLACGAVFLHAYAEGLALGVAARKAYGLGRYMVLPASLHGLPRGAAAASCVYGATDSWRGALAAAALTGLAAPSAAISAILAKIDYDGLDYWMVIACGALIPSFGRVFRRSLRLDVRKSVVGLLVGVAFASVCLMSTRFICLHTPYCNSAPEAVT

SEQ ID NO: 56926 - protein, 199 aa, Zea Mays
MEDLESTTRYVTWSLHNKNRAGLRHFLDSFVAPEQLSVNTLNERFSGLNDNKQDKAKGDSKSNHSPDTNSSTAMPETRLVDLLDSTLWNRRLVPSSERLVYALVHQIFHGIKEHFLVTTELKFNCFLLMPIVDKLPALLRQDLESAFEEELDSIFDVTQLRQSLGQKKRELEIELKRIKRLKEKFGEINKKLNSLQVRQ

SEQ ID NO: 56927 - protein, 929 aa, Zea Mays
MPPPSASAIATRFATHWIADALADDESFDFSVLQDLVRASSKPLAGAPEATRERVALRCLQEASSVIAAGGDAAATAGVLRVDGARSCEDVLLRLIREVGSSRELEKDLLPPFSQDIQETICTKKSTLPETSFQLLKGLEPWITSMTPQSQMEHNDTEQCDIDQSLRSSHGCVNIEKPMFPTDNAEVQQETMADVVNGSETGNVQKDPPAPTSVFHQPCMHESRSYIPPQEDTIDVVGLGDRSLERSPIVEGNMSIGSVLASAGCDAPLQGRITEPFSQQDKHDHTATVEPKSCRQKSPNLSHCADGEGADDGGSSNQSSKVSIHEGPSAHAPVTSGFDRISGVLSTDASEPEHLSECIPAQDTSMISQLDSRKAHLSALQQERVEKVNQGPEDISANIGPVEKEHVHGDLTLQSASVLLSISCNGSNQGTKSETNLQPGTATEDRMAFEEQNAEKSHLELSGTNKANQALFDDGSVMKNNTVHGGLTAHTAPVSQSCSVTLHDKTSEANCFSEWKNEKNGQKDNCHTSIPGSSQDGGGESAKKTSNEVNSGDTSSKICVHSKDKDINDTLEGLSQQDLCIKCGKVGQLLECSSCSLAAHNSCFGSSVTFEETNLFYCPVCFYKRATEAYKKAKKTYGEARKNVAAFLGTIQVTKQHNEQLNGVQPGGANREDHSDTSKRTHENEVYNLAHQDEEPHQQMKKQKINAIGIDYRKEVLTEKVPFQNSGPASINKHSVLQNNGKTRVKDPEKKQQAGDEEARKEAGNEKSHETGASSQRRCDPPSNHDVEADQEGSLTTSIQSSGSDELEAKGLQEKKAAVSSKSRKGISKRDQHMPTSPRKRNSVHLQKRYSNPLAPPGRRKKLFWTEEEEAVLREGMAKFTPQNNAQIPWILILEHGRGVFHRTRLPSDLRVKWRSMQRKKSDAVDMEH

SEQ ID NO: 56928 - protein, 434 aa, Zea Mays
MDETGVYKNLLQEVAQRVGAPLPLYTTERSGVGHLPVFTCTVELAGITFTGDHAKNKKQAEKNAASAAWSALKQLVREEVNSSNETENSDEQEQIRIARALLNYRLKEKMAMANYPHVSPFPKKFPMQPERKPSFGQSSQSSYSKILPLFRPKSNSRSRPESPASTDGASQMPGRAMDIHTPSPRSRFPAAEAAPYVPVGHFRMPCHSMAPSVTIRTAVPVFSAPPLPPPSARPQQLPPLMSHPPPIRMASPVRMRPASPMFASSAPAQGPKLVRPVQLKDVQDQPRKETAPSVIPVQVKDVQYQSRKSSMSPVIPVVVKDAQRQPLPVQTKDVQTQTQAPKESLADPIPAIRPAVKIDLPAQGKKEASAGATSEAPSSATGNNGAMERGTSSDVLLARRSRAAVDGDGDKVEAKHEAEAQAVAEAAIRQLEIN

SEQ ID NO: 56929 - protein, 419 aa, Zea Mays
MQAKIEQKRQRLLGIAPDLPLHKLQLVVAPTAASLPALAVVALLLLLATARRPCSFLDAYRSGVVSLPSPSRTSPPHLGRSAAAARVPSGCDIFRPGQWVPDDDAPYYTNLTCPLIQEHQNCMKYGRPDRGFLRWRWRPDGCDLPRFDAAAFLDAVRDTSLAFVGDSLARNHMQSLMCLLSKVAYPKDVSTTTNPEFRTMRYEAYNFTMAIYLDEPDAAWRDAVSGFDRVVLSAATWFTRPAMFYEAGGGRVRVVGCHYCLVPGVPDRTLRYSLRMALRSALRVLTGPRFNGTVILRTLSPTSHFEGGEWDRGGDCRRTRPFAANETRVAGLDLDLHAVQVEEFSRARAEAEASGGGTRLALMDTTAAMVLRPDGHPSRYGHWPHENVTLYNDCVHWCLPGPIDAWNDMLLQMLLADPS

SEQ ID NO: 56930 - protein, 183 aa, Zea Mays
MAFYIKALVRRVQISIFVVVVLPSSSTRRLAPMGKDSKPKDAKGKGKQAAGSSGGDDGGGKGGKGKGKGKGGKSADGLGTCTYVKARHVLCEKQGKINEAYKKLQDGWLNNGDKVPPAEFAKVAQEYSECPSGKKGGDLGWFPRGKMAGPFQEVAFNTPEGTVSAPFKSTHGYHFILCEGRKN

SEQ ID NO: 56931 - protein, 340 aa, Zea Mays
MLHQTTLIPPSVSAASSSPFLHAATTAPAPGGGSCTPAFLRGASAMPSYAHHRSSPLSHDVEELEWVSRIMDDSLSELQPQAQPKPAAAVVASSAARPPLAQQRRPFAHDGTYRAVAAAPPQAGPQRTPTICALSTEAMIPVKAKRSKRSRGPGWSRPGASFLPDSASSSSTTTTSSCSSSGSISPFLRLDSSPFGGGLELGEGLFSYGHLLPRPPSKKSKHGGKGSKHRPKKRGRKPKHLPPPHPSAAASQPGPSDRRCSHCGVQKTPQWRAGPEGAKTLCNACGVRYKSGRLLPEYRPACSPTFVSSIHSNSHRKVLEMRRKKEGGMVATAAPAVASF

SEQ ID NO: 56932 - protein, 213 aa, Zea Mays
MPWAAQLLSVACVSVAAKMEECQAPALSEFHAGGFDFDSASIRRMELLVLSTLGWRMGAVTPLDFLPCFSSRVHPHGGAGAGAGGRVAIGFIFATAEAGSVLDHRPSTVAAAAILAATYGPLLTKEALSSKMSCLSPSYLIEKEHVHACYSMMVGDMSRRGSKRSLPCSGPDEIATSTYHSVLVDDATDTAAFASAVAAARSKQIRLELTGIH

SEQ ID NO: 56933 - protein, 462 aa, Zea Mays
MNNKEEADEKMRYWQLPWVPPPKEEPPSEEELARKAALKEKAGQRLRDMAAAKRSQKIVELEKQLSYLEELMEQLDEAEEEEATAILGSSGYLSQQEIRSAILKASQSLRKAKGESNGNDEKTDASAVDKYPLVSVPDETLTPEQLKEKKKQILLKTTTEGKLRAKQKRAEEEALREKQEEKRRAENPELYLEELRARYSELSDKFEQRKRQKVNGSQTNGNHSSSAGVGRGERLNAAQKERMRLLASAAFDRGKGEDTFGMRDEDWLVYNKMSKDNDDDSNDDDESELVRISSKLQEIDPTFVSKSEAVQLTPEPPKVRPLTAEDYRIAIGIERFRCPEVLFQPGMIGIDQAGIDEMVSISLRRLMEDESVKERLCQSILVTGGSSLFPGMIPRLESGIRQYRPYLAPLKLVGAADPILDAWRGAAAFAASSKFGKQTFSLADYGEHGENLFHRYNIVYSL

SEQ ID NO: 56934 - protein, 67 aa, Zea Mays
MEPETFEQLEVSKELFGKAAAYLKDEMKVNLQYFDGRPMSGTVPQRVTCTVVEAQPNTKGLTAQPQF

SEQ ID NO: 56935 - protein, 388 aa, Zea Mays
MFGRCLTSTAWGIAADRIGRKPVVVFGISSVVVFNTLFGLSVNYWMAIATRFLLGALNGLLGPIKAYAIEVCRPEHEALALSLVSTAWGIGLIIGPALGGYLALPAENFPAIFSPDSVFGRFPYFLPCLCTSVFAAAVLVSCIWMPETLHRHKVHESTSQDVEKVQESGIRKKKSLFRNWPLMSSIIVYCIFSFHDMAYTEVFSLWAESDKKYGGLSLSSEDVGQVLAVTGASLLVYQLFLYPRINKVLGPIKSSRIAAILCIPILFAYPYMTYISEPGLSIILNIASAIKNNLAVTIITGTFILQNNAVPQDQRGAANGLSMTGMSFFKALAPAGAGIVFSWAQKRQHAFFFPGDQMVFFLLNVVELVGLILTFKPFLAVPERCDSR

SEQ ID NO: 56936 - protein, 659 aa, Zea Mays
MSRALYRGVSGIGGKLAAADEAYAYYDPKEPSENSIGGGFGRGGARKRHLADAAVKVGVLLLVAAALVGSVAWAGTLYAGRGAAARAAAAAAHRGYRRLQEQLVADLLDIGELAGGGARAKEAEVCPPEYEDYVPCYYNVTDAVDVSDLGAGVAISYDRQCTRDGRVTCLVAPPRSYRIPVRWPSGKGFIWKDNVRISGHEFSSGSLFKRMMVEEDQISFPSDAHMADGVEDYAHQIAEMIGLRNEFNFNEAGVRTVLDIECGFGTFGAHLFERDLLTMCIANYEASGSQVQITLERGIPAMIGSFATKQLPYPYLSFDMVHCAKCNIEWYKNDGIFLVEVNRLLRPDGYFVWTSNLNTHRALRDKENQKKWTAIRDFAEGLCWEMLSQQDETIVWKKTNKRDCYNSRKSGPELCGHDPESPYYQPLNPCISGTRSQRWIPIEYRTTWPSQARQNSTELDIHGVHPEVFADDTSSWDSMVRNYWSLLSPLIFSDHPKRPGDEDPQPPFNMLRNVLDMNAHFGGFNAALLKAGKSVWVMNVVPTDAPNYLPLIFDRGFIGVQHDWCDAFPTYPRTYDMVHADGFLSLQKNHKHRCSTLDIFLEVDRILRPEGWVIIRDAAPLIEAARSVVTQLRWDARVLDLDIASDEKLLVCQKPFLRK

SEQ ID NO: 56937 - protein, 223 aa, Zea Mays
MHDLATAPYGGSVVKAPKVLADIVEAIAAAVYVDCKFDLEKLWKVTRWLFEPIITAETIDEQPVTTLHELCQKHGKVAQFKTWQKDGMIVVNVFVGGEMVGLGSSEQKVIAKLNAARDALGKLIGGAKQQVLINCAANGLVDDIAELRECKQKLIEQCIRKHWPKPIFKLEKEGGPAHERNFVCSVQVDTQTGTFVTIGESMSRVKDAENSAAHKMVELLLKL

SEQ ID NO: 56938 - protein, 586 aa, Zea Mays
MLPDEAFTVIRKSFDARKVLKEPQFTYIVDMDVKKILNIEPRAWDFIARLEPKLGVVEYMTEEKLAVDLVSMLNVSSKGSNNVLGIRDTHSGMIYRQQKKPRVAVIGSGPSGLFASLVLGELGAEVTLLERGQPVEQRGRDIGALAVRRILQPESNFCFGEGGAGTWSDGKLMTRIGKNTDGVQAVMKTFVHFGAPPNILVDGKPHLGTDKLVPLLRKFRHHLRELGVTIRFNARVDDLIVEDGQVKGIVVSDVELQPGPASQKLAFDAVVMAVGHSARDTYSMLWQHNVDMSPKSFAVGLRIEHPQELINSIQYSELAAEVQRGRGRIPVADYKIVKSVGERDAENELDIAEPTRSCYSFCMCPGGQVVLTSTNPSELCINGMSFSRRASKWANSALVVTVSSHDFKPFQSHGPLAGVEFQRQFERRAAMMGGGNFVVPAQCVTDFISNRLSVTTLPPSSYRLGVRPSNLHELFPPYITEALQESLIMIDREMPGFVSSKALLHGVETRTSSPLQISRHGETYESTSLRGLYPTGEGAGYAGGILSAAVDGMYCGFALAKQLSLFHGDIEPFLGKTQKQTGFIKY

SEQ ID NO: 56939 - protein, 286 aa, Zea Mays
MGTGDYSNPFDLFESLFEGFGGMGGMGGGRAARNRPMQGDDESYNLVLNFKDAVFGVEKEIEITRLEGCNTCDGSGAKPGTKATTCKTCGGQGQVVSSTRTPLGIFQQVSTCNTCGGTGEFSTPCNTCSGDGRVRRTKRISLKVPAGVDSGSRLRVRSEGNAGRRGGPPGDLYVFIDVLSDPVLKRDGTNILYTCKVSYIDAILGTTVKVPTVDGMVDLKIPSGTQPGTTLVMAKKGVPLLGKSNARGDQLVRVQVEIPKRLSSDEKKLVEELANLNKAQTANSRS

SEQ ID NO: 56940 - protein, 271 aa, Zea Mays
MPRGSLDNHLFRRSLPLPWAIRMKVALGAAKGLAFLHEEAERPVIYRDFKTSNILLDAEYNAKLSDFGLAKDGPVGDKTHVSTRVMGTYGYAAPEYVMTGHLTSKSDVYSFGVVLLEMMSGRRSMDKNRPNGEHNLVEWARPLLGERQRFYKLIDPRLEGNFSVKGAQKAAQLARVCLSRDPKARPLMSQVVEVLKPLQNLKDMASASYFFQTMQAERMAHSSSMNGRSSMNGGFKTQSPFGRHGQPPPVRSLSDGPRASPFRYSPKPNVK

SEQ ID NO: 56941 - protein, 414 aa, Zea Mays
MADHDLTALMAAQLDRHLVFPLLEFLQERQLYSRPEILEAKIRLLSGTNMVDYAMDIHKSLHGTDDVPEDMVKRRSEVVSRLRSLDEAAAPLVAFLQNPQLVQELRPDKQYNIHMLQERYQIGPDQIEALYQYAKFQFECGNYSWAAEYLYQYRALCTDTERSVSALWGKLAAEILMQNWDVALEEFNRLKEIIDSKNFSSPLNQLQNRIWLMHWALFIFFNHENGRNGIIDLFFQDRYLNAIQTNAHHLLRYLATAVVVNKRRRNMLKELIKVIQQEQHSYKDPITEFLQCLYVNYDFDGAQQKLVECEQVILNDPFLGKRVEEGNFVTVPLRAEFLENARLFIFETYCRIHRCIDISMLAQRLNMSYDEAELWIMNLVRSSKLDARIDSVSGTLIMTTNHINVWCAGRGHIS

SEQ ID NO: 56942 - protein, 75 aa, Zea Mays
MDCCICSPTASVYRLPRNSICAPCHEGAKAVIAFLNKDGERQEEDAGGHHHHGSALKSRGSTTQPHSAAKRCTNA

SEQ ID NO: 56943 - protein, 119 aa, Zea Mays
MLINVHFLWNHVDILLAAVILVITVKTFIVAIVVKGFGYSNKTSLLVGMSLAQIGEFAFVLLSRASSIHLIEGKLYLLLLGTTALSDNPSAIQNDPSSGPPRGSFEMVFCRYQSAGPKK

SEQ ID NO: 56944 - protein, 373 aa, Zea Mays
MEDLDGLVNSEQLPATTRERVISTFPHYGHGGIVESARELFMQLNGENTSSGRLGFLSTLLGEGSECHGYKVRLVGHSLGGAVATVLGMMLYGKYPSVHVYAYGPLPCVDFVIAEACSHFVTTIICNDEFSSRLSINSILRLRSAAISALSDNSPADTAMIQKLARRILHVNRYHDNGPDDGIIQGYADHTRTADTTVPNERQISHQIPLCNTELDLHNTQNGFFRYNGSSASIDEHLSYEGISSGHDMQIIPLDGADSGFEGHQTSYREIPVEPPEMFLAGLIVHIVRQRRSLFPLWKCWSIQETEPPYKAVLAKRENFRDIVVTPYMFTDHLPWRCSCFYYTCLTIRTVLDGVLIFFNCAFFSGMAACNGR

SEQ ID NO: 56945 - protein, 106 aa, Zea Mays
MDTSSPAALVNAKIMNMFVGQRVRTVVQVQHNDGGMLVGQSPDGHQLSIKSAMDVPVSHFMEVYGIAENSQTIRAEVCTDFGPDFDPETFNQLCNLASNKFKHMFL

SEQ ID NO: 56946 - protein, 926 aa, Zea Mays
MVPKGRRQGQQRQPNVAFQILNEKTTVLSPEVLLSAGVPCCRLVQNPGEFVITFPGAYHSGFSHGFNCGEATNIATPCWLQVAKEAAIRRASTNSGPMVSHYQLLYELALSLHLREPKNSHMPRSSRLRDKKKNEGERMIKETFVGSVIENNSFLSTLLDKSSCIIIPEIEFPLPSVPTTRAPEVSDKQGLIAGPCSISQQKAEETLVYGDEIDEIKEVENMSESTTSSACNQRKFYETKFGIVSSTAFCLSTSDIQIGVIGKGRSHQGGGLLDQGRLPCVQCGILSYACVAIIQPKEAAVQYVISRECMSSSAIHREIMESDDTSNRMVIAHQQEYPRAESAAKVIAEELGMKHAWKDITFKKATREDTGRIQLALQDEDAEPTSSDWAVKMGINIYYSAKQSKSPLYSKQVPYNSIIYKAFAQENPDSFADGQRSSTTKKKVAGWWCGKKWMSNQVHPLLACEQVEQNHETVYSKTMLSASCDRMQEQSTRSTTLINQNSSKKITRRKEGDSVEKSRGKKKRCSASASDEAALHCSVYDQPVNSDNHAKYEDGDESVEARNTRHHQQYESLNKKSSLKRRKDNNRSNSFHELHKDNVDIDCRFDTDGTENTSIGDWDNSPPQGGDVKAVKSGARLLGTKRFSKEKGSNGLSNVNKKLVKMGKKISTKKQKNDKTNRQFQENHKKADIVDLLHEDDGDEGTYIDCNEIRKQKTDDVRVKSRGKMQSGKKKVSRCQASDGSHNGGKEMKLSSDIEVCNRRGDGTTAANFEEIPKEKADAVKVKPKMQGDKKKTSKHQAGDGDKGAKFSCDIEGCDMSFSTQHDLSLHKRDICPVKGCKKKFFCHKYLLQHRKVHLDERPLMCSFPGCAKTFKWPWARTEHMRVHTGVRPYACTEPGCTQTFRFVSDFSRHKRKTGHSCDKKKKRGL

SEQ ID NO: 56947 - protein, 163 aa, Zea Mays
MLEYCKLTVAIKMLPVRKPCSAPKWKEMTGSGIFAAGGEGEEDESANVSATSVRTAPKNYQAISTISHISFAEEESISPKKPTSISEVAKQRELSGTLLSEDDSKMKRQISDLKSKELSGHDIFAPPEDPRPRNSENGSTSQTPGKNAHVLTSDSELTLIIIT

SEQ ID NO: 56948 - protein, 166 aa, Zea Mays
MVAPRSKADVVVTMQAQRDAPPDMHCKDKFLVQSAIVAKETMPKEVTGDMFTKDSGNIVDEVKLKVVYTAPSSSQSEGFEDGNLGSLSYQEETKEPKESEKIISEPFALISKLMEEKNSAVELNNKLRQELDLLRRDISRQHGGFSLVLVLVVAILGILLGFLMKR

SEQ ID NO: 56949 - protein, 1152 aa, Zea Mays
MQRGISGGQKKRVTTGEMIVGPTKVLFMDEISTGLDSSTTFQIVKCLQQIVHLGEATILMSLLQPAPETFDLFDDIILLSEGQIVYQGPREYVLEFFDSCGFCCPERKGTADFLQEVTSRKDQEQYWADKQMPYRYVSVPEFAQRFKRFHVGLQLENHLSLPFDKSRCHQAALVFSKHSVSTTELLKASFDKEWLLIKRNSFVYIFKTIQLIIVALIASTVFLRTHMHTTNLDDGFVYIGALLFTLIVNMFNGFAELSLTITRLPVFYKHRDLLFYPAWVFTVPNVILRIPFSIIESIVWVLVTYYTIGFAPDADRFFKHLLLVFLIQQMAGGLFRATAGLCRSMIIAQTGGALFLLIFFVLGGFVLPKVFIPNWWIWGYWISPLMYGYNALAVNEFYAPRWMNKFVLDQNGVPKRLGIAMLEGANIFVDKNWYWIGAAGLLGFTIFFNVLFTLSLMYLNPLGKPQAVISEETAKEAEGNGHSKGAIRNGSTKPKDGSHNKEMKEMRLSARLSNCSSNGVSRLMSIGSNEAAPTRGMVLPFNPLAMSFDNVNYYVDMPAEMKHQGVQDDRLQLLREVTGSFRPGVLTALMGVSGAGKTTLMDVLAGRKTGGYIEGDIRIAGYPKNQATFARISGYCEQNDIHSPQVTVRESLIYSAFLRLPGKIGDQEITDDIKMQFVDEVMELVELDNLRDALVGLPGITGLSTEQRKRLTIAVELVANPSIIFMDEPTSGLDARAAAIVMRTVRNTVDTGRTVVCTIHQPSIDIFESFDELLLLKRGGQVIYSGKLGRNSQKMVEYFEAIPGVPKIKDKYNPATWMLEVSSVATEVRLKMDFAKYYETSDLYKQNKVLVNQLSQPEPGTSDLYFPTEYSQSTIGQFKACLWKQWLTYWRSPDYNLVRYSFTLLVALLLGSIFWRIGTNMEDATTLGMVIGAMYTAVMFIGINNCSTVQPVVSIERTVFYRERAAGMYSAMPYAIAQVVIEIPYVFVQTTYYTLIVYAMMSFQWTAVKFFWFFFISYFSFLYFTYYGMMAVSISPNHEVASIFAAAFFSLFNLFSGFFIPRPRIPGWWIWYYWICPLAWTVYGLIVTQYGDLEDLISVPGESEQTISYYVTHHFGYHRDFLPVIAPVLVLFAVFFAFLYAVCIKKLNFQQR

SEQ ID NO: 56950 - protein, 967 aa, Zea Mays
MEAQATATATVKEALAALYHHPDDAIRTAADRWLQEFQHTLDAWQVADSLLHDESSNLETLIFCSQTLRSKVQRDFEELPSEAFRSLQDSLYVLLKKFNKGPQKVRTQICIAIAALAVHVPVEDWGAGGIVNWLSDEMKAHPEFIPGFLELLIVLPQETSSYKIAARPERRRQFEIDLCSSANVAIDLLTACMAIDQLKEQVLEGFSSWLRFCHGISASELASHPLVHLALSSLNSDQFLEPAVNVTSELIHATVSHGSGAIAERMPLIQILVPHIMGLKEQLKDPSKDEEDVKAIARLYADMGESYVDLIATGSDDSIQIVNALLEVTSLLEFDISSMTFNFWHRLKRNLIKRDSYVSYGSEVAIEAEKNRRLQVFRPKFETLVSLVSFRVEYPEDYHTFSEEDRRDFRHVRYAVSDVLLDATEVLGGDSTLKLLSTKLAQAYGSCNNEQNPKWQPVEAALFCIQAIARSVSIEEREILPQVMSLLPCLPHHEQLLQTVCSTIGAFSKWIDAAPAELSILPPLVDILNKGMSTSEDTAAAASMAFKYICEDCRRKFSGSLDGLFQIYHIAISGVGGYKVSSEDSLHLVEALSAVITTLPPESASRALELICQPVINPLQELIQQGDQVLQQVPARHLTVHIDRLSSIFSNVKQPEVVAEAVYRYWPTLKSIFDQRAWDTRTMESICRSCKFAVRTCGRVMGMTIGAMLEEIQTLYQQHKQSCFLYLSSEVIKIFGSDPSCAGYLTNLIQILFSHTVQLLRTIQDFTARPDIADDCYLLASRCIRYCPDLFIPTEMFQRLVDCAMAGITIQHREACKSILSFLSDVIDLPNSSDGGQYRKVINTIILHRGATLTRIMIAALTGALPSGRLEEVSYVLLSLSRVFGENMLNWARESINLIPPQALTDAERLRFFNTISDAASGSSLHTITDRFGEISDVCRRNKTVQDLVQSALRPHDLTFTVVPQQM

SEQ ID NO: 56951 - protein, 217 aa, Zea Mays
MGGMRAEPGFQRSMFGNDIFSSRFGAEGSTSMQQPPRKAAAIENPLPVSLADLYKGVTKKMKISREAIDASGRISNAEDILTIEVRPGWKKGTKITFPDKGNEAPNMKAADIVFILDEKPHDVFTRDGNDLVVTEKISLVEALIGYTARVTTLDGRSLSLPINSIIHPSYEEVVPREGMPIPKDPSKKGNLRIKFNIMFPSRLTSDQKAGLKRILGS

SEQ ID NO: 56952 - protein, 628 aa, Zea Mays
MHGFIYCYVKQHNQNAEGFPSYRSKRTPLEVSIQKSLGFGLKSENGKRDYVANDMVQSLHKQDSKMVTKKTIKLLDAPPYSKRLKLEPVQTGRDAEIKGHEFISQKNVPDLAPCATSEKSRLLKQKRISDAKRIDKKNIRSGVRSKYDCFSSKAGLAHFCSGFSGNSVLGAHGLKSDVRDITNHIENLSLSELLDGTYKYSSLGRDKGKKVLRTKEELLVSVRKAFSMLSDMDYCHGKDSNLILGPKPPPACTSSCDIKEQCCDKPSPLVKDSSQINVCDTALCHPKDILSRLTLPHQQDLDSLLTPGSESTAAVKPVRGASLPPFPWSHSQAGGCRQSVDCGKHGSSRSYSQWQWVRVGSNLTSLDYEDTSVHRIDHLLQEMDAAKLCRMDSCDGQYNLCGTESTSGSLAQNIQSRKNGGEHGSQQLQTLDRVDSLDGFQKHDSEHSLLKTSQVSPKIQHAAEILCDMRRSIESLSGQGYSNGVIKWPKSPSEKVMKARKPSSQFGITESSSGSRNNDATWNGSSHSTKKFCDRKNDSACLNYPGKETIRWPVPVEGGASPVRSSERGPMLDMRQPHGNGGRHPVQVPSQVARLEKEYENQQKLRKATLTSSLGPPGDWSRERNRRV

SEQ ID NO: 56953 - protein, 946 aa, Zea Mays
MLIAVSGAIALKDYSEAGFIVFLFTTAEWLETRASHKATAGMSSLMSMAPQKAVVAETGEVVAAQDVKVGTVLAVKAGEVVPIDGVVVDGRSEVDESTLTGESFPVAKQPESQVWAGTLNIDGYIAVRTTAMADNSAVAKMARMVEEAQNSRSRTQRLIDTCAKYYTPAVVVMAAGVAVVPVVVRAHNLKHWFQLALVLLVSACPCALVLSTPVATFCALLTAARTGLLIKGGDVLETLARIKIAAFDKTGTITRGEFSVEEFQAVGERVTTPQLLYWVSSIESRSSHPMASVLVDYAQSKSVGPKSDNVAEFQIFPGEGIYGEIDGEGVYIGNKRILSRASCETVPDMKDMKGVTVGYVACKGQLIGVFTLSDSCRTGSDEAIRELRSLGIKSVMLTGDSSAAASYAQNQLGNILDEVHSELLPEDKVRIVDELKAKHGPTLMIGDGMNDAPALAKADVGVSMGVSGSAVAMETSHITLMSNDIRRIPMAVQLARRTHRTIVVNIVFSVITKLAIVGLALAGHPLIWAAVLADVGTCMLVIMYSMLLLRSESNGGRKVKKCCASSQHGSHSHARKKHCVSHHCSDGPCNKSTAGCSKESPSAGKHACSDHGHAHTHCKEPSNHRPERHACHDHGHSHNHCKEPSSHVVTEKHVCHDHGNTHSHCEEAGNQLLLVESHGCNDHGHGHSHDRCKELSSPRFTSKHECHDHEHSHCKEPKTPCADSEAACHGHGHGHEHRHCEGDSHSHATGEHGCHEHDAHSHCEEHGHSDTAVEHACEHECHGEHQTVHAVETHHCHDHDHEHGQHELGEIEEPEKDCHDHSHHCCHEPHGKDKVAAEPVEEVTISIAALPKDEGHHHSEEQHNGEHCRKAKDCGGGGGAAPTDCAASKNCCGVKGGDACSSVQAARARETGPCCRSYVKCPRTAAASRSSCCGHSMLKLPEIVVE

SEQ ID NO: 56954 - protein, 871 aa, Zea Mays
MDFDPSPASAHGDGSGGAWPFDSLTTSMLFSSVSASPQLPASSSSWLTPPSPLWLFEDRHLLPLDAPSAAPEAAVAAAESTDQHLLVQVWAPVKNGDRYVLTTSGQPFVLDHQSIGLLQYRAVSMMYMFSVDGENAGDLGLPGRVYKQKVPEWTPNVQYYSSGEYQRLNHAISYNVHGTVALPVFDPSAQSCIAVVELIMTSKKINYACEVDKVCKALEAVNLKSTEILDHPNVQICNEGRQAALVEILEILTVVCEEHKLPLAQTWVPCKYRSVLAHGGGLKKSCLSFDGSCMGEVCMSTSDVAFHVIDAHMWGFRDACVEHHLQRGQGVSGKAFISHKPCFSKDIRKFCKLAYPLVHYARMFGLSGCFAICLQSSYTGNDDYILEFFLPLDCIDEDDQNALLESILTLMKRCLRSLKLVDDNDLSGVSLHLSNVLKLENEESKTDAQFDGSLRESPEDDRHGGSHKFDNENQKVLDITEGQLLTDDYSQDNGTSVGRPNGSGASDSSLLHKTNKPPERRRGKAEKTISLEVLQQYFSGSLKNAAKSLGVCPTTMKRICRQHGISRWPSRKINKVNRSLSKLKQVIESVQGSDAAFNLTSITGPLPIPVGPSPESLNVEKLTQSKVAELSNLAVGVDRDSLQKSLENDDHFDIVMAQQGFIDNNNDVQLEADKASHSRSSSGEGSINSRTSEGSCQGSPANQTFVCKPIASMFAEPQLNQEEFNKEPFQEPQLPLSRMLIEDSGSSKDLKNLFTSTSDQPFLAPPNNLVSMKHSGTVTIKASFKEDIVRFRFPCSGGVIVLKEEVAKRLRMDVGTFDIKYLDDDHEWVKLACNADLEECMEISRLSGSHVIRLLVSDIAAHFGSSCGSSG

SEQ ID NO: 56955 - protein, 1036 aa, Zea Mays
MKGLSSRTSALNTASECLHILRFWSRDYGRGISLAESSHSLTVLVSIVSFLQAELNISDKPANATGISSRNSGSANSKNSNIWDMKISAFSMLEDILSKVASNMTENLWQSVIEVLRKVMDFVTARNLVIESSIMSRFYTSFLRCLHLVLVDPKGPLSGHVAGFVANLQIFFVYGLRSSSPPTLAPKETRTDSKPRASRGRYRPPHLRNKERRENDSLEGQNSDSEYSWYDMSSSDSDLSDSDGYAKSGDRFRSSKARLAAILCIQDICHADPKLLTSQWPVLLPENDVLQQRKYQATLMTCLLFDPITKVRVEAASTIATMLERQALVLTQVAEYKESSKRGSFTTLSSSLGQILMQLHTGALYLIQRETQATLLAALFRVLILLISATPYARMPKELLPTVIKVLCSRLLNKHSNKTEHYAVLVTVLSCLETAFSKVPPTLDVFAVLTEDCCAGPSHEQEESNVIAFLLHCIEEEMHYSVRHGAFQVLRSAVHNYPSCANMIWEKLRDNVLNLLQIQSFEDQKYDANFGPPGAKEESSIKGRCLVAGIKVMDECLRVSSGFTGADDIKECRLLDIQQISDCTINKTIKSAPHFEMEAAGSSQNCTLDITLGINRWIEVIETHLPQGLSHGSAMVRTASLTCFAGMTSDVFFSLPENKRDYVTSSSVHAALNDMVPSVRSAACRAIGIVACFPQILSSSSLPGKFIDAIEFNTHNSSTPVRVTAAWALANLCSCIRFRALEVHTDPYAGVGVLSKSSISLLVEVALRLAKDSEKVKSNAVRALGYLSRFIRFNYHAGTINDPSNSDSVFYGDPVWLERMVQALMSCVTTGNVKVQWNVCHALSNLFMNDTLRLQDMPWASSVYSILLLLIRDSNNYKIKMHAAVALSVPVSRLDYGSSFPDVVRGLVHALESLNSNNSSLPSNFKQRDNLEKQLTFTALHLLSFVSPNDDPSLKDFLTKKSSFLEDWLRSLCASFNSSERQPLPTEATNDEDGFSPNVTQKGMLSSALQSLLGVYAGRTQQVITQRFEQLARSVA

SEQ ID NO: 56956 - protein, 77 aa, Zea Mays
MPRDLSRSRSPPRRRWRSPSPARYRGRRGRRDRSPSPIRSRSPYRSSYRLTRVAFVKRMESTKLLLCAVLLWNAPPL

SEQ ID NO: 56957 - protein, 198 aa, Zea Mays
MADEIDTRPASAGSRGRPAHATEDDDREEGEIAADAPSPALPAAHPLEHSWTFWFDNPHGKNKMAAWGSSIRPIHTFSTVEDFWGLYNNIHHPSKLIGGADFHCFKNKIEPKWEDPICANGGKWTISCGRGKSDTLWLHTLLAMIGEQFDYGDEICGAVVSVRSKQERIAIWTKNAANEAAQDDAKKMDKGLKNRYTV

SEQ ID NO: 56958 - protein, 327 aa, Zea Mays
MAGLSLLCGDCGAQLRSVEEAQAHAEATNHANFVESTEAVLNFVCSDCGKPCRSQTEVDLHTKRTGHTEFADKTAEAAKPIDLEAPLKPASEDVMDVDTSASASGEPQEMVVPEVNKEMLTDLEGMGFSTARATRVLHFSGNSTIEGAINWLSEHQEDIDIDEMPLVPANSKTEDNKPSLTPEEMKIKAQELRDRARKKKEEEERRMEREREKERIRIGKELLEAKRIEEQNERKRMIELRKLEKEEEKRAREKIRQKLEEDKAERRRKLGLPPEDPAAAKPSAPLPVEEKKSALPVRPATKAERMRDCLRNLKQQNKGSIQWTGFG

SEQ ID NO: 56959 - protein, 999 aa, Zea Mays
MAIPEDLEGTSGDGGVTNRGSRGRRKGAAKGRGRGRPRSADRSFPPPAMAGVAVGDRVLRERRHTTNVFCERDTDVDDEDDVETVRSKDSRSGDVLQTAKKRKKGGAGKVSVTKRSKREGEEQKKASPSKDKDCAETNGKRKMLTGDNALMCHQCQRNDKGRVVWCNSCRNKRFCVPCIERWYPNLSEDEFAAKCPYCRKNCNCKGCLRMRGVEEQPPKKEISEENQISYACNVVRLLLPWLRKLRQEQMEEKKLEAKIKGVLVNEMKLEQAEYNLDERVYCNNCKTSIVDFHRSCKYCFYDLCLDCCVEIRRGEIPGGEEIMRVKPEDRGRAYLFGTTNSKDGSKRFSMRRHSSSLENEPSNVVGSSEGANNSLELWKAESDGSIPCPPKELGGCGGSILDLKCFFPEKMLSNLEERADRIMRSEVFAKAVAKRSDQCPCYDHSGNIRTQDVRETANTKGSSDNHLYCPVATAIKEDDLAHFQMHWTKGEPVIVSDVLHLTSGLSWEPLVMWRALREKKTNGDVEDEHFAVRALDCLDWCEVEINIHMFFVGYMKGRTHHMTHWPEMLKLKDWPPSSSFDQRLPRHGAEFISALPFPEYTDPRYGPLNLTVKLPDGALKPDLGPKTYIAYGFYQELGRGDSVTKLHCDMSDAVNILTHTAQVPYARYQLEKIEETRKKMKEQDLQELYGVSELNLSSPFTDSRNISADEMSKTSCNYGLDVNDVPPVNNESEVQSGAGQCSDYIDKDRSYAGMHNGERTGGALWDIFRREDSDKIQDYLRKHATEFRHIFCNPVKQVIHPIHDQTFYLTEEHKRKLKEEYGVEPWTFEQKLGEAVFIPAGCPHQVRNLKSCIKVAMDFVSPESVNECMKLTGEFRRLPPDHRAKEDKLEIKKIALHALNQVVNFLDPSSEWSKSWFAQLKNKKKAGAEEQEKPKRKRGRPCRKSNDEAAGDRHRKKGGRQRGRKRGYGKSKDGAGAVDVKPPKRQRNLLKGSGNRVGG

SEQ ID NO: 56960 - protein, 168 aa, Zea Mays
MLRSISFPTSIDSIALDPRSHIFYAGGRDGKIYVTAMGVDLSFHGRDESSILGALDDHSKAVTSLASSRDGLLLVSGSEDGNVRVWDTRCQQVTRKFKHSQGPVTNVLIVTPQRVNLPPLQPLRKVRSANGEAERQAVLLHRPENDVPIPGNKTFIFMERYLDELQVI

SEQ ID NO: 56961 - protein, 607 aa, Zea Mays
MRLPKNWMHLHFLRAIGTAMSMRAGIAADTAAALLFRILSQPTLLFPPLRHAEGVEVHHEPLGGYVSSYKKQLEVPASEATIDATAQGIASLLCAHGPDVEWRICTIWEAAYGLLPLSSSAVDLPEIVVAAPLQPPTLSWSLYLPLLKVFEYLPRGSPSEACLMRIFVATVEAILRRTFPSETSEQSRKPRSQSKNLAVAELHTMIHSLFVESCASMDLASRLLFVVLTVCVSHQALPGGSKRPTGSDNHSHEEATEHSRLTNGRSRCKKRQGPVATFDSYVLAAVCALSCELQLFPFITKNGSHSNLKDSMKIIISGKNNGMNNELHNSISSAILHTRRILGILEAVFSLKPSSVGTSWSYSSNEIVAAAMVAAHVSELFRRSRPCLNALSALMRCKWDAEISTRASSLYHLIDLHGKTVSSIVNKAEPLEAHLTLTPVKRDNQHHREESNTSSLDSVKLENKNGSTSHKKNGFSRPLLKCAEEVLLNGDVASTSGKSIASLQVEASDLANFLTMDRNGGYRGSQTLLRSVLSEKQELCFSVVSLLWQKLIASPEMQMSAESTSAHQGWRKVVDALCDVVSASPTKASAAIVLQVKILLYCTFGQN

SEQ ID NO: 56962 - protein, 295 aa, Zea Mays
MTQSLWGPSMSVSGGINVPVMQTPLCANAPAEKGGKNFMIDFMMGGVSAAVSKTAAAPIERVKLLIQNQDEMIKSGRLSEPYKGIVDCFKRTIKDEGFSSLWRGNTANVIRYFPTQALNFAFKDYFKRLFNFKKDRDGYWKWFAGNLASGGAAGASSLFFVYSLDYARTRLANDAKAAKGGGERQFNGLVDVYRKTLKSDGIAGLYRGFNISCVGIIVYRGLYFGLYDSIKPVVLTGNLQDNFFASFALGWLITNGAGLASYPIDTVRRRMMMTSAPDPLLRKEVRLRRCLNGEI

SEQ ID NO: 56963 - protein, 241 aa, Zea Mays
MLKKYYMSLLYHFEQLYFFRVQGWHQQEIDSRMNSSIEIKTEGQAYHKRKRGINTSSDPASSSDNVDVDVIVDGKFEHGYIVTVIMGSKSTKAILYNCTEEPALPTPEPPVANNSTGLKGVRRRRRRRKKLSTTDPRHPKPNRSGYNFFFQDQHRILKPQYPAQDRLISKMIGERWNNLSPEDKAVYQQRGVEDKERYRTQLAAYKELRTGQPISNAVPIQQRLPLTEVTIDEVDSKERKM

SEQ ID NO: 56964 - protein, 101 aa, Zea Mays
MHCYRRRSHCRRRTRFCRRRKRYSCMQLAEKQKDQRQQVQRDQTQQQTSSSSTSFMLREAAPTTNVSIFPVAAGGRVVEGAAAQPQARVGLPPWMLSHLSC

SEQ ID NO: 56965 - protein, 264 aa, Zea Mays
MRNWTKEEFVHILRRQSTGFARGSSKYRGVTLHKCGRWEARMGQLLGKKYIYLGLFDSEIEAARAYDRAAIRFNGPDAVRNFDSVSYDGDVPLPPAIEKDVVDGDILDLNLRISQPNVHDLRSDGTLTGFGLSCNSPEASSSIVSQPMGPQWPVHPHSRSMRPQHPHLYASPCPGFFVNLREAPMQEEENRSEPACPQPFPSWAWQTQGSRAPVLPATTAASSGFSTAAATGVDAATAGHSVPPPSGSLRQFSGYHQLRFPPTA

SEQ ID NO: 56966 - protein, 54 aa, Zea Mays
MDMAMASFVAATHHHGSHLAAGFPYSARAGRSVGRSGVTISIRAQKKSNSDFWE

SEQ ID NO: 56967 - protein, 845 aa, Zea Mays
MDTENMVSSSYIQNHQEIDDHYVTTKGHDMIKSDRLSVTIMSDERCVINSAPDEPTENVSVLDEMREISLRTNSFSNKQRDAQPQNCYTRSRVPSLRKSRSSISVESRKAQGSDNVWLHSGRGTSNQPVTLGTTCNGSKMLNPPVKADSTCNSEASENGTSETELKSNGTSNLPMNTEVIFRRIRKSDRKPVPHYEDCTTPNKDELRAEYSEILSDSPNSKNEVCKSDGDEHLPLVKRARVRMGRSHLEDSPVDEVDVSNKKPELTTTSDQCDRNGKPASPVNDYSADQVSTVVSSASNPSCKSDMPILSKEGHLPWKNKEYHPKILALDVEAALPPSKRLHRALEAMSANVAENVKNIPEVTGPNEMALNGSLLTANNHSNKSADAVVTVSNKPVIVQCSEPSLDTQFKHTQSGKCTSESTLQNNTIPDSASVPSKENDIMLKENDTNGSWVCSELDNGSCGKTSALCMILNRPGLDVTQTTSVPDRLSSSFEKESENVATSSVKETKPFGSAVCEVDRSAEAEQIDHSNNNVISNTIRHSETIVVDSVNNVGDTASNSSMATKSSSIQSDADTRTSEVHTFSSLALKELNHRKIKDRSTSPDSMPMKELIAVAQARRFSRLTSFPDIFLNAKYIPERATNTPPKEGSHRQLSPSNRIFRSTSGNDNVHSRSPFDIIQQKKLAGHVEANAARRSFKDFLSTLTRTKESISRATRLAIECAKFGIAGEAIDIIVEHLEKESNLYKRVDLFFLVDSITQCSRNQKGGAGDVYPSLIQAVLPRILYAAAPPGNSAWENRKQCLKVLKLWLERRTLSEYIIRHHIKEIETIMRHHLEVLAVLHARGEL

SEQ ID NO: 56968 - protein, 147 aa, Zea Mays
MKLKDLSDAIFQDIGSKIMGQISDEVWNVIQSNETDIQGTVKAVYNRILNPEKVSEPSPKKLKQRGKEEQVLPTKTATSVAVEAEDDDPEEPPGFGFNNTQRNDIGATKPQMSLENGNEGKPNGGEPATISNPGDEEEDPEVPPGFG

SEQ ID NO: 56969 - protein, 90 aa, Zea Mays
MLSTMNLSTGNLGRKEINTSVMPRGRYMPFRKISLLIFQSTSLSCTNMQMKTCRLDHGSLVWKLITLMKGTCAVELHQIVSGKGKLVMSV

SEQ ID NO: 56970 - protein, 72 aa, Zea Mays
MSFMRLLPQRLPQLIRQVEQDVETVIHVLQPGPIGIVEHKFTDTEILEARATVKRAVDNWRRNWTLEKNVGR

SEQ ID NO: 56971 - protein, 488 aa, Zea Mays
MSSDSSLTESLHERTIVFGLKLWVVIGIAVGASLLGILLILLICLTIQSCIKRSRKPLNDRRLHQIPPAYKDIKEVGMVDQFPAKDFVVHDGLLLTIQNGPEPVEPVDRDAIQLAQEEKLKQREETNVSASFPIMDGCEGTQIVSVDEQSSTHATVDSAPLAGLPEFSYLGWGHWFTLRDLDLATDHFAKDNVIGEGGYGVVYRGRLSNGTPVAVKKILNNLGQAEREFRVEVEAIGHVRHKNLVRLLGYCVEGTQRMLVYEYVNNGNLESWLHGELSQYSSLTWLARMKILLGTAKALAYLHEAIEPKVVHRDIKSSNILIDDEFNAKISDFGLAKMLGAGKSHIATRVMGTFGYVAPEYANSGLLNEKSDVYSFGVVLLEAITGRDPIDYDRPTNEVIFVKYPFLIIYGILIGLDRSGNPNPIPGWVMGDILIMVLGGPRPNTNDNDTHNTSNTPIVETLAMTDVETGPKLKHTETLQTSVWEGSW

SEQ ID NO: 56972 - protein, 464 aa, Zea Mays
MLKQAAHKVFVQMQAQAQRNSQANSSQQSLFSQLSAQQMASSGSAQLHDQKIRPPGPPNQGQKNQVSSSPQAFAPPSGTQPQNSVHYLAHDNPNQNPDAKGTNVVPNQPSRMNTSVPLQTKNKQHQPTQLQQASQQIYGASNPGAQAYPRSITGSLRSPSLVPETQPSMHAPGMAPAKMVPPPTHPMMQHNATAWQMHQNRELKTNAPPPNANMKQNSESVGKVRMAGTGNSSAKGKQGTPNSTPNASGGTKSSKKSGGQKKSLEAAGSMQPSSKKQKTSGGSQEQSIDELNDVTAASGVNIRADGSGATELEKEKEESRPKNVKPNKEEDDKMRANAANVAARQAVGGSDMLSKWQLMAEQARQKREGIDVSAASQPGRGPGSRQLSKFGKGPGEHPEGSKRSHSMAFGTGGMKRPGRTAFAGPQRLISVKDVICALEREPQMTKSRLIYRLHERLPVDSTVD

SEQ ID NO: 56973 - protein, 391 aa, Zea Mays
MPYWSPHIPHDNEANPIATQPPATIGHRSSQPARQREVKNHYEPKTGAQGKRRANQTWRRSSRAPASSPPPAKEGALERPAWSGETTLSRLVGALIAFKPLYAVLKLASREVIIRTAEKSNIPWREMTKEVLESDVYEVFERIQDPNLVYPDYYLNPFHAYDEGNLSWLAAAEAEPATMSIAKRAIPEATSIEEANQIVRGNWLNVIEEHHLKYSGNCQVNDILDIGCSVGVSTRYLAEKFPSAQAVGLDLSPYFLAVAAQKEEKLSRPKPIRWVHANGEATGLSSDSFDLVSLAYVCHECPARAITGLVKEAFRVLRPGGTIALTDNSPKSKVLQELSPVLFTLMKSTEPFLDEYYMLDLEETMRKVGFVNVCSVLTDPRHRTVTATVPY

SEQ ID NO: 56974 - protein, 61 aa, Zea Mays
MYNCQFCLSPNSNPEGKDVVIWHVTFSVYRLNSLQCLVVRCNCKVGELSEVRVGHAFPCPT

SEQ ID NO: 56975 - protein, 300 aa, Zea Mays
MAQVSNLIFTLFSFMSDPKKTLHLTALDGAKDRLHLFKASLLEEGSFDAAVHGCDTVFHTASPFYHNVKDAKAELLDPAVKGTLNVLGSCKKASIKKVVVTSSMAAVAYNRRPRTPEVTVDETWFSDPQICETNQQWYILSKTLAEEAAWKFSRDNGLEIVTINPAMVIGPLLQPTLNTSAEAILKLINGSSSTYPNFCFGWVNVKDVALAHILAYEVPSSNGRYCMVERVVHYSELVNIIRNMYPTLPLPDKCADDKPFVPPYQVSKEKIKSIGIELIPLETSVKETIESLKEKGFASF

SEQ ID NO: 56976 - protein, 394 aa, Zea Mays
MNGTHPWTSMSGGACSNLGYARDMNGNVPISTTNSSGPSIGVSSLVTDANSSLSGGAQLQPSTSMNGDSLMRVPASPMSFSSNNISGSSVIDGSIMQQSPPQEQMQKRRSSSVTSQHVIDAGGALHAQKKSRTDVSQGDIMQHQLIQHLIHGQNSLHFQGQQNPQLQAFIQQHKLAQLQQRQQQHLLQPFSQMQQPQVGIPRQPQLRPPLAQTGMQLGGPVRTPIERGVCSRRILQYLFHKRHRPENNSITYWRKIVEEYFAPRARERWCVSSYENRGNSSAAAPQKALDTWRCGICNTHAGKGYEATYEILPRLCQIRFDHGVIDEYLYFDSPNEFGLPNGQMVLEHAKVVQKSVYEHLHVIHEGHLRIIFTPELKIISWEFCSRRHEEYTTR

SEQ ID NO: 56977 - protein, 146 aa, Zea Mays
MFLRKRYKSMSENPSQTIVCRVRNPAMSSASWTAGSAGDTWHQSVRAAGSSSRSQLVQRTHGGSPRASPVIDLNEACEPGYEEMEIEGQHGYMSPLGVNKSKRYPMEGAAASPSQMRMHVFWDVQNPAGRSGKRKISWQDQLALRV

SEQ ID NO: 56978 - protein, 201 aa, Zea Mays
MHTKSSRSIRYSDPGKNNSPRKRLFRPLTNPAPEIPNLLIRVFPPSVPRLAAVMKRRRKRRKRKSAGKTTHQHPQRAGTHQLIKLSDACDCEHVSRQAGRAKIRGGKVRENLRTGLPTHRQKSNLDASLVEPRLFQSFCLCDACGIVASWLVAAANEARPPDPRGRRLRLIPLQFLYRFLERDFFPPLPPCGLRRVCLSGS

SEQ ID NO: 56979 - protein, 456 aa, Zea Mays
MVRRLRRGAFAEAAKLRTLEPHHDAIEAPCPLAADCGGCKTQSLAYAAQIRHKHHQVRDLLVNFGKFDPKRLESSEPDDILKPTVQCDEIFRYRNKMEFSFGTKRWVQKELKDKGEEVEVKQETNETDGYALGLHAPGFFDKVLHVQKCFLQSEPADKVLAVVQETWMDPAIGLTPYDVHKHVGFLKHLMIRTGRNISTGTPEVMVNFVTSCYKPDVLMPLVDKITKIPEVVSVINNVNSSVGNSSVGEQEYTLYGKPNITEMLRGLAFQISANSFFQTNTKQADVLYKLIEDSAGLKGDGSEIVLDLFCGTGTIGLTFARRAKHIYGYEVVPEAIEDARKNAKLNGINNATFVQGDLNKINESFGKEFPKPDIIISDPNRPGMHMKLIKWLLEVKAPRIVYVSCNPATCARDLDYLCHGVEEKDLRGFYELKSVIPVDMFPHTPHIECVCLLELR

SEQ ID NO: 56980 - protein, 125 aa, Zea Mays
MAFSAALAWAATQLLRGSLPPARFAAAVSPLTYSSSRQLCSTPIANDSSAAGPWDEAETEILRDVEPIVNIVKDIIHSRRYKNGEFLSPDDEKVVREKLLSHHPRAEEKIGCGLDGIMKDAVRTR

SEQ ID NO: 56981 - protein, 429 aa, Zea Mays
MLRSLWEDATIIDEVISEAALPAFSLETTRDIVKQHIATAFLHLQSEISEALVRTHSTSNEKLEESQLQTAMETSKIKVSQGCIDLLQEFHHLVDGNIELLVKLRDLIIDWVQEGFQEFFQKLDGHFHVLSGRSKTNLQEPTMDSMQTDKTPTVLVLMLAQLCVYIEQTTVPKVTEELASFFGGGAHSYEYGPPFVPGEICRLYRSSGEKFLHHYINMKTQKISKLLNKRFTTPVWIKHKEPREVNMFVDLLLLEINGLVSEVKQILPGMVRRHRHSDSTGSTTSSRSNPMREDMLNRSNTHRARSQFLENHLAKLFEQKMEIFTKVEYTQESVISTVLKLCLKSLQEFVRLQTFNRSGFQQIQLDMEFLKTSLKEFVDDEAAISFLLKEVNNAAHERCLDPIPLEPPILDKLINAKLAKIKERNPNMR

SEQ ID NO: 56982 - protein, 1492 aa, Zea Mays
MEGSPADAAGSGRRTRTRGAEASGRAAVLQQLRAVRSGQIRASDAIQVKVDAPIYDTVPEEEYNVLVARRRKEAGEFIIDDDGLGYVEDGREEDWSHRALPSSSDEGSEGEDGAPRKRKQTRPPQAKRQPQQSAKVASLSAAAAKTGQQISSMFTSSVFKGRGSDRAKNLALAADSIVDDVIAEFAPDENDREERRRRVARVCAPQPVPTVSYIKPQKVILDAEMVRSENENDMVVVELKNDTEMETNLEEIPGSSAELVVNKSLEEPKQEDNGEVKIEKAHRLNAKIKAEECRNNDVTSATEGWMKICGNGENAVGEEGVAVDGNTNVDESSEFELKDGALPFYILDAYEEPFGANSGTVYLFGKVEVGKQFHSCCVIVKNIQRCIYAIPNRSVFPMDSISGIERNPTADLLPSLRATLHELASGLKSEIADKLSDLNVSNFIMTPVKRNYAFERTDLPNGEQYVLKINYPYKDPALPADLRGEHFHALLGTNNSALELFLIKRKVKGPSWLSVSKFVTRPSTQRVSWCKFEVTVDCPKDISVLTTSTNLEVPTVVVGAVNLKTIINEKHNVHEIVSASLICCHRVKIDSPMRPEDWQKRGMLSHFTVVRKLEGSIFPIGLAKEASDRNQKAGSNVLALESSERALLNRLMIELSKLDCDVLVGHNISGFDLDVLLHRAQTCKVPSSMWSKIGRLRRSLMPRLTKGSTLYGSGASPGIMSCVAGRLLCDTYLCSRDLLKEVSYSLTQLAETQLKKVRKEVSPHDIPMMFQSSGELLKLVEYGETDAWLSLELMFHLSVLPLTRQLTNISGNLWGKTLQGARAQRVEYLLLHSFHARKFIAPDKFARNKELNSTKRKMNPDTGGANADDGAADPSVDDEVHNGDQSKARKGPSYAGGLVLEPKKGLYDKYVLLLDFNSLYPSIIQLLRSLVERRRMVKSWLKTASGLKKQQFDIQQQALKLTANSMYGCLGFSNSRFYAKPLAELITLQGREILQNTVDLVQNNLNLEVIYGDTDSIMIHTGLDDISRAKAIAGKVIQEVNKKYRCLEIDLDGIYKRMLLLKKKKYAAIKVALDGSLRENIERKGLDMVRRDWSLLSKDIGDFCLKQILSGGTCDDVVESIHSSLVQVQEQMRSGQIELEKYVITKSLTKAPEDYPDAKNQPHVQVALRLKQNGYSGCSAGDTVPYIICSQQDSDNAHSVGIAQRARHPEELKRDPDKWMIDIDYYLSQQIHPVVSRLCASIQGTSPARLAECLGLDSAKFQPRLTESSNQDTSMMLLSVIDDEDERYRGCEPLRLSCPSCSGTFDCPPVSSLITSASATSVSDPIEGKDATANFWRHMRCPRCLDNTVESKFSPSMLANQMKRQADNFISLYYKGLQMCDDEGCKYSTHSVNLRVMGDSERGTVCPNYPRCNGRLVRQYKESDLYRQLSYFCYVLDATRCLEKLDQKARLPFEREFVAVGQTIKLALLEIQKIRDRCAFGWVQLKDLAVSI

SEQ ID NO: 56983 - protein, 79 aa, Zea Mays
MIKCRTEPDRKELNMNLLKSGICRCMDREIPRVGAVSLFCYVRDLREPGFIYCLNVSLFLSQVNNLLHGKFITLDLVKF

SEQ ID NO: 56984 - protein, 1168 aa, Zea Mays
MADEAEWNEAEAGIAAPGAGVAPPAPGGGEETKRKRGRPKGSLDTYKRRRRRRRTGDLVSAVPAASLGDMGHSCGCIPAPPLPPPCTVYTVRDGGVAITPQSMEDEAEGVEAESGNAGAASAARDGEETKRKRGSPEGSLNERNKDRTPKPKAKGRRRRRTDDQTLSVSAVSLGDLGLGVAAGTRSIRERRPAPNAFFDVGSDSDTEHDDDDDEEQTTIDQANHESAKTGDSVKKGGRPRKMEAGQLHTRTQISNGKSNGHTNGNPAGKKRGRGRPKKLTVEQAITRCQFSNGETNKSGAEAARSKQSRNRRISQNAKKRKRDEGKESMTKKLNKRSKMLTGENALMCHQCQRKDKPRVVRCQSCKKKRFCLPCIEQWYPNLPEDEFAVKCPYCRKNCNCKACLRMRGVEEPPKKEISKENEIRYAFHIVTMLLPWMRELRQEQLEEKEVEANIQGVSMNEIKVEQAEFDLDDRVYCDRCKTSIVDFHRSCKRCFYDLCLNCCKELRKGEIPGGEEVEYVPPEPKGRSYSFGKIHLLKDADRSKNSSNGESYNGMPAVGNSNNGLLLWKAKSNGSIPCPPKEVGGCGSTLLDLKCLFPEKMFAELEYRADKVLRSGTLAKAMVSRSDRCPCFNQSGKIRTESKSVREAASRKGSSDNFLYCPVAIGIQDDDIVHFQMHWAKGEPVVVSDVLQLTSGLSWEPMVMWRALRERSKGKAEDEQFAVWAIDCLDWCEVEINIHRFFSGYTTGRTHARTHWPQMLKLKDWPPSSSFDKRLPRHGAEFISALPFREYTDPRYGPLNLAAKLPAGVLKPDLGPKSYIAYGFYKELGRGDSVTKLHCDMSDAVNILTHTAEVTCQTDIGLIEKIQKDMREQDLQELYGGLNSRSELKLSPAPTECRDESVDEGLKTSYSREGNCVNRDNYNGLDINALPPDDDGDIAKDKESSPGSEWQSELGQSSDHNNGVNTTDEMYNGAHYISHNQKSTGRKVGIKPQEEKSEKADCSGTCAYLKGSSEDNPEMPIVESSEEQSTGGALWDIFRRQDSDKLQDYLRKHCSEFRHIYCNPVKKVFHPIHDQSFYLTEEHKRKLKEEYGIEPWTFEQKLGEAVFIPAGCPHQVRNLKSCIKVALDFVSPENVGECVKLTEEFRRLPSFHKAKEDKLESRRWLFMP

SEQ ID NO: 56985 - protein, 828 aa, Zea Mays
MKGLKIKSEVTLSRRSQQIAVVNLLPRALLINRIGRTIFLSEYHDETEEPLQPYEPPKVFQWRSEFGSELLKLRLEGYQWSTPFSINANGVMCVLMNSTTGNDQAFVRVNVRSGTKSSRHEVVFQLDCWSSPYRVENRSMFLPIRFRQFGGDDHSWRNLLPNSSASFFLEDLSRRHLLEVLVDGTDPMNSMTYDINVVMDHQPLTNSDALKKALRVTVLKEGKLNVIQIIDWLPDNRNRGQITERMLSPIFQPSEVDYGQSSPDLDSEFHVTLELTELGISVIDHMPEEVLYLSVQQLLLAYSSGIGSGVNRLKMRMHWIQVDNQLPFVPMPVLFCPQKIENQSDYIFKFSMTVQTNNSLDFCVYPYVGVQVPENCVFFVNIHEPIIWRLHEMIQHLKFDRIYSNQPSAVSVDPILKIGLLNISEIRFRVSMAMSPSQRPRGVFGFWSSLMTALGNMEHMPVRIAQRYREELCMRQSALMNSAISNIQKDLLSQPLQLLSGVDILGNASSALSNMSKGIAALSMDKKFIQGRMRQDSKGVEDFGDVIRDGGGALAKGIFRGVTGILTKPIEGAKSSGVEGFVQGVGKGIIGAAAQPVSGVLDLLSKTTEGANAVKMKISSAIMAEEQLLRRRLPRAIGGNSLLYPYDGHKATGQAILHLAECATFLGQIDIFKIRGKFASTDAYEDHFLLPKGKIFLITHRRVLLLQLPMMTQRKFNPTKDPCSVIWDVLWDDLVTVEMTHGKKDPPDSWPSKLILYLKAKPSNSKEIVRLVKCNRGSDQASIIYSAIDKAYKAYGPNSLKEFLRWKVPRPYAPRNSSGRSIQDLSFG

SEQ ID NO: 56986 - protein, 186 aa, Zea Mays
MTKNVCTEKEMGQGQGSKYAGIIVTATCTSVASVLWLWHQSNRQEATSTTAIRSPYSDPHEVKNLYEERKEPGREELEEMASAEGERWVGLATDFSQGSREALQWAATNLLRAGDHLLLLHVIKEPDYEQSEAILWESTGSPLIPLSEFSDPIIAKKYGAKPDMETLDLLNTTATQKEVFEFLLTN

SEQ ID NO: 56987 - protein, 951 aa, Zea Mays
MTPSYNSGPAGPAGGRRAATFAGACVFLSRNLVAPEVFDAVHDALRLNGAEVLLCADPSRTGPLDFHVISSSSHERFADMRSKGLNLLGPQCILSCAKERRFLPKQSYTCCLAMDGVKTLCSGFEKSEKVRIEELVTAMGGHLLTKHSMDVNFVIVKDVLAAKYKWALNTLKKPIVTMKWLEQCWIEHRVVPHEPYRILPFTGLNICVTKLDPDERKKLEKIVVRNGGQFSACLTRKCTHLVANKPGGDKYVMAQKWGNIYIVNPKWVDQSVARRACQDENSYLVCQTSSAFSGSKSSHKEQQNPEISSASASFQPVPATSVDDSVSMSQHLPASFGDASRISSTDIVGAPSVQETDDMQVDSHIAEDSEPENDDLYLSNCRISLVGFEEKELLRLVMLIRNGGGSRHILLSEKLTHIVIGTPSDEEKKEVRRLAAWGVINIVKVTWLEDCNKAKKEVKVSSMHIATELLLKGFSQVSMENSADTRETKVAKSSGGIFHVPTVNDLHEKHHEKGVSSERKPKRGKHENSISKTRSAARTEKSSQQNGLANVSEYQLQYKVTSIMNSGSSRSNIFKGRTFSFSNSFSHDKRPEVVDWVRDGGGVMVDDIHSTAADFIIECHGQNSLPCDFSHSLVSTQWIRSCLEENCLQDVGSHPIFSPLRCRIPFPGFESFRFCISLSQYGEKERHLLKNLCFLLGAKFTDKAYKGVTHLICKFASGLKYEVYSKRGTPTITSEWLYECVKQDKLLPVDHFQPKPLTSQDKDAYPCTASQYSTQATRFDSSELLSGCQVTKNNATHNSVNEETTMPAVSRKRRISVPGKVNGICGNIEKTEKQLDNSSVPDVADAIEVLSSKIFQPDNSVVQEQKDTHSFDISRSWLNMQQKQDSTSVTKVQNLNSVPVPSPAPTTYYPFSETQTESQVVGYEEDLTGRQKIIDRVRSQSINVTPSSEIL

SEQ ID NO: 56988 - protein, 73 aa, Zea Mays
MPARDHAAGLAPRLPTRSLRFSGSSLLSLRRRGSIAKLGPLAHRGCRTRTHAAAWRRAAPFRLPRRLRSWWRR

SEQ ID NO: 56989 - protein, 243 aa, Zea Mays
MGNIGDSCSDKLTDENLSNSSRHIAEKHSITKDQYSNGQDHEREPLDHAVQQQPKSDVGERASSMKRRCRKKVQKVGTPNHTVDDYFGEDCVEPSLAEEDNNTGDDYTTGNNHKARKKSRGGVEESQQQKVQKNKSKVSSRGRKRTLKDETAEKPEKKLTHRIRQRITKEVKALLETPREQIKPMKLSASHLRLLQEARERVNPKGIPSGPSSNTRYTSFFLLFLYACYYLTKLDLGLLVGHK

SEQ ID NO: 56990 - protein, 286 aa, Zea Mays
MVVIMIYGSCSRLAPLAAFGYVMATHLSLYPAILIVPVILLLGYGLDAPPPKVFVIKGSIARKSDVSDNDKTSRQRVVQQFSWKPVLHFIFWLFIWSCHVLLLSSVILKKVGGLHEMFEKTYGFILTVKDLSPNIGVLWYFFAEVFDFFRNFFLMVFNMNIIFMVLPLAIRLKHRPCFLAFVYTAIVAILKSYPSAGDSALYLGLLGLFVNELAEMQFTFFLFFGYIGVSLLSPVMHNLWIWRGTGNANFYFATGLAYTCLQTVLLVESVSSMIKHDRKLRLLVTS

SEQ ID NO: 56991 - protein, 640 aa, Zea Mays
MEVLQNKIREKVLSDSKWRQLQQDSNKSLEVDSTIGDSPRVDQLSTNFMAEEADSLRATYIRRLTSVLIQHVPAFWRLALSVFSGKFAKAASGNVVSDFDVNAKPTANKNDEKGGEVKYTNHTLDEVGSMVQATISAFDTKVQSTFRDFEECNILCPYMSDTIKEIAKACQTLEGKDSSPTAVKMLRTLHFEMTKLYILRLCSWMRATTKEISKDETWVTLSTLERNKSQYAISCLPLEFRDITVSAMDRIDTMILNLMSETAKSYDISQPLQEINESVRLAFLNSFLDFAGYLERFGGELTENRPNKENNYVSNGYINGTRETFVNTDGDLHKKLLVVLSNIGYCKAELSEELYSKYRHIWSPVRNNEERSSDMRDLRTSFSALEEKVLDQYTFAKSNLIRSAAQSYLLDSGIYWGAAPMVKGIRDATLDLLHILVAVHAEVYSGARPLLEKTMKILVEGLVDIFLSVFHENKTKDIRLLDANGFCQLMLELEYFETVLHTYFSPEAQQAMKSLQENLLEKACESVAEAMENPGHQRRPTRGSEDTASDDRQPSVSPDDLLVLAQQCSSDLLQGELERTRLNIACFMESTLQPTAAPAGPKPAAHSSYQAQHAPVQTSSPSFRRQQTGTSSPVVSRRRR

SEQ ID NO: 56992 - protein, 53 aa, Zea Mays
MSTYPRTYDLIHADSVFTLYRNREKILLVVKTYWTTHEAMTKISSRTVKSFLL

SEQ ID NO: 56993 - protein, 190 aa, Zea Mays
MASPVVVAATLLVVALAAFCGTDPLRTDNMVDFPGFESHLVDLPDPAEMPTHADEWERLCGADVRFCGEVQGPESIAFDQQGHTRASPTAGSSSGTVSEAPRRAEGLAAGVSPSEHICNSPLGLCFDKTGDLYIADAYFGLLKVRPEGGLATLLATEAEGVRFNFTNDLDLDDEGNIYFTDSSIHYQRRL

SEQ ID NO: 56994 - protein, 549 aa, Zea Mays
MSPFEHGEVFVLDDGGEVDLDLGNYERFLDIKLTRDNNITTGKIFQAVINKERRGDYLGKTVQVVPHITDEIQDWIERVAVVPVDGKEGPPDVCVIELGGTIGDKIFSPHNDSGILDAGDIESMPFIEALGQFSYRVGPGNFCLVHVSLVPVLNVVGEQKTKPTQHSVRGLRGLGLAPDVLACRSTEPLEEHVKAKLSQFCHVPDQKAHEAILKVLDLQYDGKVPREPELTKWTKRATKFDKLKTPVKIAMVGKYTGLSDSYLSVIKALLHASVAMERKLVVEWVPSCDLEDSSAKETPEAHKKAWKLLKGADGVLVPGGFGDRGVQGKILAAKYARENNVPYLGICLGMQIAVIEFARSVMKLRGANSTEFDPATTSPCVIFMPEGSKTQMGATMRLGSRRTYFHVSGCKSAKLYGNASSVDERHRHRYEVNPDMVPDFEKAGLQFVGKDESGKRMGIVELPSHKFFIGAQFHPEFKSRPGKPSPLFLGLIAAASGQLEPLLQRSNPTTKACSISKVPKLKLYPTGPVNNPLNSLVNGYYPNGTGIHT

SEQ ID NO: 56995 - protein, 183 aa, Zea Mays
MVQCLDGVRQLLAVLLKCCDVELKQPPGLEDPQVLARETVFSVSEVEALYELFKKISSAVIDDGLINKEEFQLALFKTSKKESLFADRVFDLFDTKHNGILGFEEFARALSVFHPNAPLDEKIDFSFRLYDLKQQGYIERQEVKQMVVATLAESGMNLSDEIVESIIDKSHLRQESRSLDALF

SEQ ID NO: 56996 - protein, 189 aa, Zea Mays
MMGSGKTTVGKILSEVLGYSFFDSDKLVEKAVGISSVAEIFQLHSETFFRDNESEVLTDLSSMHRLVVATGGGAVIRPINWSYMKKGLTVWLDVPLDALARRIAAVGTASRPLLHQESGDPYAKAYAKLTSLFEQRMDSYANADARVSLEHIALKQGHNDVTILTPSTIAIEALLKMESFLTEKTMVRN

SEQ ID NO: 56997 - protein, 349 aa, Zea Mays
MDPLSVLRDYAGRNELDKIIFSGDEIHFGSDYTFPASTPTAFASKQSGRPYPLSAAVFLAQHHDLKHTDFIQAARLRRIPPVSLPDRKTFLDFLRFGHNSLPSADPLLPSAFQPQEPHLHPPSPPPEDPAATEEATTGKQIRALERPFKDRNSILDARGRDFLAVFHAAVRRQDEQLKGGGKDAAPSSRPNSGSVAAALAKPKEFLEDGVFVPSEERMRATKGGKPESVTVQKKLIRTERAGGAGGAVSFEVRDKPASLKSDDWGRVVAVFVLGKEWQFKDWPFKDHVEIFNRVIGFYVRFEDDSVEAAKVVKQWNVKIISISKNKRHQDRTAALEVWERLEEFMRART

SEQ ID NO: 56998 - protein, 657 aa, Zea Mays
MALWALPVGFRFHPTDEELVSHYLKGKITGQINSEAEVIPEIDICKCEPWDLPGKSLIRSDDPEWFFLAPKDRKYPNGSRSNRATVAGYWKATGPDRNIKSKGDKSKQFTIGKKKTLVFHRGRAPKGERTGWIMHEYRTTEPQFESGKQGGYVLYRLFWKPEEKTERSSPKEMDRSGNSPTTIRSSRDNQEANEEANTPLNKKSLESALHDPIELPNSAETPAGPRKMCLADRNDNLVATAPVVSHIPFQGHAAGVAKVDPSAAASAHFVNPQNGNDDCNNFMSDFTPILPHENAFFTGTQQGAFGFDGNGIMNHPDALDAFLNQTLVDTDEHSSTTSKVQYDSDIPTEFANHWNMQDEHQDWWEKLDFEPYEPTLLPYDTTDLDVLSVDSGADSFNDLFNVTGITLRPQQLDSTVQPDCVFPDQGTALRRLKLQVVECGESITKDESEDEVSCVESPNYFDESVEFAAEKGVASYGDGADSTGIVIRSRYPAPSSSSESSFTQQGTAMRRLRLQLGLNEGTCPSSGDSSSCIVDESESQQKAEIEEDASTNLAGSVDNLPGNSHDDEQKDIPEHGVKSVLRLRKTSAESLKDVKQEDCLEPDGRAPMQRVGFQSSIIWLVLSVAVLLLLYCGVWMSMICILVRCFAHMGSWHQPDV

SEQ ID NO: 56999 - protein, 162 aa, Zea Mays
MKMSASVAAASPTLRFSSATHPLHRPLRRRLPSVRCSLAAAAGPGVRAPPELVDSILSKVKGTDRGVLLPKDGHQEVAEVALQLGKYCIDDPVKSPLIFGGKLNVLDSKWIQVVFEAPELKVGSLGFQYGGESEVKLEITYVDEKIRLGRGSRGSLFVFLRR

SEQ ID NO: 57000 - protein, 464 aa, Zea Mays
MARRGLMEQDLSKLDVTKLHPLSPEVISRQATINMGTIGHVAHGKSTVVKAISGVQTVRFKNELERNITIKLGYANAKIYKCEDDRCPRPMCYKAYGSGKEDSPLCDVPGFENTRMKLLRHVSFVDCPGHDILMATMLNGAAIMDGALLLIAANESCPQPQTSEHLAAVEIMRLQHIIILQNKIDLIQESAAMNQHEAIQKFIQGTIAEGAPVVPISAQLKYNIDVICEYLVKKIPIPERNFTSPPNMIVIRSFDVNKPGSEVDEIRGGVAGGSILRGVLRVNQKIEVRPGIVMKDETGNIKCTPIYSRIVSLYAEQNELQFAVPGGLIGVGTTMDPTLTRADRLVGQVLGEVGSLPDVYVELEINFFLLRRLLGVRTKGTEKAGKVSKLTKGEILMLNIGSMSTGARVLAVKNDLAKLQLTAPVCTSRGEKVALSRRVEKHWRLIGWGQIQAGTTLEVPACPV

SEQ ID NO: 57001 - protein, 62 aa, Zea Mays
MHGFFVIVYLPSIHPTDVSQPHESKPMFAKAFFTLPLLPKRSSLVVLVQADRSRIPKFSSIM

SEQ ID NO: 57002 - protein, 535 aa, Zea Mays
MATCSRPLFVSDSAASASPSRASFRRLRTVAVVSIWEPLPHPPLRAAACRFARTKQCSRRSTECLASGPSVSRLTRPIRRMLSRYSSLMVTLHGNLSRCYKAMSALRPDGVSRHFMSAGGFERVVLGVVLVMSISGASYTAPSSSALTEENLLFLEAWRAVDRAYYDKSFNGQSWFRYRENALRNEPMNTREETYAAIKKMLSTLDDPFTRFLEPEKLKSLRSGTQGALTGVGLSIGYPMAINGSPSGVAVMTATPGGPAEKAGILPGDTILAIDNRSTEDMDIYDAAERLQGPEGSSVDLSIRSGTNTRHVVLKRQTVNLNPVRSRMCEIPGSKDSSKIGYIKLTTFNQNAAESVKEAIKTLRDNNVKSFVLDLRNNSGGLFPEGIQIAKIWMDKGVIVYICDSQGVRDIYEADGADTIAASEPLVVLVNKGTASASEILAGALKDNKRAVVYGEPTYGKGKIQSVFGLSDGSGLAVTVARYETPAHTDIDKVGVIPDRPLPASFPTDEDAFCSCLRDSTAACNLNAAQLFAKS

SEQ ID NO: 57003 - protein, 349 aa, Zea Mays
MRTSTCLSFFTLTVLPQTFWLNIISMPSIAILPPLVLNDEDYYPERPGEPDCPYLLSSRCKFKSKCKFNHPKEMVNALGTRTDNESLIADTTILPVRPSEPVCSFYAKTGKCKFGAVCKFNHPKLEDIKTPSLIAKETIYRATTDAAAHIGGTDDSVPAKTHAPIAPAEAHNAKGLPIRPGEVDCSFYMKTGSCKYGSICRFNHPDRSVVDIAFMAPVQATLPFPAPIVPAVALNPAANFLQSFDFHATHVPVEPMPMIYPQRPGEIVCDFYMKTGSCKYAQNCKFHHPFDRSAPHSKENEDTQQPVALTLAGLPRREDAEACAFYMRSGTCGFGARCKFDHPPRQDDV

SEQ ID NO: 57004 - protein, 711 aa, Zea Mays
MITFADLTEPAAAGAERCVDRQLWLACAGGMCTVPPVGASVYYFPQGHAEHALGLAGAADLSAARVPALVPCRVTAVRYMADPDTDEVFARIRLVPLRGGDADADAGGVEDDAAAADEQEKPASFAKTLTQSDANNGGGFSVPRYCAETIFPRLDYAADPPVQTVVAKDVHGAAWKFRHIYRGTPRRHLLTTGWSTFVNQKKLVAGDSIVFLRGDSGDLHVGIRRAKRGFCGAGGGGGDDSPAAGWDHYAGLMRGNVSPCAAAKARGKVRPEDVAEAARLAAAGQSFEVVYYPRASTPEFCVRAAAVRVAMRVQWSPGMRFKMAFETEDSSRISWFMGTVAGVQVTDPIRWPQSPWRLLQVTWDEPDLLQNVKRVSPWLVELVSSMPAIHLASFSPPRKKPRIPAYPEFPFEGQLLNPAFPPNPLPHGQHHHHFLHSHSHQHHHPPFFPFPAGSAPAAIQGARHAQFVPPFSELHLTHLQPSLLYPRLRRPDHVGPTTPIPARVSTDLTIGGAAAAARDDDDDDFPCAPPSTGANRQKPDAKPAGLVLFGRTILTEQQMSRSGATSPAATGNSSTCWNAEKGPNASEGSGGSGVIQTSPAKAASSERPPWLGGDGSQQQQASGELGLGLEPGQCKVFVESDTVGRNLDLAALRSFDELYGRLSGMFGVAGAELRSRVLYRGAAGDEPFSDFVRSARRLTVLTDAGSDNLGS

SEQ ID NO: 57005 - protein, 869 aa, Zea Mays
MCMDQQNRSSEGRVTCICMEEGGDPQLPSISAPRTTSEGAGGVDLDLLEQLLSGDNGWLEVVSRSPNSVAFPPLSAFFSADATATTVTTAAPAANASWWIQTGGASPSSVEERFSQALSYIRDTQSDGDVLVQLWVPVNRDDGKLVLTTSEQPFTLDHRSDSLLRFREVSTKYQFSADVKSGDSPGLPGRVFIGRLPEWSPDIRYFTSYEYPRVRDAQYLDVHGTMGLPVFEKGSYNCLGVIELIMTRQKINFTSELNTICSALQAVNLRSTEVSSIPRIKFSTASYKDALPEILEVLRAACLTHKLPLAQTWVTCAQQGKRGSRHSDENYRYCISTIDEACFVNEAEMRGFHEACSEHHLLRGEGVAGKAFTTNQPCFLPDIGSSTKLEYSLSHHAKIFKLKGAVAIRLRCTRTGTADFVLEFFLPTDCEALEEQKSVLDSLSGTMRSVCQTLRVVTDREMEDETVLEMNELNSFTPHGKDKVELSFGCNSADRRGEASWTSLAGTSQQESELAALRMHGMFSPGGQGPSLSGVQATAEGSKAKRRTKAEKTVSLQILRQYFAGSLKDAARSLGVCPTTLKRICRQHGITRWPSRKIKKVDHSLRKLQQIIDSVHGAETAFQLNTLYKDITNTSISSDNNLSGSVTVPPTNQSNLTDVNKHQPHKSSSNVPSTSHSHSSCSHSSESSPSCSGGATKHAQQGIIDQMKSENPVKDSSIQTLQTENTSLFEHFSVNETPIDLLQDVTEKANGGHHSSRSPSSPNPKQNTDANMRVKATFGSEKVRFRLNPECNFQELKHEIAKRLSIVDTNPLVLKYLDDDSEWVLMTCDADLQECLHVYKLAGIQTIKISVHLAVSPATRVTTGHTGLS

SEQ ID NO: 57006 - protein, 139 aa, Zea Mays
MTLNMPGKGYTSRVRCREQQRRTTIVSMLGRKSTARATVVPDPDYRLPIAILGIASAFAYADNLLAAAPVGLLGLLLLFQTTRVRFVFDNEALEVKVGEQLQESGENVFVGGKNRWKYAGGLLILHTSFFSVLCIIMIT

SEQ ID NO: 57007 - protein, 65 aa, Zea Mays
MITNNIKISGTFVELFVRRNCLCLLLLPNEKHVTDELTLKIWFPVTTMPPNYVMLLFMSYMLLPN

SEQ ID NO: 57008 - protein, 310 aa, Zea Mays
MLEKLRNKRVVFVGDSIGRNQWESLLCMLSSAVHNKSSIYEVNGSPITKHMGFLIFNFRDYNCTVEYYRSPFIVLQGRAPAGAPEIVRYSIRVDAMDWMSDRGKWKDADVLIFNTGHWWNNEKTIRGGAYFQVGDEVKMGMSVAEAYRRSIETLSDWLRKEVNTSKTHVIYRTYAPVHFRDGDWKTGGSCHLETLPDAMPVKSLDEWADLLQPVDEFLGSDLGSELAGVDLLRVTGMTAQRKDGHLSVYLSPSGPVPRYRQDCSHWCLPGVPDAWNELLYALVMRRHKKMAGTRTPDAEEGDVFSSGSSS

SEQ ID NO: 57009 - protein, 373 aa, Zea Mays
MVVVPFSLRIARNPIRLRLLPVSAARFTRLAMSTTPPAAATISVEYAKSGRSICKGCSGVIASGALRLGASARDPRGFGATKWYHVSCLPSSSYPLGPIGSIKGFDSIKDHDRAELRELEKNHKRDNTAVSPPEEQRPKKARIQMFSPAEGVPDNVTVSVEYAKSGRSTCKGCSENIAKGALRLGASFPDPRGYENTKWYHVVCFPTSSYPLFPMSNLKGFDSIEDHDRDKLHKLVENHKSDGKAADVLNESNLKREMAHSMDDSNEGAEKDLEGIKIHCMGEFEEGAEKNLEEAKLPAGNKMIGPSISFSLSDIKKEYKNATLPAHWKVFDTVIFREKEDGLHASSKIAAFDFDGCLANTSMKRPLRERPPT

SEQ ID NO: 57010 - protein, 222 aa, Zea Mays
MGMQQQKNAHVPKFGNWDSDGNVPYTLFFENARKGKGAGAAGGRMINPNDPAENPEAFSVAAPSPPPGRHERRPSDAPPPPMSPNPYYAAGSPYHRHAAGEPPRRAAGYSVDQSPAHPYSSESAGYGLVASSVDRSRAKGASRGNETPTRGSAVPKFGDWDANPASADGYTHIFNKVREEKQTTQAGKPAAYGKDGMRTNGPKQHDDDGYVSSKFSCFGWCK

SEQ ID NO: 57011 - protein, 861 aa, Zea Mays
MKGLTLNCMDRKSEAYELVRRGLKNDLKSHVCWHVYGLLYRSDREYREAIKCYRNALRIDPDNIEILRDLSLLQAQMRDLSGFVETRQQLLSLKPNHRMNWIGFAVAHHLNSNSSKAVEVLEAYEGTLEDDYPPENERYEHNEMLLYKISLFEECGMLDRALEEMQKKESKIVDKLSFKEQMASVLFKLGRFDESESIYRSLLFMNPDNYKYFIAVQKCLGLYSDNGQYSAADVERLSALYNSLKEKYAWSSAVKRIPLDFLEGEKFQEAADNYVRPLLTKGVPSLFSDLSPLYEHPGKANILEQLFLKLEDSIRDSGCFPGCPQKEPPSTLLWTLFLISQHYDRRGQYDIALNKIDEAISHTPTVIDLYSVKGKILQHAGNFTAAAALADEARSMDLADRYLNSECVMQMLQADQVGLAEKTAVLFTKDGDQHNNLHDMQCMWYELASGESYYRQGDLGRALKNFLAVEKHYADMTEDQFDFHSYCLRKMTLRAYVSMLKFQDRLHAHEYFHKAAAGAIRCYMKLHDSPTKSSKEENDEISKLPPAQRKKLRQKQKKAEARAKREAEEKQEDETASSNSSKSGKKQHARPVDLDPHGEKLIQIEDPLAEATKYLKLLQNNSSDSLETHILSFELSMRKQKVLLAFQAVKQLIKLDEDNPDSHRCLIKFFHKINSLPGPVTDSEKLIWNVLEAERPDMRQLHGKSLVEVNRSFLEKHNASLMHRAAGAEMMYLLEPNKKMEAINLIEDSTNITSSGHSLLGPVKTWQIQDCIDVHKLLETVFGDQNVANRWKARCAEYFPYSTYFEGIKSAISTYAIDHSLESPPENGIASNPHLKSKDGEQGSLNGTLHIVDDLSSLSIR

SEQ ID NO: 57012 - protein, 292 aa, Zea Mays
MEAVVVDAGSKLLKAGIAAPDQAPPLVMPSKMKLDVEDQEMADGAVVEEVVHPVVRGFVKDWDAMEDLLNYVLYRDIGWEIGDEGQILFTEPLFTPKTLREQLVQLMFEKFNVSGFYASEQAVLSLYAVGRISGCTVDIGHGKIDIAPVCEGAVQHIASKRLEIGGVDLTNLFAQELKKSNPSVNLDVADVELLKEQYACCTEDYLTFESIESSCQPEKHTLPDGQVITIEKEGYIVGEALFQPRILGLEDYGIVHQLVTSVSNVSSEYHRQLLENTMLCGGTSSMTDSFDR

SEQ ID NO: 57013 - protein, 145 aa, Zea Mays
MDDICGRDWVPGGGDHGDPDLERAISDLQREARVSIPLVVFGHMHKSLAYGRGLRKMIAFGANHIIYLNGAVVPRVKFAQTTPGHEQNQPEGSGSRAPTLRAFTIADLYEGRVEKISEVWVLVSGARTEVEEEIVLYKHPREQHM

SEQ ID NO: 57014 - protein, 498 aa, Zea Mays
MKAKIVLLVIIICQYVPRLLRIIPLYLQITRSAGILTETAWAGAAFNLIIYMLASHGFGALWYILSIQREDTCWRQACINQTGCDPTSLYCGYHSLANNSFLQNACPTNSTANPDPIFGIFLPALQNVSQSTSFFEKLFYCFWWGLQNLSSLGQNMKTSTNTLENLFAVFVSTSGLVLFALLIGNVQTYLQSASVRIEEMRVKRRDTEQWMAHRLLPENLKDRIMRHEQYRWQETRGVDEEGLLKNLPKDLRREIKRHLCLSLLMKVPMFENMDEQLLDAMCDRLKPMLYTEGSCIIREGDPVNEMLFIMRGTLESTTTNGGQTGFFNSNVLKGGDFCGEELLTWALDPTSASNLPGSTRTVKTLSEVEAFALRADDLKFVATQFRRLHSKQLQHTFRFYSQQWRTWAACFIQAAWHRYCRKKLEEALYEKEKRLQAAIVSDGTTSLSLGAALYASRFAGNMMRILRRNATRKARLQERVPARLLQKPAEPNFFAEDS

SEQ ID NO: 57015 - protein, 502 aa, Zea Mays
MSTHAASRRSSSSSAVAKRPAIAEGATKAAGPGPTAAQAKKRTALVNITNVAAPGARVAAVGKVAPPVTGAKLNPATSGAPLKKPSLANARTIRGSAAKSASIKPAPPVSRHDSSSEQKHNVLVPTTVHVPSRAPALVPYSSFVSPGRSRDSVSTDETMSTCDSMKSPDFEYIDNGGCSMLASLQRRADEHLRTSEDRDVEENKWKKNGPAPMEIDSICEVDSNLEDPQLCAALASDIYMHLREAEMKKRPSTDFMKTIQKDVNPSMRAILIDWLVEVAEEYRLAPDTLYLTVNYIDRYLSGNEINRQRLQLLGVACMLIAAKYEEICAPQVEEFCYITDNTYFRDEVLEMEASVLNYLKFEMTAPTAKCFLRRFARSAQACDEDPALHLEFLANYIAELSLLEYSLLSYPPSLIAASAIFLARFVLQPTKYPWNSTLAHYTQYKPSELSECVKTLHRLSSVGPGSNLPAIREKYSQHKYKFVAKKQCPPQIPAEFFRDAAC

SEQ ID NO: 57016 - protein, 363 aa, Zea Mays
MEEYSELPPLGDTGEYELLPVPTVEELGYGDISQEEIPPFHGGETEALRRMKESLQNKEWVAKFEKPKGDPSAFVKPSTTVLSPYLKFGCLSSRYFYHCIQDVHRSVRNHTKPPVSLTGQLLWRDFFYTVSYGTPNFDRMKGNKICKQIPWSENEDLFVAWRDGQTGYPWIDAIMIQLRNWGWMHHLARHSVACFLTRGDMFIHWEKGRDVFERLLIDSDWAINNGNWLWLSCSSFFYQYHRIYSPITFGKKYDPNGNYIRHFIPVLKDMPREYIYEPWTAPTSIQKKANCIIGKDYPKPVVDHETASKECRKRMGEAYALSRVDAKPSKGKTLNSRRKMLHGDRDTSNSTIAKRLKRNSRAE

SEQ ID NO: 57017 - protein, 191 aa, Zea Mays
MSSGPEQERNPTPNSFPSTHMALQAQASPSPSTSPTRERTGSGEWPDDVDKLPAGASASPPYSSDAVELVVVASTHHAAAAARYSEAVNVIGFLYSVFQFVALVELMRRNKHLIPHRKRGLFDFTMDQVLAYLLISSSSSATARVSDLIDNWGSDPFPTMANGSIAISFMAFAVFGICSLISAYNLFRRDM

SEQ ID NO: 57018 - protein, 172 aa, Zea Mays
MQWFKKLLPFIAPSETELNEIMSKSLLFVGEIGGNDYNHLIVREKSVDELHEIVPNVVGAISSGITDLINLGAKKLVVPGNFPIGCVPFSPSILCGRPGSTVCPDPSKYISWDGLHFTEASYKVVIQGVLGGYAKPPLSEACKGAEFKVSQLHQCTDNPTNTVSYDALSSFI

SEQ ID NO: 57019 - protein, 97 aa, Zea Mays
MGRPEPVVLFAQTILHSQLDEYVDEVLFSEPVVITACEFLEQNASPSTPNISLVGATSPPSFALEMFVHCDGESRFRRLCHPFLYSHSSSNVLEVEV

SEQ ID NO: 57020 - protein, 1323 aa, Zea Mays
MSSLQLLQLTERGRNLLSSRRRTLAIVSGAVLAGGALAYAQSGRWKKHQEANSCSDANSHSSNNGRTSQNGIDGKLVKTRKKKSGLKSLHFLAAILLKKIGPNGTNYLIGLILTAVLRTAVGHRLAKVQGYLFRSAFLRRIPTFTRLIIENLLLCFLQSTLYQTSKYLTGSLGLRFKKILTDLVHADYFENMVYYKISHVDHRITNPEQRIASDIPKFCSELSDLVQDDLAAIVEGLIYIWRLCSYASPKYVLWILAYVIGAGGTIRKFSPAFGKLKSTEQQLEGEYRQLHSRLRTHAESVAFYGGENREASHIKQRFRALVKHLNVVLHENWWFGMIQDFLLKYLGATVGVILIIEPFFAGNLKPESSTLGRAEMLSNLRYHTSVIISLFQSLGTISISSRRLNILSGYANRIHELLDVSRELSGGRDRLITQNSSDGNYISEANYIEFSDVKVVTPSGNVLVDNLNLHLESGSNLLITGPNGSGKSSLFRVLGGLWPMVSGHIVKPGVGSNLNKEIFYVPQRPYTAVGTLRDQLIYPLTADQETEPLSYGGMVDLLKNVDLEYLLERYPLDKEVNWGDELSLGEQQRLGMARLFYHKPKFAILDECTSAVTTDMEERFCKRVRAMGTSCITISHRPALVAFHEIVLSLDGEGGWDIQDNRNGSFSPEVEFDVLKASESDRKSDALTVQRAFITSTKGNASMKPKKHSYSTEVIASSPSMEIEHTVQSSIVTQLQCSPRPLPVRVAAMSQILVPKLFDKQGGQLLAVVLLVFSRTWISDRIASLNGTSVKYVLEQDKAAFIRLAGTSVLQSAANSIVSPSLRNLTSRIALGWRIRMTNHLLQYYLKRNAFYKVFNISGMSMDADQRMTHDVEKLTNDLAGLLTGMVKPLVDIIWFTWRMKLLSGRRGVAILYAYMFLGLGFLRAVSPDFGDLANQEQELEGTFRFMHSRLRTHAESIAFFGGGSREKAMIDAKFMTLLNHSKVLLRKKWLYGIFDDFVTKQLPHNVTWGLSMLYALEHKGDRALTSTQGELAHALRFLASVVSQSFIAFGDILELHKKFLELSGGINRIFELEELLQASQSNPVMPSDATNAGSEEIISFRGVNIVTPSQKLLASQLSCDVSQGKSLLVTGPNGSGKSSIFRVLRGLWPIASGSLSKPSEGIFNVPQRPYTCLGTLRDQIIYPLSHEEAKLKMLSGETSDKSTASELLDDHLRTILENVRLLYLLEREGWDATTNWEDTLSLGEQQRLGMARLFFHCPKYGILDECTNATSVDVEEHLYRLATNMGITVITSSQRPALIPFHSLELKLIDGEGKWELCSIHQ

SEQ ID NO: 57021 - protein, 220 aa, Zea Mays
MEGKEEDVRLGANKFSERQPIGTAAQGAADDKDYKEPPPAPLFEPGELKSWSFYRAGIAEFVATFLFLYITILTVMGVSKSTSKCATVGIQGIAWSFGGMIFALVYCTAGISGGHINPAVTFGLFLARKLSLTRALFYIIMQCLGAICGAGVVKGFQQGLYMGNGGGANVVAPGYTKGDGLGAEIVGTFILVYTVFSATDAKRNARDSHVPLIDCAHTYI

SEQ ID NO: 57022 - protein, 632 aa, Zea Mays
MWKISPQMVLGYFAVPYPLPKMDMVAIPDFAAGAMENYGLVTYRETALLFDEMHSAAANKQRVAVVVAHELAHQWFGNLVTMEWWTHLWLNEGFATWVSYLAADQFFPEWNVWTQFLEESTVGFKLDALAGSHPIEVDINHVDEIDEIFDAISYRKGASVIRMLQNYLGAEVFQNSLAAYIKRFAYSNAKTEDLWAALEEGSGEPVRTLMHSWTKQQGYPVINVKLKDGKFQLEQTQFLSSGSTGVGQWVVPITLCCCSYSRQAKFLFHGKQEDFDLSASGFTDCQKKDGFWIKLNVNQTSFYRVSYDEELAARLRYAIETNKLGAADRYGVLDDAYALCMAGKQKLVSLLHLISVYKDETEYTVLAHIITTSLHIAEMMVIAAPEELVHLKKFLIDFLEPFALKLGWDAKSDEGHLNALLRGTLLTALAELGHEATINEAVRRFNVFLEDRETPLLPPDVRKAAYVALMQTVSKSNKTGYESLLRIYRETDLSQEKVRSLASSPDHDVVREVLNFILSPEVRNQDAIFLLRGVSSGAHEVAWQWLKENWDYILGAYSGTLLTYFVNITVSPLATDEHGDEAEEFFKSRTKANIARTVRQSIERVRINAQWVKNIKAEADLGNVLKKLAYKH

SEQ ID NO: 57023 - protein, 575 aa, Zea Mays
MAARRQHRRGFPLVPLLLSLLAAAAYGRLISDGGPSAQLLSVIRLSGSSPAAGAAAKAEEKCEQSYGFLPCTTTVLGNLFLVLTYGYLMYKAATYLSAGSELLLEIMGPGLVGGLLLPILGALPDALLVLVSGLSGSKEEAQSQVLIGMGLLAGSTVFLLTLLWGTCVVVGKCDLGPNREAVDVTDTKGFSLTGTGITTDVQTSYAARIMGLSVIPFIIAQFPKMLKTHHGQRLAMLLALIVSFLLVLSYCLYQVFQPWIQRRKLAYAKHKHVISGILRHAQMQSLGRLLNDDGTPNDDVIRKLFRKIDMDQSESLSRAELHALIVGINFEEVDFDRTDAVDKVMDDFDTSRNDVVEQEEFVQGMKKWLNEAKRSVPVGGAFSTKFINEYHERTRQEHNELVDRSDEAVESVENPGWCIAKAVALLLLGAAIAAAFADPLVDAVHNFSNATHIPSFFISFIALPLATNSSEAVSAIIFASRKKQRTCSLTFSEVYGGVTMNNTLCLGVFLALIYFRNLTWDFSSEVLIILLVCVVMALFTSFRTTFPLWTCLVAYMLYPFSLVLVYILDYVFGWS

SEQ ID NO: 57024 - protein, 171 aa, Zea Mays
MVRRRPATGAAPRPHLAAVGRGLLLASVLAAAASSLPVAESSCPRDNSLVRDISRMQQRNYGREGFSHITVTGALAHGTKEVEVWLQTFGPGQRTPIHRHSCEEVFIVLKGKGTLLLGSSSLKYPGQPQEVPVFQNTTFSIPVNDPHQVWNSNEHEDLQVLVIISRPPVKI

SEQ ID NO: 57025 - protein, 220 aa, Zea Mays
MAKSGASFPESSWMERDFLAAIGKEQQHPHKEEAGAEESAYFGGAGAAAAAPAMDWSFASKPGAAPALMSFRSASFPQFSSFDGAKNPAPRILTHQRSFGPDSTHYAAAHRTQHALNGARVTPVSSPFNQNSPMFRVQSSPSLPNGTAFKQPPFAINNNAAASSTVGFYGTRDVVRPKTAQLTIFYAGSVNVFDNVSAEKLSLKLERRPLLDSWRKERKG

SEQ ID NO: 57026 - protein, 84 aa, Zea Mays
MILLELNFSKFDVMWYSFSAAFLLDPFVVWMGKTLFHAGCTDSGTRLTKLSNLQTTFIFSFRDFWTELNWSYQTIIWSILYVSK

SEQ ID NO: 57027 - protein, 225 aa, Zea Mays
MSTTPRSRSQGSRTTRPWILSGMDFAGSRRKPNLTGKIAVAAALTVMCIIVLKQSPSFSGTSVFSRHETGVTHVLVTGGAGYIGSHATLRLLSDKYRVTIVDNLSRGNIGAVRVLQRLFPEPGRLQFIYADLGDAKAVNKIFSENAFDAVMHFAAVAYVGESTMEPLRYYHNITSNTLTVLEAMAAHNVNTLIYSSTCATYGEPDTMPIVETTPQNPINPYDTST

SEQ ID NO: 57028 - protein, 1018 aa, Zea Mays
MSSLSRELVFLILQFLDEEKFKETVHKLEQESGFYFNMKYFEDEVVNGNWDEVERYLGGFTKVDDNRYSMKIFFEIRKQKYLEALDKHDRSKAVEILVKDLKVFASFNEELFKEITQLLTLENFRENEQLSKYGDTKSARAIMFVELKKLIEANPLFRDKLQFPSLKNSRLRTLINQSLNWQHQLCKNPRPNPDIKTLFVDHSCGQPNGARAPSPANNPLLGSMPKPGGFPPLGAHGPFQPSPTPVPPLAGWMSNPPAVTHPAVSGGAIGFGTPTNPAALLKHPRTPTTANPGMDYPSGDSDHISKRTRPVGMSEEVNLPVNMLPVTYPQSHNYQQDDFHKTVARTLSQGSTPMSMDFHPLQQTLLLVGTNVGDIGLWDVGTKDRLVVRNFKVWDLSKCTMILQASLVKDPAVSVNRIIWSPDGTLFGVAYSRHIVQIYSYNGGDDIRQHLEIDAHIGGVNDIAFAHPNKQLCIITCGDDKTIKVWEATSGAKQFTFEGHEAPVYSVCPHYKENIQFIFSTALDGKIKAWLYDNMGSRVDYDAPGHWCTTMAYSADGSRLFSCGTSKDGESHLVEWNESEGAVKRTYQGFRKRSMGVVQFDTTRNRFLAAGDEFMIKIWDMDSTGLLTTIDADGGLIASPRIRFNKEGTLLAVSTVDNGIKILANADGLRLLRTLENRSFDASRNASEAVTKPLINPLTAAANAAAASSSGAGAPSAVTAMNGDTRSLVDVKPRIADESLDKSKAWKLMEITESTQCRSIKLADNMRTSKISRLIYTNSGLAILALTSSAVHLLWKWPRSDRNSGKASASVSPTLWQPPSGILMTNDTTDNNPEEAVHCFALSKNDSYVMSASGGKISLFNMMTFKTMTTFMPAPPAATFLAFHPQDNNIIAIGMDDSTIQIYNVRIDEVKSKLRGHSKRITGLAFSNVLNVLVSSGADAQLCVWNTDGWEKQKNRFLQIPSGRQSNILDTRVQFHQDQMHFLVVHETQIAIYETTKLEPVKQSTDLCKLYGCHCWHI

SEQ ID NO: 57029 - protein, 152 aa, Zea Mays
MMLDINLFRTDKGGNPDLIRESQRSQFASVELVDEVIALDKAWRERQFELDKIRQELNATSKKIGKLKAIRTSKQEEEAKKLMESTDEIKKRLAAKEVEVQEAKSTLDAKVTTIGNIVHESVPVSDDERVEDNLKNHVDLCRMLDIVALEKG

SEQ ID NO: 57030 - protein, 130 aa, Zea Mays
MGHQTDEEDFASLTERVSQEMFDGVIREVVEETGVPASSLTDPVFIGVSRREVNVRPTAFFFTKCNIDSSGVSELYSRAQDGYESTKLYTVSVEELQGMRQRMPGCHNGGIALYELMRNAAKKSEDVIDE

SEQ ID NO: 57031 - protein, 106 aa, Zea Mays
MFCSDSLSACPFGYDKFCPFYKSVWMMRNIIHFNTLANQAVERAAGTDGQKITYGVIKHRLGDLFYRLVSQKFEDPAEGEEALVGKFKKLYDDLTTGFRNLEDEAR

SEQ ID NO: 57032 - protein, 641 aa, Zea Mays
MAAPAVASPSRATPTDIPTAAPSPASPPRRLASAPPAVDASGSSSPASAHSGDQLSAPDASSPLLASRSEEYRLLFRLPPDEVLVQDFNCAVQENILLQGHMYLFLHHICFYSNIFGYETKKTIPLQEVTDVRKAKTAAIFHNAIEIVAGSRRHFFGSFLSRDEAYRIIVDGWEQHVSDARLLLERQETKSASSSEENGYVVLEGTKESKQDGDLSLPDRSVNSTAVSSSNADGGDSNINISKRFSEVEENGLEDNIVALNPFNLEPVDAPPSVPESYTMISESKFQVPVEVLFNFLLSDGAFGFVDDFHTKCGDKEFSCSKWRTDEQGGLVRDVSFLHPIKIYLGAKFGTCQEVQKLRLYKNRRLVIQTSQSIGDAPYGDHFTVEGIWDVEQDSLDENCCDLRIYINVAFSKKTIFRGKIEQSTKDECREVFSLWIKLVCLFSYLKIFLSATFHLEGHDLLKQEYDRSKGASSTPDSGVQPGATTNEESAVEVAVPVVSSSHDESGARSLIPPTQDHQQRTGRDPSITSTSQELWGSLSSYMRSRQLGPVLAMSLVALIILMQVTIIVLLTRPPQVQMDPHGIWTGSSGYSKESIEWVQKRLSLLSEEMQLAEAHMETMRREFAWLRSYLERLQRTRGST

SEQ ID NO: 57033 - protein, 164 aa, Zea Mays
MTIQVIAEREHKIRSEVKEIQKVFFCNLCNKQYKLAHEFESHLSSYDHNHRKRFKEMREMQSSSGSRDDRQKREQQREEKELAKIAQLADAHRKQQKDKQEKSETEDAAPKNMAASSNQDQRQTLKFGFSKMAPSKVLVGSASKKPKVATKVSSVFGNESDEDS

SEQ ID NO: 57034 - protein, 53 aa, Zea Mays
MMETLGKMPRKIASSGTRSKDYFDRYGDLKRVRRLKFWPLDRVLVERYPRTLI

SEQ ID NO: 57035 - protein, 313 aa, Zea Mays
MLFVIIAGSYIGFQTGWVGYKVAGGFFPYGANGMLAGSATVFFAYIGFDSVASTAEEVKNPQRDLPLGIGTALSICCSLYMLVSVVIVGLVPYFAMDPDTPISSAFAKHGMHWAMYLVTTGAVLALCSTLMGSILPQPRILMAMARDGLLPSFFSDVHKTTQVPVKSTVVTGICAAALAFFMDVSQLAGMVSVGTLLAFTIVAVSILILRYVPPDEVPLPSSLQASFRLSQENDEEKLRGTLGDDDHEQGSAEISDVVVEPITDPLIEKQLYASNLSEAKRRKTAACSITSVCIGVLILTTSASATFLPFNNL

SEQ ID NO: 57036 - protein, 175 aa, Zea Mays
MAQAVEEWYRQMPIITRSYLTAAVVTTVGCTLEIISPYHLYLNPKLVVQHYEIWRLVTNFLYFRKMDLDFLFHMFFLARYCKLLEENSFRGRTADFFYMLLFGATVLTGIVLIGGMIPYISETFARILFLSNSLTFMMVYVWSKHNPFIHMSFLGLFTFTAAYLPWWEIVQLAKC

SEQ ID NO: 57037 - protein, 371 aa, Zea Mays
MRPQQMSGSSSRENIKNTSLSDSSNIMVQSPLKAIGNMGSMGAFWSTQHAQELSFADDKEPAFDKEPIDQVRSKQSQAKNQNTAARNSSRKSLSASVDSSPGDFEIRFSANGSESRLEETKTVITENKTKIQTTAFNSCASDFDNIKMNSRNTTDSINITSKLKELQLEAEVTLLKEQLKIANLEKEEISLKFDKLSAICSSQRREIQELKQALAAAYVTPPAKQFRENSSVEVTPPSKSLDTPPREKIEGTPPELRQGLFTSSPGTPSPDLKTWSAFLEEPKSQAAVKSVHPRSVRTLRASNSNKASSLGQSNISSSTDPFAFGQDSFKAAPSGTVLPLLSNMGNTSQLSNLNIEEKKDGSYQPDGWTGF

SEQ ID NO: 57038 - protein, 755 aa, Zea Mays
MQQMLLHRAAQQQQQQQRRDGSLLNGTASGFSGNDPLIRQNPANANSMAAKMYEERLKLPPQRDSLDEASIKLQQRYGENVGQVIDPNQALLKAAAAGQSSGQILHGTASGLSGTPQQVQARSPQQPPTAEQNIRTEINPVLTPRAAGTEGSLIGIQGSNQAGNNLTLKGWPLTGLDHFRSGILQQKPFMQSPQQFQQLQFLTPQQQQQLLLHAQQNLSSSMSSDVDTRRLRMLLNNRNVVLGQDGQTNSGGDVIPNIGSPGQSGGSRNDIDILIKKKFALLQQQQQQQSHSQQQQLQQPALSGQQSQSSNQLLHQHGKPGVGSLPIDGNLPNSFGFPEQGSKKRKKPVSSSGRANSSGTANTAGPSPSSAPSTPSTHTPGDAMSIPQLQYNGGPSKPLMMFGSDGTGSLTSPANPLGDVERLLEDGSLDENVESFLSQDDMDPRETMGRCMDSSKGLGFTEVAKARASTNKVVCCHFSLDGKLLATGGHDKKVVLWFTDVLKRKSALEEHSSLITDVRFSPGMTRLATSSFDKTVRVWDADNPDYSLRTFTGHSASVMSLDFHPNKEDIVCSCDSDGEVRCWSINNGSCVTCVRVFNGGATRLRFQPRQGKYLAAASEKGISILDAETLQVCRTPLQGHVQIIQSVCWDAAGNYLASVSEDSVRVWSFTSGNYIECIHELICSGNKFHSCVFHPNYPNLLIIGCYESLELWDIREKNTVTISNAHDGMVAALAASSASGLVASVSHDQLVKLWR

SEQ ID NO: 57039 - protein, 202 aa, Zea Mays
MGRSSLGLFTSSLEDAMGIAQHHDAISGTAKQHTTDDYSKRIAIGASKVEKGVNAALTCLTNSNKTCVSSVPKFSQCPLLNISYCPSTEEAISATKHLVVVVYNPLGWKRSDFIRVPVNDEDLVVKSSDGNTVVSQIVVVDNVTNNLRKLYVKAYLGVTANKAPKYWLTFQASVPPMGWNSYFILKSTGSGRLTNSTKLSLV

SEQ ID NO: 57040 - protein, 445 aa, Zea Mays
MAAAGHCYYHDDYGDDDHNPWSPFMQSEAQISPLRQQVQSLALIDIWEDRKIFDTQAQSLKDDFFRRLKDIRNQLKNTGSEQLEKVVSSYKHVLNAPMDEDTLMRKCQAALINFDELNKTYGNNSILGSSNRSGFMQELQEQHSILRNSIEQLKVSESLRATLIFHLKEALNEQELKVEHLRSQLQAAQPRFKRASELCVGLGSNMERRQPSNQGLKRSSLSDPLSTVAPEAVKSLQKGQSSAVLYSQEGNGVEHSVTETKLAAGAASDDIRGGALSSRVNGGNTMLKIEEHTSGNKRQKLEDDAHISQPRSESPPPPPPPFPHPDTFQPPPPPPEYPRSPDPSPPPPRTSLPPHIIPPPPPPPPAMPLHMFSHLPPPAGTFVPFPAGPPGPMYCTYPSFTPVVNFPMTSPPGFRNLTPPPSFRGLAGTFYGPRFPTAPPPADRK

SEQ ID NO: 57041 - protein, 362 aa, Zea Mays
MICDPMKLASSPTARSSSASSSSSHSWKKDQPMQFGIPISVVCDWLYQHWQGSLDEVSKPKLPLVRLMSSRSDHSSTSFTRRHVFKPDDENDDASVCSKPKHQQVSGSTATARISHEANPIVDLRTSCEQGVTTPEIYESPRRSSCQAQKNAAAPIQLLDINFPPRVPKTIFLPLPLKQMLSDENNVETSKPKYRSKDNGFPSGLIWHRNIEAECRDPPVALQHMDCSSEGQSSSSPAEIPEYGCQDQYDSEEETMYSAETMESRNIPSPREKHVGRSQSCVTYSRWSSPRTSSMQNGTLRKQHTLIPVRKTHSQNTTLPQRSHDYLSPTVSSAMKKRNSMEQQQATKPRRSTIQSSPKWMF

SEQ ID NO: 57042 - protein, 90 aa, Zea Mays
MLPQNIQISQHQQLAGYCPFGAIISYSTPIKEAVLITNISARCRITESNKSMATSIRRLVVSDFLATTLNKLVTDFSGASVSPGQFYPTN

SEQ ID NO: 57043 - protein, 357 aa, Zea Mays
MSWLRSAVHRAVEASGGHSSLLTRTVRTSLDTVVHHAGQAVAGGARLITGSRSYKSAKVAAKRLEEEALSCKGDERVQLLRRWLVALKETQRATTAVREPQFGDNPDQTAPLLDLYIDYDSGAEPMNFFHVFLYSQALECVVLSLIREAPTEEEVPLVSEVFGMCLSGGKDVHNALLSSVKDLARLFSSYSDEVLAKRDELLQFAQGAISGLKINADIARLDNEITQLQQQINSMDALHATSIVNQNKKAQTATEGFRKAVSEVRLCSRMEELLLKKKSIHPGDSLETHFEKVDKLKVLSESLANSSAKAEKRIMENRLQKEESLIFRVTKTNEVSGIEKLLRSLDLRSKGINSRQN

SEQ ID NO: 57044 - protein, 89 aa, Zea Mays
MAALSSCVASGGLALQATLVVSPPRRRGTPVVISVSSHGRRPSLIGSTMNPSGMAPIKRTTRIRAVHPCPANSLGGSLTIIPIPDLLSS

SEQ ID NO: 57045 - protein, 52 aa, Zea Mays
MINRDSRGHSYFIVRGENLGFMKDEQLRKLLPRMFSLIKNESWGLEDDQIPS

SEQ ID NO: 57046 - protein, 1006 aa, Zea Mays
MRDNFEKIILIDHDLSEQKEVEYLLWKLHYKRIEDFRRSISAASSAASQSGKSNANPDRVKRIKLTFKSFLSEATGFYHDLMLKIKSNLGLPLSYFPEGIDNANNSARDDKTTVQLKKGLISCHRCLIYLGDLARYKSSQGDGDSASREYAAASSYYMEAASIYPSSGNPHHQLAILASYSGNEVVAVYRYFRSLAADTPFTTARDNLIILFEKNRQSYRQLPDNNKVPSAKALPPRLSGRGQGRGEVKFQPKDVNAEAAEREQECNVRDTLKAFYIRFVRLTGILFTRTSLETFGELFSSVSNDLQILLSSGLEEDLNFGSDAAENALAAVRLTIILIFTVHNVNKEPDSQSYSELVQRRVLLQSAFTAAFDFVGRILRRCSELGDITSSFYLPAILVYIEWLASHPELAIDSEMEEQHANARSFFWNQCISFMNKLILTNLASMEDNDDEACFSNMSIYEEGETGNRLAIWEDLELRGFLPLVPAHTILDFSSKHTFGNVGSTKEKKARVQRIFAAGKSLLNFVQIDQLRIYFDPSLKKFVLAKNSPVSRTNTPLHESPDALKTNGTEMDHKAARRFDSVSSNVGSLQSKVQFCPDGDDEEEIVFKPTAYEKFSKVSSDLSVNGYVHPVPVSAAGGPTNASLVPVQNTASMSATRLPSNPHATGLPSNGGSLPSTASLSAAGNYNTDQSLPRSSVGWTDWAVNSEQNVTPSIAPRFELMQSVEEPVSSWTSSGAQHVGPQHKHTGLTFPDVVSEPCVSASMVQCFSSSDYSKFLREQEIFLMNGLKTVNITGNGYLEQRLQPGLSGLQSMGYSSQIPIQPGGTTANLMHNHVKITGETVPSTLDSVVPSIAPSGGMPIKLTEAPLTASKKNPVSRPSKPVGPPPGFNHVTPKRQDDSIPVEKLQNPQVDDYSWLDSYQQSIDHVHSLRTIYPGVSDTSTAFATPFSFPGRIHTQGTNEKTWQDFHLFEPSKQNMFQTYHQRNLQSGQMDEQEPANSIWSSSYHV

SEQ ID NO: 57047 - protein, 983 aa, Zea Mays
MRTCPIDLKEAVASVIFASMRCSDVTELADVRKHFKSKYGKEFEAAALEVRPDSGVNRLIIEKLSAGAPDVQTKIKTLSSIAEEHNIKWEPKAFEEKLQQPTEGHLYGSATYSGGNTSTMGSSTSSISTPQPTYSGVSAAPVDSATIHVPANKTAYGSANSNTFSKESIHNSSSASVPPISQHGPSAYSSAQVPGSNNISHGNPGGPPYPQYSATVPDAVSRNEDSNQNRERKPLVTGANWNVEFKDATSAAQAAAESAEMASIAARAAAELASRGNYSGDKGTGAYDSAAYSSKNTVRKQRAEHVVKDESFHDQSSGVNDPSEMPSNSRNFFGGTETSHVDSENISTAPYQQFHAYNPDSHPYVYEMPTEPPRAHSPDPRFDDLYERESDIGRSEVDPFDFPRENFQDTASVGHNFKDVEIRTPSYDQESTDDYYGNFNSSHDTLAHGSSTTAWDKQNDKAQDNSSPVVFDQYDSDVEQENLLDTFSSKHTEQLPAPGDHMRFSTADWSEQHTSESPSKQRTSALFSRTETQLSDNLGTNKSDIPSPHSYHNMRPAFDSDGGSSDEEIATTTHAVPLRSHSGGSASSVLNKGGGPDASPIFDYSGAHAVRNLNRVQSRDSDLSEEETDLDKFKGSSFARANEQQLLPSAIRTSATSDDKEDDISLNFGKLTPGLRNKPRQPPPYTKVSRESILPKQSLPKVSAGTEESVDSEENTTFKQDRSSPQSSFSARTSSGKDYDSGLYERNRSVGTHWEAKSTIARNSSGLDDAEKLSDLPTNISLPTTKSSERWNSSKVPYHEKPGIGTRREVRSTLARNYFDSDDSEEELEQQQIPQSKQSGVLIQSRRTREVTSDTKRDGRFQTGAQYGDETESVTSKTQVHQGFNSSSTERSERRDPSVYPRVAVQRSSSKAEQIESPMERGKPQGAEMRSTLFRGNEEDTETSSGTPKESTPKTPPAHVHPKLPTDYDSFAAHFRSLRTNRP

SEQ ID NO: 57048 - protein, 575 aa, Zea Mays
MYQRDDANLGAASYYVTGAQTWGVSNVGKFTEAVYESYIISSSRQFYNTLDPELFQTARMSASSLRYYGIGLQNGNYTVALQFADFDFEDSQTWQSVGRRIFDIYLQGERKEKNFDIMKAAGGKSYTAVEKQYIVPVTRNFLEIHLFWAGKGTCCIPFRGYYGPAISAFSVTPNFNPTVQTSRKTGIIVGVVVGAAVLGVLALAGLCMRRQKRRKLLLEQQELYSIVGRPNVFTYGELRTSTENFSSNNLLGEGGYGSVYKGKLAEGRVVAVKQLSETSHQGKQQFAAEIGTISRVQHRNLVKLYGCCLEGNKPLLVYEYLENGSLDKALFGSGRLNLDWPTRFEICLGIARGIAYLHEESSIRIVHRDIKASNILLDANFNPKISDFGLAKLYDDKKTHVSTKVAGTFGYLAPEYAMRGHMTEKVDVFAFGMVILETLAGRPNFDNMLDEIKVYILEWVWQLYEDKHPLDMVDPKLEEFNSGEVIRAIHVALLCTQGSPHQRPSMSRAVSMLAGDVEVGEVVNKPSYITEWQIKGGNTSSFMSNNVSGQSSMAPRSSASHTSSPFLNSVIEEGW

SEQ ID NO: 57049 - protein, 777 aa, Zea Mays
MIQLINAWKDVFSRTNVIVFPNYILPVMYAAFDSGNYFVIPGPPSEAFQVDSFIAKSYHEDVKISLGLNPKDFLIAIVGNSFSYGDNLMEEALVLQALSPLLQRYRSENSAQSELKVKIFTGNITEKHRMALESVALSVGFPRGAVEHVAAEDKDNLLGTADLVIYYSCLEEQLFPSVLVQAMSLEKLVIAPDLAIIRKHINDGVNGLLFPRKNIGMLAQVLLRAVSNSKVSLSGQKIASAGKAHAKNLMASETIEGYAMLLKNVVKLPTDALSPLTADEIPLALKQEWKWHLFDDVKHLHRVNTSLSGYKILQKLEQEWHSNQMENSSLSTKNINDAFSAIAWEEQRVNEVMDIKRKMEEDELKDRNDQPHGTWEEVYRNVKRVERLKNELHERDDKELERTGQPLCIYEPFFGEGTWPFLHQSSLYRGVGLSSKGRRPGADDIDASSRLPLLNNVYYRDILGEFGAFFALANRIDRIHKNSWIGFQSWRATARKANLSTNAESAILEAIQSQKHRDSFYFWVRMDQDPRNHANKDFWSFCDVINAGNCRLAVLEAFQRMYGVHLDRDLDTLLHMPNDGDTWSVMQSWVLPTRSFLEFVMFSRMFVDALDAQMYDKHHQTGHCILSLHKDQHCYSRLLELIVNVWAFHSARRMVYVNPATGQMQEQHHLSGRRGQMSVQFFSYATLKSMDEELAEEFDLDHPDRRWLWPQTGEVFWQGLYERERSMRQHEKERRKQQSREKIQRIKSRARQKTLGKYIKPPPDDTVVSNDTTTVDL

SEQ ID NO: 57050 - protein, 375 aa, Zea Mays
MDGNKKKRKRYGGQAQGNRGPLDGSCEEPMPLPNPMVGFNLPDHWTRPVDRSLPTQAIGPPYFYYENVALAPKGVWTTISRFLYDIQPEFVDSKYFCAAARKRGYIHNLPLERRSPLLPLPPKTIFEAFPRTKRWWPSWDPRRQFNCLQTCTSSAKLLERIRVTLANSSDPPPPLVQKFVLEECRKWNLAWVGLNKVAPLEPDEMEFLLGFPKDHTRGISRTERYRSLGNSFQVDTVAYHLSVLKDRYPQGMNVLSLFTGIGGAEVALHRLGIRMNTVVSVEKSEVNRTILKSWWDQTQTGTLIEINDVQTLTADRIEAYIRRIGGFDLVIGGSPCNNLAGSNRHHRDGLEGEHSSLFYHYFRILDSVKSIMERL

SEQ ID NO: 57051 - protein, 331 aa, Zea Mays
MWSHLPVGRPIEFAPRPWFDVVGLRLRPTAAYRWDQVQAPFARHQRAYVEYSNELDALTPSMVSWQPYDEPPLPHIQLSSACTTDEDIYLLRCPLICFYAVEYHLPHRVARQFGLRQEFPVEPFSTSVELHKFDRQKQKKITDFEAHHQVYIDEWDQMHDLLYQSDQSHTNYNFREYISWYVGVTRCKLKGQWTSADYAELESSDDEDTSYDLVTRHGTHVEAAPILDRVGNSMMQSVVDIEHFSKTTSDDRTLAFLSRLSRRLRCAAARCGCRISAVVNIQHTLQHHGDTSLGLGAITVAQGSSRTTRDAFASHKEDEDDIKIPLDKIGP

SEQ ID NO: 57052 - protein, 105 aa, Zea Mays
MPEISHRATDAAEPVNDHEDSMPNAKPLGLGRAGTTIDRDEHKRFVREVHEEVTEARQKASTVRSRRQEQDAARREKLRQAYLKKRLEKLIAEKQASSASDDLPS

SEQ ID NO: 57053 - protein, 574 aa, Zea Mays
MAYFLIISSITVNDVYWSLVDSDVLEGPSRVSLNCPISFRRIKTPIKGRLCKHYQCFDYDNYMEMNSRKPNWRCPYCNTSSSFTDLRIDQKMMKILEETGDDVTDVLVFADGSWKVVPAQDEKSDRHRGDTIQQAGDAVETGSPSRDVIDLINGNDDGDMQMDWASAPEDSKPVLNSQDLSVSDYLTDFPMTAQTEDLNRGDGNNGGSNMASTSRQNLLLPPTSGLGSSSLGTLESILPQNVLHPVITDAVSPSLETSSASGMQHVSQETHCGTVQLQPQIGPVHGSEVRRLPIPRNPRREPIGVQGLTVPPQNPGSSTRLQPNILNCPPPIPLSSPSSSTYQAHQVKNPDSVIASRNSGSGPLPRTPSVAAASLHLQSTARDIRNTSSHLPSRVVGLPAPHLMGARPPPGISVQAGGANAYRTMQQTPTMDPLRHTRMSMNQTALAAAGQTTAAAYVRPTQADIQNHLFPVQQSQAPRSQQVPRTTTPPLQRAPPHLQPPSVPPTVPSTPQAGPSHGLPPELPVDDSWRPTGQMRGSLTGNAYSSAIRHYRGHSEQQQGEPRPPNTSGARRPQ

SEQ ID NO: 57054 - protein, 585 aa, Zea Mays
MDLLDARHRHTPDSSSSPHAASDMGLPLAGAAYQPYVSELLSFSIERLHKEPELLRVDAERVRRQMQEVAVENYGAFIAASEALSFVRAQLESFDGHLEAMIEEIPNLTSGCTEFVESAQQILEERKLNQTLLANHTTLLDLLEIPPLMDTCIRNGNYDEALDLEAFVSKISKLHPDLPVVQGLAAEVKKTVQSLISQLLQKLRSNIQLPECLRIVAHLRRIGVFSESELRLQFLRCREAWLSGILEDLDQRNVYDYLKGMVTCHRVHLFDVVNQYRAIFNNDKSGNDENSEGGLLFSWAMQQVSNHLATLQVMLPSITEGGSLSNILEQCMYCAMGLGLVGLDFRGLLPPIFEDAVLNLFSKNMSMAVENFQVVLDSHRWVPMPSVGFVANGVVDDTSDDVTPPSVLMEHPPLAVFVNGVSAAMNELRPCTPLSLKVILAQEVVKGLHAVSDSLVRYKAMRMLRGNESALFLSLCQAFIEVVHPYCAACFGRCYPNGATLISECQGTLDAVRQLLTIPARSNSSSIERKQSGAIERKQSVESPGTAVTNNELSADGPGLEINDAATTTTPPVEDDVSTHPPASK

SEQ ID NO: 57055 - protein, 926 aa, Zea Mays
MRGFENLDREQLLKAEAKKILHDIVSGKVEEDPSVLLRFLVTSFADLKNWKVYYNVAFPSLVFNSRITLLSLQPASKVLTKEEAASMYTSLQKWRTSSETTVIPFFLVSISSDSSASIRQLKEWKACQGNYQKLLFGFYDHGCRSDCPGWVLRNYVAFLSIRWKIEKAQIFCYREYKGNPDLEQSLIGEASFPSPYGWDNPEFLPDAIGWEGVKPGKGTKEMKPKEIDLQSMNPASQDEEKQLMHLKLMGWRHFPVNIDRLSHVRVLLLGAGTLGCEVARLLMTWGVRKLTVVDSGSVVMSDLAKQSLYIDKDCGVPRVSAIAPHLKERCPAVEVESIQLEIPMPGHPVSSSKMASVLDDCKHLQTLVAANDAIFLLTDTWESRWLPTLLCSSENKIAISALLGHDSYLVMRHGAGPGTSGGTDEVTTQKLSTENALGHQRLGCCFCNDTASLINPISYETLPGLTSVASGKAVELFARMLHHPDEIRAPGDTAGTETEHQLGLLPHQLRGSLPKCDLFVELNNSSVNCTACSVAVLSEYRRRGLDFVMQAINYPAYLKDFTGISDSKRPDTCPKIPPNISVNSDKISDVRCLLLGAGTLGCDVARILMDCGVRKITVVDSGHVVVSNLARQSLYTSDDRGAPKATAILRHLVERCPSVDAQGIKMEIPMPGHPVSPGEAAGVLQDCERLKELVLSHDAIFLLTDTRESRWLPTLLCTNENKIAITAALGYDSYLVMRHGAGPGISCEASSVVTAIDKMSTEDALGRQRLGCYFCNDVIAPVDSVSNRTLDQQCTVTRPGLASIASGRAADLFRRMLHHPDGIHAPGEIAGTGSGHEHGLLPHQMRGSLSQYNILTLLGYSSSNCTACSHAVLYQYRRRGMDFVMQVINEPTYLEDLTGLTELMKSASCSQVEWVDEIDEDDFVEV

SEQ ID NO: 57056 - protein, 717 aa, Zea Mays
MVKMLDILAEYLSLRGFQFQRLDGSTRADLRHQAMEHFNAPGSDDFCFLLSTRAGGLGINLATADTVIIFDSDWNPQNDLQVLPLILFLLQVLDHLVIQKLNAEGRLEKKESKKGGSIFDKNELSAILRFGAEELFKEDKTDEEAKRNLESLDIDEILERAEKVETKGGEGEEGNELLSAFKVANFSSGEDDATFWSRLIQPDPADIIQETLAPRAARNKKSYVEDPQFDKNNNRKRRAVEAQEKPRRRSGRTVETVNSVPLVDGAVAQVREWSFGNIPKKDASRFVRAGTVLDFFGVAVKAYELLARVEELQLLSKRIARYKDPIKQYRIQLPYKKPQWSASCGWTETDDARLMVGIHWYGYGNWEKIRLDPKLGLTTKIAPATLGERETFLPRAPNLDNRASALLQKEYAKFSGNSSKVKGNARQTVNNDSNSGARSMRGRQKDAPDKEDNKPNKDDIQKRKVMMEAEAREEGEISESEAETKYRLDKEEKWLEWCSEVLNEEQETLKRLDRLQNTSVNLPKEKVLSRIRKYLLIIGDKIGEVVRQHSESYRQSRMTMRLWNYVATFSNMSGEQLHDLYLKLSQDQLEGGVGPSHGANFTSIPSSKGGNSNQLHPTRNHRPTRSLQYNSESLHNNESSGSSEAWKRRRRADPDNQFDTQPLYQPPIMTNGNRLQESSSSAGILGWGPVEMRRYGNERPKRGVHPSHFPTGHGPLL

SEQ ID NO: 57057 - protein, 72 aa, Zea Mays
MFRVSAAQLLSGQRFMEPWSHWTWETIYFNSPAFFLVNILCRIHTSSLCWLVALEGTVQDDQECWPLFMPKY

SEQ ID NO: 57058 - protein, 86 aa, Zea Mays
MIRELGTKDRYYIIDINYFPGYGKMPGYERMFTDFLLSLAQSKYKRYASPPRQCTFAGDISISGRLEEVGKSQCVCSKSVAHAGLE

SEQ ID NO: 57059 - protein, 235 aa, Zea Mays
MPYGKIAERKGHQGWMKHEGSYFIFPGGGTMFPDGAEQYIEKLSQYVPMKTGVIRTGLDMGCGVASFGGFLLKENIMTLSFAPRDSHKSQIQFALERGVPAFLLMLGTRRLPFPAQSFDFVHCSRCLIPFTAYNGSYFIEADRLLRHGGYLIISGPPVRWKNQEKEWDELQAMAGALCYKLITVDGNTAIWKKPAEASCLPNQNGFGLDLCSTDYDPDEACGGRDSYRFHSQVAR

SEQ ID NO: 57060 - protein, 1402 aa, Zea Mays
MTRRTGGCAGGFLLPLLLLAASLLDWSLVSLINMVIFFAIRFAVPRRGLYTWRLHIVLWCTIIYSVLAILAQVAFHIIWYIEGKGWSVAHSWWAKLVGLARDQPWESPSVIYFLALQLSAAGLALVEVLGGRLQDSCWLNFSFEVEQIGYHLRVACCLLLPAAQLVVGISHPSWISLPFFVFSCIGLVDWSLTSNFLGLFRWWRLLEIYSVFSILLLYLYQLPMKFPYIALAFADFIGLFKISSKSEWPELSSGISLLVYYFMLSSAKRDIQEMGSLISLENDSLTEDLLPSRNAFLVRQSRSGRRHGNILLRGSVFRTFSINFFTYGFPVLLLALSFWSFNFTSICAFGLLAYVGYILYAFPSLFQMHRLNWSLLVFILLWAASTYVFNVAFTFFNKRFQKDMMIWETVGLWHYSIPGLFLLAQFCLGVFVALCNLVNNSVFLYLTSEGGPSTSDDHLIDEKEDTMVLIVATIAWGLRKLSRAITLTLLFLLVMKRGFIHAVYMCFFLVFLVNHSIDKRLRQILVLFCEVHFSILYILQLDLVSSALERSGSLTMEVLSQLGLSNNATAKDFMEIGSIVCFCAVHSHGFKMLFSLSAVLRHTPCPPVGFTILKAGLNKSVLLSVYSSQNSRDGEDHRNLHEKKIASYLSKIGQKFLLVYRSYGTYVAFLTILLTLYLVTPNYISFGYLFFLLFWIIGRQLVEKTKRRLWFPLKVYATVVFIFTYSLSVSPIFAESVSKFLKLYPDLGFDPEASLLENVWQSLAILVVMQLYSYERRQNSDKNFGVSDASESGLLGFLRRFLIWHSDKILSVCVFYACLSSISLSGLIYLLGLIVFSTLPKVSRIPSKVYLVYTGLLAASEYLFQMVCKPAQMCPHQHFYGLSVFLGLKYYDSGFWGIEYRLRGKVLVIVACTIQYNVFHWLDLMPTSLVHKGKWEEPCQLFISSNPPYSPVRSNEESHSSNRFTSLFSKVQGLIGSSSSSSSSVGPGSIHQKLEYVDNAIEGSDEDKRHSFAKIWGLSKESHKWDKKRVIFLRRERFETQKTTFKCYMKFWIENLFKLRGLEINMIVLLLASFTLLNVVSIFYIMCLVLCILMNRDLIQKLWPLFVFLFASVLILEYVALWNDEITWYHGTNDIEVHCRECWKNSRIFFDYCSKCWLGIIADDPRMLISYYVVFIFSSFKLRSDHFSSFSDSDTYRQMMSQRKNAVVWRDLSLETKSFWTFLDYVRLYAYCHLLDIVLALIAITGTLEYDVLHLGYLGFALVFFRMRLEILKKKNRIFKFLRMYNFGLIVLSLAYQSPYVGQFSSGKCDQIDYLYEIIGLYKYDYGFKITSRSAFVEIVIFLLVSVQSYIFSSSEFDYVSRYLEAEQIGAMVREQEKKALKKTEQLHHLRRSEEHKRQRNM

SEQ ID NO: 57061 - protein, 961 aa, Zea Mays
MADVGSLERMGRELKCPICLSLLTSAVSITCNHIFCNACLTESKKSASCCPVCKVPFHRREIRPAPHMDNLVAVFKSMEAAAGISVVSTQLTPAPKAAECSEYTAGKPRRSNKKKLASKKEKNTVKATANSASCSTAKPSISKNKRIHVTPFPESETPIRPKKIMKSDEQKRKEDKDNTLNSDIPDNPSLSPFFWLKEQEENVGGTAETLSEPLSLDTALCHNVPTFSDIKDSDDEMPNDMTPNSKVEVSELFDSEIFEWSQRPCSPELRSTPLKKQGQSKNTLDQITEVDDGGYMNLGDLFDKLDHESNVTQPANAEEAKKRKLARARNRKNSKLPSRVKLCTKGSDAEHQVKNIPVSIAAKPNQKDINKKKRCTLNGGNKVSGNNTKVVFSSDKYMYTFSPQSGGLDIEAPENQPSERILKKPKNSRSKLHIAGDSAVKTAKNKSEQRVKQTIRCSGGVVDENLRVLSEAENEIESFQLHRLAKGCTQHKPFDDRSKQNMESNIGPNTPSILPGRCQFDEAIHTIPTVKNVSVKNGRAKSIEQPDYPGSIRLCTAHNTALKKCEGKASKLSCAFCQSDDTTQESGEMVHYHNGKQVPAAFDAGAGVVHCHKNCLEWAPDVYFEDDSVFNLANELARSKRIKCACCGIKGAALGCFETSCRKSFHLTCARLIPECRWDNENFVMLCPLHQSSKLPRETSGFKNKSHRKLARKSSSEVNTSQSHDNKWTWPSGSPPKWVLCCSALSAAEKGIVSELAKIAGVPISTSWSPNVTHVIASTNMSGSCKRTLKFLMAILNGKWVISMDWVKTCMELMEPADEMKFEVSTDVHGTADGPRLGRQRVINKQPKLFDGIQFYLHGDYTKSYRGYLQDLVVAAGGTVLQRKPVSRNHQKLLDESSLILIVYSIENQDKAKPGSSDGMDTGRSQADAQALACASGGKAVSSAWIIDSIAACNLRPSMLP

SEQ ID NO: 57062 - protein, 255 aa, Zea Mays
MARGGLARLLATLILFLLLATPLAAGPSLAESEADLARGTSEAAPDAQQHLLAAPAPPDAQQHLLPRPLVIELPSARAGAELDADADADAVVTVDVRCASWRLAAEANNLAPWAAVPPECAPHVRDYVTGSAYRSDLDLVARESAAYARAAAPAGAADGRDAWVFDVDETLLSNLPYYAEHGYGAELFDHHKFDEWVERGEAAAIPSSLKLYNEVRGLGFKTFLLTGRSEAHRGVTVENLNKQGFHDWEKLILSR

SEQ ID NO: 57063 - protein, 1185 aa, Zea Mays
MDDVLTEYKEAMHKLLFVLEMLDPFIDPSTSAMEDTVIFDGISAIYLEKQSSVYDIALNIIHTAVKRAAVLPSLELEWRRGAIAPSVILSILDPHMPLPPDIDLCKSSVHEIDKVPLAVLDNHAPQPCNPENIAGRDASETTIRPENFEQCSFLFAPEELNQSELTSLYTLKGKGHDVITQTSLNHDIPEGRSKEKLSSDPFLLDNVVAADYFDSQADYQQLENYQDCELRAQEFHRIALNLCMQQEPTLEGHNAGIDALLLAAECYVNPFFLLGFQSNLEPLDKIERIHSELMQGNASSVSKNLHLKDFNKKTIYNLENKRDRSVIDLLLQAARFDFEYHGKIPEGELYPNIAEDGKRSVEISPEALQFADAVTLVRKNQAMLCHFIMKQFQRKGHLGSEILLQSLLFLLHSATDLFCPPENVVDIILKSAESLNDQLTCLYSFFSAGNKKLDRIKIHGLRRRWMLLQKLVLASSGSDSTRELARNKRDGFHFRSLVPPSTWIQKISDFSMFSSPLPRFFGWMAVSCYAKEYLNEKLFLASDFSQLTSLLSIYMDELCLMDGVAIPKVRSAKGEQFSCTDLFLKKETTLSDQPSMTEQFKILLPELHFFFPSMGKLFNAFGESILEAVGLQLKCLPNSAIPDVLCWFSELCLWPYLEHIKEHLVVANGVSYIRGSIAANAKSVVFYLLESIVTEHLEAVIPEMPRIVHILVSLCRASYTDVAFLKSVLCLIKPLISYFLRKGTNETKVLGHIKEGSNFELLCFEELFEIVRCGKDSVDTTEDNIQAPLVIFILGSMFLDFSFERRIEMLGSLLVWIDCISSDPPSLLCNYLQGFQTLLDGFEAVLIQNIELLGVGILSATNSSIESSDSLGIDGTMLLEKKAQDNEEQTLMKSVTYCENDGNHKGLRNLHPNSIIEFCGTLEKFILHLTSYIEDSWKWHHQLASRISLSMAKCLLFAKFLKSIAQEDTISSSSEQDVAVKISCELAQKHWQSALEGLGDTILINQETQFWQVASAMLDYIMGIPNVLAWGNVLNTTCSAVKHFCSHAPRLSWRLQTDKWLSLLVSGGIEGFKNSEICLIDLFCTMLNHSEPEQRFVAVQQLGRIINSTSSTEADLKYPNYDQNFLISVSTVTSLLHLQSFLSSSNGILTGLGQLSGVIEEGYFTRMSLLLFSKEVLDIWRKISA

SEQ ID NO: 57064 - protein, 1114 aa, Zea Mays
MVSLCYFCPGLTTRSRMPVKRYKKILAEIFPKTQDEEPNERRIGKLCEYASKNPLRVPKITVYLEQHIYRDLRSEQYGFAKVVMLIYRRLSVSCKEQMPLFASSLLSIVHTLLDQKRQDDLCIVGCETLFDFAVNQVDGTYQFNLEGLVPRLCEIAQEVGEDERASALRAAALQSLSAMVWFMGELSHISSEFDNVVQVVLENYKPQKMQNDDQGTNDADNQLVQEDQKAEHPPSPFIITPAPSWESIVNVKGGVNLPEEDARDPKFWSRICVHNMAKLSREATTFRRILECLFRYFGNNSSWLSENGLALCVLLDMQLLVESSGQNMHLMLSLLIKHIEHKTMLKQPDMQLSIVEVAATLAEQSSAIASPTTMGAISDLVRHLKRTFHITLGSKDTELVKWNEKFRKGIDECLVQLSKKVSDAGPVLDMMAVMLENIASTPVVARSTAAAVYRTAQIIASVPNLQYQNKVFPEALFHQLLLTMIHPDHEARVAAHRIFAIVLVPSSVSPSIQASPSSRPKKHDMQRTLSRAVSVFSSSAAIFDKMKKDKNSENSQGESKDNSMHSVGEGTGQSKSQNLHVSQSRRSMKAPNFSMKRGPSMAMRAPSVAIRAPSISLRGPSMSLRASSMSVKEDQSSSNKSDEETESVLVKLSARQITLLLSSIWAQSTSPENTPVNYEAIAHTYSLLLLFSGSKASTFEALTQSFQVAFSLRSYSLTEADSLQPSRRRSLFTLSTAMIIFSSRAYNVLPLIPICKQMINDRAADPFLHLVDESRLTAVKDSSNDPSKIYGSPEDNNNALKSLSEIELSESQSRECIVSTIMNNIANMLDAELHNVRSQLLSDFTPDDMCPTSTQFFEVHADNPSSGSYETGHHQEGLLIDLGNDHDAFGEASESAEASASSIPASDLLSIDQLLETVGAEPAPQAGVVSADIGFKDMTSHCEALTIGKQQKMSAFMSFQQSVQAAGLPSSQPNQMELDLSQDPQLPQTGAHSTNPFTDDSLQGYPQYTKGPNGDNAQPGQDFQQQSLKLPAASPYDNFLRAAGYSHELSIPQEIKEESLLAVMGHHEDVIAKLAAKLTGDSNDCSGFVVFPPSVLGFWHERRLLQEYATSPPY

SEQ ID NO: 57065 - protein, 151 aa, Zea Mays
MFATLEKIAQSDPKTADIVLIENYAAFQNSLYDLANVVPTLAKFYHQASESYELACTRHISSLIYLQFERLFQFNRKVDELTYTIAAEEIPFQLGLSKTDLRRVLKSSLSGEVAKDTDLRRVVSFAVGQVQEGVFGQIRELCSDGNTDIWE

SEQ ID NO: 57066 - protein, 838 aa, Zea Mays
MAEGSSSHRRSAFSPGLAVLLSGDEAKISSQKSHLVSYHDEIGHQAVERTIEHIFDLPHKSVVRPPGPVDTGFVHSVVRNQARKFDLDWENCIRGYHRSVFIVDKGAGQRKVVLDDSSICGSFRNVRGPSLVESSAPFSSARANACVWKGKWMYEVTLETSGVQQLGWATLSCPFTDQKGVGDADDSYSFDGRRVTKWNNDPKPYGQPWAVGDVIGCCINLDAGEISFYRNGTSLGVAFDGIRSVEPKKGYYAAVSLSEGERCHLNFGSHPFRYPVDGFDPLEAPPRSWSFVTYLLRCLFRLLEVHNLEKSESAYFEKLRRVKKFAPLQELFGPISEGICAEIFSAIEASQGCLEYIAWGSLITLLLDVFRTREPHDFSCLDQVLDLFLRFPGCTSLFQELIVALSCMCKVAPLVLTECPYSGSYPFLALVCHLLRHKDVMCLWWKAEDFVFSFEGFLTRKIPNKQDLQCLVPSVWWPGSSEDEVSMTLTMTTLSDAIKKIEEMHRELCSLVICFIPPMSTPQPPGSVFRSFVQSLVLKARGGDHRMVVNGTFNNTVLVSLYTVILHLLSEGFSMDSAGSASSSKANFGNGVGFLHKGGKRKFPTQLFFRNDAYHSVIPRIGGPPSILMHHQFDAVENEVQWDEGCMNDEETRVTHTTAQKPCCCSVTDVAVGLRYKETAKYVPSTSKGSCKPMPERSPHVAAECNGRGLSDEIEDKPSTSAQSEIEYGYQSLHSLENMPMATQSSSETLKEEELLDVMLLLYHLGISPNFRQAFYFMSQQSQSISLLEETDRQIREKSCSEQVRRLKEARNSYHEDLVDCVRHCVCARRISAMIVFF

SEQ ID NO: 57067 - protein, 133 aa, Zea Mays
MIFRGLGLEYDMSGLTGNTMDSHRLITHAGHQGYDKQNALVEELFLNYHCQGKYIGDKQVLLDAARKVGIEGAEELLEDPTKGVHEVQEELKKYSSDISGVPHFVINNKYQLSGGQPPNEFMRAFEMAAKDGA

SEQ ID NO: 57068 - protein, 62 aa, Zea Mays
MLFHLGSKLLINELPSILDGSAKDKAQPQDDSKATLAPKLNSEESWLSFDEEAKVLHNKVSI

SEQ ID NO: 57069 - protein, 255 aa, Zea Mays
MLVHWARTEGWLVFYVPQGKDWTHGGFFYRNTYSDFFDTPVQAANILQNFLKYNETRLQQLPCQIFERIPLGEGAGVGMMKGVDTMEMPEGSTLYDLIQTGITQTHASVGVMVRLRKELSLVKDVPVLFAIDQYNSWFTFSDFQEPVTVRSCRSIHAKELTMVNAYRSMLHNDMMVGAFSHSTAVGKLRQELPDVPSDARLIFPRYTLDEAETACHYYMRQKIIRRENFSEEKWKKIYYLSNGNGAEMRWLAAFV

SEQ ID NO: 57070 - protein, 1080 aa, Zea Mays
MTTSPPPAEQEQQEEEEVLVPHGPHQELPNGAQPMEVVPAEPAATVENQQIEDPPISRFTWTIENLSRVSTKKLYSEIFVVGGYKWRILIFPRGNNVEFLSMYLDVADSGVLPYGWTRYAQFSLSVVNQIHNKFTIRKETQHQFSARESDWGFTSFMPLGELYNPSRGYLVNDTCIVEAEVAVCKVVEYWSYDSKKETGYVGLKNQGATCYMNSLLQTLYHIPYFRKIQLTTDISCQAVYHMPTTENDMPSGSIPLALQSLFYKLQYNDSSVSTKELTKSFGWDMHDSFMQHDVQELNRVLSEKLEDKMKGTVVEGTIQQLFEGHHMNYIEYLQLDVKGCQDVYASFDKYVEVERLEGDNKYHADKHGLQINDRYEFPLQLDLDRDNGKYLSPDADRNVRNLYTLHSVLVHSGGVHGGHYYAFIRPTLSDQWFKFDDERVTKEDAKRALEEQYGGEEELPQTNPGLNNTPFKFTKYSNAYMLVYIRESDKDKIICNVDEKDIAEHLRIRLENDREEKERRKKEKAEAHLYTIIKVARDDDLKAQIGKDIYFDLVDHDKVPSFRIQKQMTFAQFKEEVAKEFGIPTQFQRFWLWAKRQNHTYRPNRPLCPQDEAHTVGQLKELVNKAHNAELKLFLEVELGLDLKPLPLPDKTREDIFLFFKLYEPEKEQLRYVGRLFVKASGRPQDILLKLRMLAGFSQDDDIELYEEIKFEPNVMCEYIDNRLLFRSCQLEDGDIICFQKPSKPDSADRYRFPDVPSFLTYIRNRQVVHFRSLEKPKDDEFCLEMSKIFTYDQVVEKVAEKLGVDDPSKIRLTSHNCYSQQPKPQPIKYRGVERLLDMLIHYNQTSDILYYEVLDIPLPELQALKTLKVTYHHATKDEVSVHSIRLPKNSTVGDVLNDIKTKVELSHTNAELRLLEVFYHKIYKVFAPNEKIENINDQYWTLRAEEVPEEEKNLGPFDRLIHVYHFTKDTQNQTQVQNFGEPFFMVIREDETLSSIKERIQKKLKVPDEDFSKWKFAYISLGRPDYFEDSDTVALKFQRNMYGAWEQYLGLEHPDTAPRKAHTANQNRHSFERPVKIYN

SEQ ID NO: 57071 - protein, 70 aa, Zea Mays
MTIAMPSSVKSPLTKFGIRPRSAVFLVRLSFFFSPIMSLGFTEIGQGYCIQNTAPEDVGGFQRIAILAYS

SEQ ID NO: 57072 - protein, 744 aa, Zea Mays
MLRVSASRDTYTLTVKIGKKDNSTENFKRACKILTADSEPVHIWDFSGRTTYIVMTELNRSPHDSKSADQEMPLQIHIYDLSEPMVNGSDGKRDELALTLGGSSSSNGGSMNMDLDSSSGSSKQVGSGLTGLDNLGNTCFMNSAVQCLAHTSKLVDYFLGDFHKEVNPHNPLGMKGELAYAFGDLLRKLWAIDRTPVAPRQFKARLGRFAPQFSGFNQHDSQELLAFLLDGLHEDLNRVKCKPYSEAKDSDGRPDEEVADEYWGNHLARNDSIIVDICQGQYKSTLVCPICKKVSVTFDPFMYLSLPLPSTTMRTMTITVFSTDGTSGPSPYTISVPKSGDTRTLINALSSACSLRDDERLLVAEVYNNSLIRYLDEPSEVISLIRDGDRLVAYRLPKDNEDAPIVVFRNQRMESSLSSFGRKSWKTFGTPLVSSLPDTVTGSNIYNLFLKVMTPFRVSRGDAAVADQTLGESSLVDETEDINMSSDASEHTSINNNSVEDETGTEDVMQFFLTNERIPDQRMKIEMDLSITVNDPHKRLHVAVCWEDSGLDQYNFSSLNSLPEVYKAVLFSRRPQDTCSLYACLEAFIKEEPLGPEDMWYCPGCKEHRQASKKLDLWRLPEILIIHLKRFSYSRYTKNKLETFVDFPIHDLDLSKYIGHRCQDVPHNYRLYATSNHYGSLGGGHYTAYVYHEGKKGWYDFDDRHVGPITEDSIKTSAAYVLFYRRIQEDSLDTVTDIDSDIPT

SEQ ID NO: 57073 - protein, 121 aa, Zea Mays
MFSQVEHFSEDHVLHNDQEKELIKISEAKIREWSRGKEGNIRSLLSTLQYVLWPESGWKPVPLVDIIEGAAVKKAYQKALLCLHPDKLQQRGAAMHQKCIAEKVFDILQEAWKEFNSVTFG

SEQ ID NO: 57074 - protein, 235 aa, Zea Mays
MKFGKRLKKQVEESLPDWRDKFLAYKRLKRLVRLVPASSPSRRGGRAADAAFLRLLHAEVDRFNAFFLEREEDFVIRHRELKETAEDARKAIVDLHGEMVLLLNYSAINYTGLAKILKKYDKRTGRLLRLPFIGKVLRQPFFATELISRLVRDCEATMEAVFEASTGHARSSAGTAPVASARQGIFRNTVAALVTMGELRSGSSTYGHFSLPPMAPPESDLLRRVCVQVAGQVSI

SEQ ID NO: 57075 - protein, 1146 aa, Zea Mays
MDPDDESAAQRKAADLHLPRVTEPASAPARTFCAAQRVLSYGDGPVASASAQRCASFPQRHGHGHGHGEAALAPAASFAAWVDGGPTPPSAVAAALERAMSQYDGAGDALPEFVGAGGGEGIFRVPLRAAVHPARPPPLEVRPHPLRETQVGAFLRTLVCDPRRRKLWAGAESGVRVWCLDEVFRGWWPGAGPRRRGDEEAAPFRDSVPVPPALCAAVDSANGLVWTGHREGRIRAWRVDHAAPAGGDPTGSAAMFKEAFAWQAFSRTPVLAIVVTPYGEIWSGSEGGAIKAWPWEALAKCLSSTPEEIHEAASLVEKSYIDLRNHATVGNMCSLPTADVKHMLADHCRLKVWSVTSMTFALWDAKTRELLKVFGIDGQVDLARPEAPVMPEQFIEEEIKAKPTKKEKLQGSLSFFRKSRNALMGAADAVRRVATKGTFVEDNRRTEAVAQAMNGTIWSGCTDGSIIVWDGNGNRLQEFHYHSSSVQCIEALGERIWVGYASGTIQVMDVEGNLQAGWIGHSCPVISMAVGDSYIFSLAHHGGIRGWSLSSPSPLDDILRYELASRELSYTRLENLKILVGTWNVAQEKACPEALKSWLGGAFFDVGLVVVGLQEVEMGAGVLAMAAAKESVGLEGSTNGQWWIDSIGKTLDEGISFHRVGSRQLAGLLIAAWARNDLKPHVGDVDAAAVPCGFGRAIGNKGGVGLRIRVFDRRICFVNNHFAAHQENVSRRNADFDHIYRTMTFNKPHGSTASATSVQLHKAVSANENQADEDRPELAEADMVVFLGDFNYRLDGITYDEARDMVSQRSFDWLRERDQLRAEMEAGNVFQGMREGRIKFPPTYKFQRHQMGLSGYDSGEKKRIPAWCDRILYRDSRSVSMPECSLECPVVAAITAYEACMDVTDSDHKPVRCTFSVDIARVDELIRRQEYGKIVESNKRVHSLLRELHFVPDTIVSTNNIILENQEDVILRITNNCETSKAAFEILCEGQSIRKQDGTKSEPVIRASFGFPLWLEVQPSSGLIGPGDTTEVAVHHEDFFTQEEFVDGVQQSWWCETTRDIEVVLSVNVTGVASTEAATHRITVRHCCPAPPAPPSANPRGPITDSPSDAVPGPKSSQSNHLLRSDFANFGSSEVRDLCGVRKRNL

SEQ ID NO: 57076 - protein, 551 aa, Zea Mays
MEAANKPISSICFKPGNEDFVYISAGNEILSFDVRMGTQSKPLETYNYNRDEINQIAVSSKGFLAAADDSGDVKIVNTIQKCLYKRLREAHTSICSSVQFIPWRPWTAITGGLDSKLAAWDFSKGRTLFSIDYGSPELQNGSSSGSAGQCFNPAFVHSVAVSEEGILGGLYKVCAVARGDGAVDVVDLEYELAPAKSKGPPRAAILTTRSKGAELGDGSCNQSRAKRIHLDYTMGGHTAAVSCVAFSAFGEKGKFLISGGNDASVKLWDWSKGFYSETNSKVDLVLDIDVKKKSETLSGCKLLLYPLEQEEEEGSSKLASLPAIAKKVLSYEEGIYAKLSRKWIEEGLRTVSIGRQEPGGFAAVLWRRREMGGLLLPHHRTFPNSLQASIPGPLSLHKGDRKNLHYFAPDVHLFCSLRQGFPRSSWSAVIRSEASGNAVASPGTVIKRSKEELITFFRDIQTSIAECSRKASKRTRKQPPDLFQEVRRREEQSHGGGDSGTDDVSEGPRKVKSLEDMNVAGLRELARARRMRGYSKLKKGELIDRLRGATT

SEQ ID NO: 57077 - protein, 79 aa, Zea Mays
MGWLSGTDADESATYTTQRSRAPAPTPDMRTPCCVDPARSDVLSSVESRKGRKKKEAVGSFSHFPSDIIMCGPSQRVTM

SEQ ID NO: 57078 - protein, 134 aa, Zea Mays
MGARIRRPRPGDQLLAGPIAGDENPIGMPTPFLIFLQPSAQTLTEVIWLHVFRSDVMLSFYTHVIFLQPSTQTQIEAICPIGDGVRKSGLWQKTQEIICGLGPNPSSDLLSRLVYGCTKITVIGMCCTTMSLLS

SEQ ID NO: 57079 - protein, 437 aa, Zea Mays
MDTSHHYHPWLNFSLAHHCDLEEEERGAAAELAAIAGAAPPPKLEDFLGGGVATGGPEQRKAVDSFGQRTSIYRGVTRHRWTGRYEAHLWDNSCRREGQSRKGRQVYLGGYDKEEKAARAYDLAALKYWGSSTTTNFPVAEYEKEVEEMKNMTRQEFVASLRRKSSGFSRGASIYRGVTRHHQHGRWQARIGRVAGNKDLYLGTFSTEEEAAEAYDIAAIKFRGLNAVTNFEISRYNVETIMSSNLPVASMSSSAAAAAGGRSSKALESPPSGSLDGGGGMPVVEASTAPPLFIPVKYDQQQQEYLSMLALQQHHQQQQAGNLLQGPLVGFGGLYSSGVNLDFANSHGTAAPSSMAHHCYANGTASASHEHQHQMQQGGENETQPQPQQSSSSCSSLPFATPVAFNGSYESSITAAGPFGYSYPNVAAFQTPIYGME

SEQ ID NO: 57080 - protein, 1863 aa, Zea Mays
MAPPRVTRKKGKGAGGKTDLRPDRKQFKRHHKEDAAAEQGDGNGERQQSAAPGSAALLAAASDEADFPRGGHSLLSKDEMAEARAEAEQDFEREAKKGKGKRKRSGGESSGFGVDDDLGILFGGATTGKLPRFANRITVKNISPNMKLWGVVIEVNQKDIVLSLPGGIRGFVRSEDVCDIALQENRKDSGNNLCAEVVHVGQLVPCIVLRVDDDSREGKVNKRVWLSLRLSLLYKGLALDGLQEGMVLTAQVKSIEDHGYILHFGVSSFSGFMQKDDKDVKTERRQLMQCVVKAIDKTRAIVHLSSDEDLLSKSTIKDLKGLSIDHLIPGMMVNARVHSFLENGLMLSFLTYFSGTVDIFNLLNSFPSGNWKDDYSKNKKVNARILFVDPSTRAVGLTLNKHLLHLEVPPINLKAGDIYDKSKVLRVDKKAGLFLEIPSPTPSPGFISIRDVSDKDAKNLEKFKEGSSLRVRILGVRNLEGVAIGTIKDSAFEGSVFTHDDVKPGMLVRAKVATVEPFGAIVQFSSGVKALCPLPHMSELEHVVKPPKKFKVGAELLFRVLGCKSKRVTVTYKKSLVKSKLDVLSSYADAKIGLVTHGWITHIEKHGCFVKFYNGVQGFVSRSDLGLEAGTEAENVYHVGQVVKCRIINVIPASRKLNVSFVISHNRIAPIDTPKLGSIVSGVVERLTPAAVVVSVNGFSKGTILNEHLADHHGQAAQLKNVLKPGHEFNQLLVLDTEGQNLVLSAKHSLINCANDIPSEISQMHPGVVVHGYICNIIEAGCFVRFLGHLTGFSPKDKAVDRWIEKLSDAFYVGQSVRSHILSVNAETARVKLALQQSMCSSMDSSFIQGYFLLDQKIAALKYSSNDWARHFGIGSLVEAEVGAIEEYGIILNFKDHLDTVGLIEHHQLGGSSVEVGSSVKGLVLDLSDGVVNLSVKPELIDSVRIVGKKKKRQRAVVADLELHEEVNAVVEIIKDSYMVLSIPEYNYAIGFSPLMDYNSQLLPHHHYDNGQRITVVVGNIPSSDSSGRLILLPKASAQYSSLSDSKRAKKKSGYKIGSLVEAEIIDIKPLELLLKFGGNLHGRIHITEILEEDSAEHPFSELRIGQKLTARIVSEAEPSGKSGKKFKWELSIRPCIVNGEFAQKEQNHTTNGIVRAYVVKVDKEWVWLTVSRNVMAHLFLLDSSSEPSELKEFQQRFSVGQAVKGRVISVNQEKRLLRLKALDNQCTQPNIDETQEPKSSVFGQTKQGDIIGGRVQKILPGVGGLVVQIGPHLHGRVHYTEIVDSWVSEPLSGFHEGQFVKCKVLSVSRSSEGSLRVDLSLRSSNLIRDSNNSRLDDLETCTSRIEKIKDLLPGTEIKGYVKNVNSKGCFIMLSRMVDARITLSNLSDEYVENPQKDFPVGMLVHGRILSTDPSSGRVEASLRKTTGSKLEKLDDISYSDLHVGDIVDGQVKRVESFGLFVTIRRSELVGLCHVSELSDEPVVDINSCYKAGDMVKAKILKIDETRHRVSLGMKKSYFDSDLTADTNDDESALMDISVAPQMVEYHNRNLVHRKAEPRASVLPLQVSLDESEGSDLEDNISNTCLEIANGTEANAKKSDKQLKKEARKQRELEISAMEERALQEDIPQTPDDFEKLVRSSPNSSFIWIKYMATLLDLADVEKARAVAERALKTIIPREEEEKLNVWVAYFNLENEYGSPREDAVKKVFQRALQYCDPKKLHLALLAMYERTEQYELADELLDRMTKRFKTSCKIWLCRIQFALKQGKDVEYIKAIVNRALLSLPHRKRIKFLSQTAILEFKCGVPEEGRSRFELILREYPKRTDLWSVYLDQEIRLGDVEVIRALFERVTCLTLPPKKMQKY

SEQ ID NO: 57081 - protein, 397 aa, Zea Mays
MEPERGLIAYEGPPPDSTDLLSSAWCSSAIQVLDTGGHKECSMALVEHPVMALGNDRNDVLAKSDRSLVVDNSSFSTAQWKYDDLKSWIWLQKAIHPELDYDLCLKKKWLPRKMTAWNGISLKKWVKERKQKRKEEARLQRAEVHAAVSVAGVAAALAAIAAENAAPRRAPGMRETALASAAALVAAQCARVAEAAGASRDQVAAAVDAARASTDDSSVITLTAAAATSLRGAATLRGRRSGSGGHGQNERAEHAGPALSQDDLDFDFNHARSRAALAKGDEMFVAMPDGKWKLHTVSAASNKRGEIVLRIKKTNLVMAFSHAKESVIHDVQPCSPEKPSPHEGATYPVEVSTNKGKVELRTDDYGVYKRWVATLSHMLVMSTAVSVSTRHEPARRD

SEQ ID NO: 57082 - protein, 147 aa, Zea Mays
MAPNRVLSTRKHGHGEISSPGDRFAPAQRQSPTRDTADTFHYHQRFTNSRFWRPNDGGEAPAWWRIGRARTALSQRATANAAPPVAMHTPSGPQRTIPHGTQWQHRFLPPIRLLGARKGEKRHWRYWRSTADRRRAQSSGRVRQGRA

SEQ ID NO: 57083 - protein, 628 aa, Zea Mays
MDLDPEGIFRDDSDEDEDSVQEREANKEMVVYLVDASPKMFTPATTQDNEKQETHFHTIVNCITESLKTQIIGRSYDEVAICFFNTKEKKNLQDSAGVYVYNVGDREQLDRPTAKLIKDFSLIEDSFMSTIGSRYGITAGSRENTLYNALWVAQALLRKGSVKTVSKRILIFTNEDDPFGTITGAVKTDMIRTTLQRAKDAQDLGLSIELLPLSPPDDQFNMSLFYADLIGLDGDEMTEYLPSAGDKLEDMTNQLRKRIMKKRRIKTLSFAITNDVCIEVNTYALVRPTTTGTITWLDSLSNLPLKVERSFICNDTGALLQDAQTRFQMYNDTIVKFSVRELSEVKRVASHHLRLIGFKPLDCLKDYHNLRPSTFIYPSDERIFGSTCVFVALHSSMLRLGRFALAFYGNPTRPQLIALVAQEEVTSSGRQFEPPGMHMIYLPYSDDIRYPEEVHVTSDDAPRATDEQIKKASNIFKRIDLINFSACQFANPALQRHYGILEALALGEDEMPDIKDETLPDEEGLSKPGVANAIEEFKTSVYGENYDQEEAEAAAGKASRGNASKKRKEVTDAAAQISAAYDWAELADNGKLKEMTTVELRSYLTAHDLPVSGKKDVLISRILTHLGK

SEQ ID NO: 57084 - protein, 95 aa, Zea Mays
MSFAAFSWPFRRRGGAGSSGASKSAATAEEDEELGVTPQLLDFLRTLSPDAFKAAALQLQGGSTEAAAGDLTSWQERHAVLVLSKAKPELHLCAS

SEQ ID NO: 57085 - protein, 347 aa, Zea Mays
MGGELLLALLLVSAAAAPQVLGVGNGDNHMRIIQEDIIETVNNHPSAGWTASRNPYFSNYTIAQFKHILGVKPAPQNALSNVPVKTYSRSLELPKEFDARSAWSRCSTIGNILDQGHCGSCWAFGAVECLQDRFCIHLNMSILLSVNDLLACCGFMCGDGCDGGYPIEAWRYFVQNGVVTDECDPYFDPVGCKHPGCEPAYPTPKCEKKCKEQNQVWQEKKHFSIDAYRINSDPHDIMAEVYKNGPVEVAFTVYEDFAHYKSGVYKHITGGIMGGHAVKLIGWGTSDAGEDYWLLANQWNRGWGDDGYFKIIRGKNECGIEEGVVAGMPSTKNMVPNFGGAVGRAIV

SEQ ID NO: 57086 - protein, 91 aa, Zea Mays
MALGAEPEKGPGVTRVLIRFPTGERKERRFHSSATVTSLYDYVDSLDCMKAENYSLVSNFPRVTYGPEKHSLTLEEAGLHPQASLFIEIEQ

SEQ ID NO: 57087 - protein, 368 aa, Zea Mays
MYLDSPAGVGMSYSLNRSDYVTGDLKTAADAHKFLSKWFELYPEFQLNPFYISGESYAGVYIPTITDEVVKGIERGVKPRINFKGYLIGNPLTDVDYDFNSFVPFAHGMGLISTDMYEDVKASCRGTFFGAVDDLCQEKIDRVRWELKDLNKYNILAPCYHHPEIQEVEFSNSSLPRSFRRLGETDRPFPVRKRMSGRSWPLRLALKDGHVPMWPGLSGRSLPCTSDEVATAWLDDEDVRAAIHAKPKSLIGSWELYTARIDFTHDTGTMVSYHKKFTALGYRVLIYSGDHDLCIPYPGTEAWVKSIGYQVTDRWRPWYFGDQVAGYTEGYGHNITFLTIKGAGHAVPEYKPKEALAFYSRWLAGEKF

SEQ ID NO: 57088 - protein, 329 aa, Zea Mays
MNQLGLVVREDAVGNIFGRWEGSEPGLGAVATGSHVDAIPFSGKFDGVVGVLGALEAISLLKRSAFLPKRSLEVIMFTSEEPTRFGISCLGSRLMAGIEELAQSLRKVVDNQNVSFLDAAESAGYKLNLEDLHSVFLKTDKYSAFIELHIEQGPILEKEGIPIGIVTAIAAPASLKVDFEGNGGHAGAVLMPARNDAGLAAAELALAVEKHVLESGSIDTVGTVGILQLHPGAINSIPSKSHLEIDVRDIDEKRRNDVIEKIRQSAAHISKNRGVELSEFKIINQDPPALSDKSVVDAMEFAAKQLNLAYKKMISRAYHDSLFMARGAF

SEQ ID NO: 57089 - protein, 106 aa, Zea Mays
MWLAGTIGYARERCSPWIKDRADASTVHGGIRSPTRNSSPRSSRICANRPLSLPPQYRNVLRSPAGTVSSAIGGYRANGTLCTRFAAALALVSETGRPVMPRAAGR

SEQ ID NO: 57090 - protein, 166 aa, Zea Mays
MMGVSGKMLVALSVRLCVLVCVGKTSFFFFFFAIRRLRDLLTTKLPPDTFPVKVAIPVVPTIRVLVTFTKFEELQPLEEFGTPPSSPDKSKSPAVQPPSSSWIQWIKAPYYRQMNLSTAPGPSSRVEDIHHQDPFAIPSDYVWTTPEEKKKKTQENKNRSKKGRNG

SEQ ID NO: 57091 - protein, 794 aa, Zea Mays
MRRAEILDNAARHIQGRFRTFITRKEFVKTREASISIQAYCRGCLARKMFANRRETAAAVIVQKYVRRWLLRRAHLQACLAALLIQSYIRGFIARRYFSVIREHKAATVIQSTWRRRKFVILFQNYRQATVAIQCSWRQKLARKELRKLKMAANEAGALREAKNKLEKKMDDLALRLTLERRLRASSEESKSVEILKRDKIIESLSAECAAAKSAAQNEHAKKLLLQKQLDDSLREITMLQSKKIMSAEAAEENSNLKNLVESLSTKNSILENELIVTRKSSDDTMEKLKEVEGKCNHLQQNLDKLQEKLTNLENENHVLRQKAFNMPTMNNLSVAPKTLSEKFSASIGLPNSEPKHIYESPTPTKYLASLPQTLSTSRRSRLPVERHEQNHEILLRCIKENLGYKDGKPVAACIIYKCLLHWRAFESERTAIFDHVIEAINDVLKGNEADGRLPYWLSNTSALLCLLQRNLRSNGLFTTPSRRSGGALGKIAQTLRSPSKFIGRSDTLPHVDARYPAILFKQQLTACVEKIFGQLRDNLKKEISPLLNVCIQAPKSTRGQSGKASKSSGVGAHPASNSNWDNIVNFLDLLMDTLRENYVPSFFIRKLITQLFSFINIQLFNSLLLRRECCTFSNGEYVKAGLSLLEKWITDVTDEFAGTSWHELNYIRQAVGFLVIHQKRKKTLEEIKQDLCPSLSVRQIYRICSMYWDDKYGTQGISTEVVAAMREMVNKDTQNLVSNSFLLDDDLSIPFSTEDLSMAIPSIDYADVDLPESLQHYTSVQFLLRQQDPQPAQ

SEQ ID NO: 57092 - protein, 1117 aa, Zea Mays
MVTPPTVEQEDEEMLVPRQEAVDTDAAQPMEGTVVAQTEVVSTAESQPVEDPQTSRFTWTIENFTRFSEKKHYLEVFVVGGFKWSVLIFPKGNNVDHFSMYLDVADSTSLPYGWSRYAQFSLAVVNQIQPEFTIRKETQHQFNARESDWGFTSFMPLSELYDASRGYLVNDTVVVEAEVAVRRIVDYWTYDSKKETGYVGLKNQGATCYMNSLLQTLYHIPYFRKAVYHMPTTENDIPSGSIPLALQSLFYKLQYSDSSVATKELTKSFGWDTYDSFMQHDVQELNRVLSEKLEDKMKGTVVEGTIEQLFEGHHINYIECINVEHKSNRKESFYDLQLDVKGCRDIYSSFDKYVEVERLEGDNKYHAENHGLQDAKKGVLFLDFPPVLQLQLKRFEYDYMRDSMVKINDRYEFPLQLDLDRDGGKYIAPNADRSTRNLYTLHSVLVHSGGVHGGHYYAFIRPTLSEQWYKFDDERVTKEDAKKALEEQYGGDEELPQINPGFNNAPFKFTKYSNAYMLVYIRESAKEKIMCTVDEKDIAEHLRVRLKKEQEEKEHKKKEKAEAHLYTIIKVARDEDLKEQIGKGIYFDLVDHEKVHNFRIQKQMPFSCFKEEVAKEYGIPVQFQRFWLWAKRQNHTYRPNRPLTVHEETQSVGQLREISNKAHNVELKLFLEVELGLDLRPLPPPEKGKEDILLFFKFYNPEKEELCFMGRLFVKALGKPSEILAKLNEMAGFPPDQEIELFEEIKFEPNVMCETIDKKLTFHYSQLEDGDIICFQKSPGAEYDAPVRYPDVPSFLEYVHNRQVVHFRSLEKPKDDDFSLELSKLHTYDDVVERVARQLELDDPAKIRLTPHNCYSQQPKPQPVKYRGVVHLSDMLIHYNQTSDILYYEVLDIPLPELQFLKTLKVAFHHPTKDEVVIHSIRLPKNSTIADVIYDLKTKVELSSPNAELRVLEVFYHKIYKIFPLHEKIENINDQYWTLRAEEIPEEEKNIGPNDRLIHVYHFKKDINQTQQIQNFGDPFVLVVHEGETLAEVKKRIQSKLQVSADEFSKWKFAFISMNRPDYLQDSDVVPTGFQRREVYGAWEQYLGIEHADTAPKRVYTVNQNRHAYEKPVKIYN

SEQ ID NO: 57093 - protein, 98 aa, Zea Mays
MASAARAKEGPGKLGATGKAGYVDSSGDKSKRSVVEIKGRFSVTSENVDLAKVQEGPLSSLSRKSPEGSLLRKSASTGDYFVNPKLMCMQPATCAWPA

SEQ ID NO: 57094 - protein, 576 aa, Zea Mays
MLQTPIAMATALSKSAVKSHPRSPTTAQPPPNPGSNAASAGVGAAPPPPPPLSAAAGATPSKNAAMVELKSRVLAALAKLSDRDTHHIAVEELERIIRAPPLTDAVPMLLNALASDSPGFASPARRESLRLLATLCASHPDAAAPHLHKVLAHLARRLKDPASDTSVRDACRDVAGQLAAVYLRPLSASGVAEAGNATVMLFVKPLFEVMGEQSKAVQGGAAACLAKAVEGAGPGPGAIGMFGKLGPRICKLLGGHGVQAKAALLGVMGSLAQVGAISSHNMPQTLQSIRDCLENSDWATRKAAADTLCVFATHSGHLIGDGIAPTISALEACRFDKVRPVRDSMIDAVQLWKKLTGEDATDGRNKDLGDGEGKLDSRRSMQSGGKSECFDDCSPDSPSNMKGSSIAEKAAVLLKKRPTLTDRELNPEFFQKLETRKTDDLAVEVVVPRKTLQSHLRSEDDTEEDDDPVGPVDSNGSAEDEANLTQMRASSNFQNIRDRWASQRGNSNKDAKSRTADVEDRGEPSTKDSTAATMNIPGEGPSVNNKTNWLAIQRQLSHLERQQTSLMNMLQVKLSA

SEQ ID NO: 57095 - protein, 644 aa, Zea Mays
MRHCWSAWLLALCLVSVQLLAPLVCERLLVAAQNLSPPALTPPLVKEVDDVVEHVWISCGLDRGSLEDVRKHFNYNHVFDILRTLSGKDTKDSSPETEDASKALSPEIKNTLLNCLSKHPLVVAAHESAKNLPIDYIKMLFALLRRDVAQGSTGAATTSAPPAAVKSNPSPSLGEPSSTKPDKNPDPPLETTPEEKMVPQTEKTVAKKEDNSNMSITAVIGLSVSAIALLALLCLCNFVCRAKQASSSEVGVDKPPLNQNLSNLSASLKFSKGNSIDVNKLGALPLKSEAGQNGNAKLSSSEISKTEVTPAVYNCLAEPMAASTGYVPGSRPTTPPSMPPPAPAHPKAPPSSTPQAPASLKAPPSSTPQAPAPLKAPHSSTPETPAPPSKPSSVLHSEPSSPSALKAAPPPKDAPQPKAAPPPPPKSTGPPPPAMSGSSNTRPPPLMKKSGNKMDDGANSHEAKTKLKPFFWDKVTANANQSMVWDHLKSGSFQFNEGKMESLFGYNSVEKIGGDGKKDLLSKDIPQFVRILEPKKAQNLAISLRALSVSPEEVCSAVKEGNELPSDLIDTLLKWIPSNEEELRLRLYTGELSQLGPAEQFLKSIIDIPYIFQRLDALLFMSSLPEETSNVKHAFATLGGLPRA

SEQ ID NO: 57096 - protein, 509 aa, Zea Mays
MEDKASNLDAVLKEAVDLENIPIEEVFENLRCSPQGLTTEQAEQRLAIFGPNKLEEKQESKFLKFLGFMWNPLSWVMEAAAIMAIALANGGNKPPDWQDFVGIITLLIINSTISFIEENNAGNAAAALMARLAPKAKVLRNGRWTEEESAILVPGDIISVKLGDIIPADARLLEGDPLKIDQSALTGESLPVTKGPGDGVYSGSTCKQGEIEAVVIATGVHTFFGKAAHLVDSTNQVGHFQKVLTAIGNFCICSIAVGMLVELVVMYAIQHRAYRPGIDNLLVLLIGGIPIAMPTVLSVTMAIGAHRLAQQGAITKRMTAIEEMAGMDVLCSDKTGTLTLNKLTVDKSLVEVFQRGVDQDTVILMAARASRTENQDAIDATIVGMLADPKEARAGVQEIHFLPFNPTDKRTALTYLDGEGRMHRVSKGAPEQILHLAHNKSDIERRVRAVIDKFAERGLRALGVAYQMVGKRVLEDHGSSLGSCLFLTPRAMIVQKLSEGHSILVSMSR

SEQ ID NO: 57097 - protein, 147 aa, Zea Mays
MDRLSMEKLYEWILRQHENGLRLTVADVASHIQHEIQYGGDNASASPRSQYPSQSTAPTMHIPNTSNQQPSPSLFASGNPGLTQSKNSMVFSSALSSPIRRSLQPYHLEQDGDAGYFANGASRDVNPTASNDSSMDMHSDSPAHDSY

SEQ ID NO: 57098 - protein, 55 aa, Zea Mays
MTPVDNGQLAESEGVTGEDPEQQLVGEDKCPLTHLCPIHVIIHSSYLHNSYLRID

SEQ ID NO: 57099 - protein, 849 aa, Zea Mays
MTLSLFTTLPSTPPSVLCHHHQLRSSSFAFSVMEGTTISIEIDGEAICLDSVGDNEQEAAENGEMHQTIYTDENGEQVAFDNQEQGREEDLAGNGEEDRDHNSIIPSREELTEELRNKVAYSEEEAYRLYCDYGHRMGFSVRKGKQYYFTGTKTIRTKDYYCSKEGLKDDEQLTEANFNKPETRTNCKAMVRFRVDSEGQWRVIQIIPEHNHELVRPEEIHLLRSVRTLSVPKSGVLNAMVNAEIQAMHDNLHINEDGTECHSQLSIRSYTLLEPKECEALVGYFKRRTNEQCMFYWDVEVDQEGRMTNFFWRDGKSRVDYDSFRDVVIFDTSYLTNKYNMICAPFIGLNNHRQNVMFGCAFLLDESLTSYEWLFKSFLESVGGRPPETIFTDQNEFISKAIEVVLPGTRHCLCQQLIEKKLMSHLGSINDSGTLHSLFSKCMRECESEAELDETWAMMHHEYNMQEHPWLTDLYQQRHKWCSALHKDAFDGGIESMDRNESLNNVLSNIDDESASLSTFVLELDKLAGSWRKTESLEDIQCNQAAPECTVKHNRILQHAAEVYTHKVYKSIETDFLDGCSATSYQAAQCNETLHKFEFLLENSPNVSVVFLNTSTMELSCTCKKFETMRILCSHALNALVLKNVDRIPERYILNRWTKYARKGTYPFPVDEFAEQDRTEVAFVYRNRAMWFVYDLLTKSKSHHNTRKLILDALENGEKSLESMCDLKRLHMNTLGKEKDGSRVEKRKKKSTKQEKHSRNVKQAVLPQTADPVFVDPPNQDQYFAAEDIASNQSVGRPFFYQGYPMTVVSTSQIQGHTNMHSEPQCASQEYSAYGTVQPPSQFGGGRNF

SEQ ID NO: 57100 - protein, 500 aa, Zea Mays
MQLDWEESPSSVNNLSPFSSVSTPRKRVKSRWEPVVDENVTNKVEQIAKGLIGSNVHSTSDPKNRMGSSWDHRKFLQSSQAPSNKVNQRSAKKQKMGSNLSQIQNGNASSDSEKEHDLTKYYASATALANSPEEKKRREHRSKRFEKSKDSSFKSRNVSANKDAMTNLRARRAILSFRTRTYEGGTLAVEDMDWDALTVKGTCQEIEKRYLRLTEAPDPAKIRPEDVLEKALAMVETSQKNYLYKCDQLKSIRQDLTVQRIQNELTIKVYETHARLAMQAGDLHEFNQCQSQLKRLYAQGIKGCYFEFSAYNLLCVMLHSNNKRDLLSSMASLSKEAKQDAAVKHALAVHASVLSGNYVLFFKLYKKAPNLNSCLMDLYVERMRFEAMKCMSRSYRPTVPVGYVAQILGFMRTDTGCATNGDDGLEECEKWLKAHGIVLSEGNSGELQIDMKASSSTLYMPEPENAVAHGDASLAVDDFLARTDGHLKRCSSDEPTVDTP

SEQ ID NO: 57101 - protein, 475 aa, Zea Mays
MASLSESELTNRGTMWELDQNLDQPMDEEAGRLKNMYREKKFSSALLLRLAFQSLGVVFGDLGTSPLYVFYNIFPRGIGEGEDEDVIGALSLIIYTLTLIPLLKYVFVVLRANDNGQGGTFALYSLLCRHAKINTIPNQHRTDEELTTYSRQTYEENSVAAKIKRWIESHAYKRNILLILVLIGTCTAIGDGILTPAISVLSASGGIKVQNQNMSTDVVVLVAVVILIGLFSMQHYGTDKVGWLFAPIVLLWFILIGSVGAINIHKYDSSVLKAYNPMYIYRFFRRRKNSDVWTSLGGIMLSITGTEALFADLCHFPVLAIQIAFTLIVFPCLLLAYTGQAAYIISNKTHVADAFYRSIPAAIYWPAFIIATAAAIVASQATISATYSIIKQALALGCFPRVKIVHTSKKFLGQIYIPDINWILLVLCIAVTAGFKNQSQIGNAYGTAVVIVMLVTTFLMVPIMLLVWKSHWILV

SEQ ID NO: 57102 - protein, 1037 aa, Zea Mays
MAKPMKYDDEEEISSSAEEEDQSDAAGSVSGEEGDDDDEDAAAPPAEEAEGEGQQEEEVDEEEIEAVTTGAGAEDEEDAGAVTAAEGDDESQSTEDDEPVARDKDDDDETDAVVGKREKARLKELQKMKKHKIQEILDTQNAAIDADMNNKGKGRLKYLLQQTEIFAHFAKGSQSNEKKPRGRGRHASKMTEEEEDEEYLKEEEDALAGAGGTRLVSQPSCIKGKMRDYQLAGLNWLIRLYENGINGILADEMGLGKTLQTISLLGYLHEFRGITGPHMVVAPKSTLGNWMKEIQRFCPILRAVKFLGNPEERNHIRDDLLQPGKFDVCVTSFEMAIKEKSALRRFSWRYIIIDEAHRIKNENSLLSKTMRIYNTNYRLLITGTPLQNNLHELWALLNFLLPEIFSSAETFDEWFQISGENDQQEVVQQLHKVLRPFLLRRLKSDVEKGLPPKKETILKVGMSQMQKQYYRALLQKDLEVINAGGERKRLLNIAMQLRKCCNHPYLFQGAEPGPPYTTGEHLVENAGKMVLLDKLLPKLKERDSRVLIFSQMTRLLDILEDYLMYRGYQYCRIDGNTGGEDRDASIEAFNKPGSEKFVFLLSTRAGGLGINLATADVVVLYDSDWNPQADLQAQDRAHRIGQKKEVQVFRFCTEIMQTKLQYTIEEKVIERAYKKLALDALVIQQGRLAEQKTVNKDDLLQMVRFGAEMVFSSKDSTITDEDIDRIIAKGEETTAELDAKMKKFTEDAIKFKMDDNAELYDFDDEKDENKVDFKKLVSDNWIEPPRRERKRNYSESDYFKQALRQGAPAKPREPRIPRMPHLHDFQFFNNQRLNELYEKEVRYLMQANQKKDTIDGEDEDQLEPLTAEEQEEKEQLLEEGFASWTRRDFNTFIRACEKYGRNDIKSISSEMEGKTEEEVQRYAKVFKERYKELTDYDRIIKNIERGEARISRKDEIMKAIGKKLDRYKNPWLELKIQYGQNKGKFYNEECDRFMNTTPTKRAALRNSEGESAPLSSFKRRRQSLMDDYVGSGRRKRG

SEQ ID NO: 57103 - protein, 306 aa, Zea Mays
MIKSDNRICADCGAPDPKWASANIGVFLCLKCGDVHRALGPDISKVLSVTLDDWSDSDIDSMVEVGGNSYANSIYEAFLPKDHPKPKPDSTMEYRTKFIRAKYETQDFLKPSLRISSRSSFKSTTSVKSVDSNFSSTSRKDVFEDTREFVGELNITLVKGTNLAVRDMLTSDPYVVLTLGGQKVQSTVKKSDLNPVWNEVLKISVPRNYGPLKLEVYDHDMFSADDIMGEAEIDLQPMITAAMAFGDTSRLGDMQIGRWFMTKDNALMKDSTVNVVAGKVKQEVHLKLQNVESGELELELEWVPIL

SEQ ID NO: 57104 - protein, 66 aa, Zea Mays
MDESGYFHIKNTGKCPIFVNSKEIPSCKRINLSSDSLIEIKDMRFIFHVNQEAVRQYIDRDLKPER

SEQ ID NO: 57105 - protein, 270 aa, Zea Mays
MEPHLTEDKPVRIDQESSSTSNRDAEASTSTSMKPVKTEEAGADLLPKEMNIMTISDDKADGHNDKEGEGVTLDGTGTETGQIIVTTIGGHNGKPKQKVSYMAELVVGTGSFGIVFQAKCLETDETVAIKKVLQDKRYKNRELQTMQLHDHPNVVQLKHHFFSTTQKGEVYLNLVLEFVSETVYRVAKYYNRMNQRVPIIYVKLYAYQMCRALAYIHRVVGVCHRDIKPQNLLVSSQIHFSSKQFVWLLVLQVFCYSHFGPFCYHLACKL

SEQ ID NO: 57106 - protein, 548 aa, Zea Mays
MISHLSLKFRTDSEGLQQQETLDALPKAIRSGISQYLFFNLVQKVYLFEGVSNDLIFQLVSEMKAEYFPPREDVILQNEAPTDFYILVTGSAELIELRNGGEQMAGVAKAGDVVGEIGVLCYRPQLFTVRTKSLCQLLRMNRTAFLSLVQSNVADGTIIMNNLMQLLKQQKDNSVMVGVLKEIENMLARGRLDLPITLCFAVNKGDDLMLHQLLKRGLDPNESDNNGHTALHIAASKGDEQCVKLLLDYGADPNARDSEGKVPLWEALCEKHNAVIELLVESGAELSSGDTALYACIAVEENDAELLENVIRYGGNINNPTKDGTTPLHRAVCDGNVQMVELLLEHGADVDKQDSNGWSPRDLADQQGHDDIQALFKSRKAHRKHASNGRVAPMLIGRFNSEPSMPDMSHENARVRSEVVPQKLLRKRVSFQNSLFGVISSSHAHQDTGRLLSKGLAGTEGPNCRHDSLIRVTISCPEKGGNAAGKLVRLPRSMAELLELGAKKFGIKPGKVLTVGGAEIDEVELIRDGDHILLVSDEWVPDVEQIRP

SEQ ID NO: 57107 - protein, 466 aa, Zea Mays
MLSTHEANADQFDLLSYVSSENFGSSCLPGESYQSATVDHEKRPLSDVKTCQIACKRPKQTDHCTWLYSFEEHPLTSEVGISSPALYDGLVEIKQPNDIPAINGATTCSGSSVIPCRNHDQSILVENLDIPDWATSFPGYFEDCGPVVTYSHVDDIGSPRKGVPIGPEHQADIPEWRPLNSMIVPGASEFCANLDCSSASTSESVPRGDDYVSDKWIRYCVVPVTCCSSPVDWAGDSKIDCNCSDEGSMRCSRQHIIEARDNLKMILGQDRFRELGLCEMGEDVALRWTDEEEKLFQRVVFLNPVSLGKNFWDHLPDAFPNKTSQEFVSYYFNVFMLRKRAQQNRSDVLAVDSDDDELHGEPLAERVEGDPAVESSTHEHSVSNSLPMDDDHKEFEGAQFDGSLCEKSVYNAVECRHLPNQMPADSNTVNTALDVCDQDNGAQCSEFHMSLPSDTSNSLGDQSASV

SEQ ID NO: 57108 - protein, 1193 aa, Zea Mays
MEPRRRQQQQSILSFLQKQPPSWRDPSGEGTPPEKPPRPPMGSVAGIMERLVRPPPPPQASHGWARNQYDSQVRHSEGKNLPVENQVLSNECLGALFSRPIYGEHSRTILSPEGGADMSPSQEPQKHSLRSSTDESTRATKEVILEHPKKLFSESHTNCIHATALNENFGVQTPSQVASKKIFPGLAHGADTPLTGYGSEQTLLQHSSKKFSLVSANGKYTRAAVTPFEQNSNNTRAEELSKMRSGSSDMLYLKPTNLSAELETNGTPLKNHSKNSSLLMDAMQAAIPRLKRVQEDQGVDANNQCPPLWAMNKKMKSAHCSIEKKDHDEMAGSARSKFEWLNSFAIRDANKRRPNDPLYDKSTLFIPPDALRKMSTSQKQYWNIKCKYMDVVLFFKVGKFYELYELDAEIGQKELDWKMTVSGVGKCRQVGISESGIDDAVDKLIARGYKVGRIEQMESANQAKARGVHSVIERKLVHVSTPSTAVDNIGTDAVHLLALKEVTLASSGFQVFGFAFLDYAALKIWVGSVQDDDSSAALGALLMQVSPRELIYETSGISKETQRTIRKYASAGSVKMQLTPLSGIDFSDAAQIRNLIHSKGFFNASTESWLSALDCTMNQDVVICALGGLIGHLTRLMLHDALKNGEVLPYHVYKTCLRMDGQTLVNLEIFSNNFNGGSSGTLYKHLNHCVTASGKRMLRRWICHPLKDIDAINKRLDVVEGFIQNCGLGPTTLGYLQKIPDLERLLGQVRSTVGLSSLLQLPFIGEKIIKKRIKTFIMLINGLRNGIDLLNDLQRADHGILALYKIVDIPSLSYLPELIHKFEERMQNEFPCGQVSDVNANGANDLAALMDVFIGKASEWSLVINAVSTIDVLRSFAAMTLSSFGAMCRPQVLLKDDVPVLRMKGLWHPYAFAGNANSLVPNDLTLGQDLSGLNRFALLLTGPNMGGKSTIMRATCLAVVLAQLGCYVPCTSCELTLADSIFTRLGATDRIMTGESTFLVECTETASVLQKATVDSLVLLDELGRGTSTFDGYAIAYAVFRHLVERVRCRQLFATHYHSLTKEFASHPHVSLQHMACMFKPRSDGNGQKELTFLYRLTSGACPESYGLQVAAMAGIPKSIVEKASVAGQVMRAKIAGNFKSSEQRAEFSTLHEEWLRAALAVSAMDGQPDDDDVMDTLFCIQQELKSHFRKAR

SEQ ID NO: 57109 - protein, 484 aa, Zea Mays
MMARSVTDSVPSVSKNLQLQFMTRLSLPIFTGSKIEGEGSLSITIALVDALTRQIVAPGKEFQIKVEIVVLEGDFESGEDDDWTAQEFNNNIVKEREGKRPLISGDAFIALVDGIGTVGELSFTDNSSWTRSRKFRLGARTEDGSFNGVRVREAKTESFVVKDHRGELYKKHHPPFLEDEVWRLEKIGKEGAFHKRLNRENICTVKDFLTLLNLDASRLRKILGGGMSTKMWEATVEHAKTCVLTDKVHHYYPDGLNKAGVVFNVVGEVRGLISDKYVFVDDFTEKEKAEARAAVKQAYEHWKDVHTCDNETLVENPSHPFNLGSPSLHENQYNQLPTQVSTDGFSLSNSAILSPNIFSMEPSSALDPCSILETEESSANQFQSVLPPVGGHEVPREPQTLDKFSNSLVYDDCSAHPSFSESYYSTVDPSMSFDTQDLGAALKGFIATISKPKAAYRGWRTLSYVLGWIFYTKRIVARRKKHGK

SEQ ID NO: 57110 - protein, 70 aa, Zea Mays
MHAMRYLLIQLLLQVLLHPDQYWEAALDVTICWKKSFLVIARGDNSSDYIVDLHFSLQQRCGPSYHPFTI

SEQ ID NO: 57111 - protein, 158 aa, Zea Mays
MEKIRHVHSHIMESGSPEDEAGSEDNFVQGENGTSVANASIDPAQSLHGSNLSPPTVLQFGKTRKLSERSDPRNRQLLQKRQFFHSHRAQPMQLEQVFSDRDSEDEVDDDIADFEDRRMLDDFVDVTKDEKLIMHMWNSFVRKQRWCYVTIHKGGMTR

SEQ ID NO: 57112 - protein, 321 aa, Zea Mays
MASHIILPPDDADENHNHQAAAAAEEEEEERDELGRDDDDDEHGVPPALPPKAALPFSATCVRISRDSYPNLRALRNASSVSLADAAYVKISEADFGYVLDDVPHFTDYLPDIPTYPNPLQDHPAYSTVKQYFVNEDDTVPQKVVVQKNSRRGVHFRRAGPRQRVYFGTDEVKACIVTCGGLCPGLNTVIRELVCGLSHMYNVSSIFGIQNGYKGFYSSNYLPLTPKSVNDIHKRGGTVLGTSRGGHDTKKIVDNIQDRGINQVYIIGGDGTQKGAYEIFKEIRKRGLKVSVAGVPKTIDNDIAGSLRCMLLLLVEMWTAV

SEQ ID NO: 57113 - protein, 287 aa, Zea Mays
MPFSGLTTFGTAFLSKFECSQMRHPLLEHITFVDTPGVLSGEKQRTQRSYDFTGVTSWFAAKCDLILLLFDPHKLDISDEFKRVIGSLRGHDDKIRVVLNKADQVDTQQLMRVYGALMWSLGKVLNTPEVSRVYIGSFNDKPVNESAVGPLGKELFEREQDDLLSDLKDIPKKACDRRINEFVKRARAAKIHAYIIGHLKKEMPTMMGKAKAQQRLIDNLPDEFAKVQREYHLPSGDFPYVEHFKEVLSGYSFDKFEKVKPKMVQAVDDMLGYDIPELLKNFRNPYE

SEQ ID NO: 57114 - protein, 316 aa, Zea Mays
MSQTNWEADKMLDVYIYDYFMKRNLQATAKAFQAEGKVSSDPVAIDAPGGFLFEWWSVFWDIFIARTNEKHSDVAASYIETQLMKAREQQHQQQQQIPQQRQQQPQHIQMQQMLLQRAVQQQQQQQQQQQQQQQQQQQQQQQQQPQQQQQQQLQQQQLQQQRRDGSHLLNGSANGISGNNPLMRQNQSTANVMATKMYEERLKVPSERDSLEEASLKQRYGENAGQLLDSNEASLLKAASSAQSSGQILHGTVGGLSGTLQQVQARSPQLPGPAQGIKTEINPILTPRAAGPEGSFIGAQVKKCAWRIQPCHMIVF

SEQ ID NO: 57115 - protein, 188 aa, Zea Mays
MSGPPPKPWERSGTEGTSGPAPFKPPSGGSTSDVVEASGTAKPSENVTAMEGNAAPNVNSTVSRPMPQRPWQQTGYGNTYGGYGGSNMYSSYGGFGNTYGTGGLGNSMYSSYGGGYGGGMYGGGMYGGGMYGGMGGYGGYGMGGMGGMGMGPYGNQDPNSMGPPASPPGFWVSFLRVYSNQTSHSSLY

SEQ ID NO: 57116 - protein, 382 aa, Zea Mays
MRLVRDLYVMLDKVNSEEAPLDLKVPETFDEFIWDMKNNDYDLRSFAFKLKATMESMDKELRSSRLSEQLNKHYAAIAIPKGLYCLSLRLTDEYSSNALARKQLPPPDPAIVEVKGVHQFDWLTQENVPVLESIETQRAARDRYHGSRRPITSANDSPRVFAAKLQAGSPTYTNVLNHIRIYMPELFPSLNKVVFLDDDVVVQHDLSPLWDIDLSGKVNGAVETCRGGDSWVMSKRFRNYLNFSHPLIAKNFDPSECAWAYGMNIFDLNAWRKTTIKDKYHHWVKENLKSNFTLWRLGTLPPGLIAFKGHVHPIDPSWHLLGLGYQEKTDISSVEQAAVIHYNGQSKPWLEIGFKHLQPFWTKYVNYSNEFLRNCHIMEPQL

SEQ ID NO: 57117 - protein, 56 aa, Zea Mays
MNMNNIELHLYLHLDRKVKGSRVTCKANTSQREQYSATVHLFIGTRRSLGKLHSCP

SEQ ID NO: 57118 - protein, 431 aa, Zea Mays
MVVRTFREKGIPCDVVWMDIDYMDGFRCFTFDSIRFPDPKSLVDDLHSIGCKAVWMLDPGIKKEKGFFVFDSGSKNDVWVQKADGSPFVGEVWPGDCVFPDFTSEKARAWWASLVKDFISNGVDGIWNDMNEPAVSKTVTKTMPESNIHRGDADIGGVQNHSYYHNVYGMLMTRSTYKGMEMANAAKRPFVLTRAGFIGSQRYAATWTGDNLSTWEHLHMSLPMILQLGLSGQPLSGPDIGGFGGNATPKLFGRWMGLGALFPFSRGHTETGSIDHEPWSFGEECEEVCRLALLRRYRLLPHIYTLFYHSHTKGIPVAAPVFFADPQDPELRKVETSFLLGPLLVCASTLPNKGAHECAHKLPKGIWLPFDFADSHPDLPLLYLQGGAILPVGLPIKHVGEASLEDDLSLIIALNENALVTVTVTRDSKAE

SEQ ID NO: 57119 - protein, 255 aa, Zea Mays
MHWQYRTICRGPNSILKNLYDVVGSKADDYISFYGLRAHGRSDDGGPLVTNQIYVHSKLMIIDDRMALIGSANINDRSLLGSRDSEIGIIIEDKEVVSSIMDGRPWEAGKFSLSLRLSLWAEHLGLLPGEVSCIMDPVDDSAYKNIWMATAKENTVIYHQVFSCVPNDHIHSRYQFRQSFAHRKEKIGHTTIDLGVALENLETQQEGDLACAKPMERLQDVRGHIVCFPLEFMCQEDLRPFFSESEYYTSPQVFH

SEQ ID NO: 57120 - protein, 1627 aa, Zea Mays
MRVPCCSLCNVRYDEEERTPLLLHCGHGFCRACLSRMLAAAPGATLPCPRCRHLTAVGNSVSALRKNFPILSLLSTSPSSPSFLHSDSGSSSDGSEDEDDFFARPSRRPAPAPAAAPPGCSFFDLASHPDLKLARRIGSGPPGPAGQEVWAGTLSRGGGVKRCKHQVAVKRVPLAAGDGLEVVQEEVERLRRASTWCRNVCTFHGAVRVGGHLCFVMDRYVGSVQAEMRQNGGRLTLEQILRYGADIARGIAELHAAGIVCMSIKPSNILLDAHGHAFVSDYGLSAILKNLTSRRVPDDSSAGIDATLLSPNYTAPEAWGPLKKSLNMFWDSANGISPESDAWSFGCTLVEMCTGAVPWAGLSAEEICKSVVKEKKPPPQYSRVVGVGLPGELWKMIGECLQFRASRRPSFQDMLKTFLRHLLDIPRSPPASPEIDFANENLPNGMQPPTTSILEMVHDNPNALHHLVCEGDAAGVRDLLAKAASERNDSLIRSLLEAQNTDGLTALHLACRRGSAELVEAIVAYQENVDILDKDEDPPIVFALAAGSPRCVRALVGRSASINSRLREGLGPTLAHVCAHHGQPECMQELLMAGADPNAVDGEGESVLHIAVARRYTDCAIVILENGGCRSMGISNSQHKTPLHLCIETWNTAVVRRWVEVASLEDIAETIDVPSPVGTALCMAAALKKEHEKEGRELVRILLAAGADSTAQDDPHCRTALHTAAMIDDVELVKIILEAGVDVNIRNAQNTTPLHVALNRGANSCVGLLLAAGANCNIQDDDGDNAFHIAADAAKMIRENLAWIAQMLLQPSPAVDVRNHRGWTLRDFLERLPREWIYEELMETLEDKGVHLSPTIYEVADWVKFRRTVTSPAFGWQGAGPRSIGFVQSVVDNDHLAVSFCTGEAHVLTSEVIKVIPLNRGQHVQLKPGVSEPRFGWRGQSRDSIGTVLCVDDDGILRVGFPGASRGWRADPAEIERVEEYKVGNWVRIRPSLTVAVHGMESITPGSVGIVYSIRPDSSLLLGLCYLSNPWLCEPEEVEHVDPFKIGDQVCVKRSVAEPRYAWGGETHHSVGKIIDIESDGLLIIDIPNRAAPWQADPSDMEKIENFKVGDWIRVKATVPSPKYGWEDVTRNSIGIVHSLQDDGDVGVAFCFRSRLFLCSVADVEKAQPFEVGEKVHVSPSISEPRLGWLSETAATIGAISRIDMDGTLNIKVSGRKGLWKVAPGDAERLSAFEVGDWVRLKPSIGSRPTYDWNSVGRISIAVVHSIQDSGYLELAGCFRNGKWLTHNTDIEKVQTLKIGQHVRFRAGISEPRWGWRDANPDSRGVIAGVHADGEVRVAFFGVPGLWRGDPADLEIENIFEVGEWVRLTNDVEQWRSLKPGSIGVVHGVGYQGDAWDGTIHVAFCGEQERWIGPSSQLEGVSKFVVGQRVRIRGCIRQPRFGWSNHNHSSIGTISSIDADGKLRIHTPAGARAWLIDPAEVEEVEEEEVCVGDWVKVKDSVGTPVYQWGDVNHSSIGVVHRADDGELWIAFCFCERLWLCKAWEVEKVRPFRQGDKVRIRPGLVSPRWGWGMETYASKGEVVGVDANGKLRIKFRWRDRLWIGDPADIVLDDVHLLTEASNGLAFCS

SEQ ID NO: 57121 - protein, 395 aa, Zea Mays
MEHVLSSRRFPTDPNEYKLYEEIGDGVSATVYRALCVPLDILVAIKVLDLEKCNNDLDGIRREVQTMSLIDHPNLLRAYCSFTNGHQLWVVMPYMAAGSALHIMKTSFPEGFDEPVIATLLREVLKALVYLHSQGHIHRDVKAGNILIDTNGAVKLGDFGVSACMFDTGNRQRARNTFVGTPCWMAPEVMQQLHGYDYKADIWSFGITALELAHGHAPFSKYPPMKVLLMTLQNAPPGLDYERDKRFSKSFKDLVATCLVKDPRKRPSSEKLLKHSFFKHARSAEYLARSILDGLPPLGERFRELKSKEAELLLNNKLGQESKEQLSQKEYIRGISGWNFNLEDLKNAAALMSGRTELRMTHKKLTMVQNIFTRKGSTMLLLEGLKRMRYKKLKP

SEQ ID NO: 57122 - protein, 264 aa, Zea Mays
MIEPWTPWWKKPSARSISLGPDGSQLIRQVNAEDTAVPYPDANTDQEASINEIPEGPESPLPSLKQLTRTEPSPLLAVHLVDILYSYCFTLRLYNGDWHSDPLGASTVALSMSKVMGQDAKPETVPEALAACIEETCSPAYRHTGGFRFAIGLVDDIIAILSLGQNALICALCDFHRLVEVGKSMLKVEKVGKTERAQGSPKLRSAARKLFFMTCWVHEQPDEAWPSLAHIVQVQKASMEELETGNWKADRKSKPQSAVLIEEL

SEQ ID NO: 57123 - protein, 869 aa, Zea Mays
MSGGGAGGKGAAAPVPPGSRKLVQGLKEIVNRPEAEIYAALRECGMDPDETVSRLLSQDTFQEVKSKRDKKKEIKEVPETRYRSANSSTNRGLRSGVDRGGRNNSMHSSSTDNMTSRPPGSGTASGTSSQRQTVASPSANKHMVADGPAASLQSSSGFQHGGWSGTPGQLSMADIVKMGRPQGKTSIKPVVTADRGYAGQYPSLPSTNQNLKQSGSMVPPTELDKGLQPAQDSVQVKDHDHSTADSKLPYGTDWSPQDGPTFANQSSLPEPSGDPSLYEASFQSSTLVTDVVNSHENSHLDENDTFAMGPAPASERHLDPSDGISEYNDVILNNSSSYQPHNYSYTEQQEVEDSSADVSAAAANFQSLSLHNDELAAKKSAEDNPAVIIPDHLQVTNTECVKLSFGSFGSGAFSGLLPQNTTDSNVEFPAREESAPVDQIDARNQDYYESGAVTSPADENLEAMLGANMENVDAPSVSQANELRQDVLDPSELQYDVPSVPSHAYSNTDTLQPSTIEEPQGNNQAHTLSHLSNLMQANPLSTSSLLGSNQNHATLHGLEFDLPPYLGAKYNAGSTTNPRPPISMQQEALKAGVFSNAQSTQSLPSTSIQTGLPLPQQLAHHPYSQPTLPITHFPNMVGYPYLPQNYATYLSSGTFQQAYPSSGPFHQSAAAALLASGMKYSTPEYKNNLSATGLQQQHQPQPQPLSSVISGYGGFGSSSNIQGNFTLSQSTGSASALGFDEALSRQYKNTSQYMALQQGDNSGMWVHGSGSRAASTLPPNHFYGYQGQSQLGGFARAQQPQPSQFGGHGYPTVYQSQGQEHPQNLAEGSLNGFQVTPSQPSHPSWQHQHTFGHDFTASKTFPIPPYWHR

SEQ ID NO: 57124 - protein, 114 aa, Zea Mays
MKDPNQNQQIQNFGDPFLMVIREGETAAEVMERIQRKLRVPDDEFSKWKLAFISMNRPEYLQDTDVVSARFQRRDVYGAWEQYLGLEHTDTTSKRSYTSNQNRHTYEKPVKIYN

SEQ ID NO: 57125 - protein, 1002 aa, Zea Mays
MESAHKSGGGSAPGAGAGGEGVLCHACGYQYPNGHPSAKQRRAHRKHCGKPASAAAAAEGSGEHEASELLLGEVGAGAAECGGGSPGSAHEHGDAAEGGDSAGNGAGHRVVGDTSAEDCLISGSSVLSEITSESSRTDDGTLTTVATQYSEKGSSTEDGDPSDPAVGSEQIQDVPTSVVPAEPEDRAKFSSEISESEIQNPSIVRPESDAAGGGTSELTDDVARQQDEVAVTGEDAVFDAIDGSKSSERNSVQGDELNLSCQDILQTETGGGHSSTVVEEDSGSKDPTASDGQEILIEETEPNQQSKHALTGSFEKVPDIESVGSSAEKSVGTGDDLLQSGKGACHSEIPVDIIAQLQLDPTSGTADHPAISKGADNFEGQHYHTTDESIGAIPSTFEPAVGAKVVSVDVTADLTEDVCSSDITIDDGMQENVTSGTIVPSQVDILDSSPSATAHEVNIVGSINDDDEKSQDGKSSADLASYEVKEMVVKDNFEEKQQTKEVIVDPTPHEANNFPSTDNHEENEQNKEIVADTTSHKISAVQSMGSTEEKEHIEDFIAKLASEEIIFTSNRDIVEQQDETDMKTNYEIDRARNLEATEEIAAGGESNTGTITDVVEDKFPNEEITLGTISLNMADSSVKEEKMHDEEVNEDLDSRDDIMVHGPDNVKEKMCEETMSGPTLDKFSLPTSTDSPEEGNKDESTRADPMSHETNVAQTSDGADEEKKIRELAVDPTSSIGTMGNIGNAEDKKPSEETTTDPRPVENTTTQGTEDATDPKPVENTTPQGTEDADSSKQNENTASVGGVEGKKQGEETTADPRSVENTTVEGKKQGEETTADPRSVENTTAQGTEDAESSKQNENTNVMEEERVTVEDTTSREISAIESTDDLKGKATNENEEIADKEMVTDSDKNHVSLKVLLADKNVEAKEKEKKATSAKDRVLSFRRRVSKDNVSPPVKPGSPTKDKDGSGQQDWNSPARLPVEKKPKGRKQQWVPFICCSSVQ

SEQ ID NO: 57126 - protein, 479 aa, Zea Mays
MVHIIPLASDGDGNHISVNGALQVGSTSNIDEIKLKLNKALQSEDISNGLVQSIHDAARSIELALIEHSKLPKSSWFPKTWLGVENNAWIKSLSYQAAVDSLLKAVIDVSSRGNDRDRDINVFVQRSLSRLLTPLESVIKNELSKREPALYEWYSSDQNPLVVRQFVNIFENDPMFYSATAICLEGEPMNTSESDLSLLMLGLICLAAITKFGSAKVSCQQFSSMVPDIIGRFMDMLLEFAPLSKAYNLAKDIGLRREFLYNFGPRAAVPKLGNDHGLEISFWIELVQKQLLWALDREKIWSRLTTSESIEVLEKDLAIFGFFVALGRSTQGYLSFKGLTDLDDSLNGIVRYLIGGSVLYYPQLSSISSYQLYVEVVCEELEWLPFYNDDVLSAKTDTEGREEVPKGEVISRVLNVCSYWMTSFTKYSSWLENPSNVKAAKFLSKGFVIIWSRQCVSISCLQIGICFCFSKKQIRICEY

SEQ ID NO: 57127 - protein, 456 aa, Zea Mays
MIETPTNQTPSATTTTPRESGGGGGAMAEPGQQLLRSFVEVAAGSHFPIQNLPFGVFRRRGSPPQAPLPPVAIGDFALDLATVADAGLFDGPALSGSPCFHQETLNMFLGMGRPAWREARATLQKILSADEPVLRDNEALRNKCLIPMSDIEMVLPITVGGYTDFFCSVHHARNCGFIFRGPQTPVNPNWFYLPIGYNGRASSIVVSGTDVIRPRGQGHPTGNSAPYFGPSQKLDFELEMAAIVGPGNELGKPIDINDAEEHIFGLTLMNDWSARDIQAWETIPLGPFLGKSFSTTISPWIVTLDALKPFMCEAPKQEPEPLPYLAEKNHINYDIPLEVLIKPKDQNVALIVTKTNFKHLYWTVTQQLTHHTINGCNMRPGDIFATGTLSGPEPDSLGCLLELTWNGQKEIPVGNLTRKFLEDGDEVILTGCCKMIGGGNMVVHTKICETPSEPLL

SEQ ID NO: 57128 - protein, 227 aa, Zea Mays
MDWTCARGWLNFPIGLTMEHEIYKAANTLTSYSQVARINPEKSIPHAVLSGASGLAILTVVKAGAILTYKLGTGLVVARRSDGSWSAPSAILSAGFGWGAQVGGELMDFIIVLRGPEAVQTFCSRMHFSLGAGVSAAAGPVGRVAEADLRAGDKGSGVCYTYSCSKGAFIGVSLEGNLVATRMDANLRFYGDPYLTTSDILTGNVEQPNAAKFLYTALDNLYSGLDW

SEQ ID NO: 57129 - protein, 206 aa, Zea Mays
MAPHPQEDKSDRHSSGAGASREQERRPSKAWGILIFGLIGVTTASFAITQVRKSMDWFYTQLNKVQSTSSWTWRYTSNNSSRGSFSEEAKKRYYQRMQQEYEEEQERVQRIRHMQSVFNRERNKFGRGYESWRENGPPRGYNYIPRDDWYWQTDTSHSEHKNRRTYTPAGPRVYPMSHHYAVLGLDRSRATPYTDAEVKFITELIM

SEQ ID NO: 57130 - protein, 448 aa, Zea Mays
MGERVIVEGSVQHNPLNEGSILWITESRMPLGIVDELFGPVKNPYYLVRYNSEEEVPAGISAGTDVCFVAEFADHILNMKELYAKGYDESDSVDKDAEDLPDFSDDEKEAEYKRSLRQAKRQTDRQHEPMKTSCYMKGSQPRGSGIRKPMPPRNLDTSTRGHQPQPHFRRSDMAPAGTENTARSLGPQNAPMIAPTMLQPGPMNPAVPPPVPLANQMGGCFMNLAQQQLLPQQPNMVWPGGFPQPPLPNMGVDGAALAANIMQNLLAGASQFQHQFQNLNFSGAGANQFPQQFQNQNFSGGTGANQFPQQFQNQNLSGPGTNQFQQQFPNQNFSGFPNQMPMPFLQTMHQTGMPANPMPFGGRPPANPPSGPASIAPMGQGNFGQPPNPQGFTIPAPPGEDGKQGSPPQFSSRQFHQGSSSSFGRGRTQHRGGRHSYGRGGRGGRHPR

SEQ ID NO: 57131 - protein, 350 aa, Zea Mays
MQPAFLTCCTELIDRWDKEVAGGSDGSFELDVWPEFQSLTGDVISRTAFGSSFMEGRRIFQLQAEQAERVIKAFQYIYIPGFVFFPTPNNRRMKEINREIEGTLRGMIEKRERAIENGEASGDDLLGLLLQSNMESGKGGLRMSTEDVVEECKLFYFAGMETTSVLLTWTLVILGMHPEWQDRAREEVFSVFGRDKRPDFDGISRLKTVTMILYEVLRLYPPAVTLNRRTFKDMQIGGITYPAGVILELPVIVVHHDPDVWGKDAHEFRPERFAEGISKATKDQQPAFFPFGWGPRICIGQNFALLEAKMALSMILQRFQFRLSPSYTHAPYTVLLLHPQHGAPIIFDRI

SEQ ID NO: 57132 - protein, 951 aa, Zea Mays
MAPPPPPPPPPPHARHHQGAAKGGHAERRKQPLQSSVTQPKAEPAAAAAAAVLPEGGKRCGGGGGRRRGGRGRAKAPPGEPRVALALAPPPRTVIGPPVPSKGLSFCRRPGFGTVGARCVVKANHFLAELPDKDLIQYDVKITPEVSSRTVNRAIMAELVRLYRSSDLGMRLPAYDGRKNLYTAGTLPFDAREFVVRLTDEDDGTGVPPREREYRVAIKFAARADLHHLRQFIAGRQADAPQEALQVLDIVLRELANQRYVSIGRSFYSPDIRKPQRLGDGLQSWCGFYQSIRPTQMGLSLNIDMSSTAFIEPLPVIEFVAQILGKDVISRPLADANRIKIKKALRGVKVEVTHRGNVRRKYRISGLTTQPTHELIFPIDEQMNMKSVVEYFKEMYGFTIQHPHLPCLQVGNQKKANYLPMEACKIVEGQRYTKRLNEKQITSLLKIILYFQTVHQNGYEQDPYAKEFGINISEKLTYVEARVLPAPWLKYHDTGKEKECLPQVGQWNMVNKKVINGCKVSHWACINFSRSVPEATARGFCQELAQMCQISGMEFNSEPVMPIYSARPDQVVKALKSVYNIALNKLKGKELELLLAILPDNNGPLYGDIKRICETDLGLISQCCLTKHVFKISKQYLANVSLKINVKMGGRNTVLLDAISWSIPLVSDIPTIIFGADVTHPETGEDSSPSIAAVVASQDWPEVTKYAGLVCAQAHRQELIQDLYKTWHDPQRGTVTGGMIRELLISFRKATGQKPLRIIFYRDGVSEGQFYQVLLYELDAIRKACASLEPNYQPPVTFVVVQKRHHTRLFTNNHKDRSSMDKSGNILPGTVVDSKICHPTEFDFYLCSHAGIQGTSRPAHYHVLWDENNFTADEMQTLTNNLCYTYARCTRSVSVVPPAYYAHLAAFRARFYMEPEMSENQTSKSSNGTNGGLVKPLPAVKEKVKRVMFYC

SEQ ID NO: 57133 - protein, 486 aa, Zea Mays
MLSSLSLRQATKDAGVIAGLNVARIINEPTAAAIAYGLDKKGGEKNILVFDLGGGTFDVSILTIDNGVFEVLATNGDTHLGGEDFDQRIMEYFIKLIKKKYSKDIGKDNRALGKLRREAERAKRALSNQHQVRVEIESLFDGTDFSEPLTRARFEELNNDLFRKTMGPVKKAMEDAGLEKSQIHEIVLVGGSTRIPKVQQLLKDYFNGKEPNKGVNPDEAVAFGAAVQGSILSGEGGDETKDILLLDVAPLTLGIETVGGVMTKLIPRNTVIPTKKSQVFTTYQDQQTTVSIQVFEGERSMTKDCRLLGKFDLNGIPSAPRGTPQIEVTFEVDANGILNVKAEDKGTGKSEKITITNEKGRLSQEEIDRMVREAEEFAEEDKKVKERIDARNQLETYVYNMKNTVGDKDKLADKLEAEEKEKVEEALKEALEWLDDNQSAEKEDYEEKLKEVEAVCNPIVSAVYQRSGGAPGGDADGGVDDDHDEL

SEQ ID NO: 57134 - protein, 464 aa, Zea Mays
MLLRRMRWMSEGDGRWELDAETPVTMEGTARPVPGDPLPLGLSRGYRITRPKQLDFFHRFMASPLVPTFSAMRDGLSVNHAHIFYMTDNWSSTILEKINVKKLVSVVKEKLANRQEEASWTKDLKNHLHDVMSLGVGTEILITPDTTLLLELFDIKKGNRGKAIFHHELPHHNITFQASWPGLFVDKKGTYWDVPLSLSADLASVGSSSGLSYHLLLQQNSGEPKCFGGDETDDVPTALLPGLCAKVAISMKKSIDAWRKKEDKLKKVQPYDVFLSDSHVSLTGIVGGVASGYLGDCSRRVAIRDETHKSNAFIMFDERNKRAAFADLFASVTFTAQYGNFQRLFLDLTKASARFDITSGSLFLCGASRLAQDFFFSRRPDVETFCDICPDVTVSFQQQIVGPFSFRVESSVAIDPRSQDHFVRVDDPIFAIDWALKVLGSAKATAWYSPKHQEAMMELRFYET

SEQ ID NO: 57135 - protein, 157 aa, Zea Mays
MPLVCCQASYLQEINGLRPRGLFFLIMCIGATTLDEYRKHIEKDPALERRFQPVKVPEPTMDETIQILRGLRERYELHHKLRYTDDALIAAAQLSYQYISDRFLPDKAIDLIDEAGSRVRLRHAQLPDEAKELDKELRQISKQKNEAVRGQDFEKNL

SEQ ID NO: 57136 - protein, 506 aa, Zea Mays
MCVHTFRDDANSTSIVNNYEVPNAIQKSVYPSRTRPLMMSGNQESTSVVNKIDFPNRLHLSFANFTHPCEGFSVPPPLVDKKRTGPRPCPVCYVSVDQAFALMPLQASPSPVLKDLNYVSEDGVTANLSNQGSGFGGHPSLDQRNDSFNINESMTVHCGFVRGKKPGQGTGFDIKDDDLLEMEQCHDLVVASAIFGNYDMIQHPRNISDFSKANACFYMFVDEETEAYVKNSSSLYNNNKVGLWRLVVVRNLPYEDPRRTGKIPKLLLHRLFPNVRFSVWIDAKLELVVDPYLLLERFLWRKNTTFAISRHYKRFDVFEEAEANKAAGKYDNASIDYQIEFYRNEGLTHYSSAKLPITSDVPEGCVIIREHIPITNLFTCVWFNEVDRFTSRDQISFSTVRDKIRARVGWMPEMFMDCERRNFVVQVYHRELLEQMIASGRMPPLAAAVTHANVRVGSRKAPPTKKPSVKRKREKKSSSRRRLPKPIAQGLDANVTQVFFSVAESG

SEQ ID NO: 57137 - protein, 243 aa, Zea Mays
MRKGLLPRSNGSAEQNDIDLREKLSRNHKLPNYDSRGHAAESRASYDMRDEPPELSSRYSSREDVLGSRHSSVVSRVPYARSVDDLLKLDYSRKSYPSWTDDGLRHRSPERMLKVRSDMYPRIAYDQIRPMPPLRSAGSSRPQSFITRDAPDTSRSQPYAGKSTISIDTVQRTNGITPSTAALPKAPVMDEAPLTVTGLLNSLGLEKYVVLFQAEEVDLSALRQMGESDLKDMGVPMAEANCS

SEQ ID NO: 57138 - protein, 432 aa, Zea Mays
MSSSLWMFIGTPHWMAPEVIQESRYDGKVDVWALGVSAIEMAEGMPPRSTVHPMRVIFMISSEPAPMLEDKEKWSLLFHDFIAKCLTKDPRLRPAAIEMLKHKFIEKCNSGASKMLAKIKVAKKIRATLAVQNELSDPDNTTQDVPFRINEDYGETVPTSSQQHMKHGTYNDCQAGDFGTMIVHTEDGDEVTESPIFPRTEFIPGLGSINSFTHDPKRAELISSFWAENIGDSDANKDRDTDYGPDMQESKVISPLTGTVKKNIGAEGTIRCHDNQINLSPGLANTTTKLNNSPSRKAFSVQDKLWSIYAAGNTVPIPFLKAIDISPLALVSENESGNGLAGSSTNDALEAVRELFSGDGQAKKGRKGQNEVPLPPGVHHRLTTSPTLMNLAQALAYHKTCYEDMPLQDSQATQEQQTIQNLCDTLRTILRL

SEQ ID NO: 57139 - protein, 316 aa, Zea Mays
MAFLFGAFLGLVVGVAVVMAFARFENSRAEQRRELAATAAAFSKLTVQDLRKLIPPEFYPSWVSFTQKQKLKWLNQELTKIWPFVNEAASELIKTSVEPIFEQYKSFILASLHFSKLTLGTVAPQFTGVSILESDDSAIIMELELQWDGNPNIVLDIQTTLGISLPVQVKNIGFTGVLRLIFKPLVSEFPCFGAVCCSLREKSKVEFTLKVIGGEMTAIPGISDAIEGTIRDTIEDTLTWPNRIIVPIVPGDYSDLELKPTGVLEVKLVEARDLKNKDLVGKSDPFALIYIRPLHDKTKKSKTIDSNHQRSLGVLE

SEQ ID NO: 57140 - protein, 68 aa, Zea Mays
MSIRSRGEKQPASQETRTSLVWPVQDFRMLSMISMLYSLASCLTMRERLSEGLKAVGAVRMFFWSFGG

SEQ ID NO: 57141 - protein, 241 aa, Zea Mays
MCNFKTIKDAADVAIATMLSGIQVSRVELLDEVQIKAINMANGKNLPEVPTLMFEFIGTEAYALEQTLLVQKIATEHHGSDFVFVEEPDAKAELWKIRKEALWAGFAMKPDHEAMITDVCVPLSRLAECISTSKRLLDASPLTCLVIAHAGDGNFHTIILFDPSQEDQRKEAERLNHFMVHTALSMEGTCTGEHGVGTGKMKYLEKELGIESLRTMKRIKAALDPNNIMNPGKLIPPHVCI

SEQ ID NO: 57142 - protein, 62 aa, Zea Mays
MNKQYEHIGLQIGRLVPHFIYLELQADSLVNQRIHLRQLVLSCQYLDALHTENVIFQFQLVG

SEQ ID NO: 57143 - protein, 75 aa, Zea Mays
MWWLCAGALVQAEFLTGIMLAVDQLRLETALSTPRIQGNATCLGSPPYLHCEVVQFTNWSTREPRHRSSVGTPPC

SEQ ID NO: 57144 - protein, 225 aa, Zea Mays
MPVVGAVTLYVSLLTFTLRVHPDRLDYVDQVLGACVKKLSGKAKLEDSRATKQIVALLSAPLEKYSNIVTALELSNYPRVMDYLDNATTKVMAVVIIQSIMKNTTCISTSDKIEALFDLIKGLIKDMDGAQDDELDEEDFKEEQNSVARLIHMLHNDEPEEMLKILCTVQKHILQGGPKRLTFTVPSLVFSALKLVRRLQSQDGDVTGEDVPATPKKIFQILHQS

SEQ ID NO: 57145 - protein, 1517 aa, Zea Mays
MAGELGQQTVELGAVVRRAAEESYLALRELVEKSQAEAEGKGIGAGANGSWQRSDTEKKIDLLKFITRTRQRMLRLHVLAKWCQQGRWKDAIRSELISDSATVQTGNTPLMQLVQDAEFDSSGFKIPGLKVNYWLDEKSTSTAEPDSSPFIKIEAGLDMQIKCQHSSFILDPFTDKEASLSLDLSCIDVEQLILRAVSCNRHTRLLNIQRQLCKNVQIFQSPKDVVLTRDVAAAKDPMMNAEKGFSDCFGNEVLQVRACGQAYVSLGINIRSGRFLLQSPENILPRAALMDCEEALNKGSTSATEVFSSLRTRSILHLLAATGSFFGLKVYQQSQGTLKIPKTLLHGSDLMVMGFPHCANAYYLLMQLDKDFRPVFHLLETQCDANGNTNASGDVKEAIRYNKINIGQMQILKNEMNENPFDVKLQALQSLVDSADMMESDLPVQNAIEPLPLLPACSPSFSSIVDEVFEYERGSTAAQNRCLPVDIQGINARVVSPMHDGCLSYTQANNNMNVHPNVSLNSYFPSNFRHLQGANKSLQLVPSSNDNSNQIPAQSSHSGNLGNATPGHLIGSSTTTGGLGKLITAGSDGASRKHYLSDFLSSIPSLRGLQPSEPRKRRKKTESVQSLLPLQAHSSNLQSRGSLTYGDVLAERNNCVPATIYASVLLHVIRHCSLCIKHAQLTAQMDSLAIPYVEEVGLRRPSSNLWLRLPFAQDDSWNHICLRLGKAGSMSWDVRINDPHFRELWELNGGSTKTQWGVGIRIANSSEMDSHISFDSSGVVLTYNTVEADSVQKLVSDLRRLSNARSFALGMRRLIGVKFQDKLDDNQLTMEVKSQSVNKGNSDAADKLSEQMRKTFRIEAVGLMSLWFSYGTMPMVHIVVEWEIAKAGCTMHVSPDQLWPHTKFLEDFVNGGEVASFLDCIRLTAGPLLALGGAIRPARMPVAVSSGYSSMPKQPNIPTQGPLVNGSSSTIHHAPGPSNAASAHLGSHNLHAAAMLSAVGRGGPGLVPSSLLPFDVSVVLRGPYWIRIIYRKKFSVDMRCFAGDQVWLQPATPPKGGPSVGGSLPCPQFRPFIMEHVAQGLNALEPNFMNATQASGHLNNNAGVPQTAPSANRLNATPGVSMVRPTSGVANHVAASLSRAGNAMLASSALASGISGTSVRLTAGAGLPVHMKGELNTAFIGLGDDGGYGGGWVPLAALKKVLRGILKYLGVLWLFAQLPELLKEILGSILKDNEGALLNLDQEQPALRFYVGGYVFAVSVHRVQLLLQVLSVKRFHHQQQQQQAQSNAQEELAAVEINEICDYFSRRVASEPYDASRVASFITLLTLPILVLREFLKLITWKKGLSPVHGDIATAQRARIELCLENHSGSASSDNTENSSLAKSNIHHDRAHSSVEFALTFVLDHALIPHMNVAGGAAWLPYCVSVKLRYSFGDNNHIAFLAMNGSHGGRACWLQFEEWERCKQKVSRAVETVNGSGVAGEVGQGRLRMVAEMIQKQLQLCLQQLRDDPLSAGSTAS

SEQ ID NO: 57146 - protein, 131 aa, Zea Mays
MLVVCTHRVTVVAMGLVDLMLVGVHILRFTQAAIWVAAVVATMEVAVPVHITKVQNQISSVFHQACFTVLKLFAPSLTSITHAHIMVLLLGMRNVSPLCKMREVQNHKTLITQIWHHLVFVEQIWHYRTLV

SEQ ID NO: 57147 - protein, 285 aa, Zea Mays
MQVEALKGIPCKQVATGLSFTVILTRDGQVYTCGSNTHGQLGHGDTIDRATPKLIELFEGPTQVVQIAAGASYTFAVTDDGTVHSFGSCTNFCLGHGDQHDELLPRAIQSFKRRNIHVVRVSAGDEHAVALDALGHVYTWGRGYCGALGHGDENDKTSPELIGSLKGQVAVQVCARKRKTFVLTDEGSVVAFGWMGFGSLGFLDRGTSDKVMRPRVLESLQDHYVSQISTGLYHTVAVTNKGIVFGFGDNERAQLGQEYIRGCLKPTEIMFQKSIEDIPIAAPSG

SEQ ID NO: 57148 - protein, 468 aa, Zea Mays
MFHNLSRLSSLPSPLKRLVGGLKGERYSRSSDISKLFTNSLTVPLPEEDEQLQLFNNQIEEDRKIMISRHNLVKLHKVLEEHDLSCVELLDVKLDEAEKAVGWARNHYLSSTTLPSIKGDRLIIPRESLDISIERLKEQGITAKKSSQNLKVLAKDEYERNFISAVVPPNEIGVKFDDIGALEDVKRTLDELVTLPMRRPELFSRGNLLRPCKGVLLFGPPGTGKTLLAKALATEAGANFISITGSTLTSKWFGDAEKLTKALFSFATRLAPVIIFVDEVDSLLGARGGAFEHEATRRMRNEFMAAWDGLRSKENQRILILGATNRPFDLDDAVIRRLPRRIYVDLPDAQNRMKILKILLAKEKLESDFKFDELANATEGYSGSDLKNLCVAAAYRPVHELLEEEKKGRVSNENSYLRPLCLDDFIQAKAKVSSSVSYDATSMNELRKWNEQYGEGGSRTKSPFGFGN

SEQ ID NO: 57149 - protein, 167 aa, Zea Mays
MDYDRLNSPNTSAISLEVMGHRLHISQDPNSKHLGTTVWDASMVFVKFLEKNSRKGRFCPSKLKGKRVIELGAGCGLAGFGMTLLGCDVTTTDQVEVLPLLMRNVERNRSWISQSNSDTDTIGSITVAELDWGNKEHIKAVEPPFDYIIGTDVYIMKNITYNFTSMW

SEQ ID NO: 57150 - protein, 227 aa, Zea Mays
MMQRLQCNVFMLSYRGYGESDGYPSQKGITYDAQAALDHLAQRNDIDTTRIVIFGRSLGGAVGAVLAKNNPDKVATLILENTFTSILDMAGIMLPFLRWFIGGSSSKGPKLLNCVVRSPWNTLDIVGEVKQPILFLSGLQDELVPPPHMKMLYDKASDHNRNCRFVDFPSGMHMDTWMSGGDRYWRTIQLFLDQYAPGVQNHDASFKSEITEDGNYSAPLYLKQPKL

SEQ ID NO: 57151 - protein, 321 aa, Zea Mays
MLRSNLESLNPRNHPLLQDPDSPGLTSLTRGDRMVQRMLLAELDKPASKSFERRRLLSYENKQSMTTTVKEKPQTGRRWGYFPGIDPHLGFSEFMERFFEHGKCSMRVFMVWNSPQWAYDIRHQRGLESLLKQHPDACVVMLSETLELESFHQFVKEGYKVAVAVPNLDELLESTPTHVFASVWYEWRQTKYYHLHYSELVRLAALYKYGGIYLDSDVIILKPLTSLRNSIGATNHVSGNSRFGGAVLAFEKQSPLLEECLREFYSTYDDTLVQWNGAELMTRVISNISSRADENRGHLDIKLEPFVKFYPISSTDIIRAR

SEQ ID NO: 57152 - protein, 374 aa, Zea Mays
MALPMMMEIGLERGFGQALSDLIMMNLQLATVFFTFSLGTKTHYYGRMLLHGGAQYRGTGRGFVVFHAKFAENYRLYSRSHFVKGIELMILLIVYQLFGQSYRSTIAYIFITFSMWLLVLTWLFAPFLFNPSGFEWAKIVDDWSDWNKWISNRGGIGVSPDKSWESWWEVEQDHLKYSGTIGRFVEIILAIRFFIYQYGLVYHLHVTHNKSILVYLISWLVIVAVLLVMKTVSVGRRTFSADFQLFFRLIKFLIFVAFIAILIVLIVLLHMTFRDIFVCFLAFLPTGWGILLIAQACKPLARHVGLWGSVRALARAYEIIMGVLLFSPVAILAWFPFVSEFQTRMLFNQAFSRGLQISRILGGQKKERSARNKD

SEQ ID NO: 57153 - protein, 52 aa, Zea Mays
MALVCHMAHMYFRFHYGFNTIVTNALDKIPAAWQRSLIADYGVPLMVILWTA

SEQ ID NO: 57154 - protein, 158 aa, Zea Mays
MSIKAVGIAIKLTIEGINQAGYFQTWLFATVSATCIIIQLIYLNKALDTFNTAVVSPIYYAMFTSLTILASAIMFKDWSGQSISSIASEICGFLTVLTGTVVLHSTREHDPTLTSDLYAPLSPIYWHIQGNGETGGKLKEDDLLSGNFITVVRQDYFV

SEQ ID NO: 57155 - protein, 141 aa, Zea Mays
MSSTEGMYKIIRPAIGEALREMPSSELKSKYRKVSSIDKVSKGWQEEYDASSKQCMHGSKCKIGSYCTVGRRLQELNILGGLILPVWGTIEKALAKQERLIHKRIRVVRLVTTNDSQRIVGLLIPNSAVESVLTGLQWVGH

SEQ ID NO: 57156 - protein, 741 aa, Zea Mays
MYFTVRSYMPSRVKQILPSFCKDMFRILDSLNFNSLIEDGSTMKLKIAKRCLIIFCALVTRHRKHTDNQMPHIVNCAIKISKQSIHLSKLDSLPNRIVSLAFDVISRVLETGPGWRLVSPHFSSLLDSAIFPALALNEKDIEEWEEDTDEYMQKNLPSELDDISGWTEDLFTARKSAINLLGVIALSKGPPVASAASKRKKGDKNKGKSEMSSIGELLVTPFLSKFPIPSHGEDASSVAVRNYFGVLMAYGGLQDFLTEKKDLTITLIRNRILPLYSLDPCSPYLISTANWVIGQLAICLPEDMSSSIYESLMKALTMEYVEDITCYPVCASASGAIAELIENSYVPPDWLILLQVVLKRISTGDENESALLFKLLGTIVEGGQEKVLSHIPEIVSNIASTVMELLPPVPDPWPQVVEQGFAALVAMVQAWESSAPDENKTPEKRFWQSGQSAIAQTISLLLQKAWLLQADNMGSALPPPSCVNDASVLLEFVMSSVTCMEETANLKVFELVATWADAIANWDSWEEMEDQGVFNTIKEAVNFHQRFDLDGLFLKTLPSQSENGSQSSVIGRVSNFVTRAIAAYPSATWRACSCVHTLLHAPKFSLGAQDTRKTISESFAQAAFSRFKSVSDSPAGLWKPLLLAISSCYICYPDAIEQVLNNVDGNGFAIWASALAQVSSSLFNPGLSSESEIKLAVLTLSTVINHLVSLSTGGTKFVARLLCITDGVLHSAEGSSGRWGQ

SEQ ID NO: 57157 - protein, 97 aa, Zea Mays
MILQPRAADPVAVGDDVCAGYLPQRRAAAERHGELQLVPQHLQHLPHAGLAVHRQREQHGPADTPEAPNARALKTSVPRRTPPSRNTGSRPFASLTT

SEQ ID NO: 57158 - protein, 115 aa, Zea Mays
MASAKFGAAQQVENRGALSKRSRNDENDVRTSCFWTCPKCDNINFSFRSTCNMKKCGAPRPTPGGNTSSSRKDNSNKEAPEGSWTCPECNNLNYPFRTVCNRKGCSYSKPAPANN

SEQ ID NO: 57159 - protein, 136 aa, Zea Mays
MFNQSADAKSPSTSDNRNQNDMLPPTKAAEKPLNGTATEQQPRLRTLGSLTTRTGSTSDIRKLMMEDMPMVSSKVEGPNARRIDGFLYRYKKGEDVRIVCVCHGSFLTPAEFVKHAGGGDVPNPLRHIVVNPAPFS

SEQ ID NO: 57160 - protein, 139 aa, Zea Mays
MVLAATNRPSELDEAILRRFTQIFEIGIPVQSERNKILQVVLKGENVEPNVDYDHIARLCEGFTGSDILEVCKQAAFYPIRELLDNERNGRKLDKPRPLRQSDLERALSTSRKCKKAASSGLQSPLWVRPTDSEDDQIA

SEQ ID NO: 57161 - protein, 129 aa, Zea Mays
MRASRPAVHPVEAAPPPPAAAAEGPEAQVEGAAHPRGVRMKDPPGAPGTPAGLGLRLAQAFFAAAALAVMASTNDFPSVSAFSYLVAAAILQCLWSLLLAFVDIYALLVKRSLRNARAVCIFTIGDGVQ

SEQ ID NO: 57162 - protein, 413 aa, Zea Mays
MASGAAAPVVQTLVLKVAIHCHGCKKKVRKVLRSVEGVQNVTVDASQNKVTVVGTVDADTLIQRLYKSGKKGEPWQCHPPVKKSEPAPEAPPAAHPAGGGGKDAATAAAAVDKKPEEPMKKPQGDSSEEKKKKPEEAAESSKEKEKKPEEPVKEPKAESSKEEKKKKPEEAVKEPQGESSEEKKKKTEQEGGAAEKKPEAESKKKDGGDSKGAETKAKGSAEPAKEAAAVPAPAAAAAVNDKAEAKKSEKPKDAGKAAEPAAVTTERSLPAPPAPAPMPAYEQEFRHPYYAPQPVMSYHASQPSSSVSYTYFAPQTQPAYSMQQAQPHPQAAASYSVQPTPPAYYSAQELQPQQPAKQWSPSYLYMPYPHAQAAPEPYYQQQDYYSPPGTHASPMHDPYRIFDDENPNSCSVM

SEQ ID NO: 57163 - protein, 149 aa, Zea Mays
MILRMKRRKAEEAGTGRRGPADRKSMKDQMRLAVMTLTQIGRDTGRAGRTDQMRLAAMTLTQIGIGAGRAGRTGREGGGRRQCHRKRSHHQRDASDCDKGGSDYADEKKQSSRRRRHRQSESSGLDEDERRDPRGAKRSEEKNRDRKRS

SEQ ID NO: 57164 - protein, 576 aa, Zea Mays
MGGGGAIVHGFRRWFHRRSGSTSNQSSIAGDGEGEADGGSPDLEIVDDPDLLGLRAIRVPKRKMPLPVESHRKDSVEMEFFTEYGEASQYQIQEVIGKGSYGVVAAAVDTRTGERVAIKKINDVFEHVSDATRILREIKLLRLLRHPDIVEIKHIMLPPSRREFQDIYVVFELMESDLHQVIKANDDLTPEHHQFFLYQLLRALKYIHAANVFHRDLKPKNILANSDCKLKICDFGLARASFNDAPSAIFWTDYVATRWYRAPELCGSFFSKYTPAIDIWSIGCIFAELLTGRPLFPGKNVVHQLDIITDLLGTPSSETLSRIRNEKARRYLSCMRKKYPVPFTHKFRNADPLALRLLERLLAFDPKDRPTAEEALADPYFASLANVEREPSRHPISKLEFEFERRKLAKDDVRELIYREILEYHPQMLEEHMQGGEQISFLYPSGVDRFKRQFAHLEEHYSKGERGSPLQRKHASLPRERVVVSKDGDTDQHINDQERSADSVARTTVSPPRSEDDDMSDVKSTSLSSRSYLKSASISASKCVVATKKHPEDDGIAEEMEGAVNGLSEKVSRMHS

SEQ ID NO: 57165 - protein, 293 aa, Zea Mays
MELEDSLYPLLREVSIGIDPYVVFQDVDWALLIGAKPRGPGMERAALLDINGQIFADQGKALNAVASRNAKVLVVGNPCNTNALICLKNAPNIPAKNFHALTRLDENRAKCQLALKAGVFYDKVSNVTIWGNHSTTQVPDFLNAKIDGRPVKEVIKDTKWLEEEFTLTVQKRGGVLIQKWGRSSAASTAVSIVDAIRSLVTPTPEGDWFSTGVYTTGNPYGIAEDIVFSMPCRSKGDGDYELASDVLMDDFLWERIKKSEAELLAEKKCVAHLTGEGNAFCDLPEDTMLPGEV

SEQ ID NO: 57166 - protein, 608 aa, Zea Mays
MASFSLKPQHNGSSSRIYHTICSATASEWRSLLRSRSSVSWSWKKHTRLRLRCCQGSNGGDDSRLSQNTGIFHPSIWGDFFLGCSSSPEEAAASSQQKAWMERCDELKEEVGRLMVVEANSPLHERLHFIDALESLCLDHLLKEEIGAALTQIETAGVSDDCDIGTVSLWFYLLRKHRRRASPDVFVRFRDAEGGFQANDPGDLLRLYNAAHFRTHGETILDEAIAFARSRLEMMLPYVKGPLLAHEVRSSLEIPLPRRVRIYESKYYIHAYETSGTLHEKVLQLAKLNSNVLQLHHQQELKILTRWWEDMQIGSKLPFARDRIVECFLWILGVYYEPCHSRARIILTMVIAIVTLLDDIFDSFATPQECEILTNCIESWDPKGAQDLPGCMKFALEKILDSYQTITNMLHREDKYRMTYLRHFTEDLVRSFNMEVKMLQKGYIPDSVEEHLKVSLRTGGCPILSCACFVGMDDIATKDFFDWISSVPKMVRALSIILRLADDLHSYEREQLIPHVASTIDTYMKKHNVSIEVAQENIHKLKEESWKDLNSEWLNPCNDVYPKQLLERIFNLARTMEFMYNQEDNFTNCHNLKDTIRCLLVEPYRIHI

SEQ ID NO: 57167 - protein, 589 aa, Zea Mays
MAAAPHRAQVPADSTAPLQTGPVLENNPSKSANAKDQILSGTENVTTGNARGASSLRSPNGPPEKASSVGKAGEQPYLYQQNVYAPQPQPLYPGGYMNPSGQWEEYPHYVNMEGLHSVSPGIYNDNQSLMLSAGYANNPQMMYGAYSPVSTAGDGQQYFPVHYSFSNPYYQPPASPSMGYSNSATGMSQGDPMLQQEYFLPDGLLYSPTPGYHQPFSSFDRALTQPNNAPGLFGQGSLPLASGMHHGSMYGPGSYKGRQYGSKFGGTTPSWSSAGRRFGTFDLSGNQQRGSMSFGSHNGSLEFMNEQNRGPRATKPKIQDTENSGDEKSEKTVPLIDSELYNRSDFITEYKDAKFFVIKSYTEDHVHRSIKYNVWASTASGNRKLDSAYRAAREKEEHCPIFLFFSVNGSGQFCGVAEMIGPVDFDRSVNYWQQDKWSGQFPVKWHIIKDVPNNLLRHIILENNDNKPVTNSRDTQEGLQMLTIFKSHEAETTIVEDFDFYEQREKALQENRRQQHAASTDTQKLVDTKAQDAVADISDAFAKAVQLKNTENSGTTPKTEGASAEKGSAATAKVEGSANLNTGPVEESS

SEQ ID NO: 57168 - protein, 341 aa, Zea Mays
MAGYPEDNQHALNGYDDEEVDEEGHPGRRGGRDGASGYGDAGGEDVRGAGGDSSGKIFVGGVAWETTEESFSKHFEKYGAITDSVIMKDKHTKMPRGFGFVTFSDPSVIDKVLEDEHVIDGRTVEVKRTVPREEMNTKDGPKTRKIFIGGLPASLTEDELKDHFSLYGKVLEHQIMLDHSTGRSRGFGFVTFESEDSVERVISEGRMRDLGGKQVEIKKAEPKKHGSDNIGNGRSSQGGGGYRSTYRGGGGAGSGSSGSGGGGYGFGDAYRSAAASYGYDGGAGAGYGYGRGYGYGGAYGAYGAYGGGYGTGGYGSYGGAGGTGGGSTGARGSSRYHPYGK

SEQ ID NO: 57169 - protein, 91 aa, Zea Mays
MEILDILYETEDTSLLFNCPCSLAASTLVAAYAISVPKQTWEFPILPWVRFATSYDEEEIMKIVLTILLHVLKLDGIEEKGKGRFDARCLS

SEQ ID NO: 57170 - protein, 339 aa, Zea Mays
MLQGSEVMGECEDGKEYRCWEELLPDALGLIFRNLPLQEVLTVLPRVCKSWGRVVAGPYCWQEIDIEEWSQQQGKPEQIARMVELLVGRSAGSCRRISVSGLPCDPRFSFIGDNARALRTLEIPRSEISDSMVESVAPRLPNVTFLDISSCTKMGARGLEAFGKHCKSLAGLRRVMHPIDLADRACQHDEAHAIACSMPRLRHLEMGYMLVATEAVAEILGRCRELRFLDLRGCWAVDDKLLPRDRHPGLRVLGPRVDDCYENSYWEECSDDYSDDSSIYSWELMDDVDDDYDYAAGSDDDDDEAVWDDDGQGLENLEVRFYGGGFGETFAGFDWPPSP

SEQ ID NO: 57171 - protein, 551 aa, Zea Mays
MAEKLRDLSQPVDVTLLDATVAAFYGTGSKEERSAADQILRDLQNNPDMWLQVVHILQNSQNLNTKFFALQILESVIKYRWNALPVDQRDGIKNYISDVIVQLSSNEVTFRQERLYVNKLNIILVQVLKHEWPARWSSFIPDLVAAAKSSETLCENCMAILKLLSEEIFDFSRGEMTQQKIKELKSSLNSEFRLIHELCLYVLSATQRPELIRATLATLHAFLSWIPVGFIFESPLLETLLKFFPMAAYRNLTLQCLTEVAALQFGDFYNVQYVKTYTFFIIQLQAILPPEKIPDVYANGSTEEQAFIQNLALFFTSFFKNHMRILETTQENIAALLMGLEYLIGISYVDDTEVFKVSLDYWNVFVLELFEAHNQMEPAVTAQMVPGMVDGGTAVKQRRQLYSGPLSKLRMLMICRMAKPEEVLIVEDENGNIVRETMKDNDVLVQYKIMRETLIYLSHLDHEDTEQQMLKKLSKQLNGEDWSWNNLNTLCWAIGSISGSMVEEQENRFLVMVIRDLLNLCEITKGKDNKAVIASMLLVSIQDFSGLIGSF

SEQ ID NO: 57172 - protein, 765 aa, Zea Mays
MSLVVKLRYILKLLSAASWVVILPVTYAYTWKNPTGLARAIKSWLGDGQNQPSLYILAVVIYLAPNLLSATLFLFPVIRRALERSNLKVVTFIMWWSQVVLINLKLIQPRLFVGRGMHEGAFSLFKYTMFWVLLLATKLVVSFYVEIKPLVQPTKDIMKEPIRTFKWHEFFPHANNNIGVVIALWAPIILVYFMDTQIWYAIFSTLIGGVYGACRRLGEIRTLGMLRSRFESLPKAFNQCLIPSDTSKRRGFRAAFSKPSKTSEDTREQEKIAARFAQIWNLIITSFREEDLIDDREKDLLLVPYCKDRDMDIIQWPPFLLASKIPIALDMAADSGGKDRDLKKRMKSDPYFTYAIKECYASFKNIIYELVIDSRERGYIQKIFDAVDEHIAEETLIKELNMSNLPTLSKKFIELLDLLESNNKEDHDQIIILFQDMLEVVTRDIMVDQLSELLELIHGANNKRSEGMTSLDQQDQLFTKAIDFPVKKTQAWNEKIKRLRLLLTVKESAMDVPTNLDARRRISFFANSLFMSMPDAPKVRQMLPFSVLTPYYKEDVLFSSQALAEQNEDGVSILFYLQKIYPDEWKNFLERVHCESEDQLHETEHSEEQLRLWASYRGQTLTRTVRGMMYYRQALVLQASLDMARDDDLMEGFRAADLLSESDESPLLTQCKAIADMKFTYVVSCQQYGIQKRSGDPHAQDILRLMTTYPSLRVAYIDEVEEPSKDKNKKIEKVYYSALVKAAVTKPDDPGQKLDQVHNSCQSCG

SEQ ID NO: 57173 - protein, 330 aa, Zea Mays
MAMANYPHVSPFPKKFPMQQERKPCLGQSCQSSHSKILPLFRPKPNSRPKSPASTDGVSKTPGRTVESLVDQSPRSRFPAAEAAPYVPVGHYRRIPCHNMAPSVTIRTAVPVFSAPPLPPPPARLQQLPPLMSHPPPIRMASPVRMRPAPASPMFASSSPVQVPKPVMPVQLKDVQDHPRKEAVPLPPVIPVQVKDAQCRPRKSSMSPVIPVPVKDAQRRPAAIPVQMKDVQTQAPKEPLAAPIPAARPSVMTDTPAQVKEASAGATSEAPSSATGNNAAVECSASSETVLARQSGAADEDTLVLMRKLSMRPEAQSAAEAATTMRLETN

SEQ ID NO: 57174 - protein, 599 aa, Zea Mays
MEYMAGGSVADLLQAGPPLDEMSIACILRDLLHAIEYLHSEGKIHRDIKAANILLTESGDVKVADFGVSAQLTKTMSRRKTFVGTPFWMAPEVIQNSEGYNEKADIWSLGITAIEMAKGEPPLADIHPMRVLFIIPRENPPQLDEHFSKPMKEFVSLCLKKNPAERPSAKELLKHRFIKNARKTPKLLERIRERPKFAAKSMDATQNGQTHDEEEDFGTGTIKVNRTKDTAPSLSQGTVRKSAVRDFSDRSEGTGTVRVVSRPPQIASTKDGRSDMPQSPKAPIRTADRENQWRSSGTGSEESLSLRDTQSGRGRVESSTDDNDHSVSGSGTVVLRSPRASQLYSTASNHSAKPPSRFSSYEDMSNSGTVVRTQNEDPETPRSSRSRLGIQEKTSNAPLEDSAINLAEAKAALQAGLRKGNARERPFINRHEKGSHEHRSSGVNSQEVQSEDVDTQKGHKLRQLPDGQSASRASSVASPAVSSLLLPSLKEATGDKFDRPAVHAFLDSLMDLERDIPGSCEVLVGRLLHRLGSSKDSSLQGLQETAMSIFTKEPEPPSEKAGDKKLANMPPLAAPTVSPLARFLLTRWQNQVSQDLNSV

SEQ ID NO: 57175 - protein, 436 aa, Zea Mays
MLGDILHPAINWADKESHLDPDEMAKMKSAFIGNLPEDVNEEYLRKLFGQFGEVVRVAISRKGQCPVAFVHFAKRSELENAIEEMDGKTVRGPGRGPSFKIQVSVARPTADNDKKRSREEVRTRRSNASGDRRDYSHGRYGHDSLDRQVKAPRLSNYVADAADPYESAVNSLPSAVKEVLLRILRLRIGTRYDIDIHCVKSLDELPESSALAVLNQFLISGGDKHNKGDYFASLVAKAETFGLTHALHGTTYLSRNPEMHSKRYPHEDYDFVTPRSSRYDSSAHHPSTYYEDDPPVSESRVRRYAEERSTIVRSPEPRPRYDETDIRINPEPRLPYESRHNAEKHLDRRYIQEHSSNIERPAEEALLSRERRFLPAAGYMPNPGGSDFRSRSPAEYSAQRQQMRFDPFTGEPYKFDPFTGEPIRPDPNQRRSGSLY

SEQ ID NO: 57176 - protein, 512 aa, Zea Mays
MNNLAVTVYEKGAEVVRMYKTMFGASGFRKGMDLYFKRHDGQAVTCEDFYAAMCDANNAQLPNFLQWYSQAGTPIVKVASSYDPSSQTFSLKLSQEVPPTPGQPVKEPMFIPVAVGLVDSTGKDMPLTSVYSDGSLQTVSTDGQPVFTTVLQFKKKEEEFMFKNIPERPVPSLLRGYSAPVRLDSDLSEGDLFFLLASDSDEFNRWEAGQVLARKLMLSLVADFQQQKTLVLNPKFVDGIRSILRNTSLDKEFIAKAITLPGQGEIMDMMEVADPDAVHAVRNFIKKELAVQLKDDLLAAVKSNRSSEAYTFNHDSMARRALKNTCLAYLASLNEPDFVELALHEYKSATNMTEQFAALAALSQNPGQVRDDALLDFYNKWQHEYLVVSKWFALQATSEIPGNVANVQKLLSHPAFDLRNPNKVYSLIGGFCGSPVNFHAKDGSGYKFLGEIVLQLDKINPQVASRMVSAFSRWRRYDKTRQALAKAQLEMIVSANGLSENVFEIASKSLAD

SEQ ID NO: 57177 - protein, 150 aa, Zea Mays
MLVDQPVTPCLPGTPHGCRPRSSPRQGQPRRRLGEEDTHAQGMLVKFGDVLDVFAFTCVAVLKLLHRVGMRALSSVRESRLSSRHAQGTVQRRQSTSATLPVWPWISPSPLRAPPVRPRRPRSSPQLLVFVHRRSSQAVVGAAPPSRPGF

SEQ ID NO: 57178 - protein, 197 aa, Zea Mays
MARRRLLALASRLYGRPQATQPWRRPPPRFLSSAASGTLDHLKSPPFARPAARNPASYPWDRFGGGQKRTMFIQTQSTPNPQSLMFYPGKPVMEIGSSDFPNARTAMTSPLAKSLFAIDGVTRVFFGSDFVTVTKSEETSWDCLKPEVFAAIMDFYSSGQPLFLDSNAAASMDTAIHEELLKCFLNVLIQSCMCTGW

SEQ ID NO: 57179 - protein, 362 aa, Zea Mays
MNHLTPALHGAMRPPSAQGQGLARYGSAPGSLLAAIADSVTRGDPAPPPPPVSRFYSAESSGLTSCDSSCRTDCGRPPLERAYGGSGEIRVPPPLQQQQHHLLAPPAASPLFRHSSSPAGLLSRLMTDPHGMAASGGAMGSYTQAGSDAALGPGHGHGHAQLSSQWSFSRQDLPQISEMGMIPADIGESIVGAGGCNSSSDAAQSSSYLSRTFSVGSWDDTNSIMFSSAPCKKPKVDPAAGADDMVTNFSTIDPQFGLSNSSLELPGMDDYLQLQQDSVACRVRARRGCATHPRSIAERERRTRISKRLKKLQDLVPNMDKQTNTSDMLDLAVEYIKELKDQVEKLKHDQANCCCLGNKSCC

SEQ ID NO: 57180 - protein, 849 aa, Zea Mays
MAHNVWEADKMLDSYIYDYLLKRNLQNTAKAFQAESNVPSAPVSIDAPGGFLFEWWSVFWDVFIARTNEKHSDSATSYLESIKAREQQQQSQHQIQTQQLLLQRHAQQHPQEQQQWRQQKQQQRSENTDFPTSAQNGTVAADPPARQNDTTAGTLSAKVFEDRMKITVQRDVSEETSMKQRLTETICPLLESNPTSMLKSPARSSLASGPIFQRSAGGMSGSLQQAQFRSQPLLGSTQDIKAETNVALNQRAAGADGSLFGVPGSNQAGNNLTLKGWPLTGLEQLRSGFLQHKSYMYPAQPLQHQLQFLTPQQQHALIHVQAQQNATSPGDMDNRRLRMLFSSRNLVPGRDGQSTGFTEIVPSVGQSLQNMCLPMQRTETDMLMKIAALQQQQPSNNLQQLLQHPLLSQQQQSSTYLEGEQEKMGAGIVTVAFAGNEQVSKNRNGRKRKHPISSSGPANSSGTTNTAGASPSSTPSTLSAHSPGETISTPLQHQNASSCTTLVVYGSEGPVPIGSPTNQLVDMDHYTEDDSMEDNLEPFLPHNGTNPRAAGSHCISSGKGYILREVSSAQASTSSVLCCHFSSDGKLIATGGHDKKVFLWNADTLKQKSMLEEHSLLITDVRFSPSTPRLATSSFDKTVRVWDADNHGYSIRTFTGHSASVMSLDFHPNKDDLICSCDGDNEIRFWSIKHGNAVRIFKGGSTQLRFQPRYGGLLATASDNVVSILDVERQACVRRFESHTKGVDSVCWDPTGEYVVSVSEDTVKVWSLNDESFVNELSCGGRKFSSCTFHPTYPSLLIIGCYQSLELWDMSENRSMTVAAHDSLVSALASSSSGLVASSGHDKYVKLWR

SEQ ID NO: 57181 - protein, 394 aa, Zea Mays
MGFFNLSLKFAPMGSRTQDTEECYSDHNQNQNVDYGRMAEILVRRAGSTDEFTRLTSITWINEFVKLGGEQLVPYYADILGAVLPCISDEEEKIRVVARETNEELRAIKADPAEGFDIGAILSIAKRELNSEHEATRIEALHWFFTLLDRYCAEFLAYLNDIFDPLLNALSDPSDAVVLLVLEVHARIAEESHHFHHLVSYLIRTFHNNHFVLEKRGALIVRRLCVLLGAEKVYREFSTILESEVDLDFASVMVQVLNLILLTSTELGELRSPLKKSLVDSCGKDLFQSLYASWRHSPMATISLCLLAQAYNHASCVIQSLGEEDINVNFLVQLDKLIRLLETPVFAYLRLQVTWSDNPFLQIYLSVSQAHLNSETWRVLPGFFNLISSATLMA

SEQ ID NO: 57182 - protein, 100 aa, Zea Mays
MRDNFNHSNMAISYKEHFQNSRLVESVLDMYWELPPVAGPSLTHQTRYDPARTVDPIIEDGRYGLFRKTGLARLDASVFNGYTQMAYVQISGSMLSTDDV

SEQ ID NO: 57183 - protein, 83 aa, Zea Mays
MHLDALLSGVYEMSWMEDWRNAHGPGKLWHVALNFANWRPDVDHFGTRVKPPVWSARNKTDGEGKKVSGDKSQRLITVLFVFE

SEQ ID NO: 57184 - protein, 325 aa, Zea Mays
MLTPVSAKTVKASKAKAKNSKTGPQTPTSNVGSPLNPPTPVGTCRYDNSLGLLTKKFINLLKQAPDGILDLNNAAEVLEVQKRRIYDITNVLEGIGLIEKTLKNRIRWKALDDSSVQLDNGISALQAEVENLSLQEQALDERISDIREKLRGLTEDENNQRWLYVTEDDIKGLPSFQNETLIAIKAPHGTTLEVPDPDEAGDYLQRRYRIVLRSTMGPIDVYLVSQFDEKFEELGGVATPAKHSNVPRHQPAEDFNTSYAGQSSTLMGVAHDAQHSQKIPQDPSALHDFGGMTRISPSDVHTDSDYWLLTEGDVSMTDMWKTELG

SEQ ID NO: 57185 - protein, 186 aa, Zea Mays
MCSTTSRRPASTPPPPVSSKSRISERALELLALPNDGVPKLLLDIGCGSGLSGETLTEHGHHWIGYDISKSMLDVALERETEGDLLLADMGQGLGLRPGVIDGAISISAIQWLCNADKSSHDPRLRLKAFFGSLYRCLARGARAVLQFYADNVKQSEMIVTFAMRAGFAGGVVVDWPHSYYITSKG

SEQ ID NO: 57186 - protein, 67 aa, Zea Mays
MKRVGSTQPFLLQLRMRGPLNPSQTSVLIGSTVLCLVIDDFPRWNMSLPWSAGLEIDANAKEDFHVS

SEQ ID NO: 57187 - protein, 487 aa, Zea Mays
MEGGMSSLEAAMKASSSMASSMARNADPNQQTLRPNLVEQFYFPRPGQSLPGIPPFFGPPSSLYLPNDNEAKFGNNFESNPSQNTDWNPQAIVSNLTFLEQKIKQVKDIVQSMSNRENQVAGGSCEVAAKQQLITADLTSIIIQLISTAGSLLPSMKNPLLSSNPAVRQLGNTLGSPTGFGMNANQRPSVDSKTDIPDTGKTSDYEELMNTLNTSQAERDELIKCPNPCGGEGSELTPMEDHDVKESDDGGEGENLPPGSYVILQLEKEEILAPHTHFCLICGKGFKRDANLRMHMRGHGDEYKTPAALAKPTKDYGADHAPVTRYSCPFVGCKRNKEHRKFQPLKTILCVKNHYKRSHCDKSYTCSRCNTKKFSVIADLKTHEKHCGRDKWLCSCGTTFSRKDKLFGHVALFQGHTPALPVEDGDVPEGSEQPQDGEPTNEMARSMVYSFPCSSSDGLLNLDMKMADDDLAVMGSRTVIADGCRHR

SEQ ID NO: 57188 - protein, 826 aa, Zea Mays
MGASRKLQGEIDRVLKKVQEGVDVFDSIWNKVYDTENANQKEKFEADLKKEIKKLQRYRDQIKTWIQSSEIKDKKALMDARKQIEREMERFKVCEKETKTKAFSKEGLGQQPKTDPKEKAKAETRDWLNNVVSDLESQIDNFEAEIEGLSIKKGKQRPPRLVHLETSITRHKAHIKKLESILRLLDNDELSPEQVNDVKDFLDDYVERNQEDFDEFSDVEDLYSTLPMEKVEALEDMVSLAPSSLVKGVAPVSTTAVLSTKSSVATSPTQPTVSTASSQSTSQDQTEETASQESNPEPTPQTPPPKGGNPGPSVPAVPIVVSTGSAAVSVPAETISSPVRLTVPATAATVLSSAIPRSAPENTLAVTSIPANLSTTLKDDESMSVPPRRPSPATEIGIGRGITRGTTSQALGTAPITIGPVSGNGSQLVMPLGSKVQPQQVPRTNDAIGSDSANTNENPILGGRVFSPPVVSGVQWRPQAAAAFQNQIETNQYRGRPEISADHREKYIQRLQQVQQQGGSLLNVSHITGINQKQFPTPQPNPLLQQFNSQSSSISSQVNLGLGVQGSDAGHIKSEDQQILAEDVGVESSATTGANKQTSEDDTKIPYSNPSAPAAENTQLPRDTDLSPGQPLQPGMPSSGVGVIGRRSVSDLGTIGDNLTGTSGSSGHDQNYYLQMLEAAFHKLPQPKDSERAKTYIPRHPAVTPASYPQVQASIVSNPTFWERIGSDTLATDMLFFAFYYQQNTYQQYLAARELKKQSWRFHRRYNTWFQRHVEPQVTTDEYERGSYVYFDFHVTEDGSGWCQRIKNDFTFEYNYLEDELSVQTN

SEQ ID NO: 57189 - protein, 243 aa, Zea Mays
MKHIHEKIKVGKANCFRKDDQGIVWFNNHIVVLKNDEVCQQILDEAHLSRYSIHPRSTKMYHDLKQHYWWTKMKIKITRYVARCDTCRRIKAIHMKTAGGKLEGNWRELGGHGWSSSEQQQSRVQPGRWVPSSRVGAPWHAGRQAGRGSRRDTRERAGRRGMDEGGAHGQESSSRQRGTAAMDGAVRETRNVDLEQGEGRGAASWGNPGAGAPWGAWQGGGSGHGWSRAGARRRRGLRPWMEP

SEQ ID NO: 57190 - protein, 727 aa, Zea Mays
MWEGLIQKAKDGGLDVIQTYVFWNGHEPTPGNDSDGIFFRFEQYYFEESGFPVWLKYVPGISFRTDNEPFKTAMQGFTEKIVGMMKSENLFASQGGPIILSQASIIFSLDLIENEYGPEGREFGAAGQAYINWAAKMAVGLGTGVPWVMCKEEDAPDPVINACNGFYCDAFSPNKPYKPTMWTEAWSGWFTEFGGTIRQRPVEDLAFAVARFVQKGGSFINYYMYHGGTNFGRTAGGPFITTSYDYDAPIDEYGLVREPKHSHLKELHRAVKLCEQALVSVDPAITTLGTMQEARVFQSPSGCAAFLANYNSNSYAKVVFNNEQYSLPPWSISILPDCKNVVFNSATVGVQTSQMQMWGDGASSMTWERYDEEVDSLAAAPLLTTTGLLEQLNVTRDSSDYLWYITSVDISSSENFLQGGGKPLSLSVQSAGHALHVFVNGQLQGSAYGTREDRRIKYNGNASLRAGTNKIALLSVACGLPNVGVHYETWNTGVGGPVVLHGLDEGSRDLTWQTWSYQVGLKGEQMNLNSIEGSSSVEWMQGSLIAQNQQPLAWYRAYFETPSGDEPLALDMGSMGKGQIWINGQSIGRYWTAYADGDCKECSYTGTFRAPKCQSGCGQPTQRWYHVPKSWLQPTRNLLVVFEELGGDSSKIALVKRSVSSVCADVSEDHPNIKNWQIESYGEREYHRAQSALKMCTWAVHFRNQIRKLWDTYGNLWRFPARRLPLS

SEQ ID NO: 57191 - protein, 287 aa, Zea Mays
MPSHEACCGTMFWVYLMSCVGLVVFAGLMSGLTLGLMSLSLVDLEVLAKAGTPKDKLNAARILPVMKNQHLLLCTLLIGNSLAMEALPIFLDTLVPPYVAILISVTLILAFGEIMPQAICTRYGLSVGAKAAPVVRLLLILFFPVAYPISKLLDRLLGKGHFALMRRAELKTLVDMHGNEAGKGGELTRDETTIITGALELTQKIAKDAMTPISETFSLDINAKLDLHTMGMIMTRGHSRVPIYSGIPSNIIGLILVKNLITCRAEDEVPIRNVTIRKIPRLIPFLC

SEQ ID NO: 57192 - protein, 1015 aa, Zea Mays
MGSDRAELARLCSARNWSKAIRLLDSILARSPSSIHDLCNRAFCYSQLELHKHVVKDCDRALLLDPALLQAYILKGKALSSLDKKEDALAAWKQGYEIAVRDTTDLKQLLDLEELVSSVKICGTTQSADHVMDASTCDTKVVISEDRVADTSFAATTMADTKTVVCEEAIGSSKVSSNGDTKLTNYNKKADHNKVSSSSVKDITGTQAPKKAPKLDKKNKAKAVKEINGRAEGVTGRASTDESETISLDQALFATKISKSSKSISLDFRLSRGIAQVNEGRYDQAISIFDQILRETPTYPEALIGRGTAYAFQRELDSAISDFTKAIQSSPSAGEAWKRRGQARAALGEFKEAIEDLTKALEFEPNSPDILHERGIVNFKFKDYNSALEDLSTCVKHDKKNSSAHTYLGLTLSALGEYKRAEDEHVIGLKYDESFLDCWAHLAQLYLDLAYPEKLLNCLEKAIQIDSRFAKAYHLRGILYHGMGRHRSAIKELSVALTYESSSIECLYLRASSHHAIGEYKAAIKGYDDVLDLELDSMDKFVLQCLSFYQKEMALYIASKANLEFSQFNIDDDVDPLFKEYWCKRLHPKNVAEKVYRQPPLRISLRSGRLNKQDFKFTKHQTTLLLAADSIGKKIQYNCHGFLPNQRQYRMAGLAAIEIAQKVSKAWRFLRNPKNIAKLVRKRDKLNMSQNRGGYCSTSTLAGSPTSSPNEDRVSSGISLSWQDVYNIAVKWRQISEPCDPVVWVNKLSEEFNSGFGSHTPMLLGQAKVIRYYPYYQRVLETAKTIMLDLKYVNNAEDRAIFLTDIDKLKKIEIASSCSDLYHVVGETYWVATRCDSMAFRGRRLEGTRITTQNIGKTGFDFAIRTPCTPSRWEEYDEEMTAAWEAICEAYCNDTNPTRDPGVLDAVKDAILRMTYYWYNFMPLSRGSAVVGYVVLLGLFLAANMDITASIPPGVQVDWEAILSPDPGTFVDAVKPWLYPSTKISRCLKDYTDVSCAFSTTDVPSSSPLPQDGVD

SEQ ID NO: 57193 - protein, 973 aa, Zea Mays
MLQPREADVPALFLVFIVLPVVAYFLLGRWHDSASKKARASVLAQRAAEEAYREETMACPDIIPPGPSLRTMPYFKPAPSLRQEYHECATCHAPAKTRCSRCKSVRYCSGKCQIVHWRQGHKETCQKWLGSGSSSFGGSSTEATEQMPFLANLNSPLPGGDIHLRDMNFDTLSEPSFPTTDGYNLDTDPFPADRSNMNRSNQGIHMSENGAVGVSFEKNNYNAADEIHSSEILSGNKVSNNYFGSDAMSGNGDATYPAKSNAQQPSSCAPDVRKQSKASITVYQPDMSVYLTSDMVSSCEGSYVSAGEPLQRSLSSGRTIGKVTVVNKRPSYPSSKVVSAQKSQDKVSTSYQNDAHEKNPCNKNDQRSTPTCESSQSTSSNLLKSGTSKVEVLKKPSKFLKTSLVALINDNKRNKVLFPYEDIVKFFQYEARGVSPRGLFNCGNSCYANAVLQCLMCTKPLMIYLLLRLHSKDCCSKNWCLMCELEQYASTLRESGGPLSPSRILSNLRNIGCRLGGGTQEDAHEFLRHLVMSMQAACLDGLGGEKHVEPSLQETTLIQQMFGGRLKSKVKCLRCYHESERYENIMDLTLEIHGWVESLQDALTQFTAPEDLDGDNMYKCGRCSAYVKARKQLSVHEVPNILTVVLKRFQSGKYGKINKCVTFPDMLDMVPFVTGSGDNPPLYFLYAVVVHVDTENASFSGHYISYVKDMQGTWLRIDDSEVQVVSVNQVMSEGAYMLFYLRSFPRPPRIYIEKGLPVTSAKRHTSKSSKGSKHDRKQTELLFPANDQAYGVYDFRPDGEGYAQDQHAELRSRAFHHADDAFADSVSADFSEATSSEWSLFTSSDESSFTTESTRDSFSVVDYGDNAGLDPISSIFGPSYAPEHGAPGSFVSRTRFSPSSPQTRYFSESTGFVSDSSMPAHPHGIVHRGRYPDSRACASSAEPLASAAHQRSGYGRYPLSRDGFVQTSGFCQM

SEQ ID NO: 57194 - protein, 131 aa, Zea Mays
MGRAPCCEKMGLKRGPWTPEEDKILVAHIQSFGHSNWRALPKQAGLLRCGKSCRLRWINYLRPDIKRGNFSKEEEDAIITLHEQLGNRYVTYLPLLINLAPPIFLRIDPFSFPFLAWCCCLFGCFAESEEQ

SEQ ID NO: 57195 - protein, 688 aa, Zea Mays
MSTIATPPPPSAAQEKAASRNKRKYRAETPSTELGPFGLEYPLTTDCVGFEFMSPEKVAMAAAVAAAEGVSLDLLQNSCENCKDLHPTAEDLLECQRYVNWGDPNEMQLEEILLKSLDTTFDNSVSLITTMGYSEAAARAAIMRTAAQYDWRESLAGFGEAAVEVLKTEGDMLPREGASVEDMRKIEEAVLGSMVTLVTEAQPFNTPGDVMYCLLMSDMNVANACAMDYNSFSLPAVSAQVIAQPVAGNYEPGSGSNLSVSITNPQTGVTFRGKLTPVPPGSYGAIKADSSTAQASPNVSNTEPSVSDKTQCVIPNIEPKKHHVPICDHSEDQPFVAAATQSVKNDKSSPSKRGGSKRDSFHRQKLTNYDKSSRALGSKGSLRSGKQSSSASAVLERKCRSFSDSTTSNLKGSSRVAKGFAASISGSEVSVDLSFTGTLSPSPSFDAKVVSNSNSAPAASTDLSLALSSSDSLTPSLSHDSNTEVVDSSSKINFSYDEEQKVWIPQDKKDEIVLILVQRQKELQAHTRDWTDWAQQKVMQVAHRLAKEKDELQSLRKEKEEADRLQEERHHLEESTRKKLLEMESAISRANAQLEKAEASARRREVENAQLTLQMEAAKRHAAESATNISELVKKDENSRKRSQRWQSDRALLQEDLAAQKSRLSRVQEHLQHAKELKDQVQMLGWKL

SEQ ID NO: 57196 - protein, 716 aa, Zea Mays
MDLEGTDGRERGEDDTAFEKQSALFALAVSDIVLINMWCHDIGREQAANKPLLKTVFQVMMRLFSPRKTTLLFVIRDKSRTPLENLEPILREDIQKIWDAVPKPHAHKETPISEFFDVQVVALSSYEEKEELFKQQVSDLRDRFQHSIAPGGLAGDRRGVVPASGFSFSSQQFWKVIKENKDLDLPAHKVMVATVRCEEIGNEKVTSFIADEEWQQFEEAVQHDFVTGFGKKLSSLLDRCLSEYDMEAIYFDEGVRSSKRQQLESKLLQLVNPAYQSLLGHLHTRTLEAFKEYFGKALEKEGFAVAACNCTETFLEKFDRGSEDAAIQQVNWDTSKVRDKLRRDIEAHVASVRAAKLSELCAKYEAQLTKALVEPVESLLDSASEDTWPAIRKLLQRETKTAVLGLESAVSAFELDEATEKELLAKLEKHGRSVVESKAKEEAGRVLIRMKDRFSTLFSRDADSMPRVWTGKEDIKAITKTARSASVKLLSTMAAIRLEEDGDNIENTLSLALVDTSRHGTTDRSIQLSDPLASSSWERVAEEKTLITPVQCKNLWRQFKAETEYTVTQAIAAQEANKRNNNWLPPPWALAAMAILGFNEFMTLLRNPLYLFAIFVIYLVGKALWVQSEIGREFQHGFLPAILSLSTKFVPTVMNILKRLADAGQEPAAAPERQREMELQPKSTRNGSLYSNVTSAGSSSVTTSEIGPEYSSPVVQ

SEQ ID NO: 57197 - protein, 57 aa, Zea Mays
MQQTNHVFPVWCGCCICDRKRSTAVKVSTVQCVMLRYHELLTGRITMLRFIRVMINL

SEQ ID NO: 57198 - protein, 542 aa, Zea Mays
MQNNREYFELASAIRSMKFNSDGKTIFCGLHESLKALSWEPTICHDVIDVGWSTLADLTVDEGKLLGCSYNQNCVGVWVVDLMRNEPYVDSSAGSHLNGSINRPIQSDDSMSSVFGRLSISRSPANEIGSDTLLGCSMSGSKESPVSTSASMRGLSKPPGKGDLRLSRSISTPLLSPRVRLNPNFIDRQKNQAATAVPLPEPIVRFKANLSSDAGMLSRKSHASAAPMYRSRSNSSRYGIMESSSIPVLALRHSSRKDAGPVHSEAATGELADIEPQNIEKEGLVANHGKEDGKLVPVIASRSSKIVEEVGYRRITNDVGCKRVTLESGLRVNSDMDYRSRAPESHEVQQLIHLSEPAGLHGKFIRESSGAGDNNCSGSICTESAEFNEVDIWYRVSGFDKWNPAAARNPEFASIHRNEVIGIRQLMESSGKYVVDDRPSSSNYDNIQYVTTLYSSRLHPSLSGKLSASASYEDDISGLVENHQEFIHVMKSRLTKLEVVYRCWQRNDIKGSIDATWRMLDFAELYHIRCLRFSLTSYHQSS

SEQ ID NO: 57199 - protein, 1456 aa, Zea Mays
MTKLTYLNEPGVLYNLKKRYALNEIYTYTGSILIAVNPFTRLPHLYNEYMMEQYKGIRLGELSPHVFAVADASYRAMVNDSRSQSILVSGESGAGKTETTKLIMQYLTFVGGRAALDDRTVEQQVLESNPLLEAFGNAKTVRNDNSSRFGKFVEIQFDSSGRISGAAIRTYLLERSRVVQITDPERNFHCFYQLCASGKDAELYKLGHISSFHYLNQSNTHDLEGTNNEDEYWKTKRAMDIVGISREDQDAIFRTLAAILHLGNIEFVPGKDADSSKIKDSTSNFHLQTAAKLFMCDSDLLVSTLCSRSIHTREGIIVKALDCAAAAANRDALAKTVYARLFDWLVENINKSIGQDVDSKLQIGVLDIYGFESFKNNSFEQFCINFANEKLQQHFNEHVFKMEQEEYKSEEINWSYIEFIDNQDVLDLIEKKPIGIIALLDEACMFPKSTHETFATKMFRNFSSHLRLERTKFSETDFTISHYAGKVTYQTDSFLEKNRDYIVAEHCNLLSSSRCPFVSGLFTSLPEESIRSSYKFSSVASRFKLQLQALMETLNSTEPHYVRCVKPNSANRPQLFENQSVLHQLRCGGVLEAVRISLAGYPTRRTYAEFVDRFAVLVPELMIGSYDEKMMTKGILEKMKLENFQLGKTKVFLRAGQIAILDMRRAEILDNAARHIQGRFRTFITRKEFVKTREASISIQAYCRGCLARKMFANRRETAAAVIVQKYVRRWLLRRAHLQACLAALLIQSYIRGFIARRYFSVIREHKAATVIQSTWRRRKFVILFQNYRQATVAIQCSWRQKLARKELRKLKMAANEAGALREAKNKLEKKMDDLALRLTLERRLRASSEESKSVEILKRDKIIESLSAECAAAKSAAQNEHAKKLLLQKQLDDSLREITMLQSKKIMSAEAAEENSNLKNLVESLSTKNSILENELIVTRKSSDDTMEKLKEVEGKCNHLQQNLDKLQEKLTNLENENHVLRQKAFNMPTMNNLSVAPKTLSEKFSASIGLPNSEPKHIYESPTPTKYLASLPQTLSTSRRSRLPVERHEQNHEILLRCIKENLGYKDGKPVAACIIYKCLLHWRAFESERTAIFDHVIEAINDVLKGNEADGRLPYWLSNTSALLCLLQRNLRSNGLFTTPSRRSGGALGKIAQTLRSPSKFIGRSDTLPHVDARYPAILFKQQLTACVEKIFGQLRDNLKKEISPLLNVCIQAPKSTRGQSGKASKSSGVGAHPASNSNWDNIVNFLDLLMDTLRENYVPSFFIRKLITQLFSFINIQLFNSLLLRRECCTFSNGEYVKAGLSLLEKWITDVTDEFAGTSWHELNYIRQAVGFLVIHQKRKKTLEEIKQDLCPSLSVRQIYRICSMYWDDKYGTQGISTEVVAAMREMVNKDTQNLVSNSFLLDDDLSIPFSTEDLSMAIPSIDYADVDLPESLQHYTSVQFLLRQQDPQPAQ

SEQ ID NO: 57200 - protein, 1960 aa, Zea Mays
MVHSTTSSHKCVSQVSATTIGQLTALIRQSRPITRPFTAPGPSVRARMTFTSVVDHRSCAPHLHTTSRPTWLHKHNLTLWTNMQIRRKSMVQCGKALVGFCGASDGHERGEPRGARVLKRTVGHSVANDGPRHPARFSMGDGGVACAVRSVESFRAGALVRRGGAGEAMPDKGERAHGHRHQHQHWKNQQSATAADLEEGELLNGEAGTNGLPERSMPPKKWRKVLAASAAAVEVEPGEIVSTKQAVPLKKERRNGDVEKVELLPERQRKEKSSGKSTRKSIKDDVEPGEIALPGKRRDAKSQLAHDNSRRPSSSAQKGSLRDSDEEPGEIKPESGISGSVRKNRPTEPHSSNHKHHTDTSDQSGSKHRRKGEGKSSSAARHLSGRIREVSPPTRDRRDKHERSPGILGRFPHDRFRHDRYDRSPSRLERSPHRTRHYDSRDRSPYISPRHRARPPQFRDNTPSRVDNSPRGRVQHEDIRDRSPFRHDRSPSERCRPTDTHEASKKSRSSNNSEKSHHKSKSAKQSSKIKSGSNGKNEEKISKEKHTESSQYTELPPPPPLPLPPPPPPPPPPPPLPPAVPPPLPPSPEPEPPGVLAEDMIEDMDICDTPPHTSAVPEPTEPICDIGRWFYLDHFGIEQGPSKLAELKKLVQDGYLLSDHLIKHADSNRWVTVENAASPLVPSDFPSLYSDTSTQLVNPPEAPGNLLDEALEEASNLASGAEDKQMEETSAEDSEEFCIDDRVEALMDGSILVHGQELEIIGELLGADFQPADWQRWSRREDFTRLNVHTEVNNEINGGTENRATDAYGLVSVEKNFHHNAESSEWFSGRWSCKGGDWRRNDELSQDTPFRKKLVLNEGYPLCQMPKGSCEDPRRPCKDELYYPVRAKKYELPLWAFSLTEEDIDSVNDTTKSGVVPGRPGQTRQPSRGVKGMMLSVVRINSRVVKDQSSVEPHTKPRGTDRPLSRSSRSHSIGAERSSVHEGSSHFRKHHDHDSQSSHKSKPVPNIPKDRVCTVDELSVYRGDWYYLDGTGHEHGPFSYSELQELVKNGTIIEQSSVFRKIDNTWFPVLKDLKPGSSVPSAARSSSFTAALMLPDQYNFGVNQGSGSFNQLHPQFVGYTRGKLHELVMKYFKSRELTLAINEVLDPWISAKQPKKEFEAYFSHNSASRNLLPEDGGSAKKAKLLPDQSDEDIHLSQDILASRKEDICFDELCDAEPSVDNDSLNPGAGNETWGLLNGHVLARIFHFMRADVKALISSAATCRSWNAAVKYYRNMCRFIDLSSVGPLCTDSVFCDIMAGYEKQNIRTLILAGCSNLSSHALGRVLEQLPQISYVDIHGCGHLGDLKNKFQHVKWIRSSLNPEESYRKIKTLKQIGDGNNYASKVARNFTNHLDGSDELDGYFADISNRENANLSFGQGFYKRSKLLDARKSSAVLSRDAEMRRLMQRQAETSYRKMEEFIINRLREIMRSNRFDFFIPKVSKIEGRLKNGYYARHGFRTIKHDIRTMCQDALRYKDGNDSGDIKQIVVSFIQLAKRLGNPRYISDRYGAGAQDSLDINQYSFDTKLKKKQNKIRGANSLAAGADNSSRAFDLEIKRSLSKLKKKDVYSGSETSDDDDGYSEVDETESETTVSDTESDLDVNSGAWDLKGNSLKLIEPGESVTDDRILGARMTKASLVPPVTRKYEVIEEYLIVADLEEVQRKMRVALPDDYSEKLLSQKNGTENLELPEVKDYQPRKVAGDEILEQEVYGIDPYTHNLLSDIMPADLELSPTDKHIFIEELLLNTLNKQVRHFTGSGNTPMTYNLRPVIEEIQRSAEDNGDRRTSKMCLGMLKTMRNRSEQNFVAYRKGLGVVCNKKGGFGVDDFVVEFFGEVYPSWRWYEKQDGIKHIQNNSEDQAPEFYNIMLERPKGDGDGYDLVFVDAMHKANYASRICHSCNPNCEANCSRISTFILFDGAQCNS

SEQ ID NO: 57201 - protein, 78 aa, Zea Mays
MSRRDRLAVWGRFMAETSVGVQSTVSRASPVPSDVCTSFHGSLVTSTVRSSRMNRWRVEDCVRWPCTRFPARGGDPLP

SEQ ID NO: 57202 - protein, 403 aa, Zea Mays
MLEDGIKRDPLNAGKLKLFASVDVAQETTSFVLHFTKPPKVTLPYRIENYLSESSILYFQKDSVDSDVLHPQESEQYAWDDLSSPRKLVVRIVDTPALREIKIDKISPWKPFLKMRQNSRLNLDFSFSGGLNSRKQRFDESFGLRVFKIGYEVYADGLTRVLRICEHADNPKIEKIQWPIANIQFRISYVCIHLLDKDQNGENVQLPSTILAARLQHVSSDSVVTNRFKQVSVAIHSLNVDEKWEGASIGTILRRNKLQDATLDENILRMIFVLNSTDSSVKQIQYCAIILQPVDLKIDEETLMKLVPFWRASLAPSGTTSTQFYFRRFEVHPIKIIASFRPGGRRTTYSSAQEALRALLHSVIKVPEISNSAVELNGVLLNHALVTFRELLLKCAQHYSWHV

SEQ ID NO: 57203 - protein, 832 aa, Zea Mays
MAPTVPSAAKKSEVADLKQQLRQLAGSRAPDADDQRRDVFKRVISCMTAGIDVSAAFGEMVLCSATSDVVTKKMCYLYVGSHARAHPDLALLTINFLQRDCRDQDPTIRGLALRSLCSLRVPNLVEYLVTPLTTGLKDPSAYVRTIAAVGAAKLYHISATACIDADLPASLKALMLSDPDAQVVANCLHALQEIWTLEAANSEAAAREIETLYSKPVVFYLLNKIKEFSEWAQCIVLELASKFLPSDNNEIFDIMNLLEDRLQHANGAVVLATIKVFLHLTMSMTDVHQQVYERIKAPLLTLVGAGSPEQSYSVLCHLHLLVMRAPMLFSSDYKSFYCQFSDPSYVKKLKLEMLTAIANESNTYEIVTELCEYAGNVDVPIARESIRAVGKIALQQYDVNAIVDRLLQFLEMDKDYVTAETLVLVKDLLRKYPQWSHDCIAVVGNISSKNIQEPKGKAALIWMLGEYSQDMHDAPYILESLVENWDEEHSPEVRLHLLTAVMKCFFKRPPETQKALGDTLAAGLSDTHQDVHDRALFYYRLLQYSPNVAERVVNPPKQAVSVFADTQSSEIKDRIFDEFNSLSVVYQKPSYMFTDKEHRGPFEYSEDLTGLTEDPENVISAQRYQENDNDLLLSTSDKEDNGTRASNGSSTSTYNAPSDLISPSLISSQAPAETSLVNTGGTYSSQSNFSLDDLLGLSVTEAPALPQPTLALNSKPVLDPGTFQRKWGQLALALSQECSLSPQGAVALMNPQSLIRHMQSNHIQCIASGGQPPNYKFFFYAQKDGAAAFFLVECIVNTASAKAQLKIKADDGTAAEAFSSLFQSALSKFGLS

SEQ ID NO: 57204 - protein, 129 aa, Zea Mays
MSFKLIFSSAIIFSAICFGPINILCTLPIYSWDCNCKACNSSHMCLVPAVVAMEQKIHVNPLKILSQTKCTHIQNSSSSCPNQLRRIRMPWILRGRSPPIARSLCKLMQMRQLPRLRLLASSGGHYTPH

SEQ ID NO: 57205 - protein, 1213 aa, Zea Mays
MPRSSRHRSHRSHRRGGSADRSESEGEESAPASGAREEAAAAARVSKDAEPERRRSSSGKEPVRSGNGYPEHGKKRKERVEDAVVDVVSDRWNSGVCDDHLVDKRSKSETFGHAEMEKLPDKSRGSGDESKRSSRRAMIVDDRAEEVASKSDSGKRRSEKEKDGRKESAGHYKDDRDREREKERERDREREKEWERQRERDMGRSRDREREKEREREKEREREREREQEQEHEREKDKDRERDRERERERDRQKDRERDKKDYDSKHERYEDGGSRKSGSKTSRAEEDAYLYRRDTDVNEISAKGKYNNPDMQADKHSRRKDDSEDTDKWPTDNRDSDDRKTLSRYEHGKSRSSKEQRFDDDKYKEKYKDEYGRDKRQHDDKFSDERVARSHESDRANYKSAKDGHKSSESHYRKDAVQDDHYEDYGNRYKESRGKKRPPEENDDQYDLKPPNTRDQRVHLEKSSGSGRLDSLIERARPDRSCSPSKIHSRSSPSTSSYHDKDQNRHGSKVVDHGKREMPYDERNSRPRTSSARERTPASRLRDRDAENWSSERLKQKDDQPCDVALEIPTSSHYDRTPRKDKHTSPKQLSEKSPSSGDQRFSGRPSGGRSLDNKGERNSLTKYRDRDGDLAQERSHHQDRTPAKVPFRELTPSNSSISRSCHFSGSSPNHPLPPSARNSDSSFLSLHDDDRRPQNGDRRFHGHQKRNDMNSVRGHGHAWNNPPNWASPVSNGFAPIQHGGPPCFHPPVHQFRGPPMFNLRPQMKLNQPGVSYPMHDAVDRFSTHMHPFGWPNHLDESCPPHMQVWNGGSSVFPGEPYIYGRQEWDQNRPHGGSRGWELTGDISKGPNDVPDAELLIAKKDPYSAITAVSDSGGQHNLQPQAEQKEIGHLTAEKFETKDDSKSSKSLESLQGVQHVTSMLTKNGAVFCKDYLARINVSHDLVESELYKRCISLLGDLGVTKASHLVRNGIQDNENIEKMSTKYGHLNPFSSRYLKSDSTIFQRALALRNNQTRKGLIIVSASVKMEANMDVLEDDHGKEMLEQVVSNPALQRHTEVMEEGSLSKQELGDGIEGTIPATIGSGGLDAPPEIPQPEVVVATTAITQFNKDMEDVLPPAIEDGALQATLEHAVGILEVTPGDGLGNVAPSSGDDMEIMPSAMTEPRLGKETAPVASPPDSQEKPSIMHDSETATRAEEARDIAPLRVCEGTMGDGL

SEQ ID NO: 57206 - protein, 343 aa, Zea Mays
MTCAAYSIRGPLMLAARRSSDVFASSKSCNGKSSVSYPVIQWWSSNCSSFTMRHVASHHHLIVKASATWHSKASATDAATASDERITVLVIGGGGREHALCYALNRSPSCAAVLCAPGNAGIAQSGDATCISDLDISSSDDVISFCRKREVGMVVVGPEAPLVAGLVNDLVKVGIPTFGPSSEAAALEGSKDFMKKLCDKYNIPTAKVLMMRLESDLAQVLLSACQGELGNVSLTWSPEMAMVVVMASQGYPGPYKKGTVIKNVDKAEQVSPAVKIFHAGTALDGDGNLVAVGGRVLGVTAKGKDIEEARARAYGAVDAVEWPEGFFRHDIGWRALRQKQAAK

SEQ ID NO: 57207 - protein, 957 aa, Zea Mays
MAGAGAMGFPRELMVQRIQSLVEEGFWDALRRHKLDVLGTDDSPIPITGYYTPRQRRPMASFFNLRSGSLVPPSHSSVGDRNNCPVPGTLINTNNMRGFENLDREQLLKAEAKKAASMYTSLQKWRTSSETTVIPFFLVSISSDSSASIRQLKEWKACQGNYQKLLFGFYDHGCRSDCPGWVLRNYVAFLSIRWKIEKAQIFCYREYKGNPDLEQSLIGEASFPSPYGWDNPEFLPDAIGWEGVKPGKGTKEMKPKEIDLQSMNPASQDEEKQLMHLKLMGWRHFPVNIDRLSHVRVLLLGAGTLGCEVARLLMTWGVRKLTVVDSGSVVMSDLAKQSLYIDKDCGVPRVSAIAPHLKERCPAVEVESIQLEIPMPGHPVSSSKMASVLDDCKHLQTLVAANDAIFLLTDTWESRWLPTLLCSSENKIAISALLGHDSYLVMRHGAGPGTSGGTDEVTTQKLSTENALGHQRLGCCFCNDTASLINPISYETLPGLTSVASGKAVELFARMLHHPDEIRAPGDTAGTETEHQLGLLPHQLRGSLPKCDLFVELNNSSVNCTACSVAVLSEYRRRGLDFVMQAINYPAYLKDFTGISDSKRPDTCPKIPPNISVNSDKISDVRCLLLGAGTLGCDVARILMDCGVRKITVVDSGHVVVSNLARQSLYTSDDRGAPKATAILRHLVERCPSVDAQGIKMEIPMPGHPVSPGEAAGVLQDCERLKELVLSHDAIFLLTDTRESRWLPTLLCTNENKIAITAALGYDSYLVMRHGAGPGISCEASSVVTAIDKMSTEDALGRQRLGCYFCNDVIAPVDSVSNRTLDQQCTVTRPGLASIASGRAADLFRRMLHHPDGIHAPGEIAGTGSGHEHGLLPHQMRGSLSQYNILTLLGYSSSNCTACSHAVLYQYRRRGMDFVMQVINEPTYLEDLTGLTELMKSASCSQVEWVDEIDEDDFVEV

SEQ ID NO: 57208 - protein, 374 aa, Zea Mays
MPLHFTPPLLVLYPRLFPSLRLFPSFLQIKSERGREERPSNAALQLLRLHLRSRRQAPAVRRLVQAPHHGGGLRGDNCADAQCSDGDASRGHNNEPSAVSAPAGAAVAGEGQDPEPGADGRGLWARAGAEPGAPRRGAGVHPRGGVVPPVPRAPVQGPGPRLRHVPVRADRQRPRRPPPRVRLPLRGPGRAGVGAPARGDQVPARAGLQRPRPAPPRAHLPPPPGLPGQPRAGAAGPDPPRLQRGAHPGAEAGVPGRARHVPRRRGRHGAALPGALHLQHRAELPAQVRVPGGRHGRRRRGRQGLPAVLRLQPREADRAAPPRRGGRRRRAAASGHAQGHRRGVQGDARQGAGAARAGSDDGLIDRGASTAVCT

SEQ ID NO: 57209 - protein, 178 aa, Zea Mays
MDAFLYIVMKFQCTCVAWVPEREGIFVVSHADGNLYVYDKFKDGNTDWTFPTVKDQSQVLISHAKSSKGNPIARWHICQGAINGISFSPDGAYLATVGRDGYLRVFDFTKEQLIFGGKSYYGALLCCSWSADGKYLLSGGEDDLVQVWSMDDRKIVAWGEGHNSWVILSLQLFLAIIT

SEQ ID NO: 57210 - protein, 226 aa, Zea Mays
MGALDWNKIVHQNQGWRLISCIWLHAGLIHLVVNMLSLLFIGIRLEQQFGFVRIGAIYLLSGFGGSVLSALFLRNNYISVGASGALFGLLGSMLSELLMNWTIYSNKAAAIITLLFIIALNLAIGILPHADNFAHIGGFATGFLLGFVLLARPQFGWMEHHELPQTNQPPKYKAYQYILWVVALVLLLVGFVISLVMLFKGKNGNDGCHWCHYLNCVPTSKWKCNT

SEQ ID NO: 57211 - protein, 102 aa, Zea Mays
MEEILYWPSTQHFLGLYDFKSKTHQDACCPEGMCRAAVFALHVKEELASWPEQSTRQRTWLTVPEAASSCRYQWMQEALLTGFSDWHDKWSRGGGGTNCDPA

SEQ ID NO: 57212 - protein, 120 aa, Zea Mays
MEQQVHLQDALNDTLKAEVQRLKVATGQGPANGGGGMMMNFGAVPRAFGGGNQQTFHSSQSQAMQSMLATHQLQQLQLHSQPQQQLQAQHLQQVARDLKMKGHLGAQGQWGGGKSGSSGS

SEQ ID NO: 57213 - protein, 282 aa, Zea Mays
MTTRNEDLTWQMRAIRVLPMFILPAVSSVIYSTVVNFTRMFEQKDQKTLEKLRAERKAKIDELKERTNYYLTQQLIQKYDLDPAAKAAAASVLASKLGEETGLKVHVGEEPKLDAAVARSNDVEIVPSDGLRNRKQPSARGSRTGSPTSHTPAQGTETNLPPAPASAGLETAPAPVVVEHHQGSGASDGGGWIAKIAALLVGEDPSQSYALICGSCHMHNGLARKEDYPHVTYYCPHCHALNTSKQSMGQYSGSNSGRSYPRKERQTSNKWRQVDGSYDLYC

SEQ ID NO: 57214 - protein, 785 aa, Zea Mays
MLNGTARTSLCLAGADGVAEYTQRDRGEIVEFDTDTTASNKSKDVPPPNSGMIISDLLDLKITCLPENKETSPSSITKEQSSSVDTLNLSAANLDSFFIERKEEMTSASLPQTHFLEQENKRTDSKSHESRLEVHAAPKSLISSQRTNQIEATPAFASWDADFQSASSENAAKNSKQPDLFKSTSVAESFSFPASEIAIKPVVSTESKTNTRSAILEHHSEVLASASSTLFGDDLSDQKVVHHIFESSNAPGFTESSLPMDFAKSDQLHGRDDDGFNDDEAFDEWQEFTTSGNQGSLSNAEHIEEPLKRDLSENDVIDPLRVGSKESPNNVIEKSSNEWQGFASVSGQGRDFVTSVERSTSDHRLNLVGPVGDEETMSSISHQHSSEINPVDVWHVGNVKAQNTAEMVKEKNDSFDDWQDSTTTGQVQDTSLNQTGDMMEVSKASHKETDMDSWFIGHSREPANTGTMNANNMLDDWQGFTGSDQAQQNSSSTGAEMISVPFEQHGGTVSAPSWANGSSNDAAKTSSTSIESDPFDVWQNFTKSGHLQENMSSLGREPSSLSPEPAKGNDSLDLWITSNFKESKSNDVGRTNASSDGWQDFASFDQAQRITKVHVEGHVVKDPSGAETLDLWASSHVNEKNLEQISEHNDLFDDWQDFQNSNPQQTTLQVSSDASLFDITLASRPDAFGEQEIGSVLQVASSENSKDKKEGSNESKAFPSDDHLKSTSGMQQMGDVDSLSSLWPANKPEPANTNVEQLLAQMHDLSFMLKDELSVPDKPIDHSKP

SEQ ID NO: 57215 - protein, 174 aa, Zea Mays
MRYRWAYAQPWGRSRLRYVNDGRPFWQYIVSSSTGCSNLEYFEELYQYYTTEKAWHLCDPDAGRVFEALRKAGVKTAVVSNFDTRLRPLLQALKCDRWFDAVAVSAEVAAEKPNPTIFLKACELLGVKPEEVVHIGDDRRNDLWGARDAGCDAWLWGSDVYSFKEVAERIGVEV

SEQ ID NO: 57216 - protein, 342 aa, Zea Mays
MNMGGVSPSTVRCKHCSTQLTVCPGERAIQCTQCCGVTRIRRRRVQRPAAAPPTTGFPRARGKKRALLIGITYAAGLRPAEGGPQRRQVHEATPLPALRLPQRLHHHAHWLPTKDNIRLGMQWLVEGSSEGDSLVFHFSGLGAQVADDDGDELDGYDEAICPMDSFQKGPILDDEINETMVRPLVHGVKLHAVVDACHSATVLDLPFCCNMSRSGSWQWKDESPPSGAYRGTSGGKAMLISGYSDGKAKSSVASAQKPEACATMGAMTHSFITAVEREPQGVTYGRLLTSMKAIMTNSGGCAVQGPIGAGAAARKVANFSGVEEPNLSSSEKFDIYRKAFVL

SEQ ID NO: 57217 - protein, 496 aa, Zea Mays
MALKFLNKKGWHTGSLRNIERVWKAEQAEEAERRKTEELKKQVAAEREKAEFRAMQERAGLRPAQERLDFLYESGLAVGKSSEGFQALQQSAPGAAAASTSAQAATPGALFEDKPQSANDTWRKLHSDPLLLIRQREQDAISRIKNNPIKMAEIKKSVEAEKKQKEEKKAKKKHKKHHHHKSKSKRHHSDENSDSDEISDGKDERRKRSHSSLHKKEENMSRHKKQHREDSSDSDDEPQRRKQDVSENDEPRRRLHDDNEPRRRWQDDVEPRRRLHDDDEPRRWQDDVEPRRRRQDDGESRRRWQDDDELRGRRQVDEKPRERSYVNRPRYDRSDADDRRRHHSPRDTKPKRVDDGHKTGNSTSEHHSRSEQGSGEQTRQESEHDRNSGPSLNRRRGGVHHMSEEERLARLHQMQADAEVHEEQRWKRLKKAADDDAKEATTVNANQFKGKNFLEDEKKSIFGTDKGGSATIEESIRRRAFYSQGGRDAEGNAFRR

SEQ ID NO: 57218 - protein, 117 aa, Zea Mays
MYQEGHAKQHWKDTQHCYSLDLETQRVWDYVGDSFVHRLNQSKSDAKHAKFKSKSKYSGDECVNCSCNDDSDMGGAMFSSKAETIVDEYNRLLASQLETQREVQTCSSFLLSFLCHY

SEQ ID NO: 57219 - protein, 646 aa, Zea Mays
MQDDTENMEQNEDDELILGEDDVSAWRELRLHPLLLKAMRRLGFKEPTPIQKSCFPAAAHRGKDVIGAAETGSGKTLAFGLPVLQRLLEEREKATRLQQEDEKMEERSCGSPLRALILTPTRELAKQVCDHLKDVAKFLGIHVVPIVGGLSMEKQERLLKKKPEIVVGTPGRLWEHMSMNNQHLVEADRMIERGHFRELQSIIEMLPLTNGSDEQAARTMPNCETVPILQIKKRQTFVFSATLALSSNFRKKLKRGLSTSKASTPDDVSSIEALSKQAGMKSNAEIVDLTKASILPEKLEESFIECSEEDKDAYLYYILSVHGQGRTIIFCTSIAALRHISSILRILGINVLTNHAQMQQRARMKAVDRFRESENSILVATDGFARGMDFDDVRTVIHYQLPHSTDVYIHRSGRTARKSLAGCSIALISPTDKSRFYSLCKSLSKENLQQFPVDHTYMSGVMNRLSLARQIDKIARKTSQENANKSWLQRNAESMGLILDTSDSEEDHVQGHKKRKATSAHLQKLQQELSDLLQCPLQPKTFSRRYLAGAGVSPLLQKQLEELAKRNASNNSSKSKNKGSGFVVIGQDRVEPLQALQNSGQEVCVNIDKEREKRRVAENWRRKKHEEKKRTQEQKRKDKRKAKEMA

SEQ ID NO: 57220 - protein, 415 aa, Zea Mays
MNTYMIEDMDSAYDSDASEEGDDDGDDLSVRQGTPYTHIHEIVFSTIDKPKLLSQLSALLSDIGLNIREAHVFSTHDGYSLDVFVVDGWPVQDADGLHKALEASILRNEGSWSGSSHSSAAERTLPFQVKGGEWEIDKRLLKMGGMVASGSCGDLYHGTYLGEDVAVKVIRAEHLNKNVWNEFTQEVYILREVQHKNVVRFIGACTKPPQFCIITEYMSGGSLYDFVHKQHNVLNLRTLLKFAVDVCRGMCYLHERGIIHRDLKTANLLMDKDHVVKVADFGVARFQDQGGVMTAETGTYRWMAPEVINHQPYDNKADVFSFAIVIWELITSKIPYESMTPLQAAVGVRQGLRPGLPKKTHPKVLDLMQRCWEADPSARPAFPDILAELEDLLAQVQGTPGKTAHAPSNNSNTKD

SEQ ID NO: 57221 - protein, 111 aa, Zea Mays
MPRFQPENLDKNAQIFERVSAMAARKGCTPSQLALAWVHHQGNDVCPIPGTTKIDNFNQNVGALSVKLTPDEMAELESYAAAGEVLGDRYGDQLANTWKDSETPPLSSWKF

SEQ ID NO: 57222 - protein, 67 aa, Zea Mays
MSTVPTDPPQRESVRATREHSIPPSSLQPGGYTLLPPSPMPSARLSFHVWNSWVQAYPVPYPGHVTS

SEQ ID NO: 57223 - protein, 82 aa, Zea Mays
MRPSPRRSLRRRRPIWHGWRVALPDSAPRNGRSGSTLCRPVWRGPRLRRARRLSGRANSLWTRTTSWARGPLTSKCQIKSPD

SEQ ID NO: 57224 - protein, 380 aa, Zea Mays
MGSPKELQRLKTEIQLLRSLHHKHILKLYASWVDNKKRAVNIITELFTSGNLREYRTKHKKVDMKAMRRWAKQILTGLAYLHSQKPPIIHRDLKCDNIFINGNHGKVKIGDFGLAMVMQQRKTQSIQGTLEFMAPELFGENYNELVDIYSFGMCMLEMVTGECPYSECQGFVQIYKKISEGVKPVALSKVKDAEVRSFIESCLASAADRLPASELLKSPFLMIDDIIINDKTSNPVQEPIAFPPNLDLDLEATPIFISLLPNGTVDNGKGSFSLVLRRGGFVLEGDMSGSNPVNLLLRIPVPNGKCKNIEFAFDLENDTSLLVATEMVQELELPSWSMPIVAKLVDAFLLKTVRGWRPCVQVGQMIQAVQNTASVNGKSI

SEQ ID NO: 57225 - protein, 165 aa, Zea Mays
MSTLPWNVLIVLSLSASTWEIRTLYTSGSSSPKCVVTLMLEIAPSFWGRWKRRHSNFDKSIPFALLSQVAGIREYFAANPALTSELPSTVVKSKASETLIIQSEHEDSELGDEFYDALTRGESFEDGDSDDDDDATTPKARKVKLKNVSWAIAGLALKTTKGCWR

SEQ ID NO: 57226 - protein, 635 aa, Zea Mays
MPGGRETVWISEARCACLVFVSFSNSLVPAHSVIDKYLREARRILAAAPEGGGGGDAAAALGLVDAALELSPRMEAALELRARALLALRRYREVAEMLRDYIPSCGKSCSGEDTSSSSSASLLSTGSGDLGTISRAKLLSPDRHRSDDAEPDARPVRFFRCFDVSELKRRVLAGLSKNPNTDTQWRYLVLGQACFHLGLIEDAMVLLQTGRRLASAAFRRESVCWSDDSFSSSSATAAAAPSVPSGKTSKSSSAFFIIPATESEAVSQLLAHVKLLLRRRAAAMAALDAGLPAEAVRHFTKILEARRGVLPHPFAAACLVGRAAAFQAGGRPADAIADCNRSLALDPAYIPALRARADLLQSVGAVADCLRDLDHLKLLYDAALRDGKLPGPRWRPQGGVRYCEIAGAHRKLTARIQGLRGRVAAGEACNIDYYLLLGVRHGCPRSELERAHLLLSLKLKPDRAVVFGERLELVDEHRDLEAVRDQARMSALLLYRMLQKGYSFVMSAVLDEEAAERQRAKDAAAAAAALAAKQEAATQEPPQPVPGKSKNTESGSGRPRSPPGRAQTAKPKPKSKAKAKSATAATMPKAPAAVNSTAPVYQGVFCRDMAVVGTLLSRGGAFDRALPVKCEAMSC

SEQ ID NO: 57227 - protein, 568 aa, Zea Mays
MASAAAGTPKRCYYEVLGLSRDCSPTDIKLAFRRLALSLHPDKQPPGSDLAAATAAFQELQHAHSVLSDPQERAYYDSHRSQILFSDPASAGAKSASIVPDLFAFFSSSAFSGFSDTGRGFYKVYGDVFDKVFAQELAYARRMGVPDPAAPPVIGNLDSPYAQVTAFYSYWLGFGSVMDFGWAAEWDAARGESRRVRRLMEEDNKKAMRKARREYNDAVRGLAAFCKKRDKRVVDMVLKKKLEEEKRKAEEKERKKEEDKRKKERAMACQEPEWARAEEVEEGLYDEDEEEEMRAKKEELYCVACNKKFKSDKQWKNHEQSKKHRDKVSELRMAFREEESLKEAEEGEGDWNEVDVGFDFKPTQESDDESAFSDAAEELAEEFEEGLEVHDKENGDKDFDSAEQEVGSYDEASVLEAMLSSCKNRKGGYVAPPEEALSGTAEDDDHHRSSEVNNAKRKGRRRRAAKKEQDESNYAGNEHHGKCEVQPEGSVHGNDVDDIMEGPSSSNVNNGSVSKGDKQNGENTNPKKNKKGTKKKPTVSTDQKSMSKADQKSTSKGKKQKNQFYSTA

SEQ ID NO: 57228 - protein, 56 aa, Zea Mays
MAHSLAASFSPAAARRQVTNVIPSWTSVSFQSHRMTSVSIRSRQRLRKRQWTRFAV

SEQ ID NO: 57229 - protein, 1493 aa, Zea Mays
MHGWRGAEGCDVRRRRLVRLMWPAARVEAEAPPPPAQGPATSPSGSSATHPRTTYRPESSAQKQECIDLPCPVSSDSFVKDGREIRVGDCALFRAVDVPPFIGLIRWIEKKEEGYPKLRVSWLYRPNDVKLNKGIQLNAAPNEIFYSFHQDEASAVSLLHPCKVAFLRKGVELPAGIASFVCWRVYDIDNKCLWWLTDRDYINERQEEVNRLLYRTRLEMRAALQSGGRSPKRLNSPSASQQLKTASDGTQNGGLSRGKKRERSEQGVDPAKRDRDRLLKVDDGEPGSFNLDDIKSEIAKITEKGGLPNAEAVAKLVHLMQLDRTEQKIDHSGRVILADVIAATDSPDCLGRFVQSRGLPVLDSWLQEAHKGKSGDGSSPKEADKPIDELLLALLRALAKLPINLSALQSCSIGKSVNHLRSHKNLEIQKKAKCLVENWKKRVDAEMKSNDVKPLVSGQSVSWSGKAGFQEISNVGTKRGGSSENSPKNSVPTLSSSKVLTDKPGGTDAAAKLNPGVSALSNLQHVQSTHVTTNLKEQPCKSTGGTGCPELPTVKEEKSSSSSQSPNNSQSISSEPSKDARSSTAASGGASKTSGSSSRSHRRANNGLVSGNLKEPSVGRSVSLDRSLLQDKSSQTGTASEKGIDMPSDHGNNHRLIVRFPNPGRSPARSASAGSFDDPSVTGGRASSPVVADRHDQTERRVKVKTENSRPHLASDANAESWHSNDIKGATGSEEGDKSPCAILDDDNSRTPDHSVKDAHASRAACSSYMNEKGVSETKVGTSFSPMNALIEIKYSEASHSLQAGDDTAMNLLASVAGEISKSELASSPSTSVKKLVCEGVNTGKVKVESDMGPSHPGQADAKKVAMGNEVKNDACLVPKEEQHQTAPSPELADSKAVKSSAKIEIHEGHANKCNSQHASIDSKGENRDGCTAHGKVEDGSTNKDGAMESAFGSQRSLVVSSKNSRLVLAGESSLSAADKQTQGLLKSTNHKHLLSVSDNPGAFDRHDSMAGKLDLMAAEVKKADVVGNSSVLQNDTEKKEHVSPSSADVPKLVPAASPVGVANGNNEMKESNGSSSESNSHVKSEGVNSQQSEQSAKQSSKKSSDGVCGKEDHVLSDEEGSSLAAHTKSNATAKLDFDLNEGIPGDDGHQSETTASPVVCSSAIHLTGLLPFTSPTTSGLPPAPITVAAPAKGPFVPPENLLRAKPEIGWKGSAATSAFRPAEPRKILEMPAATRDIPVSHAAGKQSRPTLGFDLNVADDQALEEDFPQSSAQTTCSESGNTRSRDGSSRSAGIELDLNRADEVADNGQFVPNASHRVEVPLFSTRSLPRVLSNAGANSSRDFDLNSGPDLYDVGTEPAPRSLPSKNTSSIQFLPQVPVRMNSDAMSNNISPWLVSTSPCGPVAIQSFLPSREQPYPLEAAPGAQRIIAPTADGGQFGGDPCRPPVISTSPAMVFHPPAYQSSIFSNSFLLSCWASRSVAFPTFKAVCHKSC

SEQ ID NO: 57230 - protein, 299 aa, Zea Mays
MFGSNIGPNTTLEVFLHILSAASEFDELPVRHNEDNLNRILSGNVPYPVDQHHLDDPHVKANLLFQAHFSRAELPISDYVTDLKSVLDQSIRIIQAMIDVCANSGWLTSALTCMHLLQMIIQGLWFERDYESLWMLPSMNDDILDHLKSRGVSTVPSLLDLSREELRRVLQPFSASELYQDLQHFPHVDVKVKLHNEQERSKPPTLNIRLQLKNSRRSASRAFAPRFPKAKQEAWWLVLGNATSSELYGLKRISFADRVINTRMELPQTFNVQETKLILVSDCYLGFDLEYSLEHLTKG

SEQ ID NO: 57231 - protein, 473 aa, Zea Mays
MCMRKPHGRGLELARKHVASCLTELNLMHKSRKFLKSQSSTMVQQSDGNCTTASGCQPVGFDVSLNSRLLSPTPPRAVKVLSWSNAIRYFERLLHDLDVICALSLNPVLDNVLHFIVQFQKTVPDLVPRAFLQTLLVQDGKLYGEYFFSDVISRALSLPDIIGDKEFQMNEFVVQLGQLVINLIKILCTNTAWQRRKLGKSLQDWSTISIQLELALKREFGETRNVLQNENMCMRVSKQLLIWTQEHAYWVAFRFLTLGFELDLYSPGEYSMVYWYMYVVLTKLIEKMQLRVLASSETSRRKGKKKKDHLKDSARDMAFSSSCLLPQCYLLLSEGLSMMLAVLRNESRSFQLPSIFNTEQERFMQHFDLLLKARVPEHISFYSFKESSSRAGMSDLVKYNFFKEIQKIVPSLRGSFASEPEKLAEVRRIEQVAEHNRIALNIISQVGAGDPSLRVSFEFTHHPHFAVAVVKRS

SEQ ID NO: 57232 - protein, 88 aa, Zea Mays
MWASCVGARPSRGERDSTIENTSKNKNVELEFSDEERDQELPDFSSFIPFLPPLSAANLKVYYATCFTIIVGIMVFGGFLAPIIALNA

SEQ ID NO: 57233 - protein, 180 aa, Zea Mays
MLIFIRKQNRVLLNLPQVVTACRRAGFAPHVMNLRRQTPLAAIHAALASADAMVAVHGAAVTHFLFMRPGSVLLQIVPVGLDWAADAFYGKPAQQLGLDYLEYRVAPEESSLAAEYGLNSTVVRTPWVISSRGWWEMKKVYMDRQNVTVNVKRFADLLRAARARLRNTTACAAKPAAPLR

SEQ ID NO: 57234 - protein, 980 aa, Zea Mays
MQLSYLSEPSVLYNLQYRYSKDMIYTKAGPVLVAVNPFKKVSLYGNEYIDAYRNKSMDSPHVYAIADAALCEMKRDEVNQSIIISGESGAGKTETAKIAMQYLASLGGGSGIEYEILQTNPILEAFGNAKTLRNDNSSRFGKLIEIHFSTTGRICGAMIQTFLLEKSRVVQCAVGERSYHIFYQLCAGAPASLKEKLNLKKVDGYKYLKQSCCYSIAGVDDAQMFRTVTQAMNIVHISKEDQESVFAMVSAVLWLGDVSFTVIDNENHVEIIVDEASKTVSELLGCSIEDLNLALSKRHMKVNNENIVQKLTLAQATDTRDALAKSVYASLFEWLVEQINKSLSVGKRRTGRSISILDIYGFESFDKNSFEQFCINYANERLQQHFNRHLFKLEQEEYVEDGIDWAKVDFEDNQDCLSLFEKKPLGLLSLLDEESTFPNATDLTFANKLKQHLDSNSCFRGERGKAFAVRHYAGEVAYDTSGFLEKNRDLLHMDSIQLLAKCKTSLPKMFASKMLVQSDNSMSVPYRSSAADSQKLSVAMKFKGQLFQLMQRLESTTPHFIRCIKPNNLQLPAIYEQGLVLQQLKCCGVLEVVRISRSGYPTRMTHQKFARRVSVAILHQFNILPEMYQVGYTKLFFRTGQIGNLEDTRNRTLHGILRVQSCFRGHQARHHARERTRGVLTLQSFIRGENARQIYSSLLRKHRAAVVLQRNVRCWLARRYFINVRKASVIIQSGIRGSLVRRCNGNIDLINVLREFESKQEAHGDQILIKASVLAELQRRILKAEATVREKDEENEMLHQRLQQYENRWLEYEQKMKAMEEMWQKQMRSLQSSLSVAKKSLVLDETPRMSDSSVDQSWESNGNHHVSSGSQLVPHTGGREMNAGLSVISRLAEEFEQRSQVFADDAKFLVEVKSGQADASLNPDMELRRLKQNFDSWKKDFSGRMRETKVILNKLGNGNESSPNSVKRKWWGRLNTSKFS

SEQ ID NO: 57235 - protein, 213 aa, Zea Mays
MALAAPSSLRLLPTTPSQAPSPPCASRPRHLRELRLCQRLATAAAAAAAAAAAATAPLASSPTTSVAVEERGAGKGTPIDLAALDGTWRLCYTSASDVLVLFEAAERLPLLQVGQIYQKFECKDRSDGGTVRNVVRWSIENLLEEQEGATLMVSAKFVVLSKRNIFLQFEEVAVENIKISEQLQTLIAPAILPRSFLSLQHDGHENQPTSLET

SEQ ID NO: 57236 - protein, 91 aa, Zea Mays
MVGAYAVYMWRHRRFFGNSRESLEHIGRVVVLNMVLLHFFLLILFCLRFKNFLCSMCNIFFFHRVWASFQGELITGAIWEACLGELPWHGS

SEQ ID NO: 57237 - protein, 560 aa, Zea Mays
MKLLDRPVTTPCGHNFCLKCFNRWTHNGASACGKCRRPIPYKMVQQPRINSAIVSAIRAARMSKNTNPAAAGSSAGSHHYIQNVDRPDRAYTTERAKRGGKANASSGQIFVTTAPDHFGPILAEHDPRRNTGVRVGETWEDRLECRQWGAHLPHIAGIAGQSRFGAQSVALSGGYEDDEDHGEWFLYTGSGGRDLSGNKRTNKEQGFDQTFVKMNEALRQSCLRGYPVRVVRSHKEKRSSYAPELGVRYDGIYRIEKCWRKIGVQGTFKVCRYLFVRCDNEPAPWTSDDHGDRPRPLPNIPELKDATDINERDERPSWGYDEKEGRWKWMYEPPTSRKPVRTGLRPKTGKQARKRARSDEMPNDPEKLLNEFSCCICFQVMAEPLTAPCGDSFCKACLLGAYDNQSSVRERSHGGRTLRAQKIVKRCPSCATDISDFLADPQINRDIMDVIESLQRKGDTTTKDDAASYGYGADKAEEFRGGDLQEEADPEMDAEDNSESDTDADASCGRTVVGIKDQEGQQLQPQKRKGGVAIIGTDDGPSKRITASADVEQKGNKSHE

SEQ ID NO: 57238 - protein, 107 aa, Zea Mays
MALSLDNLIKAAAAVGSARSGRLCLPASEDLLGEGHMRFAGWYLKIAAVGASIGAAMELFMIHTGFYEKVTVLESEKRAWESSPEAQAMREALNPWHKHDEQEQQKK

SEQ ID NO: 57239 - protein, 93 aa, Zea Mays
MNAALSISRSLVDARTATLSGSNRSQEIKDQIVRTITEAGGQVDYVEIVEQESLVPVERMDRPCVICVAAWFGKVRLIDNIEIHVDSSTVLSI

SEQ ID NO: 57240 - protein, 217 aa, Zea Mays
MVRWKGFDISKPKDIERQISSLKEELESLYDEELRLDDEIREAKEKLQALALDGDKRKSLYLLKEDINKIPHFQRSTMIAINAPRGTCVEVPDPNADQYMYGNLGLQEKHYKIVLRSSMGPVDCYLISGDHEDIFNQGQLVAADRLKPAVATDSSQDLQQMDCDPNQASNGGCMHAAEPSRKQEIGILRIVPSDADADADYWLASGVDVSMTDAWGT

SEQ ID NO: 57241 - protein, 139 aa, Zea Mays
MMGSYGEPMGRDGLQDLWQRAGESKMIWIITAGGAVQRDDPCHRWLRRRREPVYVQRQCAVLELLQGRRHLMFGKLTAINSSFLLFEYKKSRDGHVYDRFSLARLPSPGGLLRRQLPPKHLGRLIELRTLETCVDRYTV

SEQ ID NO: 57242 - protein, 678 aa, Zea Mays
MLLGRRPDGPTYVDWCNLDRCKRVKPFRCGELDLEQRIANALTLAATSDRSTWSYNKGRYARMEDAILQALDIEKELALGPATKAYLHARSCSPRPKVEMPNGQVKDTAAKDHAPTIQPPLPPPKRKRKTPYDSEDDVPEVSRRMRDLRDIGSKAVVPMDLANAAAVSAPKYDDLTNAGQAKRIVHSQATAKRKHAGLHQDQPCGIPRKKDRSRPLSELCNGDMWGGSRPNGQKADEHLLGVATCSSSSSGTSTLDTPLDMNNCHRSMAFKTDQAKGTEISCMTRLLSDDSRHGNDFVGTPAAQNIVEPDHLHRYQPCGLAKNPTWKPNKQTNDARKAEKHARKNMKMRTISSVDQENKNRTRDSNDHDHHKPKTGKHKSPRDGVVLLEKRQEKRSLDKNKPAEHDIKMHIAVVPSGMDCVGAFQQQRFKSRCDPEESLESLSNHSNCESGSVSSLVFEKPLQALPPGKNLLGYEICHAAKPIKTLHLNPALYDVELSVLGSSNTGRRVPLVSLMSRWNCKAVVGYPVSVEVSDDVFGCPSPSSEKDIQQAATNSVNGIVLKKDETEGLERVVVPPSAQTSRPRCKSRSRRASEKAVDKLWQPHTKWPASSSRKMRRLSSFGPGQRDGKSAVRKVSGATVACIPLRVVFSRINEALSFSVNENALAGCGTASRLRNTW

SEQ ID NO: 57243 - protein, 157 aa, Zea Mays
MCIPFRYRDINDGASDDEQKKLVEVLMISSQSGPGLLFPKGGWENDETVEEAAAREAIEEAGVRGDLVQLLGFYDFKSKQPEATCRAAIFALHVKEELASWPEQSTRQRSWLTVPEAAERSRYPWMQEALVTGFSAWLENWRNGGGGGGGCVDRTER

SEQ ID NO: 57244 - protein, 432 aa, Zea Mays
MGCVCGRPSSFEDGQCRATPPPAAKLSAAVRREEEARKQQLQLQQHARAGSGREEALERRRAMMAMAAACQVRSPVPRAVEAEQVAVGWPPWLVAVAPEAVRGWVPRRAESFEKLDKIGQGTYSNVYRARDLEKEKIVALKKVRFDNLEPESVKFMAREILILRRLDHPNVIKLEGLVTSRMSCSLYLVFEYMEHDLAGLASFRGVKFTESQVKCYMQQLLRGLEHCHSRHILHRDIKGSNLLIDNRGILKIADFGLASFFDPEQRQPLTSRVVTLWYRPPELLLGATNYGVAVDLWSAGCILAELYAGKPIMPGRTEVEQLHKIFKLCGSPSEDYWRKSKLPHATIFKPQHPYARRVAETFKEFPAPTLALVDVLLSVDPADRGTASYALQSEFFTTKPYACNPSSLPRYPPSKEFDAKRREEEARSNALF

SEQ ID NO: 57245 - protein, 102 aa, Zea Mays
MALAASSPLHAVPPAPALHTPPEKRGGTPSTGCTAGRHSVAHPSRWSGPPPSQHDSTSGDQVLGSQRPAVPAVQHDSDSTSGPRLRAFCCAGRENPFWRICH

SEQ ID NO: 57246 - protein, 65 aa, Zea Mays
MMVASSPWNFQSVWWQVIRHMVTYSHGGDGGEGEIGPGRGDMRGTWSLYFVGCNYKHVIVGCNCC

SEQ ID NO: 57247 - protein, 235 aa, Zea Mays
MAPAALLPLAPLPHHPNPPRRPLCRCGASRRGFTVHTVIAIASVSDSASDPTAAAEATSPSPPPSLPTQTPSSKPGPPALGGIANTRSWSQYYGSGFSIRVPPSFDDILEPDDYNAGMTYYGDKAKPRAYAARFASPDRDELISVVIKPSNQLKITFLEAKDITDLGTLKEASKIFVPAGAKIFSARTIKVKEEEDIRTYYFYEFSLDKQHVALMATVNSGKVHCRRYRSRDEMG

SEQ ID NO: 57248 - protein, 374 aa, Zea Mays
MDTAVLSIPVPVEAHKRPVWSRRKPEERGKSKISSSTSGFSHSKVESSSTNLQTPMEPVQTPQYALFQDSKKIGEVQHANQFMFPGYGYPPAYPFPTIPLVSNIQAEGYQTKPAGTSYRTSEDYLKQSSSTEMSQDIPSRPLTMTPQEKIEKLRRRQQMQALIAIQQQQQQFGQQGPGSDTMVSQAYTPGNKNPDSLGSSIVIDENTNKVISPEMIPTDHDRVHKSSAISDDPFIEEKIYYQLQDALGKLDTKTRLCIRDSLLRLVHSATERKIDGDRSTNKTNKDEDEASEDASTRKTRSPNKEAETTTNPIDRIVAHLLFHRHCSKVAKATKEIISSIPLTLEPEPKVPLGTPRVPSKDQRDEQEIVLQPSQ

SEQ ID NO: 57249 - protein, 77 aa, Zea Mays
MIYSLRLRRRRAGGGGGSLLATKGAGHDRGSTAGRSRCTHRRLRRNANATRLGCGHACRCRPWIDERGYIRHGTATT

SEQ ID NO: 57250 - protein, 262 aa, Zea Mays
MIDDDEKITVIDFPQMVSVSHRNAQMFFDRDIECIYKFFNKRFNLTSEKNEEQAGSESDDEGNSRPSFLSVKKTAGSLDKELAASGYTRKEQVEMDKYIEEDAERHDSSSDDDDDDDDNDKVGDAVSLVSLKIDQDDSAEPDCNLASRDSDVPGTFSEENETSCSSEKRLESPSGDNGEAMKPLESEGKTLSQKDDNNDDDSSEDADEEEEDAELTKQLNKQRKKAIAAASGRRRPVSSRNACKDKGKGTMNSKIQRQACQW

SEQ ID NO: 57251 - protein, 702 aa, Zea Mays
MPLIQILVPHIMGLKEQLKDPSKDEEDVKAIARLYADMGESYVDLIATGSDDSIQIVNALLEVTSLLEFDISSMTFNFWHRLKRNLIKRDSYVSYGSEVAIEAEKNRRLQVFRPKFETLVSLVSFRVEYPEDYHTFSEEDRRDFRHVRYAVSDVLLDATEVLGGDSTLKLLSTKLAQAYGSCNNEQNPKWQPVEAALFCIQAIARSVSIEEREILPQVMSLLPCLPHHEQLLQTVCSTIGAFSKWIDAAPAELSILPPLVDILNKGMSTSEDTAAAASMAFKYICEDCRRKFSGSLDGLFQIYHIAISGVGGYKVSSEDSLHLVEALSAVITTLPPESASRALELICQPVINPLQELIQQGDQVLQQVPARHLTVHIDRLSSIFSNVKQPEVVAEAVYRYWPTLKSIFDQRAWDTRTMESICRSCKFAVRTCGRVMGMTIGAMLEEIQTLYQQHKQSCFLYLSSEVIKIFGSDPSCAGYLTNLIQILFSHTVQLLRTIQDFTARPDIADDCYLLASRCIRYCPDLFIPTEMFQRLVDCAMAGITIQHREACKSILSFLSDVIDLPNSSDGGQYRKVINTIILHRGATLTRIMIAALTGALPSGRLEEVSYVLLSLSRVFGENMLNWARESINLIPPQALTDAERLRFFNTISDAASGSSLHTITDRFGEISDVCRRNKTVQDLVQSALRPHDLTFTVVPQQM

SEQ ID NO: 57252 - protein, 67 aa, Zea Mays
MGYDVVPSDDAGRFVCNYVYYHSLKFAEKHGIGSLFVHFPLFLAIDEEVQMQFVASLLEVLASLNFQ

SEQ ID NO: 57253 - protein, 499 aa, Zea Mays
MLRQRQKKSGGGREMLVTIDNLKRLCIDHYFEEEIEGAMATGACTRLLHSDDLFDATLAFRLLREAGHDVSAKDDVLRRFIDGASGDFKLSLSNDVRGLLSLHDMSHLDVGGEAALLHRAKEFSSRHLASAVRYLDDPSLAEYVRQSLDHPYHLSLTQYKARHHLRYLQSLPSRDAAVERLAVAEFQLNKSLHQGEMREIKRWWMDLGLAEEIPVVRDQVMKWYMWSMAALQGSSFSRYRVEITKIISLVYVVDDIFDLVGTLEELSAFTEAVKMWDTVAADSLPSCMRSCYKALHTVTNEIAEIAQKEHGSNHVNRLRKAWAVLFDGFMVEARWLATDQVPTAEDYLRNGVITSGVPLTFMHIFSMLGYDDPSTEEEEEAIIDHMPSIISCPAKILRLWDDMGSAEDEAQEGFDGSYRDFYLMENPSRSPGEAEAHMRGLIAREWEVLNRECFCRRTFPSNLVQVCLNTARMVSVMYSYNKEQRLPVLEDYAAMMLVL

SEQ ID NO: 57254 - protein, 61 aa, Zea Mays
MGEKQWNFSFTSVWNSIVWLVLLNFFIKIVTSTAQDYLKKQQDTEMELISDSPIQDHSKTN

SEQ ID NO: 57255 - protein, 1902 aa, Zea Mays
MAESEDATAAEPGSGPPHEDEDALLARAHTVISRIIDRELDPNPRLLHTLATMCELHEARYLELRSADTMFNSTNTRTAFTIGKLANLLRDNDEFYELVFCKFLSDTSYSVAVRAATARLLLSCHPAWTPPYPHVFEDSIIDNIKKWVTEDPEASNECKWKYLGNNKPTDAEMLRTYGIGLLAMALCSSGQLIEDVLTLGVSAKLMRYLRIRVLGDASSSQRDANHPQDTKHPWGGDDSRGKSRLSQDGSRLDGTRVGYGMLTNPTAEKNNEPCVGMMQAYGARSLDDSFASLDDSDVPEADWTNDRSYSTRVCDTKSKHGERNSVTRLLKDEEVSENGELLKRKLNRAPSRLRVKGKAGDSLPECEMTPLSPTSGLRIGGQATRDRNVARVDDPKEATDVNNRLFNTISKEEYEDRFRDCIIGLKDISDIVLKAVRAAEAEARSANAPDEAVKAAGDAAAELVKFAALEVWKSENNSDAVVVVAEKAASAVVEAALSISVSRSANQVGEERAMEEAVQTSEDQDLENFVISDKAQLLQLRENYSIQCLQILGEYVEALGPVLHEKGVDVCLTLLQRSMKNQEGCDHFAQLLDVLKLVCALAAHRKFAALFVDRGGIQKIVSMPRVTQTYMGLSACLFTFGSLQSTIERVCALSSDTLDSVVELALLLLECPQDLARKNVAIFFAAAFVFKAVLDLFDARNGMQKLLDILCGCASGRSGSNSGGAGSSNVNQGNDRSPAEVLTASEKQVAYHTCVALRQYFRAHLLQLVDSIRPSKSIRSIARNTSSARAGCKPFDISNEAMDAIFCQIQRDRKLGLALVRACWLALDKFVASNGHMTMLELCKFQAHGDRYLRDLTQYAIGVLHIITLMPQPHVRKSIVQGTLSNNRAGMAVLLDTVKSLDYIDHEVICPALNVLVNLVCPPPSISNKPLSSSNQQPAAAQALASESREKNFEKTISDRNLLTNLGESRERSGDGNPAEKNNTLHQGTPSTPVVPSGVVGDRRIMLGVGGGGPGLAAQLEQGYRQAREVVRANNGIKILLQLLGSRMVTHPVAIDSIRALACRVLLGLARDDTIAHILTKLQVGKKLSELIRDISAQTSGGDSGRWQTELTQVAIELIGVLTNSGKETTLAATDAAAPALRRIERAGIAAAAPISYHSRELMQLIHEHLLGSGFAATAAMLQKEAGLAPLPLTAAVLPAHQVAALEASSVQQQWPSGHVQGFLSDKINTSTYQSAQRSDPKLPSSKKKALAFSSSFSRRARSPHPSNILKSPVPIAADTGDAEMLNKAPLSLPLKRNFVDVKDISFASASKRLAITDQIYQSSAFQTPAPTRKGLSVSVDSPTSSHCGWTNFNNAFTENLDNSQGTPGALTTTALPGVNDQQSGNLERMTLDSLVVQYLKHQHRQCPAPVTTLPPLSLLHPHVCPEPSRSLSAPANIAARVGSREISRQFSGIQIPRRDRHFIYSRFKQCRVCRDEASLLTCLTFLGDAARVVAGNHTGELRIFDCNTANLLETQTCHQHLVTMMESTYTGGIEMILTSSLNEVKIWDAFSVSAGPLHTFDDCKSARFNHYGTSFAALSTDTAQREVQLYDVQTYTLATRLPDNTSSSGSGRGYVQPIIHFSPSDTMLLWNGVLWDTRQPNPVHQFDQFTDYCGGGFHPAGNEVILNSEVWDLRKFKLLRSVPSLDQTVIKFNGTGDVIYATLRRNLDDVTSCINARRVRHPLFPAFSTIDAVTYSDIATVQMDRCVLDLATESNDSLIGVVAMDDHQELFSSARLFEVGRKRITDDDSDPEDAGETDDDSDDDDDDSDDGVLAPVLEGGTDSEDISSSSSDDGDEDGGDDDIPSSDGIEDDRFIDERRREFMMDLFGDGWDDDEAYMMGSFSSGDEEGWIICSWRGRGRS

SEQ ID NO: 57256 - protein, 715 aa, Zea Mays
MSRAHRIGQQETVNIYRFVTCKSVEEDILERAKKKMVLDHLVIQKLNAEGRLEKKESKKGGPIFDKNELSAILRFGAEELFKEDKTDEETKRNLESLDIDEILERAEKVETKGGEGEEGNELLSAFKACDVANFSSVEDDATFWSRLIQPDPADIVQETLAPRAARNKKSYIEDPQLDKNNNRKRRAVETQEKPRRLSGRTVETVNSLPLVDGAVAQVREWSFGNVPKKDASRFVRAVKKFGNATQIGLIVDDVGGVLAKVPHEAQIELFDLLVDGCQEAVKENTDIKGTVLDFFGVAVKAYELLARVEELQFLAKRIARYKDPIKQYRIQLPYKKPQWSASCGWTETDDARLMVGIHWYGYGNWEKIRLDPKLGLTTKIAPATLGERETFLPRAPNLDNRASALLQKEYAKFSGKSLKVKGNTRQTVNNDSNSGVRSMRGRQKDVPEKDDNKPNKDDIQKRRVIVEAEAREEGEISESEAETRYRQDKEEKWLEWCSEVLDEEQETLKRLDRLQNTSVNLPKEKVLSRIRKYLLIIGDKIGEVVRQHSESYRQSRMVMRLWNYVATFSNMSGEQLHDLYMKLSQDQLEGGVGPSHGGNFTSIPPNKGGNSNQLHPSRNQRPTRSLQYNSESFHNESSGSSEAWKRRRRADTDNQFDTQPLCQPPIMTNGNRLQESSSSAGILGWGPVEIRRYGNERPKRAVHPSHFPTGHGPLL

SEQ ID NO: 57257 - protein, 215 aa, Zea Mays
MATAARALVAARPARPLLPSRRLPSSSSIRPARQRAGVGCVRCMARRPDSTYSPLRSGQGGDRAPTEMAPLFPGCDYEHWLIVMDKPGGEGATKQQMIDCYIQTLAQVVGSEEEAKKRIYNVSCERYFGFGCEIDEETSNKLEGLPGVLFVLPDSYVDAENKDYGAELFVNGEIVQRSPERQRRVEPVPQRAQDRPRYSDRTRYVKRRENQSYQR

SEQ ID NO: 57258 - protein, 287 aa, Zea Mays
MPFTGLTTFGGAFLSKFECSQMPHPLLEHITFVDTPGVLSGEKQRTQRSYDFTGVTSWFAAKCDLILLLFDPHKLDISDEFKRVISSLRGHDDKIRVVLNKADQVDTQQLMRVYGALMWSLGKVLNTPEVVRVYIGSFNDKPVNDSAVGPIGKDLFEREQDDLLCDLKDIPKKACDRRVNEFVKRARAAKIHAYIIGHLKKEMPAMMGKAKAQQRLIDNLDEEFAKVQREYHLPAGDFPDVEHFKQVLGGYSIDKFEKLKPKMVQAVDDMLAHDIPELLKNLRNPYE

SEQ ID NO: 57259 - protein, 1454 aa, Zea Mays
MPKVFGTGVFEFRHPRAAEYPLPADAAPATAAAPDKVPASTGGGSITLLDIQRDRLTRVATEHWGTAAAAAAFDADLVRKIYGTELRVEGRGRKTVPLQRVMILEVSQYLENYLWPHFDPVDASFEHVMSIILMVNEKFRENVAAWTCFHDRKDAFKGFLWRVLKLKEEERALNMAEKTNYLLFMINSFQSLEDELVRETILQLVSLKLWNTLSFGRLQMELCLNPELIKKWTKIRRREAKEAKKADQPINPSEMLENKFLRNLIEEFVEILNSKVILSNQDGAEESVLNESFSGQIDDSCVLYCERFMEFLIDMLSQLPTRRFLRPLVADVAVVAKCHLSALYTHEKGRLFAQLVDLLQFYEGFEINDHSGTQLGDDDVLQAHYSRFQAFQLLAFKQVPKLRDFALSSIGSLHKRADLTKKLLVLSDVELQDLVCNKLKLISEKDPCSERRDFLIEVLVAFFEKRQSQKDAVNALPLYPNEQIMWDESLVPSINYSGEGCLALPKLNLQFLTLHDYLLRNFNLFRLESTYEIREDIQEAVPHLHAYINNEGETAFRGWSRMAVPIKGFKITEVKQPNIGEVKPSAVTADVTFSISSYRYQIKSEWDALKEHDVLFLLSIRPSFEPLSPEEAEKSTVPERLGLQYVRGCEVIEIRDEEGALMNDFTGRIKREEWKPPKGEIRTVRVALDTAQYHIDVTETAEKGTENVYGTFNILMRRKPKENNFKAILESIRDLMNETCVVPEWLHNIFLGYGNPSAAQWMNMPDLLEVIDFKDTFLDANHVQQSFPDYQVTFINSDGTKNLHPSPPFKIRLSKKMRESSHALPGNMNSNLTVKSRNNMADGEPQKEKLIVETYIPADPGPYPQDKPKQNSVRFTPTQIGAIISGIQPGLTMVVGPPGTGKTDTAVQILNVLYHNCPSQRTLIITHSNQALNDLFEKIMQRDVPARYLLRLGQGEQELATDLDFSRQGRVNAMLVRRLELLGEVSKLARSLRLPEDVGYTCETAAYFWLLHVYARWEQFLAACAQNQDKPSFVKDRFPFSEFFSDTPQPIFTGESFEMDMHAAKGCFKHLSTIFQELEECRAFELLKSTVERANYLMTKQAKIVAMTCTHAALKRRDFLQLGFKFDNLLMEESAQILEIETFIPMLLQRQEDGHARLKRCILIGDHHQLPPVVKNMAFQKYSHMDQSLFTRFVRLGVPYIELNAQGRARPSIAELYNWRYRELGDLPYVREQAIFHKANAGFSFEYQLVDVPDYKGKGESAPSPWFYQNEGEAEYIVSVYIYMRLIGYPANKISILTTYNGQKLLIRDVINKRCKPWNIEPPNKVTTVDKFQGQQNDFILLSLVRTRFVGHLRDVRRLIVAMSRARLGLYVFCRRSLFEQCYKLQPTFQLLLQRSDKLALNLEECTPFTERPLEETGNIHYITGIEDINSSSKVQAGTSSSSAIHAVLCSSGK

SEQ ID NO: 57260 - protein, 83 aa, Zea Mays
MIRHRGRRSPAADGDAGRKHGPEERDVKERGVAATYLYSGGASRLLYGYRDHRRARGVRAMVFVAATDFAQHAWSSEGRRRRP

SEQ ID NO: 57261 - protein, 741 aa, Zea Mays
MAGGDGDRHRAPKRHKSSTPSKAALVDESAEFDYADDFDDDAHDADTEVKKRDFTKLELKVDHASRPLWACADGRIFLETFSPLYKQAYDFLIAIAEPVCRPESMHEYNLTPHSLYAAVSVGLETSTIISVLSKLSKTKLPREIIDFIHGSTANYGKVKLVLKKNRYFVESPFPEVLSTLLRDEVISRARISPEDSLGAPSFTVSKTSGQIASGHEDLLNGMEIAAATEDKETHSFEIDPSQVENVKQRCLPNALNYPMLEEYDFRNDTVNPDLDMELKPQARPRPYQEKSLSKMFGNGRARSGIIVLPCGAGKSLVGVSAACRIKKSCLCLATNAVSVDQWAFQFKLWSTIKDENISRFTSDNKEKFTGMAGVVVTTYNMVAFGGKRSEDSEKIIEEIRNREWGLLLMDEVHVVPAHMFRKVISITKSHCKLGLTATLVREDERITDLNFLIGPKLYEANWLDLVKGGFIANVQCAEVWCPMTKEFFAEYLKKENSKKKQVLYVMNPNKFRACEFLIRFHEQQRGDKIIVFADNLFALTTYAMKLRKPMIFGATSHAERTRILYQFKNSPEVNTIFLSKVGDNSIDIPEANVIIQISSHAGSRRQEAQRLGRILRAKGKHQDRMAGGKEEYNAFFYSLVSTDTQEMYYSTKRQQFLIDQGYSFKVITSLPPAEEGPNLSYYTLDEQLELLSMALNAGDDMIGVERLEEDSDGKALIRARRSAGSMSAFSGAGGMVYMEYR

SEQ ID NO: 57262 - protein, 95 aa, Zea Mays
MAYVERGVVKDKRTIWRLSIISDFFRAIVNFIRIFFDTLFSVDKTDSYKKGYGAGKKWDGGPGGGGGRGPYGGGGGGFGGGGGGGSLPACGSCCG

SEQ ID NO: 57263 - protein, 58 aa, Zea Mays
MQFIVKALKISPPPPILKISQPCAVSVIHQLNPYLLSSPIYFLARAERPIVPIGWCGA

SEQ ID NO: 57264 - protein, 272 aa, Zea Mays
MPRGSLDNHLFRRSLPLPWAIRMKVALGAAKGLAFLHEEAESPVIYRDFKTSNILLDAEYNAKLSDFGLAKDGPVGDKTHVSTRVMGTYGYAAPEYVMTGHLTSKSDVYSFGVVLLEMMSGRRSMDKNRPNGEHNLVEWARPLLGERQRFYKLVDPRLEGNFSVKGAQKAAQLARACLSRDPKARPLMSQVVEVLRPLQNLRDMASASYFYQTMHAERMAHSSSMNGRSSHGHGSSKAQSPFGRNGQQQPVRSLSDGPRASPFRYSPKPNVK

SEQ ID NO: 57265 - protein, 266 aa, Zea Mays
MEPSEVNVHEDSTVLSQSDYLDMLKNLDEQHRSTGGVKFVTNCFGIIGFIKFLGPYYMLIITEQRKIGDIFGHMVYQVSKTAMIELSNSTTRPKLINSKDENRYKKLLQTIDLRKDFFFSHSYHIMRSLQKNFNDPQEGWELYDTMFVWNEFLTRGIRDILKTTLWTVALVYGFFKQDKLAICGKDIMLTLIARRSRHYAGTRYLKRGVNEEGRVANDVETEQIVYEDMLGPWQISSVVQNRGSIPLFWSQETSKLNLKPDIICKH

SEQ ID NO: 57266 - protein, 141 aa, Zea Mays
MSEALQKDKEIGEEEEEEEYVLLELDNCLYSDISPGAQFVLSGLDTLTPTLIVGDNLKMVGEYDETIGTCYLFSESETEPKPASDELAPSKENTETPLNSSKEAPLKEVNHLASVQKILKFKPINVEHSQHRAYQHKDKEL

SEQ ID NO: 57267 - protein, 150 aa, Zea Mays
MEVAPMAGALVEGKLDPVVGRQDQIERVTQILGRRTKNNPCLIGEPGVGKTAIAEGLAQRIANWDVPETIEGKKSVGSMDEDDDSPASGSGRHKKKLRLIMGLHDGSAKVQTGISLNTLGSLGYEIDHGWRQRIAVCHSKLGDQPKRSHG

SEQ ID NO: 57268 - protein, 258 aa, Zea Mays
MGSSSNTNTSGGASDKEEKKKEDKIKGKDSSGPSFKENERVLAYHGPLLYEAKVQRIENHEDEWRYFVHYLGWNKNWDEWVANDRLLELTEENVRKQQELDKNQVVDKTMKSGRSTQHKPKVSNADAKADKDDTKSLISVKGKKRKSQLGTEFPLPLKKQLVDDWEFVTQMGKLVKLPRSPTVDDILKKYLEHRAKKDGKINDSYAEILKGLRCYFDKALPAMLLYKKERDQYAEEVKGDVSPSTVYGAEHLLRLFVC

SEQ ID NO: 57269 - protein, 427 aa, Zea Mays
MKMVLPVAVEDVKREVKILKALQGHENVVHFYNAFEDDNYVYIVMELCEGGELLDRILAKKDSRYSEKDAAVVVRQMLKVAAECHLHGLVHRDMKPENFLFKSKKEDSPLKATDFGLSDFIKPGRQFRDIVGSAYYVAPEVLKRRSGPESDVWSIGVITYILLCGRRPFWDKTEDGIFKEVLKKKPDFRRKPWSNITSSAKDFVQKLLVKDPRARLTAAQALSHDWVREGGKASEIPLDISVLHNMRQFVKYSRFKQFALRALASTLNSEEMSDLRDQFNAIDVDKNGTISLEELKQALAKDVPWRLKGPRVLEIIEAIDSNTDGLVDFEEFVAATLHVHQLVEHDTEKWKSLSQAAFDKFDVDRDGYITPDELRMHTGMKGSIDPLLEEADIDKDGKISLDEFRRLLKTASMSARNVQTPRGVRKS

SEQ ID NO: 57270 - protein, 426 aa, Zea Mays
MAAAATFGFLHPLIRKPLVPPLYILPLPTQPHAKTHPRSLPLLFLLPRRRRGGPIAALPNTTSSSTNASASPTYDVREAEAAVADLLREGGASADDAAAIAARAPAYAAMLADGVRELDELGLWASWSSGASARLGLSGVVEMEMGRLGFRRKVYLMGRSRPDHDVVPLLESLGVRLSSAKLIAPYVASAGLTVLIDRVKFLKEMLFSSSDYAILIGRNAKRMMTYLSIPADDALQSTLSFFEKMEARYGGVSMLGHGDMSFPYLIESFPMLLLCSEDNHLEPLVDFLEHIGIPKPKIASVLLLFPPIILSDVENDIKPRIREWEKAGIEHDYITRMLLKYPWILSTSVIENYSKMLLFFNQKGISSTVLAIAVKSWPHILGSSSKRMNSVLELFRVLGISKKMVVPVITSSPQLLLRKPDQFMQD

SEQ ID NO: 57271 - protein, 1283 aa, Zea Mays
MSLTAAPVAFIGLDELSVELAASFLRSGACVRSFTPEAERSPSAALAELNGLLQCASPVEAARDAALVVVLSDAGGVDELFFGVEGIAKGLCAGSIVLIHSTLLPSQLEKLEQELTDQKKDVFLLDGYIFTGLSDELKQQIIIVASGRQDIAEKASKFFHGLYKTIYFAEGEFCTSRKIRMVNDLLEGIHFVASIEAMYLGVRAGIHPTIIYDIISNAAGSSRIFVELVPKLLSEDPLLIDFLKSTRKKASHVMDMSKSVTFPLPLLGVAYQQLVHGSSAVTGDGSASPLKVWEASFGVNIVDAAGEQIYDASKLADQLVAESKAAKRIGFIGLGAMGFGMASHLLKSGFCVVAYDVYKPTMARFADLGGSTKGSPEEIAKDVEILIIMVANESQADSVLFGNAGAVPVLSAGTSVILSSTVSPGFVIHLNRRLEAECRQIKLVDAPVSGGVKRAADGTLTIMTSGTDEALHCTGSVLSALSEKLYVIKGGCGAASSVKMVNQLLAGVHIASAAEAMSFAARLNLRTRRVFEIMQHARGYSWMFGNRVPHMLDNDYTPYSAVDIFVKDLGIVSCESSNSRIPVHVSSIAHQLFISGSASGWGRYDDAAVVKVYETLTGVKVEGKAPMLSKEDVLQSLPSEWPEDPIDNLVPIASHSSKKFLVVLDDDPTGTQTVHDIEVLTEWPVEALVEQFLKLPTCFFILTNSRSMTADKAMLLVQTICKNLKAAAEKVPGVSYTIVLRGDSTLRGHFPEEADAAVSVLGEMDAWIICPFFLQGGRYTINDIHYVADSDRLIPAGETEFAKDAVFGYKSSNLRQWVEEKTKGRVLENQVSTISITLLRKQGPTAVCEHLCSLEKVSVEMVSMKSMEDRDQEIRRIVELGNAYIQSRKDTLILTSRQLITGKTPEESLEINYKVSSALVEIVRRIDSKPHYIIAKGGITSSDIATKALEAKRAKVMGQALAGVPLWQLGPESRFPGVPYIVFPGNVGDNSALAKVVKSWASPSRSSTKEILLNAEKGGYAVGAFNVYNLEGIEAVVAAAEAEKSPAILQIHPSALKQGGVPLVACCIAAAEQSSVPISVHYDHGISKSDLLQALEAGFDSVMVDGSHLTLGDNILYTKSISSLAHAKGLLVEAELGRLSGSEDGMTVEEYEARFTDVAQAEEFIDETSIDALAVCIGNVHGKYPPSGPNLKFDLLKDLRALTLKKGVSLVLHGASGLSHELVKECIDLGVRKFNVNTEVRNSYLASLRKPEKDLIQVMASAKEAMKAVVAEKLRLFGSCGKA

SEQ ID NO: 57272 - protein, 105 aa, Zea Mays
MMMDSAEHQKSLCNACGIRYRKKRRQELGLDSAKKPQQNQRPPPPQQQQQQEDHCPATSAVAVRDNTKSSRLQVVKKRRVLMGVEEAAVLLMALSSSSRSTLLHG

SEQ ID NO: 57273 - protein, 1020 aa, Zea Mays
MEDRTKLPISSFKDVITSTLENHQVVLISGQTGCGKTTQVPQYILDHMWGKGESCKIICTQPRRISAISVAERISAERGEAVGDTVGYKIRLESKGGKNSSVLFCTNGVLLRLLIGRGTNASKARNQKRSLDDAVLGITHIIVDEIHERDRFSDFMLTILRDLLPLYPHLRMVLMSATIDAERFSQYFNGCSVIQVPGFTYPVKTFYLEDVLSILQSAGDNHLTSHKTEGSVLTHDFKSSMDDSINLALVNDEFDPLLELISAEQNTEVYNYQHSETGITPLMVFAMKGQLGDVCMLLSFGVDCSAQDHDGKSALDWAQQENQQEVCEVIKKHMECSSEKSTEDNELLNKYLASINPEHIDTLLIERLLRKICVDSNEGAILVFLPGWEDISQTRERLFASPFFQDSSRFLVLSLHSMIPSSEQKKVFKRPPVGVRKIILSTNIAETAVTIDDVVFVIDSGRMKEKSYDPYNNVSTLHASWVSKASARQREGRAGRCQPGTCYHLYSRFRASSLPDYQIPEIKRMPIEELCLQVKLLDSNCRIADFLKKTLDPPIPETVRNAIAVLQDLGALTQDEQLTELGEKLGSLPVHPSTTKMLLFAILMNCLDPALTLACAADYRDPFVLPVAPDERKRAAAAKVELASLYGGFSDQLAVVAAFDFWRHAKDRGQDSQFCAKYFVSSNIMNMLSSMRKQLQNELSQRGFVPADASACSLNSKDPGIMRAVLMAGAYPMVGKMLPPRKNARKSVLETASGAKVRLHPHSCNFNLSFSKSSGNPLLIYDEITRGDGGMYIKNSSVVGSYPLLLIAAEMVVAPPDDDSDEDEEDSSEDEAEESTLVQHKEEIMSSPDSIVSVVVDRWLRFDATALDVAQIYCLRERLASAILFKVKHPQDVLPPALGASMYAITCILSFDGLPSMVPPNDLSANRGSGQDLAEASKFSQGRRAGYIPPSGFLMSLLADRTHNAPSFQNSSNHPGGGSAHTRPSRAPVGRFDRSRRPFRNSGPGTSAPRSFKRQRDAPR

SEQ ID NO: 57274 - protein, 265 aa, Zea Mays
MEGKCSSTTELTSDRHCSSVVIECSSSGYGICSGSCLMSIVTKYSEKIILTESDAKPRTSRRKEKLKIPANAKRKDNVDCSSEWQGPPPWDPSIGGDGYPKFLCDVMIEGLAKHLRCVGIDAAIPSSKKPEPRDLLNQTYKEGRILLTRDAKLLKYQYLAGNQVYRVKSLLKHDQLAEVINIFQLKISEDQLMSRCTKCNGSFIQKPLTLEEAVEASKGFQIIPTCLFNRNLEFWKCTDCNQLYWEGTQYHNAVQRFLSVCNISD

SEQ ID NO: 57275 - protein, 640 aa, Zea Mays
MTGPILAGLTQSFLDAINNGAVPTISSSWQSVEEAECQRAFDSAVGTYNSSFDHKKHIEEDSLREAHEDAMRKAISAFNVSAVGAGRQLEHIDAERNALRLKCNSSDDKLALLRKQLEASESHRAEYVRRYEEVLNDKQKISKDYSIRITELQAKSSKLEQRCLSLSSSLETAKRESNDWKSKYDHGILQQKADESKLKSQIASLESRVSISEGRLSATREQADSAQEEASEWKRKYEVAVSEAKTALQRAAVAQERTNKKVQEREDALRVELANQLSEKEEEIARLHAKRSQMEIHATSLISRLEATEAKSKSHESDSLALREEIRLLTDNLESIRSEALSREKEVGILEQEKNHLEEKYLSQCKKFDETDIRCKEAEREAKRATELADVARVEASAAQKDKGEAQRLAMERFALIERMERQVEALERDKAKLVEEIERLHQSEKDAVSKVALLERNVGEREKEIDEMLKQNNQQRSSTVQVLESLLATEREARAEANKRAEELSLMLQATQGKLDMLQQETTLDSKLKTSARRLRGDATESVHDMDIDGDNGRRRKRSKSTTSPFKNNHTEDGGSVFIGEDTYNGSQQGTESEDYTKFTVLKLKQELTKHGFGAQLLQLKNPNKKDIVALYEKHVIGK

SEQ ID NO: 57276 - protein, 441 aa, Zea Mays
MAPPPLPLFSPSLKAPPPPPWLHGSSTQSRDSAPPVPPLPAEATPSKFRIDSPKPAPARKNTKTAAKPLTAGVPGGRTHRAVLGIIRRVRSLELSDAPSPNSVHTSNSGAAAAAFHLTIELSPPREPGQYVVEKEKSRAVPWAAARDEGLKVALRREKKPREPTRAETELETHELHRLRRLARGIGRWARAKKAGVTDEVVKEVRREWASGEELAAVRIVEPLRRSMDRAREILEIKTGGLVVWTKGDMHFVYRGSKYQQNAKHSHTFLTNVHKDDAFQENDQSICGQKDEEPVKGTLYEREVNRLLDTLGPRFVDWWWDTPLPVDADLLPEFVPGFKTPYRLCPPGVRPTLADEELTYLRKLARLLPTHFALGRNTRLQGLAAAILKLWEKSLIAKIAVKIGIQNTNNEQMAWNLKASTIPDEVPSDIYVFKCIVVNSFD

SEQ ID NO: 57277 - protein, 477 aa, Zea Mays
MLEERDLYFHKLKLTFEIALKLRGGPSLVFAHSMGNNVFRYFLEWLKLEIAPKHYIQWLDEHIHAYFAVGAPLLGSTEAVRGALSGTTFGLPVSEGTARLMFNAFGSSLWLMPFSKHCKADNIYWKHFFEGKGGCPHKQQCDEDEYISDYGGWPTDLVNIEVPSARDMGAYPSITDITENITSIMECGKPTLLSFSAREVSDGTLFKTIEDYDPQSKALVYQLEKYYQGDPVLNPLTPWERPPIKNVFCIYGIDSKTEVGYYFAPSGKPYPDNWIITDIIYELEGSLLSRSGNSVSGKPNNSSGDGTVSYNSLSWCKNWLGPKVNITRAPQAEHDGSDLQTAMNIDHHHGDDILPNMTRVPHVKYITYYEDAESLPGWRTAVWELDKANHRNIVRTPVLMRELWLEMWHDLHPDSKSKFVTKAFRGPLRNEDCRWDYGKARCGFPEHCEYRYTFGDVHLGMSCRLRNTSANLLQQYL

SEQ ID NO: 57278 - protein, 614 aa, Zea Mays
MAGKEQGGGGPPQRPPMPAASMQPPIKKLVRQLDFNSAALAGNPAMAAAAAAVSRALQPRALPAGFQHPQHVRAAVPMVVPQQLHQRALPVMRPHPVVGHVPRHAVPLAVPVPQLRPMPPQPVQRPPVAVPLKPDSPKPWARLYEGKDSTPTKKKCCNCRNSRCLKLYCECFASGTHCDGCNCTNCFNNPENEVARREAIEATLERNPDAFRPKIGSSPHTNRNNEVSSDLPLVGKHNKGCHCKKSGCLKKYCECFQANILCSENCKCMDCKNFEGSEERRNLFQGDHKNAINIQQATNAAVNGAIGTTGFPSPSTSRKRKHIDPSLDHSNKEHAAHRNCHIPQKNAVPDGSIPISQSAHPPTLGPFKVTYRPLLADIVQAEDVKELCKLLVVVSGEAAKTYADRKAKEERVGKKEDERAEQKEDDRAGSLALTNHDREGNNQDPDKKASIDDHSSRGTHTGKANQEESRPNCADDQKSNRPMSPGTLALMCDEQAFEKMCDEQDTVFTASQNAVPQQTVTVNQNQSALYAEQERIVLTEFRDCLRKLVTYGRMKEERYAMEIKSETSGHPGQVNGVSQVPYSKVEVPVVKTDPQSSSSHPVAGKPVTGLLDKN

SEQ ID NO: 57279 - protein, 109 aa, Zea Mays
MQQLVRSLAVDNERLREVTVTHRSSSQEMRDLQGACEALSKENDELETRLGQSSRQSEVASKEQRGKGLLDPRQPARDSFALPDLNLPPQDSADVSTVSLIAPDRLQLC

SEQ ID NO: 57280 - protein, 502 aa, Zea Mays
MSCQAQFHLLSSANNNNCDAKNSGNDNDDSGKKLQVVSAEGDNGGVNRNKRISRKGRDDNGDDGDDSDDNSNENGDSSSQKKPRVVWSVELHRKFVAAVNQLGIDKAVPKKILDLMNVENITRENVASHLQKYRLYLKRLSADASRQANLTAAFGGRNPAYVNMGLDAFRQYNAYGRYRPVPTTNHSQPNNLLARMNSPAFGMHGLLPSQPLQIGHNQNNLSTSLGNVGGMNNGNLIRGAHMPLQDTSKCFPTGPSGNSFANISNSTQLVTTNNLPLQSLEPSNQQHLGRLHSSADPFNSFVGEPPQFADLGRCNTTWPTAVSSSNVQEIGQKDRIVNRPKLEPLSSFTEASSQIPLLGSEMQSHQVASLASNGLPMPFTQEAVPFAYGSSTNSREMLNNNLALSNSGVNSTLPNLRIDGSVVPGQTLGGSNSGGCVVPPLQDGRIDHQAVSSHLNYNNELMGTGRLQRGLSGGLDDIVVDMFRPDRADDGVSFIDGDWELV

SEQ ID NO: 57281 - protein, 305 aa, Zea Mays
METSSAPAAATEAGWYVLGPNQEGVGPYALAELREHFANGYFNESTMLWAEGRKEWMPLSSISELHSAVAAKDQSEQDAPDVDDDFEKFQKEVIEAETEVKALKGNDVDQQDDERPATPPDGEEEFTDDDGTIYKWDRTLRAWVPQNDASGSKEDYAVEEMTFAVEEEIFQAPDILGPALEEINNLPESKNKGSDKAEMRGDKKRKSYENPAEKKEANKPPDSWFDLKVNTHVYVTGLPDDVTVEEIVEVFSKCGIIKEDPETKKPRVKIYTDRETGRKKGDALVTYFKVMFSFQRKLTSKRRGR

SEQ ID NO: 57282 - protein, 427 aa, Zea Mays
MAGVYSVAIDVDNHKVSVTGDVDSETLIRKLTRGGKHAELWSQHKGGSAQQKQQAQQQQQQKQGGNPSKDGHSKSSNNNGGQKKDQGKQGGGGGVGGGLVQGLKAFKNQHGGNKQHHQLPELLSSEDDDGMFDDDDGEFDDDYEEELRFLGDKMSQLGLHGNGNGNNQHHHQNKNGNNVVAVNSNHSNGKKGNGGAAANRHQSQNQKNVNVVNVAAANGKMGGGGGVQNHKNANAINMAAAANAKMGNGAQRNAGAMGGIGMLGLSHGLGAGGAAAAAPPPGFQQGYAGFNHPPYAAAAGYGGGLQQQQQHLQHHQQQQSNSLMASMQGYHHHQYPAATAAVVNNLRGLNGNMVMMHQHQPQPQPQAQMMYHSSPQISSPYTGYYNPYNYYYHHHPHPGSAGYPATASNGDVESMFSDENTKGCVVM

SEQ ID NO: 57283 - protein, 301 aa, Zea Mays
MGKLEDGQEVAVKRLSRRSMQGAVEFKNEVKLIAKLQHRNLVRLLGCCIDEDERMLLYEYMHNQSLDTFIFDEGKRRLLGWQKRFDIILGVARGLQYLHEDSRFRIVHRDLKASNVLLDTNMVPKISDFGIARMFGGDQTTAYTLKVIGTYGYMSPEYAMDGVFSMKSDVYSFGVLVLEIITGKRNRGFYEEELDLNLLRYAWMMWKEGRGADLLDPVMDGGGSVNHSEVLRCVQVALLCVEVLPRNRPLMSSAVMMLASENATVAEPNEPGVNVGKNTSDTESSHGFTANSVTITAIDAR

SEQ ID NO: 57284 - protein, 167 aa, Zea Mays
MWICWLRLQTSSATAIDRSCCTIILEYLAANARSGVAVNDECMLKFGELQSKRLHRFLTFKMDDKFKEIVVDQVGDRATSYEDFTNSLPENDCRYAIYDFDFVTAEDVQKSRIFYILWSPSSAKVKSKMLYASSNQKFKSGLNGIQVELQATDASEISLDEIKDRAR

SEQ ID NO: 57285 - protein, 438 aa, Zea Mays
MRKWTWIILIYRVMNGPIEDIATQLGFQGNPFLQGLVVSIFIVGAFFGSLGSSALVDKFGCKRTLQIDSIPLIIGALLSAQADSLDEMLLGRFLVGIGIGVNTVLVPIYISEVAPTKYRGTLGTLCQIGTCLGIIAALSLGIPSESDPHWWRTMLYAACVPGILIVAGMQFAVESPRWLAKVGRFDDARKVVESLWEPSEVEKSMEEIKAVVLNDDSRGSWSDLLVEPHNRVALIGGSLFFLQQFAGINGVLYFSSLTFRDVGISSGALASLYVGITNFGGALVASNLMDKQGRKKLLIGSYLGMAFAMFLIVYGISFPLDEGVAHSLSIAGTLLYIFTFAIGAGPVTGIIIPELSSARTRSKVMGFSFTVHWICNFLVGLFFLELVHKFGVGAVYAGFGGVSLLTALFAYNFIVETKGRSLEEIEMSMSSATPGKQE

SEQ ID NO: 57286 - protein, 81 aa, Zea Mays
MSASSFARLQHKRFIWQNLIWAQGTICPTLEILLQRGTHTHALAPIVPYSMENSVADAMYNKIIVFVFDQVVDTTPWKSWW

SEQ ID NO: 57287 - protein, 254 aa, Zea Mays
MLNLQLGIRHAVGKQGPITLDLKSSAFDPKEKVWTRFPPEGSKYTPPHSSCDFKWKDYCPQVFRTLRKLFKVDAADYMLSLCGDQALRELSSPGKSGSFFYLTSNDQYMIKTMKKSEVKIFLKMLRAYYNHVRSFESTLVTKFFGLHCVKLAGANQKKVRFVIMGNLFCSDYSIHRRFDLKGSSLGRTTDKPQTEIDEYTTLKDLDLNFIFRLQKHWYQEFQRSTGTVSSWSRKTSWTIVFWLVYILGTLGIGY

SEQ ID NO: 57288 - protein, 61 aa, Zea Mays
MSQYNQSTYYIAEVLQNNNIKRTNVHPWRHKVNWETTPRSSGTPHCVAPLEPHVLLLWGAV

SEQ ID NO: 57289 - protein, 462 aa, Zea Mays
MWESPKMVNGGRVSSWACINFSRNVQDGAARSFCHDLALMCQVSGMDFALEPVLPPVYARPEHVERALKRLYQDAMSILRPQGRELDLLMVILPDNNGSLYGDLKRICETDLGLVSQCCLTKHVFKANKHQYLANVALKINVKVGGRNTVLVDALARRIPLVSDVATIIFGADVTHPHPGEDSSPSIAAVVASQDWPEVTKYAGLVSAQTHRQELIQDLFNVRQDPQRGAVSGGMIRELLISFWRATGQKPKRIIFYRDGVSEGQFYQVLLYELDAIRKACASLESDYQPPVTFVVVQKRHHTRLFVNNHNDQRAADRSGNILPGTVVDSKICHPTEFDFYLCSHAGIQGTSRPAHYHVLWDENKFTADGLQTLTNNLCYTYARCTRSVSIVPPAYYAHLAAFRARFYMEPDTSDSGSVASGATTSRGPPPGARNTRAGAANVAVRPLPALKENVKRVMFYC

SEQ ID NO: 57290 - protein, 977 aa, Zea Mays
MFKSRWRGGGRAKATFKLQFHATQVPVQGWEAMMVVVTPQDAGRPTARSEPAEVTDGACRWAAPIMDATRLPAGKDKIYQFLVYETGSSKAALLGEATVNLADYADALKPSAVTLPLKGSPGTLLHVTIQRVVGGAGGYGDDASESGDASPVAKTPQRRTTLQNQLSRFEDEDGEKARAATDAMSPVQDGLLITKPPGMRFPSRRNVPMSVDPVGHLHNGSSFDAVSVSGSDASSGRYTPKISATMHNSYLQDSSNALSPFANNGTVRNPLTSSGDWSGSSAPDASTDGSTSNSGEAGLRGEDDDVEKLRSEIATLTRKLDVSDMELQTLRKQIVKESRRGQDLSKEMSSLREERDALRREYEGLRGAKKMIHDSNGSGKRLSDGYDPWSQVEELKQDLNHEKNLNADLRLQLQKMQESNSELLLAVKDLDEMLEQKNRDISILQEDTQEDPQEAEYEHALSNVHNSGRKIALSETSSYQEKEDELMLDALAKKRDDISTSELEKKILELSNEIELYKKDREDIEMQMEQLALDYEILKQENHDISSRLEQTQLREQLRMQYECSAHLAIISDLEANVESLDNELQTQAKKFEADIAEIMSAKVEQEQRAIKAEDSLRKIRWNNATTAERLQEEFKVLSSQVSSAFSANEQQLVQARKEVAELQLQKSQLEELLQKAQGDLGSVQDQHRVKVQQLITLVDFKSKEIDRLLMELKSKSDEFHNQKRCDEAKLNALSEEIDLLNSKIDKLSSERNELFEKNEQKEKELAGISEKDMQLQDKTAEITSLNKELVFLKDQVKMHLDELHSLKRLKNEREETIGKLQIDIGSLKLQCDNLKTSLSKKESEKDSLASQVLKLRRSLETRDRAKANGQISDVKDNQHANNKRTKHNTGSTGSIAALPGTNRQGEDGDCNGPDMRNTTDQSAKELASMKERNRAIEEELKELHERYSEISLRFAEVEGERQQLVMTVRSLKNSLR

SEQ ID NO: 57291 - protein, 462 aa, Zea Mays
MDRERSSRRPRDDDVHHRSRERDDDRHRRRSRHDTDGHHRYEGGDEDRRRRHRHRDKDGSGGGEDDRRHRNHHDNDDSRSHSYRDGGDDDRRRGKRRSVSPSESPPPSVKRDRSSSRPRESVERRDSTDREPRSSSRKRKDHEGGGDGDEPVREGGKRARASVDLPPSKEERPRRERRRFEDVDENGKNGDMGKWGKEISSHELQKEELSINGGLQSYDAPNAGSQQPLSAVSVPSSVPIPSKVSSISTNNANEGVSIRSDEVTVKSSTDGSAMSAASKSSNLSLDALAKAKKALQLKKELSEKLKKLPMLNNKLATAVTATQVSKEAAKTSVSAVDAQHFSKGEAKLTDVSSLPTSSISGTPAIGGVIGIPGLTHIPNLDSVKRAQELAAKMGFRQDPQFAPVINFFPGTSTEVTVAQRPAKAPVLRLDSHGREIDEQGNVISMTKPTNLSTLKVTFHSLL

SEQ ID NO: 57292 - protein, 107 aa, Zea Mays
MQIHVHGDRRARDGDHAPTSDSANANRSPPLTRSRPSLELHGESPWPHAMVQRSTRVHAPWRHIPPHSLSLSLSLSLSLSHRRDSQLVLVAKNERREIHALGRRGGG

SEQ ID NO: 57293 - protein, 194 aa, Zea Mays
MTAMLAMMQHRRKKVPIILHNESEQAHMWSQIYSEETKKQSIPVITAWQLNERMYGELQGLNKQETADRFGKEQVHEWRRSYDIPPPNGESLEMCAERAVAYFKDQIIPKLVDGKHVMIAAHGNSLRSIIMHLDKLTSQEVISLELSTGIPMLYIFKEGKFIRRGSPAGPSEAGVYAYTKNLAQYRQKLDGIVQ

SEQ ID NO: 57294 - protein, 795 aa, Zea Mays
MMPTSCLQMWEGLIQKAKDGGLDVIQTYVFWNGHEPTPGNYYFEERYDLVRFVKTVQKAGLFVHLRIGPYICGEWNFGGFPVWLKYVPGISFRTDNEPFKTAMQGFTEKIVGMMKSENLFASQGGPIILSQIENEYGPEGKEFGAAGQAYINWAAKMAVGLDTGVPWVMCKEEDAPDPVINACNGFYCDAFSPNKPYKPTMWTEAWSGWFTEFGGTIRQRPVEDLAFAVARFVQKGGSFINYYMYHGGTNFGRTAGGPFITTSYDYDAPIDEYGLIREPKHSHLKELHRAVKLCEQALVSVDPTITTLGTMQEAHVFRSPSGCAAFLANYNSNSHAKVVFNNEQYSLPPWSISILPDCKNVVFNSATVGVQTSQMQMWGDGATSMMWERYDEEVDSLAAAPLLTTTGLLEQLNVTRDSSDYLWYITSVDISPSENFLQGGGKPPSLSVQSAGHALHVFVNGQLQGSSYGTREDRRIKYNGNVNLRAGTNKIALLSVACGLPNVGVHYETWNTGVGGPVVLHGLNEGSRDLTWQTWSYQVGLKGEQMNLNSVEGSGSVEWMQGSLIAQKQQPLAWYKAYFETPSGDEPLALDMGSMGKGQVWINGQSIGRYWTAYADGDCKGCSYTGTFRAPKCQAGCGQPTQRWYHVPRSWLQPSRNLLVVLEELGGGDSSKIALAKRSVSSVCADVSEDHPNIKKWQIESYGEREHRRAKVHLRCAHGQSISAIRFASFGTPVGTCGNFQQGGCHSASSHAVLEKRCIGLQRCVVAISPDNFGGDPCPSVTKRVAVEAVCSPAA

SEQ ID NO: 57295 - protein, 783 aa, Zea Mays
MERNDRVAARHLMQVFADAPGLARRELLPDLWDHVFLPHLLHLKVWFAREADDLVAGRDADDRRTRMKALQRLYSDHMDSGTAQFAVYYKEWLQSGAAAPPPVPSVPLPSTPRSFDGREKSSASVHRTSINRDLYNAVFGTALALGQEDVKDTKLDDGTGLALDLDVELDHDAAGFKTQKLAHSKMGLQEKHSRSRKEGAALAETAPAQRKSYSFRLFSCQGDISRNVISHPKAAKKEPVVSVEKELDSSELAPAVVPLLERAVSVVSSSDSLSQCEDAVHEVARACSAWDPSLVNLLSCASFIQGLLEVTLTSKDDAVLESAMSIMGKLVLGNEVIRQLVLNADPQLEVFLRLLRSSELFLKAAVVLYMMKPKAKQMLSLDWVPLVLHVLECGDEVQSLFSVRCAPKIAAFYFLDQLLMGFDVDRNVENAKQMIALGGLDLLIGRLGAGDARESRHCIALLTTCVQADGSCRHYLADSLKKEPLVQLLAGNQRKASAASLNLMSELVCLNRTSKIVEFVKELKNSGCLNTMHVLLVYLQQAPLVQHPLAATMLLQLDLLGDPSQYSVYREEAIEAIVAALEHSSQSRKVQEQCARALLILAGRFSSSGEPVAEAWLLKRAGLDDSLSESFRRSEVFKDKSVRAEEEKLVEERQKNLALMLLKSGGRRFLTALSSCISDGTPSLSRSCLVSVAWMSSSLSPLRGCNDFQPLACSVLASKLLDSLSYDRVLEERVLASLSLLNVVRHPECMEKVFPLKKETIESLQDLAEVTWTAKELLFACCR

SEQ ID NO: 57296 - protein, 348 aa, Zea Mays
MDLSRPTSSDLSLGLHSHGHAHAHARRHAVAAPLRLFDDAEEPKPERVGAGEADAERDDEDGGDQHFSLLGHSLCVKRPRRAGNGGGGGETSSCSSTSAALRPAKRQATGEGSGADLETRRAAVRAWGNQSLAEADPDVHSLMEQELDRQVRGIELIASENFVCRAVLDALGSHLTNKYSEGAPGARYYGGNQHIDAIERLCHERALTAFGLDPACWGVNVQPYSCTSANLAVYTGLLQPKDRIMGLEPPSGGHVSHGYYTPSGKKVSGASIFFESMSYKVNPQTGYIDYDKLEERAMDFHPKILICGGSSYPREWDFARMRLIADKCGAVLLCDMAHISGLVAAKGR

SEQ ID NO: 57297 - protein, 97 aa, Zea Mays
MPRSRGRVCTTSVMTATADADGQRHDNGGCAQPGARQRCKKLTSARKQMFMLRAPKVLVIQLKRFEGINGGKINRNIEFKEALDLSDCMYNKNQVAH

SEQ ID NO: 57298 - protein, 104 aa, Zea Mays
MSGARHVFLLLCQFVNYLEVVRLPVYYPSEQEKDDPKLYANNVRKLMAVEGNLILSDLGLAEKRVYHAALNVIRCVAPPVVPEPDRDVAAPVGGGDRKAAKLGS

SEQ ID NO: 57299 - protein, 373 aa, Zea Mays
MQMWGDGASSMTWERYDEEVDSLAAAPLLTTTGLLEQLNVTRDSSDYLWYITSVDISSSENFLQGGGKPLSLSVQSAGHALHVFVNGQLQGSAYGTREDRRIKYNGNASLRAGTNKIALLSVACGLPNVGVHYETWNTGVGGPVVLHGLDEGSRDLTWQTWSYQVGLKGEQMNLNSIEGSSSVEWMQGSLIAQNQQPLAWYRAYFETPSGDEPLALDMGSMGKGQIWINGQSIGRYWTAYADGDCKECSYTGTFRAPKCQSGCGQPTQRWYHVPKSWLQPTRNLLVVFEELGGDSSKIALVKRSVSSVCADVSEDHPNIKNWQIESYGEREYHRAQSALKMCTWAVHFRNQIRKLWDTYGNLWRFPARRLPLS

SEQ ID NO: 57300 - protein, 603 aa, Zea Mays
MGFERVELRCPRELDPRPSWTLGDVLAELDALDATRRAAPPTPLKQPPDWANGGGEKAFVMRVDDDDEDDTEDEDDGTSGGKSRALVAKGARFSCNDLASSDSEDELDGQVAPYHLMEKRDLAKSILLELEHEHHLKVQEEVRSKLASLEVCHQNEIRRTISAFARLQKYAESRKEIDRRLDVHFQRRIAEVLDKHLSMVQRDHEQKSQIVERRIRDDAALEEAKRKEQAVKEEKLRQERAQQEAEARQKEAAKLAAEARKTAFEAAKKEAAEKEAAEKEAAKLRDAAASQPSPNSQNNTAEGIKVFGDKYALEAESRRHALVQNQVPENIHHSKEFSKYDRQIAKSISKLMPTTDSVRTRASELVKALNGQDCPRPISCCLFANKIISIVKSRNTKDKTFGNLAFACGYVMLLVTNQVPDAMDYLLAEFNRVCIYTVPKHMHALNAQARNRDYYRLIGYQEENGQLESTESYLTYVVAYVKLYAAMIQTEIKGVRHPHGLAEGWKWLAMFLNSLPATTATACALHAFLKMAGFALHKKYGSQFMKILDVISRCFLPALKEQGNKMQAEAVNNLQNYLNDKIYLEEPEGQYLVQQLLSKELFM

SEQ ID NO: 57301 - protein, 224 aa, Zea Mays
MVALFILAAWAGKDSGVVAGLVGCGLVKSLVSISADLMHDFKTGHLTLTSPRSMIIAQAIGTAMGCVIGPLTFLLFYKAFDIGNPDGYWKAPYALIYRNMAILGVQGFSALPLHCLQLCYGFFGFAVAANLMRDLLPPKYGKWVPLPMAMGVPFLVGASFAIDMCVGSLMVFIWHIIDRSKASLMVPAVASGLICGDGLWIFPESLLALAKISPPLCMAFRSSH

SEQ ID NO: 57302 - protein, 113 aa, Zea Mays
MGLPSHSTTGSTGRPLPTNAISALRLASSAVMSLVLTPASRPASTRRGASASILLAVHPLRILSKAGSTSSRSGVTNATFTMGPSATYPWSSTHTDAKAPRSSASMMDSTLGR

SEQ ID NO: 57303 - protein, 931 aa, Zea Mays
MDVPTPPNRAGCNSNISNIGSPMQSFDDPFGGAAMTSFDGYSELSSPSVADHIFSLLNDPSSVQHMFALWSSSGSSPRASAVREDMSFDTYPGPMDVTASLAQRINSASVFNPTEVDRGLKDSDGLVPNNGSQQGSSIIPRSVGNILADRMLMALSLFRKSLSDGVLAQVWMPVEHNGRVVLSTSEQPYLLDQDLAGYREVSRNFLFSVKEEPGLHLGLPGRVFISGVPEWTSSVTYYSKPEYLRMEHALLHEIRGSLAMPVYDPSKGSCCAVLELVTNKEKPDFDAEMDIVCDALQGVNLQTTTDRSNQKVYSENQKYASTEILDVLRAICHAHMLPLALTWIPTSNGTANGFCVAKNIRLDSQPGKSVLRIHESACYVNDAKMQGFLHACAERHLEKGQGIAGRALKSNLPFFSPDIREYSIEDYPLAHHARKFGLHAAVAIRLRSTYTGKDDYILEFFLPVNCKGCGEQQMLLNSLSSTMQRICKSLRTVSEAETDSVSATEPMYEKTNGSCLPTGNSESSSHDDQPITESAFHDLSSGDKQGDREPAKARSSSKRVAEKKRSTSEKNFSLDVLRKYFSGSLRDAAMSLGVCPTTLKRICRQHGISRWPSRKINKVNRSLKKIEKVIKSVHGVDRSLQYDPATGSLVPATSLPDKMPTSSAGVKTVEEKSSPEPGQDFSSPDGWQRESSQLHASSIPTRVGDEVQMLAINNEGSRNYASGIANIAQHSNSEDAHGPLYPVGAVNSSRTGETGYIDSPTSLHMDSVEGQTTVRDSRSVQQADVTMATKEQTLPSTSGTTDSSSGSASSQPAFKGNPGRALKVSSSDALTVKATCNGDTVRFKFLPAMGWYHLLEEVAKRFKLATGAFQLKYKDDEDEWVILANDADLQECVDVLDSIGSRSVKLQVRDLPCLVSSSGSSSCCLQVEGSA

SEQ ID NO: 57304 - protein, 235 aa, Zea Mays
MPVAGKINVTPVEEKTSEEEPVVYATKMEAKNAFKSLLESVNVESDWTWDQTMRVIINDKRYGALKTLGERKQAFNEYLNQRKKFEAEEKRIKQRKARDDFLAMLEERKELTSSTRWSKAILMFEDDERFKAVERPREREDLFENYLVELHKKEKAKAAEEHKRYVAEYRAFLESCDFIKASTQWRKVQERLEDDERYSRLEKFDRLDIFQVIIFLTFCQLMLFCGSGSIIRFVF

SEQ ID NO: 57305 - protein, 229 aa, Zea Mays
MELAPPLRLRDPSLGWLPATCAGNKAAGRTPLDWETRVKIALGTARGMAYLHSVGSGGKFIHGNIKSSNILLSQELGACVTEFGLAQLMSTPHVHPRLVGYRSPEVLETRKPTQKSDVYSFGVLLLEMLTGKAPLRSPGRDDSIEHLPRWVQSVVREEWTSEVFDVDLLRHPNLEDEMVQMLHVAMACVAVVPDERPRMEEVVGRIEEIRSSYSDTKTSPEDNPREGAF

SEQ ID NO: 57306 - protein, 77 aa, Zea Mays
MRGEVAGQVLLGGAENASAPLLVAALGRRLGGARRRRHLQTLASKGSCRHERRGEERRGWRRRERRREATRSGCQMA

SEQ ID NO: 57307 - protein, 57 aa, Zea Mays
MPSRSSSSSSSRPTSWPSCSGCTSWLPRSNHPGGRHSDGADLRHRRSFASLFIGNTR

SEQ ID NO: 57308 - protein, 583 aa, Zea Mays
MAAKGKLSEKPVSDESPQETSKVDQNVNCLGQEGSSPNSTPTTAISNGAAPVDNVKSPDGPDSSKQKQELTSGDEQTPDSSKQKQELTSGDEQTPDSSKQKPELTSLDKQTKSSEQLISCDQEVREPVTVETEKLSDVNSKKDHKLCSSIGSEMAEQSKVVKDNESIVASEELSPGTNDVDKKQITETGNITTEESSKPSDTKPAVVKPKRGRPPAAKSQEKKPAGKKHASDLKSAKLDPITDSGGRATRHLNKDAAKSSSTKAAEGESEKKQHKTSMKLQKEDAVSDKDTNEDISLKEMMSPTKIDKSKGQQEDNGASSKRKSLQEAQETPLSKKNKILDENLIGSRIKVWWPDDKMFYAGVVESFDASSKKHKVSYDDGDVEVLMLKKERWEFISEEQDTDPDAVSNMPRGRKAKGSSGPQMKGGKTGTPQSDVKNPPKKRGRPKGMHDSNNMPNADSSVTPARLKGKSVEKDTQVTPKTGNNSKKEGARHSRSTTGKAQNAVVKASSKDEPDSTDNSKDDAGSEDKNSKDEVKSSEGNDGSKTNGLSTKRKLEENEGESSEEKGSAKTTTRKKRRRKSRN

SEQ ID NO: 57309 - protein, 130 aa, Zea Mays
MAAAQHRLLEDDYDEYTATNNNAAAFCRSIFLILMALLLLRHTLTITNSDDEDDASAIFSLFLLRAAGFLLPCYIMAWAISIMQRQRQRQEEAMLLPTEVAIILHRNGRTMQFAVAPPETPISPHPELNQ

SEQ ID NO: 57310 - protein, 795 aa, Zea Mays
MLRSASGTTPAMKMYSNLPIYFQKGEISFGVGYEPSFADISYAFQVALRKVNLSTRASCSGLAVQLPKKERSLPWWDDMRYYLHGKIILYFNETKWKFLATTNPYEHVDKLQIVSEYMEIQQTDGRVDVSAKEFKIYISSVESITKNRRIKVPSRVPRPFIYAPLFSLNVVIDWQCESRNPLNHYLHALPVEGEPRKKVYDPFRSTYLSLRWNFSLRPLQSQYGNGPPPPFYGNNSMLRGIMSGSPCKMTDDDFPTMNLGAHDLAWVFKWWSLNYSPPHKLRSFSRWRRFGIPRATRSGNLSLDKVLVEFFFRVDATPCCIRHAPLSEDDDPAFGLTFKMSNLKYELCYSRGKQQYTFDCKRESLDLVYRGLDLHRPEVYLMRDNNLSSVENVSKVRTMVQQSHGKFVHDRCNMGNFQEKHEDGFLLSSDYITIRRQTRKADPERLMGWQDTGRSHEITYVRSEFEDDSESDHTLSEPSDDDDDFNVVLADNCQRVFVYGLRILWTIENRDAVWSWVGGISKAFEPPKPSPSRQYAQRKMIEERNAEGSKVPQDSSSSIHVGSPSVQHLDASGSSSSLHSKANRSSDVAVNHDIFDDSDKGGTAQYMVNVITPQFNLHSEEANGRFLLAAASGRVLARSFHSVVHLGKEILEQALGTSSAQILELQPEMTWNKSELSVMLKDVQAHVAPTDVDPGAGLQWLPKVLGSSEKLKRTGALLERVFMPCQMYFRYTRHKGGTADLRVKPLKELRFNSPDITATMTSRQFQVMFDVLRNLLFARLPKSRISDELEMFGSK

SEQ ID NO: 57311 - protein, 232 aa, Zea Mays
MGDDDDHNEGLRAGPTASWRLNVSDFHMPERPKEPPFVARVFLRSHGKQRKIAKYYKKQENLLKDFSEMETMNEMGGLDQNAPTEEEQKQLAKSERFAINLSNAVNLVLFVTKVVASVESASMAVIASTLDSLLDLLSGFILWFTAYKMKKPNKYNYPIGKRRMQPVGIIVFASVMGTLGFQVLIESGRQLITQEHADFKFKQELWMVISMSSVAVVSSSSCSTAERSRMRS

SEQ ID NO: 57312 - protein, 153 aa, Zea Mays
MDNLPRTLLMYYTNMPLPHRKYFQTVLCNSAEFNKTVVNHDLHYSTWDARSKNEPRLLTIDDVENMTESGAAFGTRFPKDDHALDRIDEEILHRHPGELVTGGWCIGVGHDSPCDISGNPDVLRPGPKAIKLAKFLSERLSYRNFYSQQCIWD

SEQ ID NO: 57313 - protein, 495 aa, Zea Mays
MNNNIVELDAVNEDTRSQRLNDESELVEEDVKGPNLDDKNTADEHVNGTNIDGICLGFVAVEVVPAVHEARLDNNEETAEVAPMGGDDVPVPTDVDGEEPLVEAAAVTQEVVAVAEELGDDEAEEDEEKDAMGLSLGFDSTNGYVAMDVEEETNVENLDEDESDSANEEAEESEDDAFEVNDGEDMNWRIGDGRGDEGMSHSLQRCNTFGGMEFENLNEGETVMKDELRFDDFPARASSERMTPSNLLQAMNSIPSTYNVAGNVHDLPSGDFLAMGADAHKNGVDLGPGSSYLFGNNGKRNIDDIDGYDDNMQAQEDFPQSNQQKRMRHSNSGNISPGSGFFNASFSVPIQNLMVEASRLYEQKEQKLQSLQFEKQHWSDMLQEKEAIIQSLNSARFEQQNKYQVELRRFEHDLNVMAHLVTTYKRALKQTRASFDEYRKKFPCNVPLYDDVAGGGGLVLSVRELEKRRCEEEQQKIAMVNDMIERFQYKWFSKA

SEQ ID NO: 57314 - protein, 672 aa, Zea Mays
MATDLHGNEWKFRHIFRGQPKRHLLTTGWSVFVSAKRLVAGDSVLFIWNDNNQLLLGIRRANRPQTVMPSSVLSSDSMHIGLLAAAAHAASTNSRFTIFYNPRASPSEFVIPLAKYVKAVYHTRISVGMRFRMLFETEESSVRRYMGTITGISDLDSVRWPNSHWRSVKVGWDESTAGDRQPRVSLWEIEPLTTFPTYTSPFPLRLKRPWPTGLPSLHGGKDDDLANSLMWLRDTTNPGFQSLNFGGLGMNSWMQPRLDTSLLGLQPDMYQAMATGAFQDPTKQASPTMLQFQQPQNIAGRAAPLSSQILQQAHPQFQQQPYIQNISESTIQAQGQSEFLKQQIQRSQSFNEQKPQLQPQQESQQQQQSQCLQAPQHQQIQQNIANYQSVSNALSAFSQLSSASQSTPMALQTILPFSQAQSFTDTSASSLSPSNTNTMQNTLRPFSSEAVSHLSMPRPTAIPVPDAWSSKRAAVESLLPSRPQDSSQMQQLDSTPASIPHSSALAPLPGRGCLVDQDANPDPQNHLLFGVSIDSQSLLMEGGIHGLQNGNDSTAIPYSTSNFLSPSQNDFPLDHTLNSSGCLDDSGYVPPCSDNSDQVNRPPATFVKVYKSGTYGRSLDITRFSSYHELRRELGRLFGLEGQLEDPLRSGWQLVFVDREEDVLLVGDDPWQ

SEQ ID NO: 57315 - protein, 610 aa, Zea Mays
MIRQIYTRAAGGAMDAGNLLKPMLGRGELRCIGATTLDEYRKYIEKDAALERRFQQVYCGEPAVEDTISILRGLRERYELHHGVKISDGALVAAAVLSDRYITGRFLPDKAIDLVDEAAAKLKMEITSKPIELDEVDREIIRLEMEKLSLKNDTDKASKERLSKLEAELESLKQKQKSLSEHWEYEKSLMTRIRSIKEETDRVNLEIEAAEREYDLNRAAELKYGTLLSLQKQLEEAENKLVEFQQSGKSMLREEVTDVDIAEIVSKWTGIPVSNLQQSEREKLLLLEDVLHKRVIGQDIAVKSVANAIRRSRAGLSDPNRPIASFMFMGPTGVGKTELGKTLAEFLFNTENALIRIDMSEYMEKHAVSRLVGAPPGYVGYEEGGQLTESVRRRPYSVVLFDEIEKAHQEVFNILLQLLDDGRITDSQGRTVSFTNCVIIMTSNIGSPLILDTLRNTTDSKEAVYEIMKKQVIEMARQTFRPEFLNRIDEYIVFQPLDTTEINHIVEIQLNRVQNRLRQQKIHLQYTAEAVELLGSLGFDPNYGARPVKRVIQQMVENEIALGVLKGDFKEDDTVLVDVSSAAIAKGLAPQKKLVLQRVENGNDELVAND

SEQ ID NO: 57316 - protein, 1594 aa, Zea Mays
MRVPCCSLCNVRYDEEERTPLLLHCGHGFCRACLSRMLAAAPGATLPCPRCRHPTAVGNSVSALRKNFPILSLLSASPSSPSFLHSDSGSSSDGSEDEDDFFARPTRRPAPAPAAASPGCSSFDLASHPDLKLARRIGSGPPGPAGQDVWVGTLSRGGGGVKRCKHQVAVKRVPQTAGDGLEVVQEEVERLRRASTWCRNVCTFHGAVRVGGHLCFVMDHYVGSVQAEMRQNGGRLTLEQILRYGADIARGVAELHAAAILKNRRVPDDSGAGIDAMLLSPNYTAPEAWGPLKKSLNMFWDSANGISPESDAWSFGCTLVEMCTGAVPWAGLTAEEICKSVAKEKKPPPQYSRVVGVGLPGELWKMIGECLQFRASRRPSFQDMLKIFLRHLLDIPRSPPASPENDFANENLPNGMEPPTTSILEMVRYNPNALHHLVCEGDAAGVRDLLAKVASERNGGFIRSLLEAQNTDGLTALHLACRRGSAELVEAIVAYQENVDILDKDEDPPIVFALAAGSPRCVRALVGRSASINSRLREGLGPTLAHVCAHHGQPECMQELLMAGADPNAVDGEGESVLHIAVARRYTDCAIAILENGGCRSMGISNSQHKTPLHLCVETWNTTVVRRWVDVASLEDIAEAIDVPSPVGTALCMAAALKKEHEKEGRELVRILLAAGADPTAQDDPHCRTALHTAAMINDVELVKIILEAGVDVNIRNAQNTTPLHVALNRGANSCVGLLLASGANCNIQDDDGDNAFHIAADAAKMIRENLTWIAQMLLQPSPAVDVRNHRGWTLRDFLERLPREWIYEELMEMLEDKGVHLSPTIYEVADWVKFRRTVTSPAFGWQGAGPRSIGFVQSVVDNDHLAVSFCTGEAHVLTSEVIKVIPLNRGQHVQLKPDVSEPRFGWRGQSRDSIGTVLCVDDDGILRVGFPGASRGWRADPAEIERVEEYKVGNWVRIRPSLTVAVHGMESITPGSVGIVYSIRPDSSLLLGLCYLSNPWLCEPEEVEHVDPFKIGDQVCVKRSVAEPRYAWGGETHHSVGKIIDIESDGLLIIDIPNRAAPWQADPSDMEKIENFKVGDWIRVKVTVPSPKYGWEDVTRNSIGIIHSLQDDGDVGVAFCFRSKLFLCSVADIEKAQPFEVGEKVHVSPSISEPRLGWLNETAATIGAISRIDMDGTLNIKVSGRKSLWKVAPGDAERLSAFEVGDWVRPKPSIGSRPTYDWNSVGRINIAVVHSIQDSGYLELAGCFRHGKWLTHNTDIEKVQTVKIGQHVRFRAGISEPRWGWRDANPDSRGIIAGVHADGEVRVAFFGVPGLWRGDPADLEIENIFEVGEWVRLRNDVEQWRSLKPGSIGVVHGVGYQGDAWDGTIHVAFCGEQERWIGPSSQLEGVSKFVVGQRVRIRGCIRQPRFGWSNHSHSSIGTISSIDADGKLRIHTPAGARAWLTDPAEVEKVEDEEEVCIGDWVKVKDSVGTPVYQWGDVNHSSIGVVHRADDGELWIAFCFCERLWLCKAWEVEKVRPFRQGDKVRIRSGLVSPRWGWGMETYASKGEVVGVDANGKLRIKFRWRDRLWIGDPADVVLDDAHLLTEASNGF

SEQ ID NO: 57317 - protein, 63 aa, Zea Mays
MRYSDLKKIDRGVRRHFHDDITVIVVFLDSGLVSQASTHRGPTLSLRGGGGSAGLRSNTLAPT

SEQ ID NO: 57318 - protein, 248 aa, Zea Mays
MALALRCPPAATSSRSPFLPSTSPAPAGKVPRRPPASWRCLAYYGDGGFRKNYDHIPKQFREENLKDGLMDNYKHVPQFLYGLSDAQMEMFMNDDNPYNRQSQKVTEESVSAARSYDEFGMYTLSGMHEGPASYSMGMGMGGSMSMSMGRGGRGYRRMRSSAPDLPSLLLDSRIIFLGMPIVPAVTELIAAQFLWLDYDDRTKPIYLYINSTGTMDENNELVASETDAYAIADFINVSHFQELCWIIL

SEQ ID NO: 57319 - protein, 243 aa, Zea Mays
MAHRGHLDGLTAQAPALMRHGSFAAGSLSSHSPLESSSTLEMLENKLAMQTAEVEKLIMENQRLASSHVVLRQDIVDTEKEMQIIRTHLGEVQTETDLHIRDLLERIRLMEADIHSGDAVKKELHQVHMEAKRLITERQMLTLETEDVNKELQKLSASGDSKSLPELLAELDGLRKEHLNLRSQFEFEKNTNIKQVEQMRTMEMNLMTMTKQAEKLRGDVANAERRAQGLAVLVGAEGSGGES

SEQ ID NO: 57320 - protein, 67 aa, Zea Mays
MMQTTTGVLIPTLMVIEMETNTIGGKISKDKRSEFSLLQIPPIRIRTRHHRDQLLVRATKNWTTKIY

SEQ ID NO: 57321 - protein, 343 aa, Zea Mays
MKVLNSKLLKAKDRNTKRDIRKELKTLAKEERKRQQLAVTDVLKNADVVLTTLTGASSKKLNGITFDLVVIDEAAQALEVACWIALLKGPRCILAGDHLQLPPTIQSVEAEKKGMGKTLFERLTEAYGEEITSMLTVQYRMHEHIMSWSSKELYNNKIKAHSSVAGHMLYDLEEVTRSSSTEPTIVLIDTTGCDMEEVKDEEESTMNEGEAAVSIAHAKLLVESGVNASDIGIITPYAAQVTCLKMMRNKDAKLKDLEISTVDGFQGREKEAIIISMVRSNSKKEVGFLSDHRRMNVAVTRARRQCCLVCDVETVSSDRFLKRLVEYFEENGEYLSASEYQSS

SEQ ID NO: 57322 - protein, 74 aa, Zea Mays
MGAGDAHRPYAERLLLVRRSARGVDRCRPRRRPKLGGPRRPRQPSSARTVSARLWRAPRGAAPQRPVSSPSDPS

SEQ ID NO: 57323 - protein, 100 aa, Zea Mays
MPPNEYYEYFGPDYTLHVAPSNMENKNTRHQLDDIKSKLLDNLSKLRHAPSVQFQERPPEAELPEQDEDKENPDERHDADSDVEMNDAKPLQDSGRMSIV

SEQ ID NO: 57324 - protein, 234 aa, Zea Mays
MAIILVRAASPGLSAADSISHQGTLQCSTLLKTKRPAARRWMPCSLLGLHPWEAGRPSPAVYSSLAVNPAGEAVVSSEQKVYDVVLKQAALLKRQLRTPVLDARPQDMDMPRNGLKEAYDRCGEICEEYAKTFYLGTMLMTEERRRAIWAIYVWCRRTDELVDGPNANYITPTALDRWEKRLEDLFTGRPYDMLDAALSDTISRFPIDIQPFRDMIEGMRSDLRKTRHEHACVQ

SEQ ID NO: 57325 - protein, 824 aa, Zea Mays
MTSRRNLTNHACFWGYKLPFGLYNSCLTMLNLRCLGIVFDLDETLIVANTSRSFEDRIDALQRKLSNETDPQRRNGMLSEIKRYQDDKSILKQYIEGDQVYDDGKVYKAQPEIVPPLSDNQQPMTRPVIRLQDKNIILTRINPLIRDTSVLVCLRPAWEDLRSYLIARGRKRFEVYVCTMAERDYALEMWRLLDPDSRLINSVQLHDRMVCVKSGLKKSLLNVFHDGSCHPGMALVIDDRLKVWDEKDQLRVHVVPAFTPYYAPQAEANCSIPVLCVARNVACNVRGGFFKDFDEGLLPRISNVHYEDEVNEISAPDVGNYLITDDENVALVNGNRDSLPFDGMADAEVERRMKEANAQSFHQTAGDFVMPVAPAQNFVSTSVASLAPPLGMMPSPFSQPVAPPGFSDSLQGSPAREEGEVPESELDPDTRRRLLILQHGQDTRDPTSPLPAIPPVQVPVPPVQPHGNWFPTEDGINQSNLNRGSAGFTVESDSIVYEKKQPPHPSFFHGGDSPMPSDRFGYQNQRFPSQLPHEDHPMMQNHAPPKYRSFSGEELASWHVPSSQRNNQIESGRHFAQYAGTSAGILEGIALKCGSKVEYKSALCDTAELQFSIEVWIVGEKVGEGIGRTRREAQRQAAEMSLRNLANKYLSSDPNKLSDMKENDFSSNRNVFGYSGNTRDDMLPLSSTSEESRFMKMENNNSRKTGSSVAALKELCTVEGYNLVFQACPSSADGLVGKESYAQVQVGGQILGKGVGLTWEEAKLQAAAEALGTLRSMLGQLGHKRSGSPRSLAPNFNKRFKPDFPRTVQRVPYGTYSRIEGHVP

SEQ ID NO: 57326 - protein, 503 aa, Zea Mays
MEELVAAIAHRRRREVAALAERHAVSRFAHKGRIQSMLRLRLLRQRGTVEDEPWSLLKPVRPHQQKHVGKLRYDSRDTDLQKANNSCQQNNSKCMPDEQLYNDRVPAEEKSNDISAEGLVDGSGNLQCDEQMKAKGDTCQKDCENFCVHSQHYSEASSFARYGEHSTIDENQFVEDISPSTTSTLHELETPSSRGDNLREEDNQSINGSWEERGLWISSLGWPAPIDTMSPDSWHQETMGDIENHNNPIQFNDRPWIESPNSWRSLCVVTQSDCHALSHNADICNLLERKKVSKSLESDFSNKMNQLLLTALQKQRQQRMMDDFGGYYDERMYWRQNDEIRDADKEASAPCSLAPVAHLGAHQQESWQHSSFGSQHQHHDNQNLLEMEVRVRGEMSQIHQEIYQLRKLVESCIASQVKMQHSIKEEVCSALREAGLMRSQPDTAAAKRGNCCICHRMQVDSLLYRCGHVCTCFDCADQLKSSGMSCPICQSPIDDVVLARLNF

SEQ ID NO: 57327 - protein, 55 aa, Zea Mays
MVLPAIPTFREFLSQKGRDRAKCYSNSNATNQPSGIRRKFSGHLDKEEASKRMKS

SEQ ID NO: 57328 - protein, 90 aa, Zea Mays
MWYTRGSSMPSAASPSSASTALPGPTRASSWKKLDQLACSEAKGWQICLAVAAKVMKGCLLQNTCPMIRSRNIFSTVSPLKTFYHKAAKA

SEQ ID NO: 57329 - protein, 456 aa, Zea Mays
MMSGRGRSGHTLGVAGGGGIRVGRRRERGRDYRKEDGVARGWSGGTMAGYMSRGPQNGSVYVCNLPPGTDENMLAEYFGTIGLLKKDKRNGRPKIWIYRDKVSNEPKGDATVTYEDPHAASAAVEWFNNKDFHGSTIQVHIAESKSKDAFDNPTNLNTIAGVSEQDEVDNGAGRGRGRGDGPGKAWQQDGDWMCPNTSCGNVNFAFRGVCNRCGAARPAGAGGTGGGGGGRGRGRGNSDARGSSRAGAGAATGGGPPGLFGPNDWPCPMCGNINWAKRTKCNICNTSKPGTNEGETGSKEVQCHFGPLPIVVCIAIFLHFRGGRGGGYKELDEEELEEVKKRRKEAEEDDGEIYDEFGNLKKKFRSKALHTGSAQTLPGSGRAGWEVEHRGSSEREGRERSRDRGRDDYDEKETRSIDRGDHGRDQRRSQDREREKGRERRDHEYERSRERDRRHR

SEQ ID NO: 57330 - protein, 1045 aa, Zea Mays
MALSGMRGLSVFISDVRNCHNKEQERLRVDKELGNIRTRFKNEKGLSPYEKKKYVWKMLYIYMLGYDVDFGHMETVSLISAPKYPEKQVGYIVTSCLLNENNDFLRMVINTVRNDIIGRNETFQCLALTMVGNIGGKEFSESLAPDVQKLLISSSCRPVVRKKAALCLLRLYRKNPDVVNIDGWADRMAQLLDERDLGVLTSVMSLFVSLVSNNSEAYWNCLPKCVRILERLARNQDIPQEYTYYGIPSPWLQVKTMRALQYFPTIEDPNARRALFEVLQRILMGTDVVKNVNKNNASHAVLFEALALVMHLDAEKEMMSQCVALLGKFIAVREPNIRYLGLENMTRMLLVTDVQDIIRRHQAQIITSLKDPDISIRRRALDLLYGMCDVTNAKEIVEELLQYLDTAEFAMREELSLKAAILAEKFAPQLLWYVDVILQLIDKAGDFVSDDIWYRVVQFVTNNEDLQSYAAAKAREYLDKPALHETMVKVSAYLLGEYGHLLARRPGCSPKELFAIINDKLPTVSTSTVAILLSTYAKILIHTQPPDVGLQQQILTIFKKYESYIDVEIQQRAVEYFELSRKGPALADVLAEMPKFPERESALLKKAEDAEIDTAEQSAIKLRSQQQTSSALVVADHSPANGSAPPANHLTLVKMPSQIVSDTQESGVIHEEVPNPPVEAPKENGTPVEVESRDTNITGINNEVKTEPPSTSHSTSPADLLADLLGPLAIEGPPAVEQNPTQGLNSNQSPVGDLALATLDDQSNSVQPIVNVEEKFHILCTKDSGVLYEDPHIQIGMKAEWRAHHGRLVLFLGNKNTSALTSVRVLILPPSHLKMELSSVPDTIPPRAQVQVPLEVANLRASRDVAVLDLSYTFGTSLVDGKLRLPVVLNKFLQPITLTPEEFFLQWKALTVHLLKVQEVVKGVKPMPLSEMANLFMSLHLAVAPGLDNNPNNLVACTTFFSEATRAMLCLIRLETDPQDRTQLRLTVASGDQHLTFELKEFVKEHLIDIPRTQAAPPMAMVQPQLLTAAPATYNDPGAMLAGLL

SEQ ID NO: 57331 - protein, 287 aa, Zea Mays
MGNNRDHNPRELRSWARRTGFHPSAFFSGESNSSFASSAAPQAPPPPPPPPVSSRRPPPAREREPEPDTEDDLVPAPPLELERGGPAPVRGRGGRPRRRIDLRGELVIPPGFGREEAEPDAGKGRARGDARRRNFGVEMDQTPANAGRNGNGALADAESRKKSEEAEADAKRKAEEAEARRKKEEEERDAELAAYYQEQWANEDEGAADAAAAETAPLYEASGLRCGVTDNPGWEIQAHNEGTTGGYTCWFSVPDNIRIHWSYVTVSEVNKSSSGGTNYCCSGFGIF

SEQ ID NO: 57332 - protein, 845 aa, Zea Mays
MAAAAAAMAAHRASFPLRLQQILAGSRAVSPAIKIESEPPANIKAFIDRVVNIPLHDIAIPLSGFCWEFNKGNFHHWRPLFIHFDTYFKTYISSRKDLLLSDDMTEADPMPKNAILKILRVMQIILENCQNRSSFTGLAHLKLLLASSDPEIVVAALETLVALVKINPSKLHMNGKLISCGPINTHLLSLAQGWGSKEEGLGIYSCVVANEGNHQGGLSLFPVDLENKYGGTQHRLGSTLHFEYNLGPAQYPGQTSDKENLVEMAFSDRNHESSSSRLDAIFRSLRSGRNGHRFNMWLDDGPQRNGSAAPAVPEGIEELLISHLRRPTPQPDGQRTPVGGAQENDQPNHGSDAEAREVAPAQQNENSESTLNPLDLSECAGPAPPDSDALQRDVSNASELATEMQYERSDAITRDVEAVSQASSGSGATLGESLRSLEVEIGSVEGHDDGDRHGTSGTSERLPLGDIQAAARSRRPSGNAVPVSSRDMSLESVSEVPQNPDQEPDQNASEGNQEPTRAAGADSIDPTFLEALPEDLRAEVLSSRQNQVTQTSNDQPQDDGDIDPEFLAALPPDIREEVLAQQRTQRMQQQSQELEGQPVEMDAVSIIATFPSEIREEVLLTSPDTLLATLTPALVAEANMLRERFAHRYHSSSLFGMNSRNRRGESSRRDIMAAGLDRNTGDPSRSTSKPIETEGAPLVDEDGLKALIRLLRVVQPLYKGQLQKLLVNLCTHRGSRQALVQILVDMLMLDLQGFSKKSIDAPEPPFRLYGCHANIAYSRPQSSDGLPPLVSRRVLETLTNLARSHPNVAKLLLFLEFPCPSRCFPEAHDHRHGKAVLLDDVTKPS

SEQ ID NO: 57333 - protein, 370 aa, Zea Mays
MYRITGDDWDNWKDVSSHFGVSSSFATAKKIGATGLRGRSWPDLDMLPFGWLTDPSVNQGPHRKCNLTLDEQKAQMALWSMTKSPLMYGGDLRNLDDSTLNIITNSGLLKINHYSRNNMEFHYVHSERTSNGEHSGHFRSPYPVRVTKNDGIFVSLTACSDDAAKGWYMFPQDGKPDHICRNYEILNDKNVSFCLGKTKRFLASDVLTMDTKEHQSKFHISVTNTDDTCLDASAGRRQTASEIRLPMFSACRWHAKQMWELNANGNLVSSYSRLCATVESRDEGGTSGGRAWIATGSEGEIYLAFFNLDSMSRKMTVQISDLGKVLGRNLLEKNPCSYTEVWSGKNFGPVKEEISAVVHSHGSMVFEIIC

SEQ ID NO: 57334 - protein, 138 aa, Zea Mays
MDTCGIIPASPEEYPILGLNLLRLLVQNRIAEFHTELELLPAKALEHPCIKHAVELEQSFMEGAYNRVLSARQAVPHETYVYFIDLLAKTVRDEIAGCSEKGYDSLSVSDAKQMLMFSSDQDLHEYITELKLVCKPNT

SEQ ID NO: 57335 - protein, 831 aa, Zea Mays
MGAQEEAVDEMLRAAAAEVSTSSVKRRLRIFHHTLPPLIAKAIESPSDTVLLVDLIFQTLPIYDDRASRKAVDDLVIQALGEPTFMKPFAAVLVQSMEKNLKVTNPLTSLKLLRWSHYLLKWSQFATLTKGAFTRLANAQAVLCQVLMDGSFRRRRTCKQLFIHLFSEHSGIYKMYIEELRDLRISMRDSPAFLNLILDFTITSPSLSTQYQSVFLDLYVKIILSSKDRPPKAATEAFKPLFLNIGHEDFKNTIIPSCIKMLKRNPEIVLQSIGYLLKTVHLDLSKYSMEFMPVVLHQARHSDEERRINALSIIGTLSEKSSDPDALPSMVNAIKAVLGGSEGKLSLLYQRIGMINALEQLSRSPPKQIGRLAPSVSTFLLTCYKDDGIEEVKLAILSAIGSWALVSAEAVQPDVVSFIAAGLKEKDTLRKGHLKFLRVICKNSESLTKVASLLDHLIQLSKTGFSKATQRLDGIYALFAVSRLAAVDTKADGAILKEKLWTLIAQNEPSLISLQLLPKLADDDCLAVLDLVQSLFVEQFFRVREYFSIHSLLQLLIYLLCHPSWEVRKVAYDVTKKIFSSSSGLAEDILFLFTDWLSLVGERLSILKQGDMDSPSDSQLPFFPSTEVLVKCLFLIAPYAVVHSLRSYSRIILCSHHPCLTSSSSPAGVYKRLQRRLRQEQIFFVDLITPNISVICKELLSQDGLFSSNNQVQSAALCSLSTLMTITPNDTFLEFEKHFIGLQERTLHDSFSESDIKIFYTPEGQLSTEQGVYIAEAVANKNTKLAKGRFRAYDDQMQRQLGLLSLQRMRRKNPQALASEKLGNLQKGLLL

SEQ ID NO: 57336 - protein, 716 aa, Zea Mays
MGMSAASHLCAPSSLRALTVLFVLAAFVSDVEGRHHRHVCPHFSCGGLSNISYPFRRQGDPSGCGVQSYELVCTDTDATIRIGSGTYKVLSINSTYSYFWVVDANLDIQSSCPLPRWDYHARRTSRNRNLHRRRIEFSHDFSNSTPTMWVYAYFYPDWTSSNSYRQRVEFSHDTPFSSYMDYSGWAIFVNCSQPIENNDTDKYHIYEPVSCLSNSSFIYLLVTDYWYDDNVSAGDLEPSCGYLAMTPLGGPGMPVPMNTSYPDVVKFMRNGFALRFPLSIEYYPNIRECLAENMRAFHEEPRNSTGIREQILDILTFETLWFCVIEQLGSSNNGVKSVLINIIVRIIPYVLWGLKSAHVICRFVLMPLAVFVFLAYKYWKTRITIDAVEKFLRMQHMLVPMRYAYTNIIAITAHFRDKLGQGGYGTVYKGVLQPGEVHVAVKMLGNSNCNGEEFISEVATIGKIHHVNVVRLIGFCSEENIRALIYEFMPRGSLDKYIFSSEKTFSWDKLNEIALGIARGLNYLHHGCDMQIVHFDIKPHNILLDSSFVPKVADFGLAKLFPKDDNFVPLSAMRGTIGYIAREMVSRSFGVISSKSDVYSFRMLLLEMTGGRRNADPHAGSSSQAYYPSLVYKQLSQGDANRISEGVDMHELEKKLCIIGLWCIQMKPQDRPTMSEVIEMLEAGVDGIQMPPRPYFCDEEGDSSYSTISELDTIEE

SEQ ID NO: 57337 - protein, 685 aa, Zea Mays
MGYGYVDPFPPPQQPQQAAYVAPQQGDYGQPQPQPAPRPPACPYSSSASAPPGSASYHFSPPAPSPPPVSSPPPASPLPEPSAPPAPLLPSPPPPAPLPPSPPPPALSPPPPDALPPSLPPSPLPYPTRSPPQAPPPPLTTDQPRVQPRVYPSPPPPSLPPPPPPTVSPPAPAPSNSPSPSPAPAAQAPGPARVAAYSPPPPRIAPPPPPHYHGKSHYTPHSPVKSHSNSSHAASGSGKNIEISREAATTIVALAGLAMLSFIGATIWFVKKKRRRIEPPATLPTQQPAPPPPPNYIPSSAGSSLASDGFYLRSPGYPFMRYSTGSHGFPYSPADSGIGYSHMLFTPENLAAITDDFAEDNLLGEGGFGCVFKGILPDGRPVAVKKLKIGNGQGEREFKAEVDTISRVHHRHLVSLVGYCIAEGQRMLVYDFVPNNTLYYHLHVSETSLDWRTRVKIAAGAARGIGYLHEDCHPRIIHRDIKSSNILLDNNFEAQVSDFGLARLAADSNTHVTTRVMGTFGYLAPEYALSGKLTAKSDVYSFGVVLLELITGRKPVDASQPLGDESLVEWARSVLTKAIEHREFGDLPDPRMENRFDENEMFHMIVAAAACIRHSAAMRPRMGQVVRALDSLADSNLNNGLQPGRCEVFLEPQSEEIRLFRLREFGSPDGSEELSQASWRSRRDL

SEQ ID NO: 57338 - protein, 469 aa, Zea Mays
MMLRFLKARKFDIDKAKQMWIDMLQWRREYGTDTIVEDFEYTELSTVLQYYPHGYHGVDKEGRPVYIERLGKVDPSKLMNVTTMDRYVRYHVKEFERSFLIKFPACSLAAKRHIDSSTTILDVHGVGLKNFSKTARELIQRLQKIDNDNYPETLYQMFIVNAGPGFRLLWNTVKSFLDPKTTAKIHIVQSGGVHCARQIVTISNGEEKFITYAKPKRHAMRGSDTSTAESGSEADDAVSPKALRSYISHPKLTPVREEVKMVRATSFSTRVPEYDVPVVDKAVDATWKREQPRKAPSVPQDADSSVKTASKPSGRPWDKIAANLMACLMAIVMLVRSIKDLATMRLSSKGGSEESYCTLYPDSVQKEEFRPPSPFPGFAEADLFAVVLQRLGELEEKVQMLQEKPSEMPCEKEELLNAAVRRVDALEAELIVTKKALHEALIRQEELLANIDSKEIARAQRKKKTMFCY

SEQ ID NO: 57339 - protein, 714 aa, Zea Mays
MGQDAGFKREDHSGLGSGPQTLKVSCCTSEENESRNRRYHQLKCSESNSRQLHLDYVPNFHCRSLPTRSRKTNAEQSTVGKRGSMYQSSSEISRIRKIQEGRRKIDSAFDGDAFLSFDIVDASSRPSTSGAYLHSHQNRRSGAKPSVDTAKRASKDFLDLQFREHPDENFKLDRPRLDSTLLKNDDGFLEISLEKEIAKGGPCRNAAPILLNTGSGKCTDLQKMNGCPSENNCGDKGRDSASSSKSTPVKVSSFDGSCQSDGAQHHITENNTKARSSPFKKMLDPIMKSKSPRSPSIMERGGSNSATGPGSRKNSVSRKSLLGDFSRSEQASNCQPNGQTQKRVNKSALSPAHLQAVLRLDSKNGVQVFEFCVDGPGESISARNWKNGDELSSIYTFHSGGKRSSAAGRISKDGGWDLPPIVGQVQVSSYLCSEVGKDGTVNNSVVTEFVSYDIGHARRIVEEKTGALQQPQRTSLTEENKTGRNNSDVSTSCPWSEEDLHPYLEIAATVIEVPFSRYKSEEVKNGSSPCTVKVVAPSGLHGSPSDDEAGGPSPLLDRWRYGGGCDCGGWDMACPIDVIGNTYDNSWAESIATNVKHPMELFVQGSKEELPVLSMKENGRGQFVVDFHGRLSALQAFSVCISLLHCSEASIAISLKKGKQKLYSSSLKLLLEEDVRHLIEAVTAEEKKKKKRSREKAPPPSVLLDPPFSPIGRV

SEQ ID NO: 57340 - protein, 1721 aa, Zea Mays
MEALNELCDLVAAHPDLLLADKLAWLSSRCAAAPGAAAPQRASRAHLHSLLALARLLPAGGAGAGAEGDAAPPAPLLFFLASHAFLSPAFWPQSFAPAPFLARLLPLLAAAPSSPALSSALSAALLAALDVADPTSAPLARAFLSAAAAAAPLPLLPADAAPIAARLLLEFLGSEEEPIRAKGKGEDTLGEENGGAKEVVRRFEEEEDGKGKEAVPVIRLNVIRLLAELCVCLKKWEVVDMILPLFIEHLEEGDASSPSSLRLRLLDAISRVACLGFEKSYRESIVLMTRSYLDKVKALGASENNTVPSEATTERTETLPAGFLLVASNLTSTKLRSDYRHRLLSLCSDVGLVAESKSGRSGADLMGPLLPAVADICSDFDPVSTVEPSLLKLFRNLWFYVVLFGLAPPIQNNEAPTKPVSTSLGTAESSSAIALQAVAGPYMWNSQWSVAVQRIAQGTPPLVVSSVKWLEDELELNTLHNPGSRGGNGNENSAVGQRAALSAALGGRVEVAAMNTISGVKATYLLAVAFLEILRFSCNGGILSATSTLNRSNSAFSCVFEYLLTPNLTPAVTQCLTAVAHRAFETVLSWLDDRISDIGEGADVRESVLSVHACFLIKSMSQRDEHVRDVSVKLLTQLKEKFPQVLWNSSCLDLLLISVHNELTSGPVSDPAWVATVRSLYQKIAREWLTSALSYAPCTTQGLIQENFCKPSGVQRTQHTADVVSLLSEIRICSGKNDWNGIRTANVPAVMDSAAAASGAKKEAPDFTLEVLSTAVVSATVKCNHAGEIAGMRRLFSTMGGINMGMSPPGTQSLHPHQSFDEVFVSKFVSLLQNFVVAAEKQPIDNSQFRETCSQATALLLDHMVSDSRANLEGFSQLIRLLCWCPAYISTPDAMETGIYIWTWLVSAAPSLGPLVLAELVDAWLWTIDTKRGLFASDMNYCGPDAKLRPHLIAGEPEAPPEKDPVEAIIAHRLWLGFFIDRFEVVRHDSIEQLLLLGRMLQGTMKSPAHFSHHPAATGTFFTAMLLGLKFCSCQSQSNLQKCNMGLQLLEDRVYRAALGWFSYAPEWYESPNKTYAQREAQSVSVFVHFLQNERTSGPVDSVSKLQGREGEPSMADHIHPVWGCVDNYTNAREKRKQLLLTLSQNEADRLEVWAQPIHTKDTTTFRGKISSDKWIDHVRTAFAVDPRIALSMPLRFPTNATMQSEITQLVQTRLLELRTIPEALPFFITPKAVDENSVLLQQLPHWAPCSVTQALEFLTPPYKGHPRVMAYVLRVLETYPPETVTFFMPQLVQSLRYDEGKLVEGYLLGATRRSNIFAHILIWHLQGEYVDESEKDAAALKGSAFQSLLPAVKDKIIESFTPEARDMFEREFDFFDKVTSISGVLFPLPKDERRAGIRRELEKISIPGDDLYLPTATNKLVRGIQLDSGIPLQSAAKVPIMITFNVVDRDGDPNDVKPQACIFKVGDDCRQDVLALQVIALLRDVFQAVGLNLYLFPYGVLPTGPGRGIIEVVPDTRSRNQMGETTDGGLLEIFQQDYGPVGSPSFETAREMFMISSAGYAVASLLLQPKDRHNGNLLFDSHGRLVHIDFGFILEISPGGNMGFESAHFKLSHEMTQLLDPSGTMKSDTWNQFLRLCVKGYLAARRHMNGILSTVNLMVDSGLPCFSRGDPINNLRKRFHPEMNEREAANFMVRTCADAYNKWTTAGYDLIQYLQQGIEK

SEQ ID NO: 57341 - protein, 449 aa, Zea Mays
MLFSTPKVHIIIDFHCPLSSHSPEAVVATELFVDLLVDYLNAYAYDAQIAGLFYSIYVTSAGFQVSLGGYNDKMRVLLNAILVQIVKFEVKPNRFSALKETSVKDYQNFNFRQPYSQASYYVSLILGDKKWPVAEKLEALSKLESDYFAKFVPHLLSKTFLECYVQGNIEPSEAKSIVEEIENTIFTTPNSLFKSMSPSEYLIKRVIMLENDLKCYYQTEGLNQKNENSSVIQYIQVHQDDAILNIKLELFSLIAKQPAFNQLRTVEQLGYITSLSLRSDYGVLALQVVIQSTVKDPSYLDVRVDEFFKMFESKIYELSDKDFKRNVKSLIDSKLEKFKNLWEESHFYWGEIEAGTLKFDRVESEVAMLRELKKEEFIEYFNQYIKVDAPQRRTLSVQVFGGNHLVEFKKAINEANPPKMYRITDIFGFKRSRPLYSSLKGGPGRITMD

SEQ ID NO: 57342 - protein, 512 aa, Zea Mays
MDSAQDFQPRTFSIKLWPPSESTRIMLVDRMTNNLSTESIFSRKYRLLGKQEAHENAKTIEELCFALADEHFREEPDGDGSSAVQLYAKETSKMMLEVLKKGPRTTAELEAPVADTPLVSADTVLDISGGKRAFIEADEAKELLSPLTKPGNSYKRICFSNRSFGRSEDEALDVMRIFSKALDGSVLRYLNISDNALGEKGVRAFSELLKSQESLEELYVMNDGISEEAAKALSELIPATEKLKVLHFHNNMTGDEGAMYIAEMVKRSPNVESFRCSATRIGSDGGVALSEALGTCTRLKKLDLRDNLFGVDAGLALSETLPKLPDLVELYLSDLNLENKGTIAIAKALKQSALQLEVLEIAGNEINAKAAPDLAECLAVMQSLKKLTLAENELKDNGAVIIAKSLEDGHSDLKELDVSTNMLQRVGARCFTRAVANKPDFVQLNINGNFISDEGVDEVKEILKAGKKSLDVLGPLDENEPDGEPDDEDAEDDEDELDLKLQSVKVEQDEDD

SEQ ID NO: 57343 - protein, 388 aa, Zea Mays
MFSHTNPLHQDVFKSVANMEAEVVAMTAALLGSKEKSSGGQICGNMTSGGTESILLAVKTSRDYMRSKKGITRPEMIIAESAHSAYDKAAQYFNIKVRRVPVNKEFLADVKGFKRCINGNTIMMVGSTPGFPHGLIDPIEELGELASRYDICLHVDLCLGGFVLPFAHKLGYPIPPFDFSVKGVTSISSDVHKYGLAPKGTSIVLYRNHEIRKHQFVAVTEWTGGLYVSPTIAGSRPGGLIAGAWAAMMSLGLNGYLDSTSRIMDVSKKIQRGIGEIPGLFVIGKPDMTVVAFGSDVVDIFEVNDIMSSKGWHLNALQRPNSLHICVTLQHTTVYDQFLKDLQDSVNTVKANPGPISGGKAPIYGAAGKMPDRGTVRELLVEFMDSSC

SEQ ID NO: 57344 - protein, 172 aa, Zea Mays
MSKEHSGLLSWPESFRRSRGSLGLAAEMLPGGLSSRALQLSMYGGSVVSLSSGQQGHRRQRPRHRVQAATTMTNQKKHSSSYPRMPSISKERHLLSVQSEGSNMKRVAALPEVAATAPAPAGAAQGQRRAMNLQEEYNSSEDSAGEEVIVRVDSPSMLSFRESTAVPPPQEQ

SEQ ID NO: 57345 - protein, 79 aa, Zea Mays
MTGDTAAAVSAGPKAGRAEQPRRGAAGWRSRGARAEGGGHAVEERKTADERTSGGGGAGVGRAGYGAAAGLCYFGARVV

SEQ ID NO: 57346 - protein, 584 aa, Zea Mays
MDEPEKVRGREDAASGREAGGAEEAGDGFQLVIHGKKKKRAASGQDCGTAGSGSGAGAGPVRALTREKGAAPAPGAKAKVPFHDPSIPRPQDVYKIRVDNYKPFEHVWLERSEDGTRRVHPLENLPVEQFVDRNVPDREPVKPADLEDTPFTLVQDHKGLTELAKKLKSVTEFAVDLEHNQYRSFQGLTCLMQISTRTEDFIVDTLKLRIYIGLYLQEPFKDPTKRKVMHGADRDIMWLQRDFHIYVCNLFDTGQASRVLQMERNSLEHLLLHFCGVTAKKEYQNADWRSRPLPDEMIKYAREDTHYLLYIYDLMRQRLQRESTFENDLLLEVHKRSNEICLQFYEKELLTDTSYLHIYGLQEHELDARQLAVVAALHEWRDRIARQEDESTGYILPNKALIEIAKQMPTDVGHLKRIVKSKYPYVESNLELIAYTVWNALEYSYAFEGIAEQLKKERLEQVALKSGQTSDEVTPLDADIDRSNFDSSDQSANVNVASGSRAGFMSEAALISSIHLEDKTQTMSSVKTSQTLLGQIRPVNKDVLSNNIHQQAIQDLSLTLKALKGNLASGGESNEQTRRISEFS

SEQ ID NO: 57347 - protein, 147 aa, Zea Mays
MEILGHLKSVCLVMNNQGLLHPLRKGTNGAVTLQGLLAATGGGLIIGLTFVVVGLLTAECSSDMAIRQLLVLPISAAAGLLGSLIDSLLGATLEFSGYCSVRKKVVSKRGPTVTKISGMTILDNDAVNAVSILLTTVLTAYVCICIF

SEQ ID NO: 57348 - protein, 189 aa, Zea Mays
MADYLVTDKITAFIMQMQRAATEVLKEKPLKDRMNMDQVLQTVIQILDTFMDLCEANSWINYLVPENPPVYAQLMAVSSSGFDDSSLLNDFRKLDQLMSETRIVLASDDFRNIMERSLRKIAEVVVGDLAVQTTLGSGLPLATLLPKVGHLSSPLLEEPNNNKYIQIIRSMPEVELFYTFLYANMPPET

SEQ ID NO: 57349 - protein, 211 aa, Zea Mays
MSTNSTFYTDSNGRDFLKRVRNYREDWNLQVTQPVAGNYYPARGTYYINVEKLGHGAHWRRTYGQQVYSPFLLAFTHEDATSSKPYSVAKDSMMDGNYSLPDNVAIVTLQNLDDGTTLLRLAHLFQAGEDPRYSEVAEVDLKKVFGKRTIKELTETNLSANQKKSEMKQLNWRVIEDAESGPAPVKGGPVDCRALVVALGPMEIRTFLLKF

SEQ ID NO: 57350 - protein, 254 aa, Zea Mays
MEPMRKSIVNPKLKVGTNGRSLHPLQGSFADRKASAKDKYKFFELLRSKSVNGSSAAIESPSSLTDDQQNSSPELPFKFIENGNSSCEEANSCEGSQRHLSDNEEIIPPSESHDVLDEGSLGIQVDDKGSSSSPVLGTQDISSKKPQEDNVDIVVPVYVNDGSVMPNSVDNEARLLLEEANPAQVLQHIDAREENPCPAQEFESIGAGGEEELNLLRSMGWDENEEVQPLQQEEIADCVRQNVRLQQKLQECRG

SEQ ID NO: 57351 - protein, 1239 aa, Zea Mays
MATAAAMADDDDFASPPLAPRAREEGGGRGVYQVGGVPVEFPYKPYGTQLAFMGRVIATLDRARRQGRSHALLESPTGTGKSLSLLCSALAWQRHYPLRSPPAPDPLLHGGGFVPDDTQPQPTPVVPEKAVKKKNAPIIYYATRTHAQISQVVREYRKTSYRVRMAILASRKHYCVNKFACASDNIDEKWNAQKLSRHPSLQIGGCYEVHDIEDLVRVGQKAKGCPYFAAQHMAEAAQLVFCPYNYLISPVVRRAMDIDISGSIIILDEAHNIEDIARDAGSIDIDEESLCYLKQMLKLIHYGEVLQGELQNLAANEAVAMIYQPLHDIIQALIGWIAEREDNLHNHEFGHPASYWTGEKAMNELQRAGISPMYFPVLQECATKAIKAASDTESDGSHLSGGSAMTLESLFSSLSYFFAQKGRNSCDYQLALQRFVKKEGKDVISSTCTMSLWCLNPAVVFQEIADRTLSVILTSGTLSPMGSFTSELGVQFEACMEAPHVINADSQVFAAVLSSGPTRQILNASYKTADNSSFQDELGASLEEICRIVPGGALVFFPSYKLMDKLQVRWSQTGQWARLNAQKHVFVEPKGSSEELDPVLKGYYDAILGKAPVKKGRGGSKQIAKNRVTKKSSQESVKAGAALLAVCRGKVSEGIDFADDNARVVVIVGIPFPNINDVQVKLKRRYNDSYKSSKHLLSGSEWYCHQAFRALNQAAGRCIRHKSDYGGIILIDERYQDDRNVLYISKWLRNAIKKYDSFQETMAKLQKFFQNAQEKIKIKDCGIFPKVKLDNEAPQSFSDDKRKLPWPELSSSNHSVSRCNQKVKTECLSQRIPDIDGVAVNQKVVGVANTGANYGVKTEIIKLEEDDFKPRYAEITILNPLEDRSRQPTLVEGTSAATPVASPSNYAEVNTSVNINNGDQIADMSISPFSTNRNLSSLSTLAATPERTTDKDCHDSFINRSVNSHYEKKRRLSSPMSCTYTTQSSPPSKSFCHTGSVMPGDLNRNSELCCKNIGLSRCENVKFERNYSPEEVSAKKSMQKKLLINCIRCKTALGLEEDGFLVTCTQYYSSKLYLAYLLKHGLSTFGILEDDFSASTPTEVHVVQCEASSLNKNVFGKFSSQGHVWFAKDGCVYNAMTCSLCSSENTSAMVLGVQVLATDRSNQQLVEKVLLFSDRLDVQSEPSKGQISRTRRDASNICQQSVIDLDSFAYKPLKKDPVALNSRRSKLRLPAPNKSTTGT

SEQ ID NO: 57352 - protein, 318 aa, Zea Mays
MSDALINGLAGAGGGIIAQLLTYPLQTVVKNEGWERLYGGLMPSLVGTAASQGVYYYFYQIFRNRAEARALERSRRGLGDGSVGMLQSLTVAALSGCVNVLLTNPIWVVVTRMQTHRKANKQQRPQGLNCALDKPLEAATAENAPYKTIDVFQELYKESGVLGFWKGVIPALIMVSNPAIQFMLYETLLKKLKKRRASNFKGADGLTALEIFLLGAVAKLGATVVTYPLLVVKARLQAKHMINDDKRHRYKGTLDAFTKMVRYEGLSGMYKGMGTKIVQSVFASALLFMIKEELVKGARLLVTGNTSLVKKLPSKSSR

SEQ ID NO: 57353 - protein, 306 aa, Zea Mays
MRGAVEVHTIRRDVATPSPLRLRDPPALDMMRYQRLSPDCLPLGNGGGGGGGAVPRKQASRSSYIREDDAPAVATDGSRLASYLAASSHEPKPLRARAPQPAPLSSVAGRSPARDHAHHHHTSDSSDTASPPPPAATRGSNLRSASSFPSRASASTAATGSHHPPHHHRTVEDRSGGQKRSSPDKTHRSTMDGVYHHHHHQESPLTGNGVATAGEKLGVERFELPLIYISLSRKEKEDDFLAMKGTKLPQRPKKRAKNVDKTLQFVFPGMWLSDLTRGRYEVREKKCVKKKRRGLKGMESMDSDSE

SEQ ID NO: 57354 - protein, 107 aa, Zea Mays
MMKYMLIPLYVYSWLSIINILGKSQTRIWVLSFVLSVALVLVPAPLVEFRYYTIPFVILVLHSPSIGNGKLLAMGSLYAAVDLSTLVMFLFRPFRWEHEPGTQRFMW

SEQ ID NO: 57355 - protein, 532 aa, Zea Mays
MVKTAETGYMSRRLMKGLEDLSVFYDQTVRNASGGIVQFLYGDDGMDPAKMEGKDGMPLNLDQLFMKVMATCPQRGSDTLSPVGIKQMLEDKFLQHDTSSDGGCSAEFKKNLTEFLDKRIELMKCTRRALHLHEDHVEKKDSCLEESIAAIISGISAKQLQVFLDTCLSRYQSKKIEAGASIGAIGAQSIGEPGTQMTLKTFHFAGVASMNVTLGVPRIKEIINAAKKISTPIITAQLLSRKDVLSARIVKGSMEKAVLGEVAATIQTVLKSSLPNLVVKLDMQLIETLHMGISADSVKLSILNHPKLKLKSEHVRVIDRAKLRIYPAGTDKLKLQLELHNLKSILPKVIVKGIPTVERVVIDEVKVNNATERYQLLVEGTNLLAVMGTPGVDARKTKSNHIMETNQTLGIEAARRSIIDEIQYTMKSHGMNIDRRHMMLLADLMTYKGEILGITRYGIAKMKSSVLMLASFEKTAEHLFNASYSGRQDQIEGVSECIIMGIPMQLGTGILKVRQRLDHVPEFKYQPDPILS

SEQ ID NO: 57356 - protein, 227 aa, Zea Mays
MYAFVMRPESLPKSYQEFILKTGPVAEPVYKVVKECCRGGPVDLTALSAHLSNKRNPDLINLTTNPSIIPCSVIHPDRASCLAQNVNVVSSTFKKTFPLYFSLTFVPFVVLRLQKFLESPTTTCWRALVGAVRSTTFLSAFVTVFQAAICLHRKVANKDHKLVYWFAGLMSGLSILLEKKARRAELALYVLPRAGDSLWYILINRHLLPNIKNAEHDLDPDEYEQKL

SEQ ID NO: 57357 - protein, 389 aa, Zea Mays
MVQKKKKAAAAPKLRKLPKRDADKKLGKKGDMAEFRAQLDSLGLKIVQVTADGNCFFRAMGDQLEGDEEEHMKYRDMVVDYIVKHREEFEPFIEDEVPFEEYCNSMLKDGTWAGHMELQAASLLTRRNICIHMLNSPRWYINNFSGREATNMVHLSYHHGEHYNSVRLREDPCQGPAMPVVIKTDSNISNTNNNAQTKAKEVKKSSHRSTYDDTSVKLVMAGTGCSDIAIAEHVLGEMDGDVDAAIEYLIAERLAVSTDDAEVDLYINHAFNGDEPTKRQEDNNMIEHKDEANCSNEDETVEKPKHSNAVHSKKEKSKTNGCCSCGSARKHKASCSLATASSSREPPRAKGGQGKGQRGKKQKKKEQAEAAAAKAKESAIVPDLGALCI

SEQ ID NO: 57358 - protein, 432 aa, Zea Mays
MRELQDEHHMKSLGLQVSSPGYDRQVVADHANNLASKIRSNLTNSMKALGVDILTGIGTIVGKQKVRYGKVGFPDNEITARNIIIATGSVPFVPKGIEIDGKTVFTSDHALKLESVPEWIAIVGSGYIGLEFSDVYTALGSEVTFVEALDQLMPGFDPEIAKLAQRILISPRKIDYHTGVFASKITPAKDGKPVLIELIDAKTKEHKETLEVDAALIATGRAPFTKGLGLENINVVTQQGFVPVDERMQVMDATGNVVPNLYCIGDANGKLMLAHAASAQGISVVEQISGRDNILNHLSIPAACFTHPEISMVGLTEPQAREKADKEGFEISVVKTSFKANTKALAENEGDGLAKMIYRPDTGEILGVHILGLHAADLIHEASNAIALGTHVQDIKFAVHAHPTLSEVLDELFKAAKVNTAGSHSMNEPVAV

SEQ ID NO: 57359 - protein, 62 aa, Zea Mays
MQGFSCDIMFTDKELDIIEMAVYGDVIRPGKQCRCRTVAEVLGQVKPTNRMAACELPDKGAS

SEQ ID NO: 57360 - protein, 348 aa, Zea Mays
MFGYDMMLPMNTGAEGVETAIKLARKWGYEKKHIPKNEALLVSCCGCFHGRTLGVISMSCDNDATRGFGPLVPGHLKVDFGDIDGLKKIFEELGDRICGFLFEPIQGEAGVVIPPDGYLKGARDLCSKHNVLMIADEIQTGIARTGKMLACDWENIRPDMVILGKALGAGVVPVSAVLADKDVMLCIRPGEHGSTFGGNPLASAVAVASLKVVRDEGLVERAAKLGQEFRDQLQKVQQKFPQILREVRGRGLLNAVDLNNDALSPASAYDICIKLKERGILAKPTHDTIIRLAPPLTISPEELAEASKALSDVLEHDLPQLQLQKQIKKPESEAEKPVCDRCGRDLYG

SEQ ID NO: 57361 - protein, 473 aa, Zea Mays
MNLLNINQHQARALLIHHRWSMDGIYDSLDMGRERMLRNSGIVLQEVNSIAAAGSMTPWRTVTCKVCFEDFSMDAVSTMDCGHCFCNDCWTEYFHAAVESGKKQIRCMEVKCSAFCDEDLVRFLLVQKYPDMAKNFNRFLLGSYLEDNASVKWCPSTPNCGHAIRVGTDERCCEVECPCGLSFCFNCMGHAHSPCPCTIWEKWNASRSEGENIKWILANTKSCPKCFKAIEKNGGCNLVRCKCGQCMCWLCGGGTGQDHTWNSITGHSCNRYEEEICVETVHTGRQQMQRYKHYHDRFKIHGDSSYGVEKQKLGAAIEERVRLLESDRERPLAIRDGDWLTRAHRRLLVSRQVLSRSYVFAYYMFGGHELRTRPAERANLGVARNLFEHQQEQLERHVEHLSRSLAESADLAGAPDAEIVKQKQTAITLTKTVERLCGEMYKCIQDELLTLLVEPMSIAAYRPDGPDRAKPAI

SEQ ID NO: 57362 - protein, 604 aa, Zea Mays
MEVNSSGEETVVKVRKPYTITKQRERWTEAEHKRFLEALKLYGRAWQRIEEHVGTKTAVQIRSHAQKFFTKLEKEAMNNGTSPGQAHDIDIPPPRPKRKPNSPYPRKSCLSSETQTKELPNDKSTKPNMPLSNGHVKMVGDASLQNFQRKELSEKGSRSEVLNLFRDAPSASFSSVNKSSSNHGAPRRTEASKTESRDMSIMENNSFNPNTQEDVKVISDQEMERLNGIQIRSKCEHSHEGYLDISTQQMKLMPKSVETTYVDEQTARASHTLAESDGTASIPVTVPEGTHPDQTSDQVGINGSMNPCIHPMVSADPKFGSSATPQTFPHNYAAFAPMMQCNCNQDTYRSFTNMSSTFSSMLVSTLLSNPAIHAAARLAASYWPAAEGNTPIDPNQENPADGVQGRNIGSPPSMVSIVAATVAAASAWWATQGLLPFFAPPVAFPFVPAPSAAFPTVDVPRPSEKDRDCPAENAQIECQEARKQVQFEGLRIAASSESDGSGKGEVSLHTELKLSPAQNADATPTTGAGTNDAFRNKKKQDRSSCGSNTPSSSDVDAGNVPEEDNANEKAKQASCSNSSAGDTNHRRFRSNGSTSDSWKEVSEE

SEQ ID NO: 57363 - protein, 199 aa, Zea Mays
MELDPRLYENVSVSDNDVRNIVLSYLMHNCFKETAEAFLSSTGLNLPVDYSVDVDKRKEGNALKAIELTEEMAPNLLENDMDLHFDLLSLHFIELVRSKKFTEALDFGQKKLTSFQKVTKYIEKLEDFMALLAYEEPEKSPMFHLLSPEHRQNVAEGLNRAVLAHANLPAYSSLERVVQQATVVRQYLQQEVGKAFLSK

SEQ ID NO: 57364 - protein, 1114 aa, Zea Mays
MVTPPTVEQEDEEMLVPRQEAVDTDAAQPMEVVAQTEVVSTAESQPVEDPQTSRFTWTIENFTRFSEKKHYLEVFVVGGFKWSVLIFPKGNNVDHFSMYLDVADSTSLPYGWSRYAQFSLAVVNQIQPEFTIRKETQHQFNARESDWGFTSFMPLSELYDASRGYLVNDTVVVEAEVAVRRIVDYWTYDSKKETGYVGLKNQGATCYMNSLLQTLYHIPYFRKAVYHMPTTENDIPSGSIPLALQSLFYKLQYSDSSVATKELTKSFGWDTYDSFMQHDVQELNRVLSEKLEDKMKGTVVEGTIEQLFEGHHINYIECINVEHKSNRKESFYDLQLDVKGCRDIYSSFDKYVEVERLEGDNKYHAENHGLQDAKKGVLFLDFPPVLQLQLKRFEYDYMRDSMVKINDRYEFPLQLDLDRDGGKYIAPNADRSTRNLYTLHSVLVHSGGVHGGHYYAFIRPTLSEQWYKFDDERVTKEDAKKALEEQYGGDEELPQINPGFNNAPFKFTKYSNAYMLVYIRESAKEKIMCTVDEKDIAEHLRVRLKKEQEEKEHKKKEKAEAHLYTIIKVARDEDLKEQIGKGIYFDLVDHEKVHNFRIQKQMPFSCFKEEVAKEYGIPVQFQRFWLWAKRQNHTYRPNRPLTVHEETQSVGQLREISNKAHNVELKLFLEVELGLDLRPLPPPEKGKEDILLFFKFYNPEKEELCFMGRLFVKALGKPSEILAKLNEMAGFPPDQEIELFEEIKFEPNVMCETIDKKLTFHYSQLEDGDIICFQKSPGAEYDAPVRYPDVPSFLEYVHNRQVVHFRSLEKPKDDDFSLELSKLHTYDDVVERVARQLELDDPAKIRLTPHNCYSQQPKPQPVKYRGVVHLSDMLIHYNQTSDILYYEVLDIPLPELQFLKTLKVAFHHPTKDEVVIHSIRLPKNSTIADVIYDLKTKVELSSPNAELRVLEVFYHKIYKIFPLHEKIENINDQYWTLRAEEIPEEEKNIGPNDRLIHVYHFKKDINQTQIQNFGDPFVLVVHEGETLAEVKKRIQSKLQVSADEFSKWKFAFISMNRPDYLQDSDVVPTGFQRREVYGAWEQYLGIEHADTAPKRVYTVNQNRHAYEKPVKIYN

SEQ ID NO: 57365 - protein, 686 aa, Zea Mays
MEHVLSSRRFPTDPNEYKLYEEIGDGVSATVYRALCVPLDILVAIKVLDLEKCNNDLDGIRREVQTMSLIDHPNLLRAYCSFTNGHQLWVVMPYMAAGSALHIMKTSFPEGFDEPVIATLLREVLKALVYLHSQGHIHRDVKAGNILIDTNGAVKLGDFGVSACMFDTGNRQRARNTFVGTPCWMAPEVMQQLHGYDYKADIWSFGITALELAHGHAPFSKYPPMKVLLMTLQNAPPGLDYERDKRFSKSFKDLVATCLVKDPRKRPSSEKLLKHSFFKHARSAEYLARSILDGLPPLGERFRELKSKEAELLLNNKLGQESKEQLSQKEYIRGISGWNFNLEDLKNAAALIDSSNGTCYLDVRENRVKDDSQEAYNGPEHIYQERLNHVASRRPEEDEIQEVEALNDAVSSSFSSRSLEALKSCFDVCGVDDPSPTATDSRAQPSVGTLPFQQLQKFEHCKSGDCNGESLERSVSVPTNLVTSGYHKHSSGSLIPEQVLSPYLSSDLERDGFRQKNLSSRNCSGPLLFRQMKDSRTHQSVAPDESSEGKIIRRRGRFQVTSDSISEKVATSSCNSSRINLPIDAARSSPKLSAILPTLQFLMKQNTMQKEVLSRLISSIEETSDDSEATGSSSYQSSGGPAREKELHFVTELAEEVQRLKLQNNKLEHQINILSRKDERSSTQDN

SEQ ID NO: 57366 - protein, 198 aa, Zea Mays
MSNSESLRFLAVCFCNRAAAYQAMGQILDAIADCSLAIALDADYAKAISRRSSLYELIRDYGQAANDLRRLIALLEKQLQEDMTMPVERSESIRNNLNRANLRFSSLERDARKGASLNMYLILGIESSSSAVDIKKAYRKAALRHHPDKASNFLVRSENISDAVWRDITNEIRRDADYLFKIIGKAYAMLSDPTTRRE

SEQ ID NO: 57367 - protein, 390 aa, Zea Mays
MNCLKNSRSVLSRLLRHRPHVAAPPPPTPATAPQSPASRYYYYASRVKPAVSRPPPPPQLPRSRHYYTSPRRQQVVHFNRRRGGSRWYHDQRKLTAAVLISGGGAVAFYFGHLETVPYTNRSHLVVLSPKFERQLGESQFAQLKKEFGPKILPPLHPDSIRVRLIASEIVRAVHRGISVQQRHDAFYGEDASYGYGGIADDLSIKNRDADAAAALLGASPGKNASAAVAAQRDDELLDDRWVTESRSRGKARGAQPQTGHLDGVNWEVIVVKDDLVNAFCLPGGKIVVFTGLLNNFRADAEVATVVGHEVGHAIARHSAEQITKNLWVAILQIVILQFIYMPDLINTVSTLLLRLPFSRRSMNIQTKISKLSGPFYCYWHQLCRCINISC

SEQ ID NO: 57368 - protein, 756 aa, Zea Mays
MASRAIIRRRNDILRHTHVPILSPSFTSTIGQGQFDCEVDHQRSVCYFSKESLADSNHAMAHCTLNKRKLCHLSSGFAWHPACEVSLPTYGSRAQNFVFPLGVRCFLQSVRTTSNTTAQGQVHIMDKKSEDEKQKQQKKEASPEECDQAVEGLSTAKAKAKAKLEEVQKTDQSVVQKLWAKLLGIGPALRIIASMSRADWAAKLKHWKDEFISTLQHYWLGTKLLWADVRISSRLLVKLASGKSLTRRERQQLTRTTADLFRLVPFAVFIIVPFMELLLPVFLKLFPNMLPSTFQDKMKEEEALKRKLKARMEYAKFLQDTAKEMAKEVQTSRSGEMKQTAEDLDEFLNKVRKGGHASNDEILSFAKLFNDELTLDNMSRPRLVNMCKYMGIQPFGTDHYLRFMLRKKLQDIKNDDKMIQAEGVESLSEYELRQACRERGHLGLLSTEEMRQQLRDWLDLSLNHSVPSSLLILSRAFTVSGKMKPEEAVVATLSSLPDEVVDTVGTVLPSEDSVSERKRKLEFLEMQEELIKEEEKRQEKDDKAKLEEPKATEEDLALKEMTEPTVREKEELKKAKTHDKKEQLCNISQALAVLASVSSVTKERQEFLSLVNKEIELYNNMLAKEGTDGEEEARRAYKAAREESDHAAEAAVGEKVSSALIDRVDAMLQKLEKEIDDVDARIGNRWQLLDRDCDGKVTPEEVAAAANYLKDTIGAEGVQELISNLSKDNEGNILVEDIVKLASQTEENNEAEETAR

SEQ ID NO: 57369 - protein, 986 aa, Zea Mays
MGKSSKKAAAVAAAPAAVPKGKKREAEDEIEMAVSAKKQKAAPPAKAVPTSKKDAKEDAKSKKQPPPKKAENSSSDSEEDPESEEENFYNLIESGRADGDEEFDEDEEDGFEFGDADEAMQCVVMAESSTTAAALRAHTQDYEALAAHKRKALAEEQPQREEGPKRPRPDQLSEAEAATMFDQLMEGFGLRRKRRSKDGKRRGRKKGTKNKGSAEVIKKLGDATLLFAEEKFNEAIPILHEIVRIAPNLSDSYYLLGSIYSEIGELDKAINFLMLAAYVSPKDASLWKKLIPLAKKKGDASLARHCILKAMNADPEDVDLKYLCGYMYHNLCEYQKAAEIYEQIVRIYPANSAVRKVAAQMYRECGQIDNAINLLKDYADTQTFNIDWSVLDLLISLYLRNNVFSEALKQIKRAQLHLGSQQKLPVQLQAKEVICHAYCGDMKHAEIFLRDVRLEPSKENIDVLKELASNLEKMGRYEYAVKFYLLIENVATQNDGGLCFDHKEMGSWYVKAAQCYMILGDKKNAIPYFYKALQSMKDNIGIRLTLSSLLIDDDKTDEAATLLSPPKIPELQSANTPDQQKPWWCDGKVKMALAKLYYNKGNLEDFVDTIFHPILETLNVEYANRKVKSMRKLPNIVLHERVKVLGEQRPDSVFQGLRPIASPDELQKANRAKKLIEKRTAANEELKHDYLPRTKQVPPVPGLLTNVEHHQLVLNLCRTLALLQRYWDALQIINRTLKLGNDALTGDKKEELRSLGAQIAYRAPDPSHGFKYVRYVVQQHPYSLAAWNSYYKVVSRIEDRFPHHFKYLLRTREANPDCVPPIIISGHRFTAISQHQSAARDYLEAYKLDPENPLINLCVGTALISLALGFRLQNKNQCIVQAFAFLYRYLRLCDNSQEASYNIARAYHHIGLNTLAAVYYDKALSTEEKDHPIPKLPYEAGSRAPEDLRPGYCDVRREAAFNLHLIYMKSGATDLARRILKTYCTV

SEQ ID NO: 57370 - protein, 167 aa, Zea Mays
MALLSATSPAKAHLSALLSCHDEPQQHQHALPVPHPRCFGGGKARRRARGRCAASMRPPDASVAPASAPAGEARRKKKPRVLVAGGGIGGLVFALAARRKGYDVTVFERDMSAVRGEGQYRGPIQIQSNALAALEAIDMSVAEEVMRVGCVTGDRINGLVDGMSGSC

SEQ ID NO: 57371 - protein, 2213 aa, Zea Mays
MLSRLMPWMRLHSLRTKGMKLSKRNSNQEISQKKEMKPILWTCTVAAPEMTVLLYSLNGLVLYHACSQSSHLFANNIASKGIQIHTELGELLVHMEEEYRELLKENIFGVDTYSGSLMHIARMSLDWGYRESDVQDMVETSRNALVFSIDISDMEVKFGFKHLESIVLNLMSFRTLFKSLQLSGGSAKEKNLERKGEKKMKGVKKLKLSLQKFSITYCGDANIISMPIADPKRVNYGSQGGQVIVSVSADGTPRRASITSVLPDCHLRFSASLVISHLSMCIDKERKTTEAELERVKAIYEELPEDRSGVRVTLLDMQNAKIVRRSSGHAEVAVCSLFSATDIYLRWEPDAHLALYETFIRFKHFLHHNVSQNSEKMINTEVASTKSNEHGNITAGFINSQKSNRKGSIFAIDVDMLRVSAELADGVEANMHVQSIFTENAKIGVLSEGLSLTFNGARVLKSTRIQISCIPFSTGSLLDAKIEPSSKRDWVVQGLDVHICMPYRLPLRAIEDAVEDMFRALKLVSSAKRSIICPDEKEKSRKVNSGGSKFGSVKFVLRKLTADIEEEPIQGWLDEHYHLMRNKICELGVRLNYLEEAISGSVDPSNHSSERKVLYNGVEVDIHDTTALQKLQEEIHKQAFRSYYVSCQNMVLAEGSGACSEGFQAGFRQSSRRASLLSLSASDLDVTLTRIDGGEIEMVEFIKGLDPVCQEQNIPFSRLYGSDVSVVAGSLVVQLRDYTSPLFSSLSGKCQGRIVLAQQATCFQPQIHQELYIGRWQKVTMLRSASGTTPAMKMYSNLPIYFQKGEISFGVGYEPSFADISYAFQVALRKVNLSTRASCSGLAVQLPKKERSLPWWDDMRYYLHGKIILYFNETKWKFLATTNPYEHVDKLQIVSEYMEIQQTDGRVDVSAKEFKIYISSVESITKNRRIKVPSRVPRPFIYAPLFSLNVVIDWQCESRNPLNHYLHALPVEGEPRKKVYDPFRSTYLSLRWNFSLRPLQSQYGNGPPPPFYGNNSMLRGIMSGSPCKMTDDDFPTMNLGAHDLAWVFKWWSLNYSPPHKLRSFSRWRRFGIPRATRSGNLSLDKVLVEFFFRVDATPCCIRHAPLSEDDDPAFGLTFKMSNLKYELCYSRGKQQYTFDCKRESLDLVYRGLDLHRPEVYLMRDNNLSSVENVSKVRTMVQQSHGKFVHDRCNMGNFQEKHEDGFLLSSDYITIRRQTRKADPERLMGWQDTGRSHEITYVRSEFEDDSESDHTLSEPSDDDDDFNVVLADNCQRVFVYGLRILWTIENRDAVWSWVGGISKAFEPPKPSPSRQYAQRKMIEERNAEGSKVPQDSSSSIHVGSPSVQHLDASGSSSSLHSKANRSSDVAVNHDIFDDSDKGGTAQYMVNVITPQFNLHSEEANGRFLLAAASGRVLARSFHSVVHLGKEILEQALGTSSAQILELQPEMTWNKSELSVMLKDVQAHVAPTDVDPGAGLQWLPKVLGSSEKLKRTGALLERVFMPCQMYFRYTRHKGGTADLRVKPLKELRFNSPDITATMTSRQFQVMFDVLRNLLFARLPKPRKNSLQYPSDDEDIEEEADEVVPDGVEEVELAKITLEQREREIKLLLDDIRSLTGNGDNGTDHCHSAEKGDCLWMINSGKASLVEGLKRDFANLQKSRIFASSALRKALSNASQSHLEKEKNKTTSCAMRISMKISKVVWSMLADGNTFAEAEINDMVYDFDRDYKDIGIALFTTKYFVVRNCMVNAKCDTLLSAWNTPPGKINMLRVDAKQGAPKDGSSPLELFQVEIYPLRIYLSEAMYRMMWDYFFPEEDDSQRRQEVWRVSTSTGPRRTRRLSSGVDAVTSSSYSVRDHELPGKSSTTVSTSTNVSSWQGILSDNSQVSKFQSIKANMVCGSHQELHRSSSFERNWEESAAESVASNDVVSLLNSSIVSSKVDASNSVLENPVVGSEMWRSKTKDSKPAKSGRLSHEEKKLGKSNDEKKTKPRKSMEFHNIKIGKVELLVTYEGSRLAINDLRLLMDTFHKAEFTGTWRRLFSRVKKHIIWGVLKSVTGMQGKKFSNHRETLEGSIPENDLNLSDSDVGQPGRHDQLTASWLKRPGDGAGDGFVTSIRGLFNTQRRKAKAFVIRTMRGEGHNDEYQDEWSESDGEYPFARQLTITKAKKLIRRKFRPRVQKNPGLSMQDSLPSSPRETTPYQSDSSRSSYEDFHEQ

SEQ ID NO: 57372 - protein, 490 aa, Zea Mays
MGSYAYKYCMCFTRKFRSPDAQPPPDVRAAHLSFASDAHALRRFVAGVQGESPADVDRILAMLSGGHSHGIARLVTRSPAASTPTLEDFLAFLFSPDLNPPIAHQVHQDMSAPFSHYFVFTGHNSYLTGNQLNSDSSDVPIVKALQGGVRVIELDMWPNPSKDNVDILHGGTLTAPVEMIKCLKSIKEYAFCASNYPLVITLEDHLTPDLQAKVATMLTETFGDLLFVPNPDPMKEFPSPASLMKRIIISTKPPQEYKEFLKAENNRSGSGNIAELPDQGSLRRIDSNADESDGKDELDEQDEEDSDSDDPKFQQDTACEYRKLITIQAGKPKGHLRDALKVDPDKVRRLSLSETQLAKATISHGAEVIRFTQKNILRVYPKGTRVNSSNYDPMNAWTHGAQMVAFNMQGHDKALRLMQGFFRANGGCGYVKKPDFLLRTGPNGEVFDPKASLPVKKTLKVKVYMGDGWRMDFSKTHFDAFSPPDFYTRV

SEQ ID NO: 57373 - protein, 104 aa, Zea Mays
MKGRQGGRARLLETCQRARRCRLVRRVPWSVGRFPRLRAGGKTTCCRSPVAEAAASFLSCPVLVLPPATGTGASSNCFFSSSVGVRSAPSVRLSLACSSCASTL

SEQ ID NO: 57374 - protein, 543 aa, Zea Mays
MEGRNPVQRFVDSPKPYNRRKARGMQTRMDSSDHGDRQGPRACEELPGKMDNDRADRQRLKACEFPAKMDNNHADRQVSKACESKGNACELPGKMDNDHPVRQGLKARGLLQPKSDASEDGVCEGLKACGLTANKMDATDQCDHKGSKVCRVVTTKTDTSDQGDCQTFKVCGIAAKMDVNDHADHQGSKASGMPTKTDANDQCSNQGPFKTAERLDHLLNQPANRYCADCGAPDPKWVSMTFGVFICIKCSGAHRSLGVHISKVVSVKLDEWADEQVDILADSGGNAAVNMIYEAFVPENYAKPRQDCSAEERNDFIRRKYEAQQFLTNPQLSCPPRRNEKHNHQQHSTSSSRHGLGHSFRNSWRRKEHEAKSTKKTIEVGMVEFVGLIKIDIIRGTNLAIRDVMSSDPYVIINLGHQTMKTKVVKSSLNPVWNERLMLSIPDPVPLLKLQVYDKDTFTTDDRMGEAEINIQPLVAAAKAHETSAIADTAQLNKWLAKDGIWIPRDSAISIVNGKVKQVVNARLQNVERGQLEMELECVPLTQ

SEQ ID NO: 57375 - protein, 121 aa, Zea Mays
MASRSYCKKAERRVPVDPLEWQISQEMANSIVASLANTVGAAESVLRVAATGHDKKLFFKVVSTLYFLAALGRVVSGAAVAYAALCIFCLYMFAQSTDLFDQLPSWVPVGRDSLGGTQDTA

SEQ ID NO: 57376 - protein, 643 aa, Zea Mays
MMGPLLGLDPWRSGPGCQRPSIYRIGWQLLQGASWINYPCLSASTDSVRAFSTSPCVRKSTHCGHILFIQRAGFASPTPIQAQSWPIAMQNQDVVAIAKTGSGKTLGYLLPGFMHIKRLQNSTRNGPTVLVLAPTRELATQILDEAVKFGRSSRISCTCLYGGAPKGPQLRDLDRGVDVVVATPGRLNDILEMRKVTIGSVDSLVANSSITQHVEIITPSEKQRRLEQILRSQDSGSKILIFCTTKRMCDQLARTLTRQFGASAIHGDKSQSEREKVLNQFRSGRSPILVATDVAARGLDIKDIRVVINYDFPTGVEDYVHRIGRTGRAGATGVAYTFFCDQDSKYAADLIKILEGANQRVPRDLEDMASRGGGRGRKRNHWASRPDRGGSRSELDSRYSSRDGLASSGKSESGRGSRGRDDNGSRGRYDPGETDGRSRRSTRGRSRSRSKSDSRSRSPSPKKSRRHEGRRSRTKSRSRSRSRRNHGASHSKSRSPVASRRYEKTASGSARPNSGHAEHKSPPRSHSRDDHVNHSDHKDDHKDDHMEDGKMERVDLDRSPSPHDDKSAPYSPVYNGKASGSMSPNGQPEAGAKFVEPSGKPEPASPVRCSKGRDDDEEGIIDEDGEIGEDDPRANAAVQNGNN

SEQ ID NO: 57377 - protein, 342 aa, Zea Mays
MERWEIGGRGLKRDERRAGAVVDGAAHRGGRLDTPALREIKIDKISPWKPFLKMRQNSRLNLDFSFSGGLNSRKQRFDESFGLRVFKIGYEVYADGLTRVLRICEHADNPKIEKIQWPIANIQFRISYVCIHLLDKDQNGENVQLPSTILAARLQHVSSDSVVTNRFKQVSVAIHSLNVDEKWEGASIGTILRRNKLQDATLDENILRMIFVLNSTDSSVKQIQYCAIILQPVDLKIDEETLMKLVPFWRASLAPSGTTSTQFYFRRFEVHPIKIIASFRPGGRRTTYSSAQEALRALLHSVIKVPEISNSAVELNGVLLNHALVTFRELLLKCAQHYSWHV

SEQ ID NO: 57378 - protein, 1266 aa, Zea Mays
MTLLLGPPSSGKSTLMRALAGKLDKNLKVSGSITYCGHPISEFYPERTSAYVGQYDLHNAEMTVRETLDFSRRCLGIGARYEMIAELARRERDAGIKPDPEIDAFMKATAVQGQETNIITDLTLKVLGLDICADVIIGDEMIRGISGGQKKRVTTGEMLTGPARALFMDEISTGLDSSSTFEIVKFMRQLVHVMSETVMISLLQPPPETYNLFDDIILLSEGYIVYHGPRENILEFFESAGFRCPDRKGVADFLQEVTSKKDQQQYWYLDQEQYHYVSVPDFAERFKSFHACQQMQKELQIPFEKSKTHPAALTTRKYGLSSWESLKAVMSREQLLMKRNSFIYIFKVTQLIILALMSMTVFLRIKMPHGQIADGTKFFGALTFGLITIMFNGFAELQLTIKKLPVFYKHRDFLFFPAWTLGVANIILKVPVSFVESAVWVVLTYYVMGFAPAAGRFFRQFIAFFATHQMAMALFRFLGAVLKTMVVANTFGMFVLLIIFIFGGFVIRRNDIRPWWIWGYWASPMMYSQNAISVNEFLASRWAIPNNDTTIDAPTVGKAILKSKGLFTGEWGFWLSIGALIGFIILFNMLYLWALTYLSPSSGSNALVSEGEDDVNEMALEGRRKDARRSKDEISQVVSSDPGTNGGTNTLAQSRVTLPFQPLALCFNHVNYYVDMPAEMKEQGFTESRLQLLSDISGTFRPGVLTALVGVSGAGKTTLMDVLAGRKTSGAIEGDITLSGYPKKQETFARISGYCEQTDIHSPNVTVFESITYSAWLRLSSDIDDGTKKMFVEEVMALVELDVLRDALVGLPGVSGLSTEQRKRLTIAVELVANPSIIFMDEPTSGLDARAAAIVMRTVRNTVNTGRTVVCTIHQPSIDIFESFDELLLLKRGGQVIYAGELGRHSHKLVEYFEAIPGVPKITEGYNPATWVLEVSSPLSEARLNMNFAEIYASSVLYRKNQEVIKELSIPRSDNQDLSFPTKYSQNFYGQCAANFWKQYRSYWKNPPYNAMRYLMTCLFGLVFGTVFWQKGKNIDSQQDLYNLLGATYAATFFLGASNCITVQPVVSIERAVFYREKAAGMYSPLSYAFAQTCVEVIYTILQGILYTVIIYAMIGYDWKADKFFYFLFFITASFNYFTLFGMMLVACTPSALLANILITFALPLWNLFAGFLIVRPAIPIWWRWYYWANPVSWTIYGVVASQFGENEGELSVPGGTPVVVKQFLKDNLGIQHDLLGYVVLVHFAYVIVFFFVFGYSIKFFNFQKR

SEQ ID NO: 57379 - protein, 121 aa, Zea Mays
MAAAFGSGALFSIVSGMGTPNPVANAITTGVGFAVFQGGFFMISQKFSQPQSGDTYYSRGRSMLQKLGLQNYEKNFKKGLLTDQTLPLLTDSALRDVKIPPGPRLLILDHIKRDPELTKAN

SEQ ID NO: 57380 - protein, 82 aa, Zea Mays
MPHPHHTGTVASVTLSATSPASASKGTKKQAAPRRCSVGPANSMATTAAAADARKSESRGDRRGPAGKDRLVGPCLSWLVRR

SEQ ID NO: 57381 - protein, 112 aa, Zea Mays
MATAVAATAAAAGGSNVEFIRARSDKREYRRVVLANALEILLISDPDTDKAAACMEVEVGSFSDPEGLEGLAHFLEHMLFYASEKYPGEHEYTKYITEGRPRHWSLYSGRYS

SEQ ID NO: 57382 - protein, 555 aa, Zea Mays
MEEAAAAAAAWASNAATPVPSEPMRSPPDAEASVDPTAVGDDEHDSKEVVLRRYFLQEWELVSAILHRVVAGGGVAESADVHRIRSIMDKYQEEGQLLEPYLENIVSPLMSLVRSKTMELGASTDELLDIIKPLCIIIYTLVTVCGYKSVIRFFPHQVSDLELAVALLEKCHTMSSATALRQESTGEMETKCVVLLWLYILVLIPFDISTVDTSIATADNVDGPEVVPLVTRILDICKDYLSSSGPMRRMSGLLLARLLTRPDMAKAFSSFMDWAHKMLLSVSDDFVDQFRSIGIVEALASIFKIGNRRALHDAVSGTWSDCSLVMKTNVSARSPLLRKFLVKLAQRVGLISLPPRLPSWQYKSISSSLGANLSSYTAGEVYSSGSREQVNIDQIGMCFLEEDMDVPEIAEEIIDLLLTGLRDSDTIVRWSAAKGIGRITACLTPALSEDVLSSILQLFSPGEGDGSWHGGCLALAELARRGLLLPSSFPDVVPVIIKALHYDVRRGPHSIGSHVRDAAAYVCWAFGRAYTNYDMKAVLEQLAPHLLTVACYDRE

SEQ ID NO: 57383 - protein, 436 aa, Zea Mays
MWHLKLIALIYGSLFFMHIPYARGSDLNTDKQALLAFAASLPHGRKVNWTSTTQVCTSWVGITCTPDMKRVREVRLPAIGLFGPIPSGTLSKLDALEVLSLRSNRLTINLPPDVPSIPSLRSLYLQHNNLSGIIPSSLSSSLTFLDLSYNSFNGEIPSKVQDITELTALLLQNNSLSGPIPDLRLPKLRHLDLSNNNLSGPIPPSLQKFPATSFLGNAFLCGFPLEPCPGTPPASPSSPSSQNAKRSFWKKLSLGIIIAIVAGGGVVFILILILLVCIFKRKKNAESGIGSSSSKGKAIAGKRGEKSKGEYSSSGIQEAERNKLFFFEGSSYNFDLEDLLRASAEVLGKGSYGTTYKAVLEDGTTVVVKRLKEVVAGKREFEQQMELIGKVCHHQNTAPLRAYYYSKDEKLLVYDYVPLGSLCAALHAICYFNLKV

SEQ ID NO: 57384 - protein, 432 aa, Zea Mays
MDFASRHAAAEAATSASAAAPAGVAEEPEYLARYLVVKHSWRGRYRRVLCIASSGVVTLDPTTLNLTNSYDARSEFDHAEALTATDEFTLAVRTDARSKFKPMRFSSPLRPGILTELHRLRPVQASFDFPVLHLRRRTHEWSSFKFKVTPVGVELLEASGDIRWCLDFRDMNSPAIVLLGDSYGRKTSEGGGFVLCPLYGRKSKAFMAASGTTNTAIISHMTKTAKLKIGLSLSVDNSQSMKADDFIAKRAMEAVGAAETRHGEWSVTRLRSAARGTANIESLSLGVGPRGGLGEQGDSVSRLLVLTSTSLVERRPENYEAAIVRPLSAVSAFVRFAEEPQMFAFEFNDGCPIHVYASTSRDNLLATVLDILQTQRQCAIPVLPRLTMPGHRIDPPCGVSHLQMPHHSSVDMESATMHIKTSGCSCLRAVAS

SEQ ID NO: 57385 - protein, 270 aa, Zea Mays
MAQVLNTAPVAPANLPMPNPAPAISSVAPSEQSAPSKEDVELAMAINASIQSAIAEGVSVPNVQPNASTPNNNGWAAPPSNSHNGWGPPATPAPSKTSGQSQVRVDAPSSSTYNGWDVPGTSSSQSSSKPHQTQTNPPVLIPQEALQALPTPTAPPFAEETFYNGPVHYPSIDSTPVDVTMPATTGGGSTTVIATAAPTEQLENEADASDSGKTPSGTCVICLDAPVEGACIPCGHMAGCMSCLKDIESKKWGCPICRATINQVVRLYAV

SEQ ID NO: 57386 - protein, 109 aa, Zea Mays
MDVVWGETAGVEGQLLLLCPLLFLLQGFEGYVGFLLLRTAHTGVVPEWQVVVCGILLISMAIGNFANTLDTLMAKSRFKAKMKKSKGKRDLDTCPSPTGSSPTDSATRA

SEQ ID NO: 57387 - protein, 378 aa, Zea Mays
MRIFVATVEAILRRAFPSETPEQSRKPRSQSKNLAVAELHTMIHSLFVESCASMDLASRLLFVVLTVCVSHQALPGGSKRPTGSDNHSLEEATEHSRLTNGRSRCKKRQGPVATFDSYVLAAVCALSCELQLFPCISKNGSHSNLKDSMKIIIPGKNNGINNELHSSISSAIIHTRRILAILEALFSLKPSSVGTSWSYSSNEIVAAAMVAAHVSELFRRSRPCLNSLSALMRCKRDAEISTRASSLYHLIDLHGKTVSSIVNKAEPLEAHLTLTPVKKVNQHRCEENNTNSSDSAKLENKNGSTHKKNGFSKPHLKCAEEVLNGNVASTSGKSIASLQVEASDLANFLTMDRNGGYRDVCRKHISSPRMEEGCGCTL

SEQ ID NO: 57388 - protein, 129 aa, Zea Mays
MIQLQPSRRTLKLHCWCLQDPTKSAVFQRIPLTYDEEKGAWFLEKELPEGRYEYKYVVDGKWLCNEHELITKPNADGHVNNYVQVSRDGTSDEEKELRERLTGPDPDLTDQERLMIREYLEQYADAAER

SEQ ID NO: 57389 - protein, 247 aa, Zea Mays
MLLYEFVENGNLEQWLHGDVGPVSPLTWEIRMKIAVGTAKGIAYLHEGLEPKVVHRDIKSSNILLDKKWSPRVSDFGMAKVLGSGSSYVTTRVMGTFGYVAPEYASTGMLNESSDIYSFGVLLMELISGRSPVDYNRPAGEVNLVEWFRGMVGSRRVEDLVDPRIAAPPPPRVLNRVLLVCLRCIDADAHKRPKMGQIVHMLEGDEFPFRTEHRSPRASHRTSMATRPSLLSENVGATDDSDKSMWR

SEQ ID NO: 57390 - protein, 317 aa, Zea Mays
MQTREGLKLGISCVKYGSAKDRKKIIKSLKGHIMKLALSDFGCLFLICIISIVDDTKLVNKIVIQELVKHLKQLIFDKNGRRPLLQLLHPFCSRYLSPNDLACLNYNVPSLSSTEVETSESAIGVITENKLDDVTAQDPNGLEGKQIVFESKKDPLQRRHELLIKSELAEALVQSCIENVGELLRTNFGKEVLYEMAVGGKDNVLDGLTDRIHMLHDAIASDAAQPKTEDTEHAFENFFSSRVIRRMVIDCPAFAVTLWRKALQGKCKIWAEGHSSKVVASFLESPSTEVKDLAKPELQPLVDAGILKVPDPKVVQK

SEQ ID NO: 57391 - protein, 600 aa, Zea Mays
MDTTTQGLEFGGGINSPKPYCYWSTTQDTTVHKDSTPEAYSTFSISNSKASKRKQGAMSGAKGGNPLLTLGLGCSPSSSYNSKLSSGTACITSSSLLKEIDEESSIDLGLNLGLYIGNDIGHCQQKSHAGFENVLSTNSPKLDLQLSLSTSSPESVVIDANRSPDGLAMPMANSPLAIVEEGSVPHSWVFEHSIVSSSHASKATHGFPLSKKTNGGCVKGARGASGRCIAHGGGRRCQKPGCEKGAEGRTIYCKAHGGGRRCQFLGCTKSAEGRTDHCIAHGGGRRCSHEGCSRAARGKSGLCIKHGGGKRCQKENCTKSAEGHSGLCIAHGGGRRCQFPDCTKGAQGSTKFCKAHGGGKRCTFVGCTRGAEGSTSFCKGHGGGKRCAFQGGGVCPKSVHGGTQYCVAHGGGKRCASFGCTKSARGRTEYCVRHGGGKRCKFESCTKSAQGSTDFCKAHGGGTRCLWGQADTSFGAGAQQCDKFVRSKTGLCSAHSALIQDHCVHGGGTLGSAIYQSVHVKPTEMINGDKTLLDPAIPVTNSGVHPPVLAQSMIDPLPEGRVHGGGLLALLSRGGSRTSAGGSELCFGQDRVDLRLSGSP

SEQ ID NO: 57392 - protein, 443 aa, Zea Mays
MGSRERMLFDLNKLPAEVEEEAAAVVPNESAVVVSQEAAVVASQAAVVVSQPQKSLPVPMTYAPSLFQPGGGSQSQGILNDNNAFKHASIGSGFQPFVKNNKDSNNTKEPMKVEDNQNSSIQSTAMVNNRTTDSASPKAETCNQVSQAVEREEGECFDADSISENAGSSNKDEITGTASTHLKKESQESEPHLIKSGGVTKDDTAAECSDAEMVDASKDLVHGSSTGSENMQISECKGNQPGDDLDPCNRSKDVKGVEANYAFRFASNPAKRPKLNEHKEAMLGKKRARQTVFIGVEDAKQAGTMKTTTPRRQSSFPAPIVTRTVKEASRGIGEKAAEKQNQQAIRDQRQPEMMGSERSNSVDPSDQHTEPNGDTELGTQGWSKKMNTEEPASDGYQHPAQRQASLKQTMDFKQPKGRPFSSQRTILTGQNNADQKPANKRGG

SEQ ID NO: 57393 - protein, 225 aa, Zea Mays
MLRETNLSPPSHRAVLALAAAPLPRLPPAPAALSPAPPAMGLLTSAELNYLVFRYLQESGFIHAAFTLGYEAGIHKCGIDGNAVPPGALITIVQKGLQYIELEASSDENYDEVERDFALLEPLEIITKDVEELQQIVKRRKIERSQTELEKDKGKEKERNEEHERRPCGEREREQHEKEKEQVRDKDKSEKDRDHDKEKEKERERQHAERTDKVKHEDDSLVGAD

SEQ ID NO: 57394 - protein, 415 aa, Zea Mays
MGKGSARALALALAVILACSDVAVVTAQETERIEGSAGDVLEDDPVGRLKVYVYDLPSKYNKKLLKKDPRCLNHMFAAEIFMHRFLLSSAVRTFNPEEADWFYTPVYTTCDLTPKGLPLPFKSPRMMRSAIQLIATNWPYWNRSEGADHFFVTPHDFGACFHYQEEKAIGRGILPLLQRATLVQTFGQKNHVCLKDGSITIPPYAPPQKMQTHLIPPDTPRSIFVYFRGLFYDTGNDPEGGYYARGARASVWENFKNNPLFDISTDHPPTYYEDMQRSVFCLCPLGWAPWSPRLVEAVVFGCIPVIIADDIVLPFADAIPWEEIAVFVPEDDVLRLDTILTSIPMDEILRKQRLLANPSMKQAMLFPQPAEPRDAFHQVLNGLARKLPHPKDVFLKPGQKVLNWTEGAQDDLKPW

SEQ ID NO: 57395 - protein, 727 aa, Zea Mays
MSLLSRHARHPTTPPPASFSGGVETPPRRRVPKENVDPSSPARNHHSALDHGASPFRSPSSAAKPLSARNRLPPRPPSSNPLKRKLEVSPAAAAVGSAHDAAPGLDSGVQVVVRIRPSCWVDEEEAGEDGRGPEACVRKTAANSVAIQGQDFTFDAVADSVSTQEDIFTLVGLPLVENCLSGFNSSIFAYGQTGSGKTYTMWGPLSALSEDSLSSERGLTPRVFEQLFSRINEEQVKHADKELTYNCICSFLEIYNEQITDLLDPSQKNLQGLANRRTGATSANADSSRSHCVFTCVIKMDSKNPEDGSSITRSSRINLVDLAGSERQKLTHAAGDRLKEAGNINRSLSQLGNLINILAEISQSGKQRHHVPYRDSKLTFLLQESLGGNAKLAMICAVSPSQSCKSETLSTLRFAQRAKAIKNNAVVNEEKIEDVNALREQIRQLKDELHRMKSNGGIEGNSGSFATGWNPRRSLHLLKMSLGHPTTFQCIKEDSDEEMEIDENDVEKPYNHENMAMSSINVKESKRFQASMNVSAGTSQVEDLDRDKILISIKRSCCSANKFNTGTDVGDGKCKLNIAASIQRGLQVIESHQNNSAWKRASVGLNARIMDIQPCKVDVAIQTDPEEYETRDNPLALVPSCLLEASANESRDPSTCRDLQLVPVDVTVPSDDQKQRHFLKAVEKVLAGAIRREMARDEQCAKQAAEIQQLNRLVQQYKHERECNAVM

SEQ ID NO: 57396 - protein, 56 aa, Zea Mays
MSSHMTYFVVGFIIKWRVAILSLATTCACQLCLATFNEGLCWCCDKDTCQEQYGCR

SEQ ID NO: 57397 - protein, 163 aa, Zea Mays
MSLGPNICANMTPMERSISAKEPENSEDLPTVVRSSDEMDTRNSGDVRRDTVDTLPESKQSHESCASVSNKFDSGEYQVILRKELTKSDVANSGRIVLPKKDAEAGLPPLVQGDPLILQMDDMVLPIIWKFKYRFWPNNKSRMYILEAAGEFVKTHGLQAGDT

SEQ ID NO: 57398 - protein, 851 aa, Zea Mays
MSPCCPTSRYTPGLDKNLLGDYLGNHDEFSIQVLHEFARTFDFKDMNLDAALRLFLETFRLPGESQKIQRILEAFSERYYEQSPQMFVNRDAALVLSYSVIMLNTDQHNVRVKKKMTEEDFIRNNRRINGGNDLPREFLSELYYSICRNEIRTIPEQGAGCSEMSFSRWVDLMWRSKRTSLYIACDSYPFLDHDMFSLMAGPTVAAVSVVFDNVEHEEVLTGCIDGFLSVAKLAAFYHLDDVLNDLVVALSKFTTLLNTSYIDDPVIAFGEDTKARMATEAVFTIATAYGDHIRSGWRNIIDCILRLHKIGLLPGRLTGDTTDDQESSSDSLPGKHTSSAPQVLPISTPRKTYGLMGRFSQLLYLDADEPRSRPTEEQLAAQRNASETVKKCQIGIIFTESKFLQADSLSNLARALIQAAGRPQKITSSLDDEGVAALCLELLITVTLNNRDRIVLLWQDVFEHITHIVQCTVMPCNLVEKAVFGLLHICQRLLPYKANLVDDLLRSLQLILKLDARVADAYCENITLEVTRLVKANATHIKSQMGWRTIISLLCITARHPDASDAGFEALVFIMSEGVHLSPANFILSVEASRQFAESRLGSAERSIHALNLMADSVNCLVRWSQEVREAGGEADRILEGIAEMWLRLVQALRKVCMDQREEVRNHALLSLHRCLVVDGISVKSSTWLMAFDIIFQLLDELLEIAQSYSPKDFRNMEVSLLHAVKLLCKVFLQSLKDLSGQHSFDKLWLEVLDMIEKFMKVKLRGRRTEKLQEAIPELVKNILMMMKASGILSKTGASENSFWEATWLQVNKIAPSLQLEIFPDNEDGSTTQVEENKLDTQVQSDQNNDR

SEQ ID NO: 57399 - protein, 93 aa, Zea Mays
MLQKLTYLAIRHHPQIKRVDTVRAYTFGVLYFVEVDIELPEDLPLKEAHAIGESLQIKIEELPEVERAFVHLDFECDHKPEHSILNKLPSSQP

SEQ ID NO: 57400 - protein, 145 aa, Zea Mays
MLGAFLVSLGYSTVTFMASYNNYPGGYALKALHEADSSVKEKMVHIDAFTAMSGVSRFCENEYPWRYSKEEEIPIEEFEKRNFTYLLNEHRSIGGYQCLFAVDGFSRVKLTPQIPPLSLVKEPKVFAHGNTRDPDILSLSWPGCP

SEQ ID NO: 57401 - protein, 431 aa, Zea Mays
MGVSYPSHSRPDVLSSPGTPSCNRRGMAGVGYQQGPRSERVIPPWTGHTSHSGSGMVLPYSTGTGRTLPSKWEDAERWIFSPNPNPNNALGRSVPQLWRPKSKSGPLGPPGRFCGAYSCVSSSAQFLDNGRVGNLTVNAHYMAGMLLPEHICGGVMDWERDASGASGEDSSNGQGGCRPGQMNVRHPAMQPTRVSQQHGSAMESYQSLHASLQSIQDGGIESIKDSATSSAPIILRKDVATQTSPAISRSSSPSTRTSFSRSLSSQQVKELESCFSKLEVRDVQVDDRVTLTRWSKKHVTRGSEKNATNIIECKKKTVDSKSSAWEVTQTAKCISMIEGEEAKMTAWENMQKAEAEAAIQKLVIKLEKKRPYSLERIFNTLRSGSRKTQVVRSTSTANQDQHISRTIKTAPNLSKNGQMSSLSGCFTCHAF

SEQ ID NO: 57402 - protein, 79 aa, Zea Mays
MAVLLRLYTSLSSIAVAFSVTCIIRSELFLKVMKQNTEAITSYEMLDAVRVALGILLQMVVIATTTRLLQNMSPPKRAS

SEQ ID NO: 57403 - protein, 100 aa, Zea Mays
MLQFFCFHAYHRSQQKVLCFLLYPQMTDLLWDVNYGMGLSFVAKMKYHIQAMDAEKLSTRIVIHVAHFLQGSSVCFTCQVKAATYCMRFSLKLTIQFWSS

SEQ ID NO: 57404 - protein, 198 aa, Zea Mays
MPGPKSVLIWDRLRNWLRTAKSLCPPEEAKEFRLDSLENQITALENECSGDYQWIGFCHNDLQYGNIMIDEETNVLTIIDYEYASFNPVAYDIANHFCEMAADYHSSKPHILDYSRYPDVDEQKRFVKTYLNISGEEPDAEVVENLLQSIEKHTLASHLVWGLWGIISDHVNDIDFDYKEYARQRFEQYWHKSAILTS

SEQ ID NO: 57405 - protein, 604 aa, Zea Mays
MVGEESGCGVEGGTGGGEVPAASAPNGDRSGNSRLAVPSSSADDRGFHRSSTMPGVIKNDEITNESTGPSNLERSRTERRRQNNPTIDPAKQLLDERIPIKKKLKMLNRIATVKDDGTVVVDVPSGLEPTIVGGTEDIYTEAVEEALDGTEILYRPPMQIVILIVGTRGDVQPFVAIGKCLQDYGHRVRLATHANFKEFVLTAGLEFFPLGGDPKILAEYMVKNKGFLPSGPSEIPIQRKQMKEIIFSLLPACKEPDPDTGIPFNVDAIIANPPAYGHTHVAEALKVPIHIFFTMPWTPTNEFPHPLSRVKQPAGYRLSYQIVDSMIWLGIRDMINEFRKKKLKLRPVTYLSGSQGSGNDIPHGYIWSPHLVPKPKDWGPKIDVVGFCFLDLASNYVPPEPLVEWLEAGDKPIYVGFGSLPVQDPQKMTEIIVKALEITGQRGIINKGWGGLGTLSEPKDFVYLLDNCPHDWLFLHCKAVVHHGGAGTTAAGLKAACPTTIVPFFGDQPFWGDRVHARGLGPPPIPVDQFGLQKLVDAITFMMKPEVKDKAVELAKAMESEDGVTGAVRAFLRHLPSKAEEQSLPQSSGFLEFLGPLSKCLGCS

SEQ ID NO: 57406 - protein, 405 aa, Zea Mays
MHAPPLVAFAGGACPASAASSLSPWLASLRPAIVAAPARLLWFRRGALRLEAKAAWRATGGGRGPRVPAKGAVLASYMGAEEVVGPLSLLDEEELILHIRKERDNGKLPADVAINLEELYYNYRNAVLQNGDPNAYEIMLSNMTALFDRVLLDVQNPFTFPPYHKAVREPFDYYMFGQNYIRPLVDFRNSYVGNISLFHDMEEKLHQGHNVVLMSNHQTEADPAIIALLLEKTNPWISENIVYVAGDRVVTDPLCKPFSMGRNLICVYSKKHMNDFPELIEMKRRSNTRSLKEMALLLRGGSQLIWIAPSGGRDRPNPSTGEWYPAHFDSSTVDNMRRLLEHAGVPGHIYPLSLLCYEVMPPPQQVEKEIGEQRVISFHGVGLSATEETKYGDITCHTKNADEVQ

SEQ ID NO: 57407 - protein, 753 aa, Zea Mays
MFAKRLFHRALGVGRGGGGGASAPAASPADAIQMDAQISTHCGVPYTASLLAFDPVQRLLAVATLDGRIKIFGGDNIEGLLISPKSVPYKFLQFITNQGLLVAISNENEIQVWNLEFRQLFYSSQWDVNITAFAVIERTFMMYLGDENGLLSVLKYDVDDGKLQIMPYNVHIHSLIERSGVSLQDPQPIVGILIQPDTFGTRLLIAYERGLLVLWDVSEDRAVSVRGYGDLRMKGQINGAQGDSGEDQLNTTIDDSEEEREICSLCWASREGSTVAVGYITGDILLWDMTTKSSRQEKQSDVSSNVVKLQLASGSRRLPVIVLHWSAGSAVHSNKGGHLFVYGGDDMGSEEVLTVLSLESTAGLESVRCMSRTDLKLDGSFADMILIPDTGVPDKSRTSALFILTNPGQLNFYDGGSLFSVQNSKEGTPLPEAQKFPVAIPTLDPNITVTGLYSLTESEFPNISLKKFCARKNAGHFISENMKWPLTGGVPNEMSLDEDHAVERIYIAGYQDGSVRIWDATFPVLMPMFVLDGNVADVNLDGANASVSSLAFCSLSMTLAVGTTSGLVRIYKLREHTGGSSFHFVSEFKQEVHVVHHGKGFHCYVAFLSANSSVLSLLFMASGGLLAAGYQNGQVAMLDPSQLSILFTVDGASGTNSPVVSLGIYSVAASAAKADQSKKDNPQNATLSRDVLLSLTKDARVTVLDCTTGVMINSHIIHQKQSSAISICRVRRDTNPIIRGQNSKSRSDRERWQ

SEQ ID NO: 57408 - protein, 370 aa, Zea Mays
MASSSGGGGGRRMTPGGDSSASAGGRRIYRTQTAGNLGDSIFDSEVVPSSLVDIAPILRVANEVEASNPRVAYLCRFYAFEKAHRLDPTSSGRGVRQFKTALLQRLERENDPTLKGRVKQSDAREMQSFYQLYYKKYIQALQKVADKADRAQLTKAYQTAAVLFEVLRAVNVSQKIEVDKSILETHNQVEEKKKLYLPYNILPLDPDSANQPIMLYPEIQAAFHALRNTRGLPWPKEHEKKRDAPKEHEKKRDADLLAWLQAMFGFQKDNVSNQREHLILLLANVHIRQIPKSDQQPKLDDRALDTVMKKLFKNYKRWCKYLGRKSSLWLPTIQQEVQQRKLLYMGLYLLIWGEAANLRFMPECLCYIYH

SEQ ID NO: 57409 - protein, 1003 aa, Zea Mays
MAQTPNPSRRSWVGPAPMPFLTPRPERRHLEMRWADGVSQSAARRSGVGAVARDGCERDQEVNVQVMLRCRPLSEEEQRVNAQSAISCNESKREVTVLHSLFKQADKTFTFDKVFGPQSQQRSIYNHAVAPLVTEVLEGYNCTVFVFGQTGTGKTYTMEGEMRQKVSELPDTAGVIPRAVCHIFEILTARKADYSMKVTFLELYNEDITDLLSLEDQSRFPEGRQKRPITLMEDGKGGAVIRGLEEIVVYSPSDIYSLLEHGSARRRTADTALNKQSSRSHAVFSINIQVKETTVGNEELIKYGRLNLVDLAGSENIARSGAREGRARETGEMNKSLLTLGRVINALVEHSVHVPYRDSKLTRLLRESLGGKAKTCIIATVSPSAHSLEETLVTLDYAARAKSIRNKPEANKKTCKTVVLKELYQEMERMKQDVKAAREKNGIYISHERFAQDETKRKTMKEKIEHLELSLEKQNKEVQKFKALYLAEQECHWDFESQNNDLKVNLESLKGKFIDLEEAHCRAHMSLREKDFIISNLLHSEHLIIERAKDMRNTLENATEDISVLLNKQERQSKTEAENKRLLSGFRAELDRSLGVLHATVVGSVCEQSKILESINEQTKLYFLARNEFLEVMFSEAEQVLNDVLKSTSDLKELLAFSAELQNTGLRRNLASVQAMSKQSIDFFEDIRIHVSQLMTLMEQNQMERSSKLVKFENEFKETCVKDEQAALNKIAAILSELTAKKTTMVSSYMGQLNERYSEDQKNLKLEISNLQQVSDNGKNESVACVGVIESQFQEDMSSHTKSNDQMEGILKQYSEKGSHFVSYWSHIQSSLHDLVKSSIMETDDFIEESRNKNENIFQEGLLFSSQNDAEFHGITSDVLTVSKNSLLLDHETCKMVETNTTIFSDHLELLNEKHSEGVESTRNMMSDCLEKDYMANSPVRNHPRELLTSANSLESIDKLRASLPDLVAKFRLENKLNEMDKGKQYSDQRTRTPRSPLTPVNQ

SEQ ID NO: 57410 - protein, 152 aa, Zea Mays
MRIESKKAAECLREALRDYNLKFGTILNDPDLAPFRASPEFKELQEEALRGGEDIGSGFRRDLKLISEVQAPFRGVRRFFYVALTAAAGISTFFTIPRLVLAVRGGDGAPDLLETAGNAAINIGVCRRYCCSGSFVFLGKQERREADHTNFS

SEQ ID NO: 57411 - protein, 252 aa, Zea Mays
MPNFLSDATIRRFLRARNWSTMKATKSLKEATSWRRQYKPEKIRWESIADSENEARRAYIPDYLDKKGRMVFVTLPTIKSKSSEKDHLKYLVYNLENLLIDCADAEEDNVVWISDFKGWSISSTPFSLTRQSLHIIQQYYPGLIAVGILTNAPKIFESFWKIMKHFLEPKMDEKVKFVYNDSSESQKILGDMFDLDELEHIFGGRNTADFDINVYAERMKRRDRIRGASTEDNGEATSSRCWTKTTRNSSSV

SEQ ID NO: 57412 - protein, 440 aa, Zea Mays
MEYKLRRNETVIKGTILFDASSTITLSPVNFQGMPKYDGCCFYIGTPQKKEYFLCAETPGAAKAWVSTLHATQLVLRAHKEAVNSLAGNGSPATLGTVATAVANANATAMEATKEIEAALKVSMRAALGLGTNNSNDGQLDDLTIMKETLRVKDEELQHLAKDIRSRDATINEIADKLTETAEAAEAAASAALTMDEQRRLLCLEIERLKQALERQVEQSMLKLRQSEEKVISLSKEKEQLMKERDAAFQEAHMWRVELGKAREQAVIQEATIARTEEKARVSEADAAARIKEAAEKLRTVEKEKEELLALVGVLQSQVQREQSSTKQVCGERSESCSGADSPPPLTKHVDASDDDVDKACVSDSRSVLVSSDSTEVQLAVDGVDIRPVGDAEWGGFQQSDALIADVREVSPEADGGSLDIPVVNPPPISDHVQGGATHP

SEQ ID NO: 57413 - protein, 61 aa, Zea Mays
MKHNTNKSIDQRTQMASSNGHVIPNVSQNDSKLELFGFDSLVNILGLKRYGQMFYYFHHIY

SEQ ID NO: 57414 - protein, 381 aa, Zea Mays
MAASLLSRAAAAAAALRGAARPNHLLARGRVGWAARAAEGAGGPRCGPSPLLGAFGIAARCNATSSSSAVSEATGVHTVPPTEPVVSAEWLHANLKDPDVKVLDASWYMPAEQRNPLQEYQVAHIPGALFFDVDGISDRTSSLPHMLPSEKAFSAAVSALGIYNKDGIVVYDGKGLFSAARVWWMFRVFGHDKVWVLDGGLPQWRASGYDVESSASSDAILKASAAGEAIEKVYQGQLVGPTTFEAKLQPHLLWSLDQVKENINTQTHQLIDARSKPRFDGAVPEPRKGIRSGHVPGSKCVPFPQVLDSSQKLLPSDELRKRFEQEGISLDQPLVTSCGTGVTACVLALGLHRLGKTDVAIYDGSWTEWGAHPDTPVATAV

SEQ ID NO: 57415 - protein, 413 aa, Zea Mays
MAAAEAASSAPAPEHLLEVEDDEVMIDFKPNAKCRADLRLRSLHPSLPVAFKVQTSSPLKFLVSPPRGAVPPLSSASLRVVLRPQPHAPPSFPRSRADRFLVLSSLSAARLDSVGSSNDGGGGGGGVRAVRLRVFFGGPYLLRLAADAGDAAAVRLILRRQPHLLPFLEHQQAAAAPDAGEQQWAPLHAAAARGDCGELRRLGPEALAARDREGRTVLHAVAAAGEAEAVAVLVDMGADTSAVDARGRTPLDVARDKGYQEVVDVLERWELVMTAARRGDLGSLESLLSKRAGVRGRDQYGLTALHLAAIKGHGDAIALLAGPGCMDVECEDVEGHRPLHLAVEGGHAEAVELLLDMGADANARTRRGATPLQMAEAMGYEAIAQLLCARGAEVAAASALCAASSSSSSISCA

SEQ ID NO: 57416 - protein, 123 aa, Zea Mays
MIPSQPCFHPREPRCAITVVLREIRERALVHRDRRPCTRDSSALRPRSQPGDFSPPCTEPGCSRVGLGGKHLDTGDTHRCRADPTNPHLAGGKRNLGSSTDEQGIENPGVQQVEVAEQELIEG

SEQ ID NO: 57417 - protein, 347 aa, Zea Mays
MVVTIIGVSGIILLTGIAWFGYKYRMYKISAAELDDGKSSWVLTSFHKVDFSERAIVNNLDESNVIGQGGAGKVYKVVVGPQGEAMAVKKLWPSGAASKSIDSFKAEVAMLSKVRHRNIVKLACSITNNGSRLLVYEYMANGSLGDVLHSEKRHILDWPMRYKIAVNAAEGLSYLHHDCKPVIVHRDVKSNNILLDAEYGAKIADFGVARTIGDGPATMSMIAGSCGYIAPEYAYTLHVTEKSDIYSFGVVILELVTGKKPLAAEIGEMDLVAWVTAKVEQYGLESVLDQNLDEQFKDEMCMVLKIGLLCVSNLPTKRPSMRSVVMLLLEVKEENKPKLKAVATLPI

SEQ ID NO: 57418 - protein, 1099 aa, Zea Mays
MQREVGPQVAPPLFLHQIQPMPPHAAAAAKKRGHPWPAAGAAEAGAGNWNPRLWDWDSRALTARPSSDALRLAGGQPQPAAEAQRQGAGALNLQLGLQEDSTTPMDASPTAPAAAAAASPPASAAAGQEPVVRPSKRVRSGSPGGAGGGPGGGGTANGGASYPMCQVDDCRADLTSAKDYHRRHKVCETHSKTTKAVVGNQAQRFCQQCSRFHPLAEFDEGKRSCRRRLAGHNRRRRKSQPTDVASQLLLPVNQENAANRTQDIVNLITVIARLQGSNVGKVPSIPPIPDKQNLVEIISKINSLNNATSPAKSPSPEVVVLNTSQEQREQGHDSVDKTTNGIDKQTVPSTMDLLGVFSTGFATSTPVTNTSQSQGSSDSSGNNKSKSHSTEPATVVNSHDISTQDFPAAGFMRSNSTQESRPHIYKQTEHETRPYLSLQLFGSSEEDIPPKMDSLNKYLSSESSNPLDERSPSSSPPITRKFFPIHSVDEEVRHPHITDFGEDATMGEVSTSQAWCAPPLDLFKDLERPLENGSPPNPGYQSCYVSTSCSDHSPSTSNSDGQDRTGRIIFKLFGKEPSTIPGNLRDDIVNWLKHSPTEMEGYIRPGCLVLSMYLSMPAIAWDELEENLLQRVNSLVQSSDLDFWRKGRFLVRTGSKLVSYKAGMTRLSKSWRTWNTPELTFVSPIAVVGGQKISLILKGRNLSIPGTQIHCTSTGKYISKEVLCSAYPGTIYDDSGVETFDLPGQPDFILGRCFIEVENRFRGNSFPVIVASSSVCQELRSLEVELEDSQVLDVSSDGQIHDCRQSKTRVQVLHFLNELGWLFQRASACTLSTRPDVSDLDLTQFSITRFKYLLLFSSERDWCSLTKTLLDILAKRSLVSEELSKETMEMLAEIHLLNRAVKRKSRRMVHLLVQFVVLCLDNSKVYPFLPNFPGPGGLTPLHLAASIENAEDIVDALTDDPQQSALDEDGQSPETYAKLRNHNSYNELVAQKLVDMKNSQVTITVNGDEIHMDQLGNVDDRKKSGVQALQIRSCSQCAILESGVLRQPMRSRGLLARPYIHSMLAIAAVCVCVCVFMRALLRINSGKSFKWERLDYGTI

SEQ ID NO: 57419 - protein, 296 aa, Zea Mays
MASFNDRAGAASNPKLVLPITGGSSSEPANKKQKKEAQRRVQHVGVQGPFIKSRWSHIPITFSQEDLQLKDYPHNDAMVISCVIKGFLVHNVLVDTGSAADIIFAKAFRQMQEPEDKIHDATHPLCGFGGRQIVALGKITMSVTFGFINNTRTEQIVFDIVDMEYPYNAIIGRGTLNAFEAILHPAYLCMKIPSDQGPIAIHGSQEAARRAEGNWTDSKAIHNIDGAEACEQYKFRREKAASADQPKPMLLCEDVAEQKVLLGSQLSEAQEKTLLRFLFNNKDVFAWSANDLCGVN

SEQ ID NO: 57420 - protein, 209 aa, Zea Mays
MPWTPTSKFPHPFSRVKQPAGYRLSYQIVDSMIWLGIRDMINEFRKKKLKLRPVTYLSGSQGSGNDIPHGYIWSPHLVPKPKDWGPKIDVVGFCFLDLASNYVPPEPLVKWLQAGDKPIYVGFGSLPVQDPQKMTEIIVKALEITGQRGIINKGWGGLGTLAEPKDFVYLLDNCPHDWLFLQCKAVVHHGGAGTTAAGLKAAPIYGTFD

SEQ ID NO: 57421 - protein, 101 aa, Zea Mays
MPLDQRTWPKPPDRRTPEPPTPRVAAIARDDRTLRVRRSDPRLPWPPLGLSKSIAQPPSPLGLGRAAGRPSRGGTAAGLGIAAAHVRGNRLHRSHARGNRH

SEQ ID NO: 57422 - protein, 608 aa, Zea Mays
MLDVLLAERRVDEALDALDEAERVAVDAKRKQTLTAAEVSALKRSISDNRQRLADQLAEAACQSSTRGIELRAAASALKRLGDGPRAHSLLLSAHNQRLQCNMQTIHPSSTSYGGAYTAALAQQVFSVIAQALSDSVDVFGNESCYASELVTWATKQVMSFALLVKRHVLSSCAAAGGLRAAAECVQISLGHCFLLEARGLSVSSVLLKQFKPSLVQALDANLRRIEESTAALAAADNWILTYPLTGIRPLTRSSAANLALQPKLSSSAHRFNSMVQDFFEDIAPLLSLQLGGSSMDGITQIFNSYVNLLISALPGSMDDEANLDGLGNKIVRMAETEEQQLALLANASLLAEELLPRAAMKLSSINQSMDDLHKRGTDKQNRVPEQREWKRKLQRMVDRLRDNFCRQHALELIFTDEGDTHLSAEMYISMDNTVEEPEWVPSPIFQELYVKLNRMASIAAEMFVGRERFATLLMMRLTETVILWLSEDQAFWEEIEQGAKPLGPLGLQQFYLDMQFVIIFGQGRFLSRHVHQVILDVIDRAMAAFSATGMNPDSVLPGDDWFMDVSQEVVSMISGRGRVANGDREVNSPTASVSAHSISSFKSHGSS

SEQ ID NO: 57423 - protein, 292 aa, Zea Mays
MDSRPRETDAPGDPANGAAPPLAAAVTAATGDVEIIRPRNDKRGYRRVVLPNSLECLLISDPDTDKAAASMNVSVGYFCDPDGLEGLAHFLEHMLFYASEKYPEEDSYSKYIAEHGGSTNAFTSSEHTNFYFDVNSDSLHDALDRFAQFFIKPLMSPDATLREIKAVDSENQKNLLSDPWRMSQLQKHLCAENHPYHKFSTGNWNTLEVKAKEKGLDTRLELIKFYDSHYSANLMQLVVYGKALITCRTLLKISFAILEMLGGSHFHFLVIHVHLNISRSLSKQFPLNKGTL

SEQ ID NO: 57424 - protein, 141 aa, Zea Mays
MVGDGINDAAALASADVGIAMGGGVGAASDVSSVVLMGNRLSQLIDALELSKETMKTVKQNLWWAFLYNIVGLPIAAGALLPATGTILTPSIAGALMGFSSVGVMANSLLLRVRLSSRRKREPLKAISDEVEKNYSSKWST

SEQ ID NO: 57425 - protein, 1386 aa, Zea Mays
MALFRKFFYRKPPDGLLEITERVYVFDSCFTTDVFDDDKYRDYIGDIVAQLQSHFADASFMVFNFRDGDSQSLLANILSSYDMVVMDYPRQYEGCPLLTIEMIHHYLRSGESWLSLGQQNVLIMHCERGGWAVLAFMLAGLLLYRKQFIGEQRTLEMIYRQAPHELVQLWSPLNPMPSQIRYLHYISRRNVSSEWPPQDRALTLDCVILRNIPGFNEEGGCRPIFRIYGQDPLPATNNTPKVLFATPKRSKYVRLYKKADCELIKIDIHCHIQGDVVLECISIDVDQEREEMMFRVMFNTAFIRSNILMLNRDEIDILWDAKDRFPKEFRAEVLLSEMDTANQLGPMEVAGIGEKGGLPVEAFAKVQEMFSNVDWLDPTGDAAVQLFQRLTSSENIQLRQGFLSPSKKEAESLELGSISPIDKHFDNVQQEPSKVEHPTVYVNKLENVGQERLVLLEQTTNSEVKTGISVVQENPGSLVHKVDSNAKQSISLEKAVPSTMKSIDPVLKDQNAKLDEQHGSGQHSFPTIIMSQRFPISSSCPALSGYSSPRLLSACPRFNSAPSALGITALLEDHAGSAENRCGSTTLTFDTTGTPVVTKGMPLLRPPPSPLDLLVSDSTMMSEAKGSSQPTLNNSGLPSHPERQLTFQSLGTTTPATNHQKSSTTVTIELLPTSAPPPPPLPPPSSVFSSRIYHLPPSPTSFRSPAPAAPQPPPVPPPPPPMPRPFPVRSHAPQPLTPQPPALSSSLILSGTPQSPPSPPPSRCSLSKPPAPPPPPPPPPLLASTSSTIRPAASHLPLFASTSSPVRPAAPPPPPAPTSSPIRASALPPPPPPGTSSSPRPPPPPCYSSKQSSSPMGKSMPSPPVPPPPSHGGRNGASGNIVPPPAPPGSNAKLFGPQGRGPAPPSGPMSKSFQSGQAVLRRSNLKPLHWVKVTRAMHGSLWAESQKPDETLKAPVFDMSELENLFSAALPSSDSRRSDKSGSRASGSKPEKIHLIDLRRANNCGIMLTKVKMPLPDLMSAILALDDTVLDADQVENLIKFTPTKDEIELLKGYKGDKQVLGECEQFFMELMKLPRVESKLRVFSFKIQFRSQVSDLKRNLNIVNSSAEEIRGSVKLKRIMQTILSLGNALNQGTARGSAVGFRLDSLLKLSDTRARNNKMTLMHYLSKVLSEKLPELLDFPKDLSSLELAAKIQLKSLAEEMQAVNKGLEKVEQELTTSENDGPVSEIFRKTLKDFLIGAEAEVRSLTSLYSNVGRNADALALYFGEDPARCPFEQVVTTLQNFVRLFTRSHEENCKQLDLEKKKALKEAEDNSKQLDLEKKKTQKEAETEKIKKKSDSEKACKKELENDKSSKKDSANEKGKLNNPIKELDISLQSPAQTASAK

SEQ ID NO: 57426 - protein, 521 aa, Zea Mays
MIEIYNEQVRDLLMTDGANKRLEIRNNSHVNGLNIPDANIVPVKCAQDVLDLMKVGQRNRAVGSTALNERSSRSHSVLTVHVQGKEVISGSTLRGCLHLVDLAGSERVDKSEATGERLTEAKHINKSLSALGDVISALAQKSSHVPYRNSKLTQVLQDALGGQAKTLMFVHVNPETDSFSETMSTLKFAERVATIELGAARANKEAGQVKDLKEEIAKLKLALDEKENEVAQFKDLANRVTSEMRNARTRSPLTASMSLKPEVSQESSVDTCTSEIRSSSSGKQRRFRSPLSVRELDDKSPVISRELYLSARKYKTPSPPVRSSLSVERGSFAKIVENTGSIDCTPISKVEVPPKVWSSNSKTTPSSVLTAQSLRKFRDSEENRTKIPPAVRQSMAKNRSESTPKTHNEEKPANRHHSGTKARSEARNTRDSSEIENEFAGDEPTFHFNRTAKKLPTKVMSRQSQNIDVSVRASVRGEMEPLTEGRQRRNWSKPPHAERTNMPLPDIRRSVSLPRGKNPLV

SEQ ID NO: 57427 - protein, 657 aa, Zea Mays
MEKLRSLCACCMGPPRPASPACATAGVTVKVSDRYVEIKNGIFDLTLSNPDGIVTGVRYNGVDNLMEILNKEDNRGYWDLVWNPPGQKTGIFDVIKGTEFRIVYQDENQAEVSFTRNWDPSLEGKAVPLNIDKRFIVLRGSSGFYTYGIYEHKEGWPDFGLGETRVAFKLRKDMFHYMALADDRQRIMPMPDDRLPPRGQPLAYPEAVLLVDPINPELRGEVDDKYQYSCEDQYNNVHGWMSFDPPIGFWQITPSDEFRTGGPLKQNLTSHVGPTMLAMFLSAHYAGDDLSPKFTNGEYWKKVHGPVFMYLNSSWDASDPTMLWEDAKVQMMIEKGNWPYCFALSEDFQKTEQRGCVSGRLLVRDRYIDDQDLYASGAYVGLALPGEAGSWQRECKGYQFWCRADVDGSFYIRNIVTGNYNLYAWVPGFLGDYKLDATVTIASGDDIYLGDLVYEPPRDGPTMWEIGVPDRSAAEFYVPDPNPNYVNRLYVNHPADRFRQYGLWERYAELYPDSDLVYTVGQSDYSTDWFYAQVNRKIDDNTYQPTTWQIKFDLDSVSPSSTYKFRVALASSALAELQISFNDQDRAVPHFATGLIGRDNAIARHGIHGLYWLFNIDVASAWLVQGVNTIYLKQPRSQSPFQGLMYDYLRLEGPCGC

SEQ ID NO: 57428 - protein, 404 aa, Zea Mays
MIRKLVSFNSYRPIRFQSAQFTLKDRPVRITLFSRRCNRRLGTRMWRRGANLEGATANFVETEQLVEYEDLTSSFIQLRGSIPLLWEQIVDLSYKPRLSIIEHEETHKVVQRHFHDLSQRYGKIIVADLTDKRGDEGDLSNAFAAEMDRIPGVRYIHFDFHHVCRGGNFDNLQALYNQIEEAIHKQGYFLMNTKGEILLEQSGVVRSNCIDCLDRTNVTQSFLARKSLDSQLQLMGALLSSESISLSDNIHDTFKKLWVEHGDELSLEYAGSYALKGDLVRYGRQTLPGLIKDGMSALSRYYLNNFHDGVRQDALDLISGYYTVSQGSSSPFHNGVDSSSYLPVASAIIVGGITATTFTLSQVGRNAQHLISSIICAGLTVGVVALVKANGKQFCSRPRLCGLI

SEQ ID NO: 57429 - protein, 346 aa, Zea Mays
MSRVAGSRLLPRISALSFCTASPATAAASSSSSTAAVAAAAATASEASSTAGDPSSQPPQTARKPWGALKFAAFAAVSTAVGGTGYVSYAYSLEEVDQMTRELRKKSKQPIPEDASGFERFQAMAYSAAMKVPVAAIEVYMDVRSQIEDQIRGFSEPVSDKLLPDLAPQEQHVLTLVLDLNETLVYSDWKRERGWRTFKRPGVDAFLEHLGRFYEIVVYSDQLSMYVDPVVDRLDPKGNIRHRLSRVATKYENGKHYRDLSKLNRNPAQVLYISAHAKESSLQPENSVEIKPWKLENDDTQLLDLIPFLEYVAMARPSDIRAVLASYQSGDIAAEFIERSKEHQSW

SEQ ID NO: 57430 - protein, 891 aa, Zea Mays
MAAVVPPPDNLDPQPATPPAAAPSATLTPPPAATSTPPTPLTPGPAAPSPNPNLPPAPAPAPAPAPASTPPAAVAPPMPPAPISFAATFRPLGAPAPPPPYQVPQYVAVPANPGYPMQPPGVPVVMPPGAVRLPAMYGPPQPGVYMPQQGAAIPHPGMSRYPAPYPMIRPGFVPRPMPPPGVVPIQRPTIISGIRAIPPLVAPTARPPAPAVKLADKPPTAVYVGKIAPTVDSDFLLSLLRLCGSVKSWKRAQDPSNGKPKGFGFCEFESAEGILRATRLLNKLSIDGQELVININDATKEYLKKHVEGKKRAQEKEKETEDASGDGTTAVAENESSKPVPDELDETGDAGDKYREDNTDKFGIVTDEDSQTDKDVAEKISNMIEEWLKTRPPPPPSPVQPSADSSGVDKAKNDSDDKNAADADKRAANETERSETASPDKRKDREHDKDKRDKDLERHDRERERVRRDREKDHKHREADRLYRDRLKEWESREREREYQRYSEKEKERDRDHNRRREILKQEDESDDEDNRKRKRRSISSLEDRKRRRQREKEEDLADKIREEEEIAEARRLAVELQRQADEAAAAAAAAAEESASLMEIDGDDEKETDAQNKSAVVEADNISSFANGVGAGRLSKGNNGEETCMTPGQTADTKQNNNVPAKKLGFGLIGLGKRTSVPSVFAVEDDENNVDKSIRPLVPIDYSTEELQAVHANSSTGANVTAAAEFAKRISVSNSKEEKAEAEKDRNRRSSEARPNDERREKLHDREKDKPKSENKKILDAKQLIDMIPRTKEELFAYDINWAIYDKHELQERMRPWISKKIIEFLGEEESTLVDYIVSCTKDHVQAEKMLDLLQSIFDVEAEMFVLKMWRMLIFEIKKVESGLSGRAKS

SEQ ID NO: 57431 - protein, 680 aa, Zea Mays
MLQYPNSQAQPFPTTAAVQGGFSQGCLSMPVPLTEQPLFGHERQPIDPSDQPLEFNSRKAPDLAVHINVNSNIPAPQTLAPNHDVAATSTHSWTPSATVGYLPRAPVPPQTAQMDPSVHAAPLFGAASSSSYVSPAAFGVGNVTEVFPTDPNTPFSVADKSKKPPVPNWLREELLKKKSEPLSASAQNSENLNPMEANEAVQTIGRPDQSDSRSNDSAKSTEDDDDDEDEIEAARMAAINKEIKRVLTEVLLKVTDELFDEIATKVLNEDDSAESNEATGVFGSKETGLGRSRAKASAKVVLPAKSTNSSDHKDSTGLSSPKGALLGLASYDSDDDDDADTDSKDKMPISNLSSKDNAGAVNTEGDKSTLGKRNGNHNEQNSSLGSSPSGEDLKSNNQNFQRNANAEPEQMHIRDTENGEFRFKAKTRTEPKGAFDRMDEKAHTYAEVDIQNRKTSFGNNAEKHNDLESSHRHSEKSSKEDFVNELKADHTKELEYSRAEKYNNDDKYSMYGNIDKRGSCKEGKGSDSAAKHESDTREPHYRGNSKLDGAKGDWKDLPKDRERNRDDRRGKGKDEKDDRLRQMTSHNSRSSRSRSPRGRSRTRKENSHVRGSVSSDEPSDSVKKRKHYSHKTSMSPSPPKSRNRRISRSPHSKHSHRRHSPYSSAGRKRRSRSRTPVKRR

SEQ ID NO: 57432 - protein, 1692 aa, Zea Mays
MLKECAANRGKFAALQQSIQSYLDSIKGATAEGAVITEALASAGRVLDGPQAELVLQPLRLAVETKHVKLVEPALDCLHKLIAYDHLEGDPGLEGGKNSPIFTDILNMVCGCVDNTSSDSTVLQVLKVLLNAVASNRFRVHGEPLLGVIRVCYNIALNSKSPVNQATSKAMLTQMISIVFRRMESEQVSVLPASSVVKDTPSSITNESENGEISTDGQDEEKVTPGDALSMNRPSEAPPTSVEELQNLAGGADIKGLEAVLDKAVELEDGKKVSRGIDLDTVNIIQRDALLLFRTLCKMSMKEESDEVATKTRLLSLELLQGLLEGVSNAFTKNFHFIDSVKAYLSYALLRASVTSSPVVFQYACGIFSVLLLRFRESLKGEIGVFFPLIVLRSLDSSDSSLSQKASVLRMLEKVCKDPQMLADVFVNYDCDLEGPNLFERTVSALSRIAQGSQIADTNSIVSSQTVSVKGSSLQCLVSILKSLAVWEQLRRYSLKQGSIVESHEGDASRSVTTDEMKSQEDVRNQFERAKAHKSTLEAAISEFNRKPTKGIEYLLSNKLIENKASSVAQFLKSNPGLDKVMIGEYLGQHEEFPLAVMHAYVDSMKFSGLKFDAAIREFLKGFRLPGEAQKIDRIMEKFAERYCADNPELFKNADTAYVLAYAVIMLNTDAHNPMVWPKMSKSDFVRMNTASDAEECAPKELLEEIYDSIVKEEIKIKDDSHDTSKTTKRPETEETGRLVNILNLALPRLKSASDTKAESEKIIKQTQALFRNQGQKKGVFHVAQQVELVRPMLEAVGWPLLATFSVTMEEGDSKPRVVSCMEGFRAGIHLTRVLGMDTMRYAFLTSLVRFTFLHAPKEMRSKNVEALKTLLGLADTDMDALQDTWNAVLECVSRLEYITSNPSISATVMLGSNQISRDSVVQSLKELAGKPAEQIFVNSVKLPSDSIVEFFTALCGVSAEELKQTPARVFSLQKLVEISYYNMARIRLVWARIWSVLAQHFIAAGSHHEEKVAMYAIDSLRQLGMKYLERAELNNFTFQSDILKPFVILMRNSHNSKIRGLIVDCIVQLIKSKVGSIKSGWRCVFMIFTAAADDEDESIVESAFENVEQVILEHFDQVVGDCFMDCVNCLIGFANNKCTPRISLKAIALLRICEDRLAEGFIPGGAVKPIDVVPEANFDVSEHYWFPMLAGLSDLTLDSRPEVRHCALEVLFDLLNERGHKFSSPFWESIFHRVLFPIFDHVRHAGRDGLSSSGDDWLRDTSIHSLQLICNLFNTFYKEVSFMLPPLLSLLLECAKKTDQTVVSIALGALVHLIEVGGHQFSDGDWDTLLKSIRDASYTTQPLELLNSLRFQKSKHQQLLSREESNAQGNSYLDSQGEPSISDSNNGEHNHPEAGLQTILENSEDLPSPSGRTQPAVFPRGQSFGQRIMGNMMDNILVRSLTSKSKGRTDDIAPPSPVKAPDDEADKAEEEESPMMETVRSKCITQLLLLGAIESIQKKYWSRLKATQQIAIMDILLSLLEFASSYNSPSNLRTRMHHIPPERPPLNLLRQELAGTTIYLDILHKSTVEQDEKDSIEETNGLNVESDDQEKIKYLAEGKLVSFCGQVLKEASDLQPSTGEAASADIHRVLDLRAPVIVKVLKGMCIMDAQIFKRHLKEFYPLITKLICCDQMDVRGALGDLFSKQLTPLMS

SEQ ID NO: 57433 - protein, 88 aa, Zea Mays
MLWKMSRHLTCFCFSILSPFFPHSIECHSCNGRLVVPLLSTVYQMLDVVLIRFFISPCMEFVYFDVFRISDVMVFVCWRPEMTVVCNI

SEQ ID NO: 57434 - protein, 179 aa, Zea Mays
MDILLSLLEFASSYNSPSNFRTRMHHIPLERPPLNLLRQELVGTTIYLDILHKSTVEQDKIDSIEETNGLNVESGDQEKIKYLAEGKLVSFCGQILKEASVLQPSTGEAASADIHRVLDLRAPVIVKVLKGMCIMDAQIFRRHLKEFYPLITKLICCDQMDVRGALGDLFSKQLTPLMP

SEQ ID NO: 57435 - protein, 640 aa, Zea Mays
MISARTAAASPASLWKRGGQSEGGGSCDGCRTYRNTLRRAAAAKVRALPSRAVEAVKMGSAAEVEQEEAEVAAAADGVVVEDHYGEDSATEELPIMPWAFSVASGYTLLRDPHHNKGLAFMEKERDAHHLRGLLPPAVVPQELQIKKIMHNLRQYQVPLQRYMAMMDLQERNERLFYKLLIDNVEELLPVVYTPTVGEACQKYGSIFRQPQGLYVSLRDKGKVLEVLRNWPHRNIQVICVTDGERILGLGDLGSQGMGIPVGKLALYTALGGVRPSACLPITIDVGTNNEKLLNDEFYIGLRQKRATGEEYHELMEEFMAAVKQIYGEKVLIQFEDFANHNAFNLLAKYSKSHLVFNDDIQGTASVVLAGLLAALKVVGRTLAEHTYLFLGAGEAGTGIAELIALEISKQTSAPIEECRKKIWLVDSKGLIVDSRKNSVQSFKKPWAHEHEPLTTLYDAVQSIKPTVLIGTSGVGRTFTKEVVEAMASFNERPIIFSLSNPTSHSECTAEEAYNWTQGRVIFASGSPFDPVEYDGKVFVPGQSNNAYIFPGFGLGLVISGAIRVHEDMLLAASAQATQENFDKGSIFPPFTNIRKISARIAAAVAAKAYELGLATRLPPPRDLVKYAQSCMYTPVYRNYR

SEQ ID NO: 57436 - protein, 56 aa, Zea Mays
MGMSEEDATNYAVQNGWSLDAAAKMLTVKKPKSQTNQKLDASKLQRLTECVFHLEN

SEQ ID NO: 57437 - protein, 984 aa, Zea Mays
MNDGSIEELAPASAEEIIDSVREDSPQKEQSAEDQAVAGEVVEDVGVDKPTEVENVDATSADGILSRELAPESIKETNGTGEIEGATEVVDHEEEAADNDIIEAVPDDADGDGNEAEDDDDGTNSDTSPARVAILESSEAAKQIMKELAEGSSSGSISRDFTNSMDGQIMLDDSEDDDDDNDDDGDEKGFDSAALAALLKAATGGSSGGDITVTSQDGSRIFTMDRPAGLGSSAPSLRPTAPRQSARSNLFSPSELAVTADPTEEMTEEEKKLHDKVELIRVKFLRLVYRLGATPEETVAAQVLYRLSLAEGIRHGRQTNRAFSLDNARRKALLLEAEGKEDLNFSCNILVLGKTGVGKSATINSIFGEEKSRTDAFSSATTNVREIVGDVDGVKIRIIDTPGLRPNVMDQGSNRKILAAVKNYTKKCPPDIVLYVDRLDSLSRDLNDLPLLKTITAVLGSSIWFNAIVALTHAASAPPEGLNGAPMTYEVLMAQRSHIIQQSIRQAAGDMRLMNPVALVENHPSCRKNREGQKVLPNGQSWRHQMLLLCYSSKILSEANSLLKLQDPNPGKLFGFRFRSPSLPFLLSSLLQSRAHPKLSAEQGGNEGDSDVELDDYSDVEQDDDEEEYDQLPPFKPLTKAQLARLTKEQKNAYFDEYDYRVKLLQKKQWKDEIRRLKEMKKRGKTDLDDYGYANIAGENDQDPPPENVSVPLPDMVLPPSFDCDNPTYRYRFLESTSTVLARPVLDAHGWDHDCGYDGVSVEETLAILSRFPANVAVQVTKDKKEFSIHLDSSIAAKHGENASSLAGFDIQTVGRQLAYILRGEAKIKNIKKNKTTGGFSVTFLGDIVATGLKVEDQLSLGKRLSLVASTGAMRAQGETAYGANLEARLKDKDYPIGQSLSTLGLSLMKWRRDLALGANLQSQFSIGRGSKMAVRLGLNNKLSGQITVRTSTSEQVQIALLGLVPVAASIYRSFRPSEPSFAY

SEQ ID NO: 57438 - protein, 412 aa, Zea Mays
MEKRNLQWRRGRDGIVQYPHLFFAALALALLVADPFGLSPLAEVDYRPVKHELAPYGEVMGSWPRDNASRLRRGRLEFVGEVFGPESIEFDLQGRGPYAGLADGRVVRWMGEEAGWETFAVMNPDWSEEVCANGVNSTTRKQHEKEEFCGRPLGLRFHGETGELYVADAYYGLMVVGQSGGVASSVAREADGDPIRFANDLDVHRNGSVFFTDTSMRYSRKDHLNILLEGEGTGRLLRYDPETSGVHVVLKGLVFPNGVQISEDHQFLLFSETTNCRIMRYWLEGPRAGEVEVFANLPGFPDNVRSNGRGQFWVAIDCCRTPAQEVFAKRPWLRTLYFKFPLSLKVLTWKAARRMHTVLALLDGEGRVVEVLEDRGHEVMKLVSEVREVGRKLWIGTVAHNHIATIPYPLED

SEQ ID NO: 57439 - protein, 69 aa, Zea Mays
MRRRSATAASKHRREIAQRLHQPRARRGHVHHRCTPANHPDQSPRDRRWHTRGTAFATPATIPDDGDEV

SEQ ID NO: 57440 - protein, 571 aa, Zea Mays
MDIPLSAMCKSPESTHSPNSLLSEKSSPQGSHVIVNLVPMNGLHCASSGHSAPVDNQAILSDMGVFDGELHESVSGRSVDAYDMLPIAELRKKMASARRNCAVQHTEEQHVKSLRVKKCISNSKDKKTRPIQELMGEIQLKGNKNFSRDFVLALGVSRDGPTTLSPDRLVSIGPKRCSSTKVLACKKLAKRRGSKELCSPNSSLDVTRTDQQGGRKEVAEAMKECSLALECPKSDAQGQLDRTLEDAKNITELSNQENLLSMLPPGFKSVSNRKGTNIHDAQLGEEPAVMTNNSLIEPNGNDDMCTDHAATTKLAENYNVMETAIMSIDCPAQQPCGEVDERSVLGLKNAGSTQCIIDSSPSSESLLPSPQALFVKSSPVWHIVEAMHVFKELPQQPHFIPLQEVPPTLREGMALGMMVSFADLVKVTMEASIGNDMEWFEDKIRTISHLEANGFSVQSIQSAMTEMVKVKTEHTSYHCEIGKLSSKLVENMASSSRAGALLDEKDEAAARLEEELVSIRQESQKIAKEKEKIDAEVVSIKTACSGYEDLCSGVERKFKEVLAGLQRKRLT

SEQ ID NO: 57441 - protein, 93 aa, Zea Mays
MDTNDGHTQVVSPVVGLQSYNDKGEQWFQLRCPDLKQLPIEDSLKTSPAEVHKERLRTLKMGALAMARAVVPKGSGESVNHHPDYEFFLSRCA

SEQ ID NO: 57442 - protein, 233 aa, Zea Mays
MASGATLSWVKTPFDTRRFHDLSNLSFRCRNPFGSIQPWWLQTDQDSSLIKVRVAADYSDSMPDSKYTRDRGYHPLEEVKERPKKKDLLLTDIETARTVVEANSKGLLVFPARVHNEPHGHVSWSEFQYVVDEYGDIFFEVPDSENILEDDTANNPVTVLIGMDGPIIGESSVAISDFSDYMDGENFMDVPDEHHTKIDTEITDILIEWGMPATMRAIHPIYFAKCLTKVSDK

SEQ ID NO: 57443 - protein, 288 aa, Zea Mays
MLLLHSSLDMSVVHYTHVMEVWAYLSCKIELYTYSSIRCSVVLNPFGGGAGKNWIKAMAMTASLFPFMCFGIGLVLNTIAIFYGSLAAIPFGTMVVVFILWAFISFPLALLGTVVGRNWSGAPNNPCRVKTIPRPIPEKKWYLTPSVIALMGGLLPFGSIFIEMYFVFTSFWNYKVYYVYGFMLLVFLILIIVTICVTIVGTYFLLNAENYHWQWTSFFSAASTAVYVYLYSIYYYHMKTKMSGFFQTSFYFGYTLMFCLGLGTLCGAVGYLGSTLFVRRIYRNIKCD

SEQ ID NO: 57444 - protein, 189 aa, Zea Mays
MSLSLFSDVADYYWFCCKMDTEATLNKSGGSESVMSLLEQLAEVFGNLKSHTEAFLQLQNGMQWEDIKGHFLSLDKSYGSKFDELVEKQKALEEKKAEACRLIAEKEADISIKERASLNQLQELRDAAVSSLAEVRQKYKVELAEILDTSESKYKKVSLRSWLRGTGKLMQFISYKLSGFQRHSPLHHC

SEQ ID NO: 57445 - protein, 153 aa, Zea Mays
MRDGELNSLCRGLDKAFQVYTQLVTAPLVDKEDLAPPIPVLTRYKKELGIKAFVKKEVQEVRTVDERKASEITQLTMPKLCVRLNSLYDEKVKSQRVPSLIRRINLMAAEKKSILLLIVSVNLLGQRLYSGTCSSHLLRIYTEMVLLKLDWTP

SEQ ID NO: 57446 - protein, 131 aa, Zea Mays
MVTLIGTSVANASIDPAQSLHGSNLSPPTVLQFGKTRKLSERSDPRNRQLLQKRQFFHSHRAQPMQLEQVFSDRDSEDEVDDDIADFEDRRMLDDFVDVTKDEKLIMHMWNSFVRKQRWCYVTIHKGGMTR

SEQ ID NO: 57447 - protein, 204 aa, Zea Mays
MSSSKTYTGLPVLMDLCLFGTLPLLMGNRQGENLLIDLFRHCDNHLGEKQKTPSGSARQPLQLTNDVTKMMQKHQLETPQFHQTRFSVLQNVPRSTEKDVSFLIPHSWLPAMLDDQMSFPSLRQTRTTGCFRLHPIRDEDAKFKLCNRRSVQFDVGNMVMVTGGRNTGRVGVIKNWEKHKGIFEENIEWNSNLVVVKVWRLEFK

SEQ ID NO: 57448 - protein, 64 aa, Zea Mays
MIWPRSNVLCCFHTYTKLVLYLPKQKNAEPTISKCSTILFVYVRARSFKCKRQSCSPCQRMEKV

SEQ ID NO: 57449 - protein, 774 aa, Zea Mays
MRHEGPGLSIRHDAAGSMAGAIFMSNSVTRDQCFQASIFGLPLEYRSFVSHIRKGMPLFLFDYTLRKLYGVFEAASDGGFNINSDALRSVRRSYPSQVRINIIWKCKPLSEDEFFPAIEDNYYRPRKFYFDLSYEQVVRLYELFGNKRVGRPIHDYQKNECLQTNRSSKGIPDKESLTPDPHSSNQSRLLVPNISEIIRYSTPTSIHTDLPLNVEAYPSTLMPLGTEVNGAKIAPTFSSHSDQIEPFSQSEFFPAASMTDAVSTQVSAPCSETNNQLVGQSHPLPHNYPQNIFSAGFTAQDPIEGSKFVANQLYSLCRDYMHDGLLTSGYGTQNRTYKGMNHLNSTCPPYDPLHPFLPVSNNFDYQAQCDIYSNQGCPDTCNDICAYECECLSEEVVAAEELNQRGISTCPQVLGWDGKAVSAIHQQNMCSTDYFQISDRDEDSENDQMKHGTHSNASDSSDRENGIVDPRHTQHAVGTENNTKDQCSQPKKGVFSRLSVRKELTSQDATGSTLNQLVSSLVRKTEQWSHNNRPIEDGLIIPLIGEQADCSHAALNLLSELELDKDVSIEPQLPFLNFKRRSEAGKVDANLGKEISGKMKRRKLVRPSLGENNDSTNFGEQLIGNCTQDKNQNHQESENHFDIDLNIPAAPIDDGPVEVNRIAVCPSVVIKVQTEKPYEIDTNKVNSNVMETTEEHDPSSAPTQKVIPDFNMADLNTMDESKLRTILEHTSSLLQALAEVKNGESNNCEQAKSSFEDKKVNMAYSDGATKSECD

SEQ ID NO: 57450 - protein, 211 aa, Zea Mays
MWSPQASFEEVDVAWRHYEQAGTGLAAIFINLAVENFSGWKYTATFAIIKHSYFVGFFVYTVFNLALVFSSVYIVTNFAPAAAGSGIPEIKGYLNGVDTHGILLFRTLVGKIFGSIGSVGGGLALGKEGPLVHTGACIASLLGQGGSAKYHLSSRWVRIFESDRDRRDLVTCGCAAGVAAAFRAPVGGVLFALEEVTSCYSFSCWQQILQY

SEQ ID NO: 57451 - protein, 1493 aa, Zea Mays
MLAAVMADSGDAAMAVVLGWSSSWICGEEDGGRLTLTVASKCVQRTLIDCVNVVLFIAYVCTLAAACVRRRQRSADASSGRSGAPSRWVLLVVSTCCVAAAVAYCVTALQDAYDIKTAVPYFVRGLVWIALAASLHAQPTRPARVVAVLWWVLLSLLATAYNSEILAGGHSLDLAEMIAWPVSLLLLLCALGSLLPRGDGHHYRDASNGSSGLSEPLIGNDRTVPTSELYRAGLFGQLAFSWLNPLLRVGRSKALDLGDIPLIATDDTAHHTSQQFTEAWSRHVSDKARSRRGVGSNSLALVLGKCFLSEILLTGFYAFLRMLSIAVAPLLLFGFVWYSNQEERDLRVGLSLVGCLLLAKLVESLSQRHWFFSSRRTGMRIRSALMAVIFQKQLRLSIQGRNNHSTGEIVNYIAVDAYRLGDAISWLHMGWTSPLQLVFAVATLFWALKLGALPGLVPLVIFGFLNVPFAKMLQGYQAKFMVAQDERLRSTSEILNSMKIIKLQSWEDKFRSTIESLRDGEFKWLRQTQMKKAYGAVMYWMSPTVVSAVMYTATAIMGSAPLNASTLFTVLATLRVMSEPVRMLPEVLTMMIQYKVALDRIEKFLLEDEIREDDVKRVPSDDSGVRVRVQAGNFSWKASGADLSLRNVNLRVNRGEKVAVCGPVGSGKSSLLYALLGEIPRLSGSVEVFGSVAYVSQSSWIQSGTVRDNILFGKPFNKELYDKAIKSCALDKDIENFDHGDLTEIGQRGLNMSGGQKQRIQLARAVYSDADVYLLDDPFSAVDAHTAAVLFYECVMTALAEKTVVLVTHQVEFLTETDRILVMEGGQVSQQGKYSELLGSGTAFEKLVSAHQSSITALDTSASQQNQVQGQQESDEYIVPSALQVIRQASDIDVTAKGPSAAIQLTEEEEKGIGDLGWKPYKEYINVSKGAFQFSGMCIAQVLFTCFQIASTYWLAVAVQMGNVSAALLVGAYSGLSIFSCFFAYFRSCFAAILGLKASKAFFGGLMDSVFKAPMSFFDSTPVGRILTRASSDLSILDFDIPYSMAFVATGGIEVVTTVLVMGTVTWQVLVVAIPVAVTMIYVQRHYVSSARELVRLNGTTKAPVMNYASESILGVVTIRAFAATERFIYSNMQLIDTDATLFFHTIAAQEWVLIRVEALQSLTIITAALFLVLVPPGAISPGFAGLCLSYALTLTSAQIFLTRFYSYLENYIISVERIKQYMHLPVEPPAIIPDSRPPTSWPQEGRIDLQDLKIRYRPNAPLVLKGITCTFAAGNKIGVVGRTGSGKSTLISSLFRLVDPAGGRILIDKLDICSIGLKDLRTKLSIIPQEPTLFRGTVRNNLDPLGQHSDEEIWEALEKCQLKTAISTTSALLDTVVSDDGDNWSAGQRQLFCLGRVLLRRNKILVLDEATASIDSATDAILQKVIRQQFSSCTVITIAHRVPTVTDSDKVMVLSYGKLLEYETPAKLLEDKQSAFAKLVAEYWANTKRNST

SEQ ID NO: 57452 - protein, 412 aa, Zea Mays
MLLVLPMMMEIGLEKGFGRALAEFVIMQLQLASVFFTFHLGTKTHYYGRTILHGGAKYRATGRGFVVRHAKFAENYRMYSRSHFVKALELLILLVVYLAYGSSYRSSSLYLYVTVSIWFLVFCWLFAPFVFNPSCFEWHKTVDDWNDWWKWMGNRGGIGLAPEQSWEAWWVSEHDHLRNATIRSLLLEFILSLRFLIYQYGIVYHLHIVHGNKSFLVYALSWLVIAVALVSLKVVSMGREKFVTRIQLVFRILKGIVFLVLIGLLVLLFVGFDLAVSDVGASILAFIPTGWFILLVAQLCGPLFRRLIIEPLHLLCCPYGTGGACRGPCCARFRQRTGAALRKMGPWDSIQEMARMYEYTMGLLIFLPIAVLSWFPFVSEFQTRLLFNQAFSRGLQISRILAGQNGSGTKSD

SEQ ID NO: 57453 - protein, 135 aa, Zea Mays
MGPSTSAPRPRSCGAPSAGVMIPHKTKRGEAALARLKTYEGVPPPYDKTKRLVIPDALKVLRLQPGHKYCLLGELSKEVGWNYHDTIRELEEKRKEKAKVAYERRKQLAKLRLKAEATAEEKLGSQLDILTPIKY

SEQ ID NO: 57454 - protein, 522 aa, Zea Mays
MQSLKKILHPTSSSKINTISTSDISASTDTLLDSCIAPHLLKASVISNAEILQPGAILSMSEVWEKDVAPNANEASSEVANILPLMWMHPGKHDILLSDCRELWDSRQTINPPVSDEVLCKEKHSERIKFFCLDSGNDQEQTTQEKDNFIRSCPVILLKHAREGIPSLGWSIILPLSWVKPFWLFLVSHGAHAIGLRERRWIAAKLRMPCFPYDYPDSKAYASYMSKEAAGFDKVVERRPVAKRPPRVPVPPLWHCIMTCFRKDYDGILGVLEVDDLVRANMVLPKNSSAHCESGDAEPSQANVASLQLHVPRTTQMLRQYVEEFDRKYLSSSSDMKVDSDEPNLASDNTVGMTRFASELCLTRVLIRAFKEGSFEEGAVVCAPLPAELSAWKIRSKEEEEECVEKWELQLPQSHVSSYFSWFDPSTSSLQLPTDGVAREAFRWPIGFVTSGFIHGSNGQDAVAVAFCEAKLLAALRRQQWTHGNLQSREVCVLVRNARSAAYRRALATTVLEHQESDLAFL

SEQ ID NO: 57455 - protein, 938 aa, Zea Mays
MEEPGREGDSPGPPWAPSESSAFRAFVTAVGERAVASPSGSDNGDSVCSSNLRAVRKRPFVARLTTYIIQTFEKCNPEFKYSESLNPKRFLTNPAVPVHNHGLDNANSDLILYVNLELLNKKSSRRYVVQEMLGQGTFGQVAKCWDAETNSYVAVKVIKNQPAFYQQAIMEVSLLRLLNEKFDPDDEHHIVRMLDFFLYQNHLCIAFEMLGNNLYELLKRNSLRGLQMKYVRTFSRQILDALIIMKDAGIIHCDLKPENILIAPTVKTAVGVKVIDFGSVCMEGKTIYSYIQSRYYRSPEVLLGYPYTTAIDMWSFGCIVAELYIGLPLFPGASEYDVLCRMIEIIGGQPPDDLLREAKNTGKFFKHVGSIYPSSEARNGASSAYRILSEDEIEARDSKKPKVGRWYFPRGRLDRLIYTYPWKNLSEGNLPEKADCLALVDFLRGLVEFDPNKRWSPLQASYHPFITGEAFTGPYEPVQETPRIPVGRAAVVDHNPGGGHLLGAGLSPQVGSINRCLRFNNALQPNMPFSYGSSCGSFGSHGSFNDNAGFSYGSYDFNSVDIYNSPMDPSGFNLRSQLGGSFLGSSPHIRRRPHLSHGGGIRLSPGGPGHMSLGASPSQFTPPNSQMQIPTGPNGRYGASPSRGGHGSSLGKVAVVGQYNRRRNQGYPPMPMPPHEHTSQLIQGHQGDGVSTARFGAYAQGNSTYLHNALPNSSHYSWRSQRGSGSGLPLDPSSSRGSFPPTNYYGFPLHSDASADTLPSTSSVSDPADWDLNSSDKSLLQEDRTLSAGLSDLRLIDASGQTNRSSRLAPFQSHDILSSNPSTMNQRNGHLFHASSLGESTHTPGHVTLDGYEHTTYSQRSFPIYRGQPFQQYNNMTSSYIRPMRAHHNGQPVWSNYRLTEPPPTTMGDGMLWGGRGGHSFAASGLPPTLRKDFGRIF

SEQ ID NO: 57456 - protein, 642 aa, Zea Mays
MPELRSSTRQACLRSKKLEDLQLGEPPAKPVSPAPPRAGKRAPTRAARGRKGATGKGVPPAPTTRRKRGNIVDLEADPACEDPPKAVKGLEVAAAAAPKNLPLKEVAEVGVLKMNGVSAEKIIGAEDESTATPVPERVQVGNSPEYITDRKLGKGGFGQVYVGRRVSGGAARTGPDAYEVALKLEHRNSKGCNYGPPYEWQVYNTLNGCYGIPSVHYKGRQGDYYILVMDMLGPSLWDVWNSMGQAMTPNMAACIAVESISILEKLHSKGFVHGDVKPENFLLGQPGSPDDKKLYLIDLGLASKWKENNGHHVDYDQRPDIFRGTIRYASVHAHLGRTGSRRDDLESLAYTLIFLIRGRLPWQGYQGDTKSFLVCKKKMATSPEMLCCFCPAPFKQFLEIVTNMKFDEEPNYAKLISIFDGLIEAPASRPVRIDGALKVGQKRGRLHANLEDEQPKKKVRLGSPAAQWISVYNARRPMKQRYHYNVADSRLSQHIEKGNDDGLYVSCVASSANLWALIMDAGTGFCSQVYELSPVFLHKDWIMEQWEKSYYITAIAGSTNGSSLVVMSKGTPYTQQSYKVSESFPYKWINKKWKEGFHVTSMATAGNRWGVVMSRNSGFSTQSWTSCTLAKAFIGDGRVVTG

SEQ ID NO: 57457 - protein, 310 aa, Zea Mays
MMIPWGGVGCCLSAAALYLLGRSSGSDAEVLRSVARAGSMKDLAAILDTASKVLPLVVAISGRVGSDTPLICQQSGMRGVIVEETAEQHFLKHNDAGSWIQDSAVMLSVSKEVPWYLDDGTGRVYVVGARSAAGLILTVASEVFEESGRTLVRGTLDYLQGLKMLGVKRTERVLPTGTSLTVVGEAIKDDVGTIRIQRPHKGPFYASSKSIDQLIVNLGKWAKLYRIASMGFATFGVFLLAKRALQHFLERRRRHELQKRVLNAAAQRQAREAEGSKGTSDAEPNSKKDQLVLDICVICLEQEYNAVFVP

SEQ ID NO: 57458 - protein, 443 aa, Zea Mays
MADIVIRDLERVVKVALAIKKAVETAKQNKEDCVKIGERAAEVSTHMKRLKENTKAMEDPLMSDTLKSMEETLQRALKLVNECQRKHVVLHYLNAGGMSKKLRQVQEDISYKLWNGVLATVVDTRIALEKQIQSAIDAPLHQHQQRAGQVETSQSSHSRTDQASEKGKAMLARVKREQSELLSEGCVVERGYYKGVLHDGLDVAIKKLAVSDDTQERRLQLELNIRAKLEHGNILKLLGYCLDAQEKEKLYFLVEEYIPNVESLEKFINVSRLDWSSCFKIIQGIAKGLHCLHKHHILYMDLNPANILVRSDMNPVVINFGSSIVLDRDDDKVTGDAVAGTLGYVAPEKLMEAYASMMSDVFSFGIIIIEIITGRRASPFVDLPEWGSVDEMITSAKGLFDPALANESQLMKINRCREVGLKCIERDPKRRPTMGNVLEMLSS

SEQ ID NO: 57459 - protein, 114 aa, Zea Mays
MEAGDDGKQNATCEVSLKTGTTVHDFRQEMSWYGPIYALTAMPLPYLCIIFVNPLVSCLINHMASSSRNLPSIFNEENGRLRYLIKDKSNDNSITKFNLPLMEAITFLTNSSTW

SEQ ID NO: 57460 - protein, 149 aa, Zea Mays
MHSSKFCLHPAGDTPSACRLFDALVSLCVPVIASDYIELPFEDIIDYNKISIFVGTSKAVQPGYLTSTLRRISSERILEYQREIKKVRHYFEYEDPNGPVNEIWRQVSLKAPLIKLLTNRDKRLLERGTNGTDCSCICSTTPTDITAAS

SEQ ID NO: 57461 - protein, 250 aa, Zea Mays
MKSHIASSDFEGIVQVWDVTRSQVFVEMREHERRVWSVDFSIVDPTKLVSGSDDGSVKLWDMNQAGSIGTIKTRANVCSVQFQPDTARSIAIGSADHKIYCYDLRHIRAPYCTLVGHTKTVSYVKYLDASTIVSASTDNSLKLWDLSMSPGRIIDSPVQTFKGHTNTKNFVGLSISDGYIATGSETNEVFVYHKEFPMPVLAYKFSVTDPISGQEIDDQSQFISCVCWRGQSSTLLSANSSGNIKILEMD

SEQ ID NO: 57462 - protein, 331 aa, Zea Mays
MIAYQGDLGYQDAVDSADAVAKLLNVSTDNILIQSTGVIGQRIKKEALLNSLPRLVGSLSSSVQGANSAAVAITTTDLVSKSIAVQTEIGGVAIRIGGMAKGSGMIHPNMATMLGVLTTDAQVSSDVWREMIRMSVSRSFNQITVDGDTSTNDCVIAMASGLSGLSGIQSLDSIEAQQFQACLDAVMQSLAKSIAWDGEGATCLIEVTVSGANNEAEAAKIARSVASSSLVKAAIFGRDPNWGRIACSVGYSGIQFDANRLDISLGVIPLMKNGQPLPFDRLTASKYLKDAGDAHGTVNIDISVGSGGGNGKAWGCDLSYKYVEINAEYTT

SEQ ID NO: 57463 - protein, 592 aa, Zea Mays
MMETKLVENEAAMSMLRENYEKRILDEQVKLKKEARKFQEEEAFLQDQLASSRRTVTSLTEEVQREKELVEQLNLEIDRLKSSIAEAEEDKHLSEGKLKENMEVLDILYGKVNLLSQEVNGKDEHIRELSSSLSAKEKDYENLNVICNQAKEDLEQANSQIKQVEKDVRTAKDDLKSKASLINSLNEKVQTLYTEKGEVEEKLSALVSQYTYLKSASEERASHDSELLVQKDDMLNQLEEKLSAALSDSSKDRTRIAELNNELVTTRTILDNEVVANKKLSDLVQFTEEALTGSRNEVFKLSEELDAVKRSNQDLMTQISKLTDEASEVRQALANKIEQAESVYATLSDELASVREVLKKSEGELEITSKQLVLVSEAHSDLNKELLDAYKQLESTQSELVKERKINATLNMELEALVKQSVIESEARKTLQVDLDEATRSLNEVNKSTLCLSKQLETTNSKISAIKEEKDMLSKFLEEQKKSTVEAQENMEDAQNTIKRLGTERESFEVRSKKLEEELATAKGEILRLRRHISTGGSPNTQVLSEAGAAPISSRALKQQPMNDHVQNINGADAVASRSPKRIYRRKRKPAA

SEQ ID NO: 57464 - protein, 1100 aa, Zea Mays
MFGLQASGAAASWVVGRMGTDAHLYDDPDDASIPELLDSRFDADKVDALKRLLALIAQGVDVAHLFPQVVKNVASQSLEVKKLVYLYLLHYADKRQNEALLSINIFQKDLSDINPLVRAWALRTMAGIRLHVVAPLVLVAIKKCARDPSAYVRKCAAYALCKLCDLIPDENAALEEIVDTLFSDNSPGVVGAAAVAFKSVCPSCLPLVSKHFRRLCETLPDIEEWTQIVLIEILLRYVIARHGLVKDSLLFASDLPTEIHGVTDSDAVASVPTQSDSIVNGVSDTISSIMLFRHYIEQCSGSSDREGNNLELSSVTANNNDDVTILLKCTSPLLWSRNSGVVLAAASVHWIMAPIGDMKKIVGPILFTLRSSPDAAYVMLGNIVVFVKTMPSLFAPFYEDFFVNTSDPYQTRALKLEILTTIATESSIPAIFEEFQDYIKDPDRKFVADTVAAIALCAQKLPSIATSCLEGLLALVFYESFISNSVHLDGEDAVLVQAILSIKAIVKMDPVSHEKVIVRLVRGLDKLKEPAARSLIIWMFGEYSFMGDLTTKIVPPVLKYLAWSFVAEVVETKLQILNSSAKVIMRCTEEDMEEFKSIVAYVIELATCDLNYDVRDRARLLSRLLPCYMTHQGSSHQPQNGDIYKELANHIFNGKLQPTSHPASNYRIYLPGSLSQVVLHAAPGYAPLPKPQSMELNHNVTAAIRGKAKLSGSDSDAESGSSTYESSSVYDSESEGAGLSDRDTVESHQAQEDNQDAPLVQIYDASIQQGQAGQNTEENLADLISTDLTELMSKSALESWLDEAPAEPVVQNLTQTSSARVSFTNRNFERKPKLHTLLDPSGSNGLSVLYAFSPEVSPRSRLLVCVDLYFENVTTQQLTDITIESEEASSSVDFIDQTSEGYSGVPTIVPVEGIHSLAPQQMAKLVLQVHFHHHILPLKLSVFCNGKRHPAKLHPDIAYFVRPLPMDLNTFLCKENQLRGMFEYARRCAFKDHLQKLGHEDSAEHIDKNLQVAQSVASKILSNANIHLVSMDMPVTFSVDDASGLCWRFSGEILSTSKPCLITILAEGRASGPLDLAVKVNSEDTVFALNLLNRVVAIID

SEQ ID NO: 57465 - protein, 172 aa, Zea Mays
MEGPWAAMATTGIFLAAAVTDWLDGYIARKMQLGTPFGAFLDPVADKLMVAATLVLLCTKPLESSLLNDGPWLLTVPSIAIIGREITMSAVREWAASQNSKVLEAVAVNNLGKWKTATQMTALTLLLASRDPSLPAQGALVAPGVALLYVSTGLAVWSLVVYMRKIWRILLK

SEQ ID NO: 57466 - protein, 187 aa, Zea Mays
MHLHTLPLQRLKHTHTHKTVLVRGLFQQSPPKLRRGDVRLSQERRLVVSVDDEKGLLFLLCTAVLGHVSSVATVEASPTVAAPSAYGARAVAIVVGVVVAVATATSFLAATTSSITPVRTILAAPTRLPLLLSEKQAPKLICRLLQAEAVLRHTEPPDELLQRHCLEVAQHLDGRRDLIELRWNNAK

SEQ ID NO: 57467 - protein, 1128 aa, Zea Mays
MSLPSNNRRTCSRSSSARSKHSARVVAQTPVDAQLHAEFEGSQRHFDYSSSVGAANRPSASTSTVSTYLQNMQRGRYIQPFGCLLAVHPDTFALLAYSENAPEMLDLTPHAVPTIDQRDALGIGVDVRTLFRSQSSVALHKAAAFGEVNLLNPILVHARTSGKPFYAILHRIDVGLVIDLEPVNPADVPVTAAGALKSYKLAAKAISRLQSLPSGNLSLLCDVLVREVSELTGYDRVMAYKFYEDEHGEVISECRRSDLEPYLGLHYPATDIPQASRFLFMKNKVRMICDCCATPVKVIQDDSLAQPLSLCGSTLRASHGCHAQYMANMGSVASLAMSVTINEDEEEDGDTGSDQQPKGRKLWGLVVCHHTSPRFVPFPLRYACEFLLQVFGIQLNKEVELAAQAKERHILRTQTLLCDMLLRDAPVGIFTRSPNVMDLVKCDGAALYYQNQLLVLGSTPSESEIKSIATWLQDNHDGSTGLSTDSLVEAGYPGAVALREVVCGMAAIKISSKDFIFWFRSHTTKEIKWGGAKHEPVDADDDGRRMHPRSSFKAFLEVVKWRSVPWEDVEMDAIHSLQLILRGSLPDEDANRNNVRSIVKAPSDDMKKIQGLLELRTVTNEMVRLIETATAPVLAVDIAGNINGWNNKAAELTGLPVMEAIGRPLIDLVVTDSIEVVKQILDSALQGIEEQNMEIKLKTFHEHECNGPVILKVNSCCSRDLSEKVIGVCFVAQDLTRQKMIMDKYTRIQGDYVAIVKNPTELIPPIFMINDLGSCLEWNKAMQKITGIKREDAINKLLIGEVFTLHDYGCRVKDHATLTKLSILMNAVISGQDPEKLFFGFFDTDGKYIESLLTVNKRTDAEGKITGALCFLHVASPELQHALQVQKMSEQAATNSFKELTYIRQELRNPLNGMQFTCNLLKPSELTEEQRQLLSSNVLCQDQLKKILHDTDLESIEQCYMEMNTVEFNLEQALNTVLMQGIPLGKEKQISIERNWPVEVSCMYLYGDNLRLQQILADYLACALQFTQTAEGPIVLQVMSKKENIGSGMQIAHLEFSSRRSRGPDTGDVPAQPRGVQGGPRPVHKPEAGENDERHGTVPSRSRHLVVHHPDGVPGRPAQQQAVQAFDE

SEQ ID NO: 57468 - protein, 53 aa, Zea Mays
MAARPGRGPPSSRAGAHARPGRWPPGSEPPEVAPAWGCAARGRALAAGWFGWP

SEQ ID NO: 57469 - protein, 152 aa, Zea Mays
MEADIGIKKLRVANRVTASEVQYVELLSLMKIDKEMPLHKQEPRIFHADRLLPDLHGGYVPDSFVPDLHDEYALDIEKCPLCPNYKLVYDCTSKECKTSGSSICRGCVVCISRCLRCGRCIDSEFEFEETFFLGSICHDCVKYSPHHRKIDV

SEQ ID NO: 57470 - protein, 51 aa, Zea Mays
MLLDFKICSSIFNLTNYFVEVFLIFFVPLLDTMMIIDPDFIFCTTGSTRVF

SEQ ID NO: 57471 - protein, 122 aa, Zea Mays
MQQQQDPAPADPDPLPPPDLGDAAASSATQTIPSRNASSKYDFVKVKVWLGENADHYYVLSRFLLSRMLTVTKIPNHVAIKIALELKKLLVDNSLLDVSQSDLEANLFKVSLWKNGDTERSI

SEQ ID NO: 57472 - protein, 117 aa, Zea Mays
MLYYYRKQITRPPAGCSMQRSVNPPEHGSGLLSRLFSSHYHGIVHDEKSVARHTVNLLTSTIKVDADQSDLRFCFRIISPTKIYTLQAESAVDQMDWIEKITGVIASLLNSQSPEQP

SEQ ID NO: 57473 - protein, 1484 aa, Zea Mays
MGNKIARTTQASATEYYLHDLPSTYNLVLLDVVSRGRFLKSVRCKHDEGLLLVKVYFKRTGEPIDLKEHERRLERIRKAFKGIDGSHVWPFQVWLQTDKAAYLLRQYFFNNLHDRLSTRPFLSQIAKKWLAFQLIHAVEQSHSKGICHGDIKCENVLVTSWNWLYLADFASFKPTYIPDDDPSDFSFYFDTGGRRRCYLAPERFYEHGGESQVAADAPLQPSMDIFSLGCVLAELFLEGQPLFELSQLLAYRRGQYDPIHTLEKIQDTGIRDMILHMTQLEPKKRLPCRSYLQKYEIVVFPFYFSKFLHKFFSDIVPLDSDARFSLKVEKTQENFEKIHEIMMGSSTIEQIERSTSCEHSEPSGRKGMGGETLYSPGDYRNSTSIGKKNTSVDHQHIVGGINFLLKEVESRSNNTSTKVTKDTEHFVAPSISCASGVQSLQLVNPAGRQIGSGLMSQNNAVSHVKKISKTNLCSLVAAYDDQSDTYSFDIFQQIDTKVSCEGMVLLVSLLCSCIRSVKKPELRRASLILLKFSSTYIDDDRRLQLVLPYVIAMLSDPSAIVRCAALETLCDVLCLVQDFPISDTVIFPEYVLPMLSLLPDDTEESVRVCYASNIHKLALTAYRFLLRSRSIANIRPLDESLVAHRSQSADSPAKRQDIFFRQLAELRKSIYEIVQDLVMGQKQTPNTRRALLQDIGYLCYFFGHKQSNDFLLPILPAFLNDHDEQLRAVFFAQIVYVCYFIGARSVEEYLLPYLEQALSDGMEAILVNALDCLTMMCKSGYLRKRVIVGLLVKVLPLLRYTINWVKQSAVRFVAACSESLGSVDTYVYLSPQLRQFLHREPPSLDSETALLSCLKPPLPKSMFYVPLEDAQDIGNILLKSSGKKEQILHGGRYSGMAQSGSLGNLEDIRRLKGTNISSSVSLDVKDSFSFGKSLYSGFALHASAANSSFYDGLSKGIPSYSFCIDNRGLGETHMVPDSSVYKASIRLPWLEPNRPGMQTRDDHFSSKRRDLSINDSLKSNSSLQGDSISNSDTGGLPFSRSAVNLETGWKPRGILVAHLQEHRFSVNDIAVSNDNTFFVTASDDSSVKIWDTRKLEKDIAFRSRLTYSVGNSRALCTAMVHGTSQVIVGGSNGTLHLFSVDCARSVGSVVERYAGIVGVKRNDIKEGAILSVVNCSPDSFSPTVLFSTEHCGIHKWDTRTNSEFWYFKSSPEEGYISALVVGQCGNWFISGSSRGVLTLWDNRFLLPVNSWNYSIVSPIEKLCLLIPPPSSISSAGRPLVFVAAGCNEVSLWNAENGSCHQMFRTASTDNEAVMSKAPSRPVNKPIIKDIIRARNYKYRIDELNDPPVRRPGIRSLLPLPGGDLLTGGTDLKIRYWDQARPEQSFCIAGPSAKKVRSAKADILEKAAGNDECYDIRSSFGVQVVQEMYKQNTTVSGLTPKTQFAEAAADSAGCHRDAILALASFNLSSQRLISASRDGAVKVWK

SEQ ID NO: 57474 - protein, 301 aa, Zea Mays
MRANRAGGKRFNATLMLEMLRGKRMLFVGDSLNRGQYVSLVCLLHRIIPESSKSMETVDSLTVFKAKDYNATIEFYWAPFLAESNSDDAVVHRIADRIVRGTSIEKHAKFWKGADILVFNTYLWWMTGQKMKILRNSFEDKSKDIIEMETEEAYEMVLNAVLKWVESNMNPRTSRTFFVTMSPTHTRSRDWGDDTDGNCYNQTAPIEDLSYWGPDTSKGLMRVIGEVFSASKSRIPVGVVNITQLSEYRKDAHTQIYKKQWNPLTPEQVADPKSYADCTHWCLPGLQDTWNELLYSKLFFP

SEQ ID NO: 57475 - protein, 567 aa, Zea Mays
MDKTSKTDGSSKVRLFLKKLAKKASTKAALESKTSSGMSVQGEKKILDKLRSYQGAPFIEALIGPQEDKLGGNSSQDTVKATAPPAALNQIGQLSTSPDVNADDRVADEGTLCWNLLSSRLFFDAKMSDEINKAIKARIQRTLSNMRTPTYVGEITLTDFSLGELPPYVHAMRVLPLDLNELWAFEVDFEYSGGILLHIETRLEVQEPELQKDIMKSNFGADANGDVDSDLLESIEQYGNQFKGSHNSASSIGENDEADASSQSKSIGWTSAYISRWKTILHSIADHVSQVPLSLAIRISSVRGILRIQMKPPPSDQIWYGFTSMPDLEWDLESSVGDRKITNSHIAALIGNRFKASLRDSLVLPNCESISMPWMLAEKDDWVPRKDAPFIWLNHEPTEMRIHATATASTQSEEGGLKDGGSEESSRVVASIDEAKQEPKAEASLHGQSSSAPGSESAHSDANDELRKPLLITEKLQEEASEGIAMSPMSTSRRAVIPAGEQPQVSASPIGEDAKRKSGRRARMMDFGKRMGDKLEEKRRTIEEKGRHIVEKMRENARTNSMERTSS

SEQ ID NO: 57476 - protein, 851 aa, Zea Mays
MTVWYDLLQWRNEMYNSVIDAFKDFGQTNPQLHHLGYRDKAWNVNKLAHIARKQGLPEVCVTILDKMYGHATMEVQEAFVKICEQAKAYLEMKGELVSGLNLINNTNLEFFPVKNKAEIFRLRGDFLLKMNECETANQSYSNAITLFKHLPKGWISWGNYCDMVFKETKDEVWLEYAVSCFFQGIKYGVSNSRSHLARILYLLSFDGQNEPVGRALDKYLEQLPHWVWLSWIPQLLLSLQRSEAQHCKLVLMKIAQVYPQALYYWLRTYLMERRDVATKTEIGRNMLAQQRMQQAMMANNAANNLPDGSARASNHAGSNMTSDNQSHQASQSVGAAGSHDGGNVQGQDPERSTPEGGTNTSHDQGQQSSTGAEGSQVPLRRNSGHGWVTSAASAFDAAKDIMEALRSKHTNLANELELLLSEIGSRFVTLPEERLLAVVNALLHRCYKYPTATTGEVPQSLKKELSGVCRACFSQDAVNKHVDFVKEYKQDFERDLDPESATTFPATLAELTERLKHWKNILQSNVEDRFPAVLKLEEESKTLRDFHVVDIELPGQYFTDQEIAPDHTVKLDRVGPDIPIVRRHGSSFRRLTLIGSDGSQRHFIVQTSLTPNARSDERMLQLFRVLNKMFDKHKESRRRHLAIHTPIIIPVWSQVRMVEDDLMYSTFLEVYEINCARHNREADSPITIFKEQLNQAVSGQLSPEAIVELRLQAYNEITKNIVNDNIFSQYMHKILPTGNYLWTFKKQFAIQVALSCFMSYMLQIGGRAPNKILFAKNTGKIFQTDFHPAYDPNGMIEFNELVPFRLTRNLQAFFSNFGVEGLIVSAMCSAAQSVVSPKPAHLASFGYVFPR

SEQ ID NO: 57477 - protein, 263 aa, Zea Mays
MDEFEERLFGGKDTDKGSLYEKLDRAENTGRRYNMGSGMGGLTGLSDKSRSGLSKGGFTWLSDSSSSGFPGFPASGDRSNSGWMDGYDSFNDGLNDTIANAARNIQMEEDEDVDGDWEDDFEFRPDVRFRQGSTYSVRDLDLRKPAAAKNPPRRQFETTTAEVLKKADFRNVRFLSNFLTEAGIIIKRSQTRISAKAQRKIAREIKTARAFGLMPFTTMGRRPFIFGRSAEEHYWDDGYFGYVKQKDGEPVENEDAEPNVEAV

SEQ ID NO: 57478 - protein, 271 aa, Zea Mays
MYLCLAMQLYHHPYSLDSQKVRMALEEKGIDYTSYHVNPLTGKNMNVDFFRMNPSAKLPVFQNGAHVIYRAIDIIQYIDRLAVHLSGEIPPVNTEVHQWMQKVDAWNPEMFTLTHTPAKHRAFVSKFIRRVLIARMAQAPDLASMYHVKLREAYETDDKVKDPDIMKQSEEELSKLLDDVEAQLGKTKYLAGDEFSPADSMFVPVLARITILDLDDEYINCRPKILEYYNLVKLRPSYKITIGRYFSGWKKYRTLFKTSFFLCVRTLFRKY

SEQ ID NO: 57479 - protein, 286 aa, Zea Mays
MQQLKHQFQEFIVGLMSLPIKLPGTRLYRSLQAKKRMATLIQGIIQEKRRRRRAALEDGGEGEGEAGPPRDVIDVLISGGDELTDELISDNMIDLMIPAEDSVPVLITLAVKYLSECPLALQQLEEENMQLKRRKTDVGETLQWTDYMSLSFTQHVITETLRMGNIINGIMRKAVRDVEVKGHLIPKGWCVFVYFRSVHLDDKRYDEPYRFNPWRWKEKDTSTMGFTPFGGGQRLCPGLDLARLEASIFLHHLVTSFRWVAEEDHIVNFPTVRLKRGMPVRLTSKD

SEQ ID NO: 57480 - protein, 164 aa, Zea Mays
MDHDLALCFCQDCLGLRLVKPEVDDHTGRDAGDGAGDNDDDGAGGNADAGRDPGYADGDHDATGRDVHGRHPGQRDDADGWPGHRGRGPRQRAPGRQQQRRQRLLARQHGHRRRGRPAGGFGSVIGGATGNVALRPPFAVVVVMEGAEESVGDSHGGAFVLPCL

SEQ ID NO: 57481 - protein, 907 aa, Zea Mays
MHVEDGREQRDLERGWRARFPWILGEVGHVGVVARKGRKERAVGGIGGEVGRVEAVARKACTAWLETGARVGAGMARLWFSPRSMLASAVDAEAGIGEELEDATSTVGSPQLFAIPTPRREEGLKANFHSSAANVKMRVGGLPDWGVGRDDQTNPESQSRSAPGGPRLAACAFAMESRGKRILPFLLVIIAAAAAPSAMPRDEREVVVVSGAPDGVVWVAQLSDLHFSVHHPERAYDFRRYVGPALAMVNPDLVLITGDLTDGKSKDLLTMKQNEVEWVEYESTMKEIIENSKLPRRIFYDMRGNHDSFGVPASGEDYDFYSKYSINAKLRRQGRVQSITLENSGRKHLFVGFDSTMEIGLRGPTNLFGHPTDKQMIELDQALSQWNTDFDKVPVTKIAFGHFPLSFSALTESGKSIKDVFLKQSLAAYLCGHLHTRFGKNLKRYYHRAVQEPSLSEHYYQHNMHQGDAFQGNKENCSEEASHVEEFWEWEMGDWRKSRSMRILAIDDGYVSYTDIDFRLGSKSIIILPTFPLDSRFMQRASAFRDFKCHVMGASSFDTVRALVFSKHEIVSVSVKIYDSRPGTLEIVFDSEMKRVDSNETRGNMYLIPWNWRAFEDSSPSRYWLQIEVMDITGDTSVSQLRPFSVNGLLARVNWTWKEFFVIGIQWASIYHPALWCAFSLIFSLLLVPQVLAVVFKDRFTYKSLCAYGGQRTLLKSLVGGFICCFVELARLVLVWLLLLLYAIYLVFIPWLFGHPITEDGSLTYMTHKGWILKGPSSSNEVVHAGIPDVMVIVLPHLCFVLVPTIVILAAMAAERTAYREHYLSRSGKKKDDYRKSRRQIEHENFWNGRWISKFLCLLCVVVLCKHWKLCRALVKAYAMNPLLHAPVLFFFVPLLMVFAIYKTRSI

SEQ ID NO: 57482 - protein, 1113 aa, Zea Mays
MVWKSWGAAPSLLLLRIALLLLGAAAPLCSGAGDVALSFAATPRRVSRSTSAAFALRVLRATGGPCADCVVTCQLDGEAASLCGGTAAASYAGLRDGNHSFTACASTTSASNSSSSPSPTPTCATYAWDVDTVPPTASVSAGPAFTSASSTVSALVSFSEPCPGRGGFVCNATYCNLIVYGSGSVDPSTLQVLSPGLRYSVAVAISPDAEYGRLVLVMGRGFCTDAAGHPFTRTPNSTFTLRFDRRSDSMNITATVAEKMVQIQGVTRLVQASNEEEGLRIYLAFAQPVLNSSEQILRALTATDAVAVHLTPTNRSTLGNRRFGYVVKKMSDAAAIVSVACDTSSIISRQGTPVVPAEPFTFLYDTQRPWVKLGTSTRRTSSRDILVLIKFAKPVFNFSSSAVQLITNTLGCFSFHEASKSIYTLQIQAVGQLVSVQVAENAAMDVAGNPNLASDRLQVRHYSVPASSSWIAAITTVVFLTTAAVAALLTVSTSSLVAAGAVSRPSSYMISEPSRNVLRMACHIQIFALSRWLSANLPIEYYEFAKGVEWSIPYMRLPWEGPAADPYLGYSTMPAIAYSESELLDRSAVGGAANISSYRPRAQQGQPVTPAQIIPSDPVFPTEIPEDGKPTPPVQTPGGDATPPVMPVQTPLPLDGMPLTAMEYRSFFENPDMKPEAQIIMKLQDLDGWKYFGRNMFWLGVIGGGLILLHLLTLLYFKLRYRDRERRRHGYAALLLPRLEIMVVVLAMPCVAQAAAALIRGGTTCGLVVGIVLTAVLTSVLVALLLFLSLGITMGKLLQYREVHHEEGQEEYHWYQDLARRTLGAGKRGQWTWKDPRRAACLPRLGPLFEDLRGPPKYTRGGGGGKRRAEGGGPERRVIASEDENEGSRAPLVQQLLGVLRIYLTLLESVKRVAVGIVAGAHASSGRSSRAHAVAVLSVASFQLLFMLLGKPFVKKRVQLVETLSVASEVAVFAACLALIDRTASSGGWLPDGEARGVGLAMLGAFVLGFAAQVCNEWNALYRQARLLSADRSSFLDGAKTAGLGLLVLVLPSSALGDHRDPPPPDGGGGAGESVSASTAADGGRGGSSNNERWWLGQLWEMAKASFSKESNA

SEQ ID NO: 57483 - protein, 191 aa, Zea Mays
MQHTFAMRYGFYDECLRKYGNANVWKYFTDLFDYLPLTALIENQIFCLHGGLSPSLDTLDNVRSLDRIQEVPHEGPMCDLLWSDPDDRCGWGISPRGAGYTFGQDIAQQFNHTNGLSLISRAHQLVMEGFNWCQDKNVVTVFSAPNYCYRCGNMAAILEIGENMDQNFLQFDPAPRQIEPDMTRKTPDYFL

SEQ ID NO: 57484 - protein, 819 aa, Zea Mays
MERKRNPIVFLDVSVGDEPDERMIFELFADVAPLVTENFRALCTGELGIGHKTKKPLCYKGSSFHRVIEGFMAQGGDIAKGNGSGGENIYSGKSADETCVLPHDDRGLLTTADTGSKASGSQFCITFKPNSHLDRKHTVFGKLVVGSDVLKRIEQVDVQSPDSTPVVPVTIVNCGELTDRKDIGSMRIGIDKKRAAKSKLSKGISSDEESNEGQHKGRRNKSSKRRRKKRYFYSESDSSSESETESSDSESDSDTYSSDSSDVSSSSDDRRRRRKRHSKKNKRKRSRRKHDQRRERRRRKRDRKSKQKSKRIKGDSEAESSSDSSSEDARSKRHRHGRKSKASSQVFEENIAAVSALKDATSPQQKSGIPNSPAQDVSPLQNGENYTNGVNESKIERNAAVMPVLTGNQSKSRSQSMSVNHSMSKSMSISPRRSPMKRSITTTKRSVSRSPVHHNRSGSPVGAPQKSVSRSSARRQSISRSPARSLSKSPPRDASRSPHISRTPVKAHRRSISRSSARSMEQRSLSRSLERIHVRKSVSPRPPLAKPKSITRTPVTSPLRSVSRSPARISRSPLRPSRRSPMRSPRRNIHRSLSRSPARILRSVSRSPVRGGRPRRNISRSPSPLRRALTPPNNGRSRSRSDSPDGSPKRIRRGRGFTQRYSFARQYRSPSADRLHRYGGRNDRDRYMGYRGFRHRSPPRRYRSPSRGRVSSPRYRRRSRSASRSPVHRGRRGGYNKSPVRSRSPPARKRSPSDRARSVSRSHLSRSVSKSPPVHHPSPLDSPSLERASDGKSRSPSPSGGGKKGLVSYGDGTPDSAGK

SEQ ID NO: 57485 - protein, 648 aa, Zea Mays
MEDADPSSSLAGPWNDRLPGKEDYTDEPKKTGGREPSVAMGEGRRGGCRRGLVVGRVHWQVDDDVEEDDIDFNPFLREGSPSETSSSLTSEAECEEHSSENQPSNHTYQQNTVVNENTSDSALPQNRLSSQDAVNEMFPEETSTQVNIENDGHLNGLEKDVLASEAACSPTVQDPHHLSLEISEEDAICKRTRARYSLANYSLEELETFLQESDDDSGLQNVDEEEEYRKFLAAVLSGVGNDTQTFQGDENQDEDDNDADFELEIEEALESDGDENVENYHNTNPRKEKDVRRPQTRQRRPLTGMSGAGSDHQESNKTHLRPIVPYIPSALVTPAHAFGWQYANQNAFFPSSLVSLTRPPLACGFTYQQLGQLHVLIYEHVQLLIQTFSLCVLDSSKQDVANNVKKMIVELVGARDQALARSSPQRHIFFETQHLSSSFVSSDNLERQWIPLIKSPIISVLDVAPLELVLDYLSDVATAVVKYRKSHVDGTADKTRRKEPLFPSAAINSCKQVNNVSQDRSNGVPTASPPSGQLQQKKSLAATLLENIKKDTIALVPADIARLAQRFFSLFNFALFPHKSPPSPMANRVLFTDAEDRLLALGILEYNNDWAAIQKRFLPCKSKHQKFFESNERHEMLSRAPSPRLVGP

SEQ ID NO: 57486 - protein, 1084 aa, Zea Mays
MAQGSSPPPPEIRSPDERAAAEDPAEAEAGEVVFDDAFDIPHKNAPHDRLRRWRQAALVLNASRRFRYTLDLKKEEEKEIIRRKIRSHAQVIRAAFLFKEAGQKDIREAYTGINLATASRSFPIELEKLNTLNRDHDSVLLQEIGGVKGLSDLLKSNLEKGVSPNEDELLQRKNVYGSNTYPRKKRKNILRFVFEACQDLTLVILMIAAAISLTLGMTTEGVDEGWYDGGSIFLAVFLVILVTATSDYRQSLQFRHLNEEKQNIQVEVVRGGKRFGASIFDLVVGDVVPLKIGDQVPADGVLISGHSLAIDESSMTGESKVVHKDQKAPFLMSGCKVADGYGSMLVTGVGTNTEWGQLMANLSEDNGEETPLQVRLNGVATFIGLVGLSVAGAVLVVLWIRYFTGHTENPDGTPQFVAGTTGVKQGFMGAIRILTIAVTIVVVAVPEGLPLAVTLTLAYSMKKMMRDKALVRRLSSCETMGSATTICSDKTGTLTLNKMTVVEAYFAGTKLDPCDDVSQMSDSAASLIIEGIAQNTTGTVFLPEDGGAAELTGSPTEKAILSWGLKIGMDFDDVRTKSSVIHVFPFNSEKKRGAVAVQLDDGVHIHWKGAAEIVLSSCKSWLSVDGSVQSMSAEKHDEFKRSIEDMGANSLRCVAFAYCSFDIEKIPMEDITSWELPEDDLTLLGIIGIKDPCRPGVRDAVRLCTTAGVKVRMVTGDNIETAKAIALECGILDANSVISEPVVIEGKVFREMSESARGEAADKIIVMGRSSPNDKLLLVQALKRKGHVVAVTGDGTNDAPALHEADIGLSMGISGTEVAKESSDIIILDDDFTSVVKVVRWGRSVYANIQKFIQFQLTVNVAALVINVVAAVSSGDVPLNAVELLWVNLIMDTLGALALATEPPTDNLMKRNPVGRREPLVTNIMWRNLFVQALYQVAILLIFDFDGVRILRLQNESRSDAEKITNTFIFNTFVFCQIFNEFNARKPEEKNVFKGVTKNHLFMGIIGITTVFQILIIQFLGKFFKIVRLGWRLWLVSVAIGLVSWPLAYVGKFIPVPVRPLPDYFKPRCCWKPPRRDEEEGGQS

SEQ ID NO: 57487 - protein, 61 aa, Zea Mays
MQPAPPAQRDVRVCAFPTALCVVARPSCCFLRPRAQALRVRAEESPARTPSNTCTRAPKLR

SEQ ID NO: 57488 - protein, 78 aa, Zea Mays
MIGGGVLAYTLLGVDYNGASGDCAFLILDPHYTGTDDLKKIVNGGWCGWKKSVDSKGRSFFLKDKFYNLLLPQRPNMV

SEQ ID NO: 57489 - protein, 479 aa, Zea Mays
MTGKDDIDKMVSKLEERIRNLEEGSCIDALVLPLHGSLPPELQVRVFAPAPPNCRRFIVATNVAETSLTVDGVVFVIDCGYVKQRQYNPSSGMYSLDVVQISRVQADQRAGRAGRTRPGKCYRLYPISIYQNEFLEATVPEIQRSSLAGSVLYLKSLNLPDINILKFDFLDPPSRESLEDALRQLYLIDAIDENGQITDVGRVMAELPLEPSLSRTLIEANELGCLSQALTVASILSAEITLRSVSKDVVDGKRKRQELPDGSGWGDHIQLLQIFESWDQTGYDTKWCSHHDLQVRGMKLSKDVRNQLCQIIQKIAKGSTDVDARKSRKNDPDYRKLRRALCVGYGNQLAERMLHHNGYHTVGYRTQLVQVHPSSVLEGDEYGKFPMYVIYHELISTTRPYMRNVCAVEQAWVQPILKKLDKLDINRLSGGSSAPGDSELLGDNKQVNSSKNDVGVKQSEVDSKIQAARERYLARKGKK

SEQ ID NO: 57490 - protein, 291 aa, Zea Mays
MEHGSLENHLFKQIPAVLPWSTRLNIAVGAAKGLAFLHDAEKPVIYRDFKASNILLDSDYKAKLSDFGLAKDGPEGDDTHVSTRVMGTHGYAAPEYIMTGHLTAKSDVYSFGVVLLEILTGRRSVDKTRPSREQNLVDYARPCLKDPLRLGRIMDPAMEGQYSPRAAQSAALVAYRCLSASPKNRPDMSAVVRALEPLLDLHDDVPVAPLGHAGPVVLFVAAAAEEEKKERAPRKDVHVHRRRPMSPKASPRKRPGTGAGTKEEFWVWHLPVPADHKTRPTLGGGVVQACA

SEQ ID NO: 57491 - protein, 200 aa, Zea Mays
MQSSILLPLYMQIPEGLFPLLPRVVDLVSDSSIPVIAAGGIVDGRGYVAALALGAQGVCLGTRFVATEESFAHPIYKQKLIEMSHTDYTNIFGRARWPDAPQRVLETPFYDEWKNNFPDQETEEDQPIIGHSIIHGVHKDIRRFAGTVPNATATGDIDIMAMYSGQGVGLITEIIPAAQVVKSLVAEAKEVIREKLSGYQ

SEQ ID NO: 57492 - protein, 310 aa, Zea Mays
MGWSPRPPPITRSTASLRLVPHFSHFRFSFHRAQESRGGGGSRRRTLRCCGGTAPAAAAGAAEGRMAAATAADMVWVRVLEDGVFRFDASEAARAAAGPSLSFADPRRREAPHDGADMPAVVPVCEVAAGGSQKVVIKLPPGTSFYGTGEASGPLERTGKRVFTWNTDAWGFGPGTTSLYQSHPWVLAVLPDGKALGVLADTTRRCEIDLRQESTIKFSALSAYPVITFGPFNTPADVMTSLSHAIGTVSMPPKWSLGYHQCRWSYDSSEKVLKVVRTFREKDIPCDVVWMDIDYMDGFRCFTFDSFPSG

SEQ ID NO: 57493 - protein, 503 aa, Zea Mays
MRIQSYDDQLLHLAADLAQRLLPAFDTPTGIPFGSVNLLYGVDENESKITSTAGGGTLTLEFGILSRLTNNTVFERVTKKSVRGIWSRRSKLNLVGAHINVFTGEWTQKDAGIGTSIDSFYEYLLKAYLLFGDEEYLYIFQEAYKAAMHYLHHDPWYVEVNMNSGATVWPLFNSLQAFWPGLQVLAGDVDPAIRTHAAFFSVWKKYGFTPEGFNLATSTVQNGQRSYPLRPELIESTYWLFKATRDYRYLDVGRDILASLQYGARCPCGYCHISDVETHKQDDHMESFFLAETVKYLWLLFDLAAGPDNIVENGPYKYIFSTEGHLLPVTPEIALEDEHCSYFGAFCNGGADHGYGASASSTKHRNGNYTQLDDIQTPSSHYSMSNVLFTPGYIKGVCPGLTHAQKFGISYSDEEDNFIEQTSESLDHHGESAIESSVQDQSSSIILISHPVASQQDEAFESESGSQDHANIVVTSDSDSDSTSRDNTVGSPGMNSEELMDDI

SEQ ID NO: 57494 - protein, 221 aa, Zea Mays
MKLVRDTGVQQRNSLLGDLGTSKKHATGKRSNALISGMENANETGTRNRSFAQKQSHSSQVENHGTADSPDSLKPSLLKLKFKRPHFEQLNTQASQPEEPTSWVSQQEEQLNVAKGQRSKRKRPSMEKADGLDGITPAKRHQQSTDEVMDANWILRKLGKDAIGKRIEVHLTSDGKWHQGMVSNVMGGTLCIRLDNGRSENVELGKQAIRLIASRSKGGKR

SEQ ID NO: 57495 - protein, 1219 aa, Zea Mays
MIIDAIDWLVLSTTEKVRNIYDDLFEVPSKVMQTAITPRDATSSINFYWNSKGSSLGYIPVFHFSEVLQAGAGVVRQFNININGKRFTSHDYYTPRHLESGYVYGTRPYTNQIRYNVSIVKTDTSTLPPIINADEIFIVISTTNVGTDSEDGTWDGLTCSYAISDPPKITALNMSFSGLTGDISSAFANLKAVQSFYADNPDLCTNAGDSCQTAPQGKSKLVIYYVAVPMALIVVALAVLLCCLLRRRKTRGLADVSVKPRDKTPTSLASMAADEHRLSSLRLENRRFTYEDLEMITDSFKRVIGRGGFGYVYEGFLEDGTQVAVKMRSQSSNQGAKEFLTEAQILTRIHHKNLVSMVGYCKDGVYMALVYEYMSEGSLQEHIAGKRLTWGQRLRIALESAQGLEYLHRGCNPPLIHRDVKTSNILLNAKLEAKVADFGMSKALDRDTYASTNTLVGTPGYVDPEYLETMQPSTKSDVYSFGVVLLELVTGRPPILHSPQPTSVIQWARQHLARGDIEVVVDASMGGNHDVNSVWKAAEVALQCTEQASAQRPTMGDVVAQLLECLDLEKGRSANESFCDGDDSGSATASLSHSSAFVTGRIFGTVPMVETGPATRRALVCVSLSPLSPLPRARLPSAPPWDESAFLAMAASHLPPAATLVKKYPTLLHPFGAKPHAQRLIFRCRATSSEGADDGWASFVDELKRSLQVDPSDAVISNAGAGLTSNNDLVTALPLEPSAGPAAGDATTAAAGAVSELLGVDASGAVATPDRLLSSLLHLDASNPVASVAGGALSRLDALTSGLSDAQRWALFGFLAATWLYLTARPGVLSGAVDMYVLAPLQLALDSVLGRRSLKMSDFVVGERIGEGSFGVVYAGAVVPKNGAVVEERSGKAKTSLQNDDRYKEKVILKKIKVMTVGAKECGDYEEWFNYRVSRAAPESCADFLGSFVADKNKAEFVKGGKWLVWKFEGDRTLANYLSERGFPSNLERLMFGRVLQGLGPLEREALVVKQVMRQLITSLKRIHATGIVHRDIKPSNLVVTRRGQVKLIDFGAATDLRIGKNYVPDRALLDPDYCPPELYVLPEETPEPPPEPIAAILSPILWQLNSPDLFDMYSAGIVLMQMAIPTLRTQSGLKNFNAELRSAGYDLNRWRQSARRRPDLQILDLDSGRGWDLATKLISERGANGGGRLSAAAALRHPYFLLGGDQAAAVLSKFSLSK

SEQ ID NO: 57496 - protein, 159 aa, Zea Mays
MPPPPPPPQQQQQQSGMTLCRLPTATLGLPLSLPCLLPRSRPRLCFAARHARAVAARASSSSPSPDSSFGSRMEESVKKTVADNPVVIYSKSWCSYCMEVKALFKRIGVQPHVIELDHLGAQGPQIQKVLERLTGQSTVPNVFIGGKHVGGCTGSVSIT

SEQ ID NO: 57497 - protein, 242 aa, Zea Mays
MLKGYNGNKEMLGKCEQFFLELMKVPRVEAKLRVFAFRITFSTQVDELRTNLTTINDATKEVKESLKLRQIMKTILTLGNALNQGTARGSAVGFRLDSLLKLSDTRSRNNKMTLMHYLCKLLAEKMPELLDFDKDLIYLEAASKIQLKLLAEEMQAINKGLEKVEQELAASESDGAISVGFRKALKSFLDAAEAEVRSLISLYAEVGRNADSLAQYFGEDPARCPFEQGCNSMAESISHSWR

SEQ ID NO: 57498 - protein, 76 aa, Zea Mays
MSLRTTAWLSARPGHHQPVQCLSSPEKPRRRSANYQPTSWDYDALLSLDSGRPGDQHVLGVGVLMMTKNGSVDLVH

SEQ ID NO: 57499 - protein, 98 aa, Zea Mays
MLAMTGAMMRGSMPTLAMFSGQSDAPKEMVVLRHRWCGAAFGTPRVVDRTSRRSDFTFLQEVSSQLPSYITYNFLRRSVSSPESESLVRMSLRTCSGD

SEQ ID NO: 57500 - protein, 258 aa, Zea Mays
MVVNGRPLKRARARVEARDFARFPAAGDCGAAGTFREAVRGFLAKHARLLPLPSIFSPAAAAAPPHLLIWRVSLRVGEAGEEESGGGVELNVVEEDVLRSRSVYCDQCRVVGWSGHPVCVKRYHFIIENDSSHLSGRRRTCCLRCGTPMAAGESRCALCNFDMDGEEIEECAYLHLDDPTHLLHAVVHANGYGHLLRVNGREGGSRFLTGRDIMSLWDRLCKVLHVRKVTVMDISKKHGMDYRLLHAVISGHPWYGQW

SEQ ID NO: 57501 - protein, 187 aa, Zea Mays
MPPGDPSVALPSNPSSEPLLQAPVVSSGGPPHYPNQAILQGPLGVVARFPGYGALQFAQGSAQAQMVQPSGQGSQHMSGHVNYQLPPGSAQFMQYLSNGSHPLPNAPGPQTMPYPALSGQQLPPGLQMMQAQGFGGLPFSQGPGQPMPQFPMYGTQQFPPGMEPKMMRFSEQGGQQFTFAPRGPNSR

SEQ ID NO: 57502 - protein, 570 aa, Zea Mays
MQIVGDVGGNWKAVMHEQSNQCYYWNTVTGETSWDIPNGLASGVATAFVPSDVDYSNEAQTHVLPHSTLEAYPSDMSVGNGTTYPNLGMACGSAHVTQDAYAYAAPIASNEPLDIDPLYLAKYGDGLLQRLDLLERLCGSNKGLELIRREIEIRMSDLNALSSYGSSLLPLWLHAEVHLKQLDSSISKLEMNYHADSEPRNSKTEVAEHRAPDDADLITPSNGEALKYEVCAGITIDANMKIGKPASTSQNSQGRDNAAVPPKIESDNDEDMDVEMEVDEDNVEEQAQCSSVPEKEHPPSEQLSSSNLPSFEDPTPPEDNSVPPPPPEEEWIPPPPPEHEHEPAPPASPEEPAASYVQVDTIPQPYIAQENVGYTISGMEYYSTEGTNANYYMQVSEPHVLQAQHSYYAPVSGSGISVSVDGTSIAPESYYTYPSVTVAASAVAAEHSGYYASSVSAIYSSAADIKTSSASLVSAISNSDLKNHDNVISNDASIVPFTQAVVATSAAGTTSVPESSTQPSSSTTNQIKVIRNKKRVVGITSSLRSNKKVSSLVDKVALYNESLYSVIIAY

SEQ ID NO: 57503 - protein, 1961 aa, Zea Mays
MRYLKLGVKTEGGLNASVSFIAKANPLNRPPNKRKSELQHALCNMLSSILAPLAEGGKNHWPPLGVEPALSLWYDAVARIRVQLMYWMDKQSKHVAVGFPLVTLLLCLGDANAFNSSFSQHMEILYKYLKDKNHRSMALDCLHRLVKFYLNIYADYQPRNHVWDYLDSVTSQLLTVLKKGLLTQDVQHDKLVEFCVTLAQSNLDFAMNHMILELLKPDSLSEAKVVGLRALLEIVVSPSNQQIGLDVLQVFGIGHYIPKVKSAIESILRSCNKAYSLALLTSSKTTIDNVTKDKSQGSLFRSVLKCIPYLIEEAGRNDKMTEIIPQHGISIDPGVREEAVQVLNRIVRCLPNRRFAVLKGMANFILKLPDEFPLLIQTSLGRLVELMRLWRVCLSEEALAKDMQSGRRLSIGGDALQRSPFHRSRDVSEFRASEMDAVGLVFLSSADVQIRLTALELLRCVRALQNNLRDYSANEWGDNKLKLEPEPIFIIDIIEENGEDIVQSCYWDPGRPYDLRREMDPIPLDVTLQSILESVDKNRWARYLSEIVKYAAELCPSSVQDARLEVIRRLEQITPADLGGKAQQPQDSETKLDQWLIYAMFACSCPPDIREEFSIKSAREVFHMIFPSLRHGSEAYALAATSALGHSHLEVCEIMFGDLALFVEEVSSETEGKPKWKQNPRSRREDLRTHVANIHRILAEKVWPGMLSRKPVLCQHFLKFIEETYRQITISLADSFQDLQPLRYALASVLRYLAPEFVDAKAERFDNRIRKKLFDLLLTWSEDSGSSWGQESSSDYRREIERYKSNQHTRSRESFDKLAFDREMAEQLEAINWASMNAIASLLYGPCFDDNARKMSGRVISWINSLFMEPSARAPFGHSPVDPRTPSYSKHTDGRFGGRDKQKTSHLRLLLAKTALKNILQTNLDLFPACIDQCYSPDPQIADGYFSVLAEVYMRQEIPKCEIQRLVSLILYKVVDQTKLIRDSALQMLETLSLREWAEDDTDGVGHYRASVVGNLPDSYQQFQYKLSSKLAKDHPELSEHLCEEIMQRQLDAVDIIAQHQVLTCMAPWIENLNFVRLKESGWSERLLKSLYYVTWKHGDQFPDEIEKLWSTVASNTRNIIPVLNFLITRGIEDCDANPSAEITGAFATYFSVAKRVSLYLARICPQQTIDHLVFELSQRMLEDDEEPVRLGKVDVSANVVLEFSQGPTASQVATVVDSQPHMSPLLVRGSLDGAVRNVSGNLSWRTSAVTGRSVSGPLSPLAHEVSIPNPTAGRSGQLLPALITMSGPLSGVRSSAGNLRSRHVSRDSGDYYFDTPNSTDDILHQGGSGIHGINANELQSALQGHQHLLSRADIALILLAEIAYENDEDFRENLPLLFHVTCVSMDSSEDIVLEHCQDLLVNLLYSLAGRHLELYEIESSERENKHHVVSLIKYIQSKRGSLMWENEDPTLFRIELPSASLLSALVQSMVSAIFFQGDLRETWGSEALKWAMECTSRHLACRSHQIYRALRPSVKSDSCVLLLRCIHRCLGNPVPAVLGFAMEILLTLQVMVENMEPEKVILYPQLFWGCVALMHTDFVHIYCQVLELFCRVIDRLTFRDRTTENVLLSSMPRDEFDINGYASDLHRLESRTTSERLLSVTGTGKVPAFEGVQPLVLKGLMSTVSHGSAIELLSRITIPTCDSIFGSPDTRLLMHITGLLPWLGLQLTREAPPSLGSASPLQEQNQKAYYVSSNISAWCRAKSLDDLAEVFRAYSFGEIMSLEDLFARASPPICAEWFPRHSSLAFGHLLRLLERGPLDYQRVVLLMLKSLLQQTPVDPSQIPQVYNFVSQLVESTLCSEALNVLEALLRSCGGGGQGEEAGFGDNGGHGSGEKVLQSMLLPQSSFKARSGPLQYAAGSGLGSLMGQGGGGSSSAADSGLVARDVALQNTRLLLGRVLDTCALGRKRDHKRLVPFVANVG

SEQ ID NO: 57504 - protein, 336 aa, Zea Mays
MVGVYELKAGDFSVGVTNWGATITSVVLPDSKGDFADVVLGYDTIGGYVSGKSYFGALVGRVANRIANARFVLDGKAYHLFKNDGNNTLHGGHRGFSQVVWTVKEFVGGGDSPYITLYYHSFDGEQGFPGDLDVYVTYQLAAPYVLRVHMNATAVNKATPVNLAQHTYWNLGGQGSGDVLRNTVQLFASRYTPVGGGLIPTGAVAPVAGTPYDFLAPAAVGSRIRQVSGGKAGVYGYDTNYAVDGEPGALRKVAVVRDGASGRALELWANQPGVQFYTGNFLQDVKGKGGKVYQQYGALCLETQGFPDAVNHPNFPSQIVRPGQVYKHDMVFKFSF

SEQ ID NO: 57505 - protein, 383 aa, Zea Mays
MQTGMCLAYFNLRFVNVTFWRTPEAAESHAKMAHSTGLVQAILFEVVDRDNIGGSAYGGQRSICCTPDLAKLEGCKQGEVIRRPSSDDPDWPFVLDTHFSANHLSVKLEDEPVRITKTGMYNLFFISCDPKLRGLTMSGKTIWKNPGGYLPGRMAPLMKFYVLMSLAYLLVMIVWFSQYVRFWRDILPIQNWITLIIALGLFEMTLWYFEYLNFNSSGVRPVGITTWVVTVGAIRKTVSRLLILSISMGYGVVRPTLGGLTSKVLLLGLTYFLASELLDIAENVGTINDISGKARLFLVLPDAFLDAFLILWIFTSLSRTLEKLQARRSSVKLDIYRKFTNALAVSVIASVAWIGYELYPIESIRKTRKILHLMIYIYNCHLR

SEQ ID NO: 57506 - protein, 71 aa, Zea Mays
MARTNVSGEDGEVTANHLLLGIWSDKESAGHKILYSLGFDDEKASLLAKTAGEEAAMSLREQGEHLIYSST

SEQ ID NO: 57507 - protein, 66 aa, Zea Mays
MCLFSVLFADVRTPHCLVYLPTQPGPTLLPSRPLTAQFICQHIESFTARENMIHDHQVTGNDQINN

SEQ ID NO: 57508 - protein, 195 aa, Zea Mays
MLCNELIRTGVADPAGTDLYVVFISNEEKKVPLWHQKAGHSDDGFICWDYHVICIQSRRSKEVLDFVWDLDSDLPFPSPLIQYVSEAIQPLSFGNSRYARLFRVVHAPVFLQSFASDRSHMKDPEGNWIQLPPKYEPIVAEDGTTNNLNEYIMMSVGDVADRERMANDVYCNKHGVVLNETIFPEFFAQLPAPHT

SEQ ID NO: 57509 - protein, 285 aa, Zea Mays
MAADDVRELLLSTTADASDPSTPLSAPDLRLLIDRLRFCSDRLNASALSFAASNRGVLANALLRAASAADSSASLESSLDSALAPLASWPDLSDLRALADRLLAARRELAERQEHLAAASMIASLSSRLREARAAASPLDAAAAIAELKTLLIDLERSGSGQDDPVVFRLLRSDWEQLVDELQVRLSKNVEECVDFAPEGGKVVVSATPKGHSDGSHGVELPVALQALEIIDALDYGMAKIADSMMKHILVPAISNIHVSVLVECGPEHTVSVLSVVHSEENKIK

SEQ ID NO: 57510 - protein, 336 aa, Zea Mays
MPPPSLVSILPAASISPRRRQAKHPKTPTASHPFFSRRLVSQPPRHASISPSAAGGSGSDELHLLEKPLPAVAEDNEAEEELESAPVSSTEEALAPFLKFFQIKQLNVPIKIKIYEWNASGLLSRIEGLRAFLPKPEMMTRPRNFTDLKNKVDQEMHVCITRIDEETNELIISEKEAWAVTCLREGTLLQGTVRKLFPYGAQIRIGETNRGGLLHISNMTHGKLRSVADVLKVGETVKALVIKSTPDRIALSTKDLESEPGLLITNKEKVFSEAEEMARRYREQIAEPQPPGSIAAEDSCDDAVPFNDESRSYANWKWLKFSKSDDVANPKSGVES

SEQ ID NO: 57511 - protein, 423 aa, Zea Mays
MLKNGLELTVLTPTFGYDQKRLECKKHTTVMGHDHMSRIKMHMAEGSFGDRIRCQQPGCNEVVDRRVVYCKIHSGELSCQQFSYLQSGLESSGLSVRPVNDSQFKGSVSIAAVPCTEQELHVKHEGGDRGKLKDSSGYTLGQAAQFIFSGASMLCKNDNCSKQAHENSIHCKLHSGGVNKGCMARGCTRGAHGGTPLCIGHGGGRRCVVPGCPNAACGQGRSDRCVRHGGGKRCKFEGCAKGAQGNTDHCIRHGGGRRCRFQGCTKSAQGRTDFCIKHGGGSRCRFQGCGASAKWGTDLCSVHRKSLLGGDNAIPEALAAPSEKRRRAKTPQREAKPSEVFQENVTTAATAGNSTQHTGFLLVAAPVANRDILTNGMAVTGQAAIAPQRIVAPMFMRSPTPSGSVAASAQRWEAGASRGMLGL

SEQ ID NO: 57512 - protein, 275 aa, Zea Mays
MGAEVDLFYRRDLPLRGFDDEMRAIVASNLEGRGIKLHPGTNLSELSKTADGIKVVTDKGEELIADVVLFATGRTPNSQRLNLQAAGVEIDRVGAIKVDEYSRTSAPSVWAVGDVTNRINLTPVALMEATCFAKTVFGGQQVKPDHRDVPCAVFSIPPLSVVGLSEEQALEEANGDILVFISSFNPMKNSISKRQEKTIMKLVVDAETDKVLGASMCGPDAPEIIQGIAIAVKCGATKADFDSTVGIHPSAAEEFVTMRTVTRRLSPTSKPKTNL

SEQ ID NO: 57513 - protein, 440 aa, Zea Mays
MEMHADVDGCSVPLAVLLKRELCNQKVERPDILFGEANKSKKGEDFTLLVPRCHRTPGGSGGGENAGDDDTISVFAIFDGHNGSAAAIYTRENLISSVLAAIPPNLTSEEWKAALPRALVAGFVKTDKDFQGKAARSGTTVTFVIIDGWVVTVASVGDSRCILESAEGSIYFLSADHRLDANEEEVERVTASGGEVGRINIAGGAGIGPLRCWPGGLCLSRSIGDIDVGEFIVPVPHVKQVKLSNAGGRLVIASDGVWDALHFQEALNYTRGLPAEAAANRIVKEAVTSKGLRDDTTCIVVDILPPEKLSPPLKRPGKGVIKALFRRRPSDEMSEDQMDRGCLETDVVEEIYEEGSAMLARRLNINYPEGNMFKLHDCAVCQLEMKPGEGTSVHGNMPKHSRVDPWGGPFLCSSCQLKKEAMEGKLHSRNSQSAVQPVPK

SEQ ID NO: 57514 - protein, 188 aa, Zea Mays
MHILGQMGLSEEQQKQALELRSMTNGGKESLEETETDGASCNPAATGGCCQGNGGFTRALEQQKQALELRSMTNGGKESLEETETDGASCNPAATGGCCQGNGSFTCCHPDLPKEKRDKSIAIEQNPKSCEENGKEGGGAGSKKGNSKTCPMPTWFETWERADTYAALAVVAAAAAVFISFRIYKNLN

SEQ ID NO: 57515 - protein, 72 aa, Zea Mays
MGYIRDKVNQGQVLLDNVDIKTLQLKRLRDQIGLVNQEPTLFATTILENILFGKPEATKAEVGSTTTSAVFS

SEQ ID NO: 57516 - protein, 841 aa, Zea Mays
MAAAVAMRSGSSDGGGGYEKSGMDTGKYVRYTPEQVEALERVYAECPKPSSARRQQLLRECPILSNIEAKQIKVWFQNRRCRDKQRNESSRLQSVNRKLTAMNKLLMEENERLQKQVSQLVHENAYMKQQLQNPSLATDASCESNATTPANLRDASNPSGLLAIAEETLTEFLSKATGTAIDWVQMPGMKPGPDSFGIVTISHGGRGVAARACGLVNLEPTKIVEILKDRPSWFRDCRSLEVYTMLPAGNGGTIELVYMQMYAPTTLVPARDFWTLRYTTTMEDGSLVVCERSLSGSGDGQSAATTQQFVRAEMLPSGYLVRQCEGGGSIVRIVDHLDLDAWSVPEVLRPLYESSRVVAQKMTTTALRHLRQIAQETSGEVVYALGRQPAVLRTFSQRLSRGFNDAISGFNDDGWSVMCGDGMEDVIIACNSKKIRSSSNPATGFGAPGPGGIICAKASMLLQSVPPAVLVRFLREHRSEWADYNFDAYSASALKTSPCSLPGLRPMRFSGSQIIMPLAHTVENEEILEVVRLEGQTLTHDEGLLSRDIHLLQLCTGMDEKSMGSCFQLVFAPIDELFPDDAPLVSSGFRVIPLDIKTDGPPSGRTLDLASSLEVGATTQQVAGNGSQDVCNLRSVLTIAFQFPYETHLQDTVAAMARQYVRSIVSAVQRVSMAISPSHSGLNTAGQKLISGSPEAATLVRWICQSYRYHLGVDLVSHSDQAGESLLRMFWDHQDAVLCCSFKEKPVFTFGNQMGVDMLETTLVALQDLTLDKIFDEPGRKALHAEVPKLMEQGYAYLPAGVCLSGMGRHVSYEQAVAWKVLGEDGNVHCLAFCFVNWSFI

SEQ ID NO: 57517 - protein, 646 aa, Zea Mays
MLMRVSVGIHKEDIESAIRTYHLMSQRWFTHASPTLFNAGTPRPQLSSCFLICMKDDSIEGIYETLKECAVISKSAGGIGVSVHNIRATGSYIRGTNGTSNGIVPMLRVFNDTARYVDQGGGKRKGAFAVYLEPWHADIFEFLDLRKNHGKEENRARDLFYALWVPDLFMQRVQSNGEWSLFCPNEAPGLADCWGEEFDNLYKKYESQGKAKKVVPAQTLWFDILKAQIETGTPYMLYKDTCNRKSNQQNLGTIKSSNLCTEIIEFTSPTETAVCNLASIALPRFVREKGVPLESHPSKLVGSSDSKNRYFDFEKLAEVTSTVTYNLNKIIDINYYPVETAKRSNMRHRPIGIGVQGLADTFILLGMPFDSLEAHQLNKDIFETIYYHALKSSAELAVKEGPYETYEGSPVSKGILQPDMWNVVPSTRWNWPSLRETISKAGIRNSLLVAPMPTASTSQILGNNECFEPYTSNIYSRRVLSGEFVVVNKHLLHDLTEMGIWTPTLKNQIIYDDGSVQKIAEIPDDLKAIYKTVWEIKQKTLVDMAVDRGCYIDQSQSLNVHMEQANFGKLTSLHFHAWSKGLKTGMYYLRTRAAADAIKFTVDTTLLKENGNGMNDGKPTEEDVEAKMAQMVCSFNNREECLACGS

SEQ ID NO: 57518 - protein, 187 aa, Zea Mays
MPPAPYIALFPGPSVSSFFQRSKQPKKTVSSRLFSFLLLFPQPGLPTRFHRSRVAKRIPCLVRAMAEEQSNPQHQQAEEREVMVEQQQPRRAPKLRYLDFVQVAAAQAAVCLAGLYGLAKDHAGPLRPSVDAVESAVKGVVSPVYDRFGGLPLDVLAFVDRKVSCVTRPMYRSPPSPALCWPGSVAW

SEQ ID NO: 57519 - protein, 779 aa, Zea Mays
MWAEAQLDKRRSRDDFTSKVQYDSCVGIKVDTDQKNNAAESTLVPVDNPIRNNNGNSSLTNNDLLVDKQNQLITGDVFQQWNGVSQELSTNPESLSVQQYASSEKTRSQLKSFIGHKAEQLYVYRSLPLGQDRRRNRYWQFSASSSSYDPGSGRVFFESRDGYWRVIDSSEAFEALVSSLDTRGIRESHLHSMLQSIEPTFREAVERKKCVSLEHTTGWTDNGSNESPNCNNEFGSPCSTLSGVASDNLMAYSDTFKIEIGHNEAEKSSISKRASVFLKWMWRECYCHQSTYTMKYGKKRCPELIQSCDHCYQIYLAEEQHCSSCHKSFKPIHNFLEHLSQCEDNQRTNPSWKTQIVGLSVPVGLRLLRLLLATIEASVPAEALLPFWTDLYRKSWGVKLYSASSAEEVLQMLSVLESAIKRDYLSSNFETTTELLNSNTQDATQNSVGGSGSATILPWVPDTTAAVALRLLDLDTSISYKLHSKLVSNKEQEAGDFMKLPLRYPSINKNKQEIEQFIPIGFDQQDGTLLTNSNGRRGRGRGGRGGRGSRGGSRGGSSRGGGGRVPRGIGSSSRIQFRDDNSVPYGRAPRKNVRGGRTRGRGRGRGLRTVRPRQPSEFSATSIPKLNLLGSFSMLSKANHTGNMHSPESLGAEEWVLERREYVKDDDDNLVSRYDESEEENGEPMNEEYDEQISGYPRDNSEFSPIQMMGDVSHDEDAEGDEGEEDGEDYETEDPAGDEDDDVEMDWDDDIRDNDDGNGAANADEDEGGTSSYSSEYSE

SEQ ID NO: 57520 - protein, 134 aa, Zea Mays
MFKNTFQSGFLSILYSLGTKPLQIWDKEVVNGHIKRPQDEDIQSNVLEIVGTNSVTRVKPYICTMPLKLDDGWNNIQLNLADLTKRAYGTNYVETLRVQVHANCRLRRIYFSDRLYSEEELPPEFKLYLPIQKS

SEQ ID NO: 57521 - protein, 105 aa, Zea Mays
MTAVRIHPSPRSLVSCLPRADRWVRPRPLSIAIVLPTPTSTRAGPVRTSLEAPAGRQLHGDRPTGLIAGLRAPSRFVPGYMFDLSRHPLAPCEGVATRAGKLAGS

SEQ ID NO: 57522 - protein, 53 aa, Zea Mays
MVLDRIISGVEEFGFCNKGWIESPIKGAEGNKEFLACFNRIQYQSHSQRQRNL

SEQ ID NO: 57523 - protein, 109 aa, Zea Mays
MCWPGIIRSYGGTLSVLFYLSRFSLKMNRGQIFEKGGCIFFSVVQCSGQLGQRARGLKEVMHIPVYTMRSNVLASVWFPCDFLGREEVSLQRAINKSCKASMVFLSWIQ

SEQ ID NO: 57524 - protein, 516 aa, Zea Mays
MATHYQAATLIASPSYPNAIAWSSDNLVAVASGHIVTILNPAALDGPRGLVGLRHSDPFPIGVVKREDLLEPCLLPTSLARETEPCARSISWSQQGFAPNYGCLLAVCTVNDHVKLYRSPIWELCDEWVEVADISQLLFNYYKIINFGEDNGSHLTSSKNTNSGEAEVLGSTCRSEESLYFRGPGQRKIKPARVGGFIYDGNEVDLDASKDADFSMEPCSKSKKKSLKKTVKPRDEVVAVNGRNSTGNVKASLSSNEQNKSLPLITAKQYACRAAHLSSLVVSWSPVVSLSDRTSCLLRHWCILAVGSKSGNISFWKLYKPEYYTIDAGVVTSDPMLIGVLHAHESWVNAITWQVLSAGSSKSSLLLATGCSDGSVKIWLGNIEGLNQCAIGEEVPFVLVAEVAANLSAPVSSISLGIPARSQHEVSLAIGRVSGLLEIWIWNASTNKIESSSAWHAHDQVVTGLRWAIDGNCLFSCSQDNSTRCWISHENHLEEFFLHSEFSELRESEDVRVVDT

SEQ ID NO: 57525 - protein, 635 aa, Zea Mays
MIPQARGTTSRGPNLQFHAETCHLLLRYEPVGSQVRFTLGSLARSLARTDNLGGRLAATAHLCCGLPPLFAPAPVVGEPRPSTLSPMASAAARGAAVRSPLLVHHRVPLVHPSGGGSLRVGWPGIGPGREGRRRGAPVGARVFARYSQAQDFSTRLQDRAGELPKLVEDLIQTSISTGPRGAFRMAQGIQAVLGVGGEWLNDLSKTANTSAGIPSQMQLGLLSPLYLRRLFERMGATYIKLGQFVASAPTLFPAEYVEEFQKCFDQAPAVPYDVIESILREELQRPLDSVYEYIDPVPIASASIAQVHGARLKSSQKDVVIKVLKPGIEDTLVADLNFIYVVARVLEFLNPELQRTSLVGIVKDIKESMLEEVDFRKEAANIQAFQGYIDAMGFDRQAKAPFVYQHCSTKRVLTMERLYGVPLTDLDSIRSLVPDPELTLVTALNVWFGSLISCESFHADVHAGNLWLLRDGRIGFIDFGIVGRISPRTWAAMEVFLASFATEDYDAMASALSEMGATGNDINTNEFAKDLRKIFSSIQDLDTEIIVATARTPDATAVSANVVLDERQMNALFLDLVRVSESYGLKFPREFALLMKQLLYFDRYTRLLAPSMNMLRDERINISTNRQPRRTDRFQ

SEQ ID NO: 57526 - protein, 724 aa, Zea Mays
MYWEFRRLKLAATVLDEPCIESQHSAVTYTQQNEMPISLVSNANENEVAVPSSSIHVEKEQFAAGTSDQVASNLIHAANSEGAANLEGAANSEGAANSEGVANSEDVANSEGGNAWGQYDEDEYVGADDEKATYKELFSDIEESGSEYIPDSDDEDHDDCVVDDNGDPLFVTTTDLENPNIAVGVRFEDGPTFKKAIRQWAILHEVEIGAHYSESSRYRGFCKAKKCNWRIHASQLPDGKTWQVKKMSKRHYCRSRSKMEKNCMANQYWVRDKVVPMLRENPNLGAGALVKKLQEKYLIQVSYCVAWKGKELALDELMGKWEDSFDHIYAFKAAIEKESPGSVVEIQTEKVGEKIRFCKMFVAFKACIDGFLQGCRPYLGIDSTVLTGRWKGQLASAVAIDGHNWMFPVALGLFESESKDSWKWFMEKLQTAIGSPHGLVISTDAGKGIDSALTNAFNNGVEHRECVRHLFKNFQKRFHGEVFERNLWPAARAYRRTVHDKHYNIMKIASPAAIKWLEDTHKHLWARCYFSTASKCDYVTNNIAETFNCWIKDEKSLPPVELIDRIRQKILEKFFVRKNLADKLTGTILPSVMKQLHDAGRGLVGYVVHKGPDHTAEVSGVHKDLTPWRHTIDLVNRECSCKKWQLTGLPCTHALSVIGCFRNLKLEDYVDSYYSVEKFKTAYVGKIPTLTDKTEWEQPEVGYKVWPPILKRAAGSQGQEGSLE

SEQ ID NO: 57527 - protein, 151 aa, Zea Mays
MTMAGGGGLNRSSSRGQLPPQELLDDLCSRFLLNVPKEELESFERILFLLEQAHWFYEDNSVEHNPNLKSLSFKDFTSLMFKSCTALRPYIAHLDDIYKDFNNYKFRVPVSGAIILDDTYERDGRLGPAGAFLVERGIKMRKTTHVLLEKF

SEQ ID NO: 57528 - protein, 149 aa, Zea Mays
MGPGSRTTPGVPTNTLFGQSTQPSHPTFPAPTFGRSDMKFGVSGPFGSQISQQSSGTFQGSNMSSFGNFSKPHASYQQSPSSSSHHRDIDRQSQDLLSGIVVPTSATNEAPVEDNKNENQDDSIWLKEKWSIGEIPLGEPPQRHVSHVF

SEQ ID NO: 57529 - protein, 226 aa, Zea Mays
MVSGTSMAAPHIAGIAALIKQKNPKWSPSAIKSALMTTANTLDKGSHPLRAQQYTASEMMTLSRATPFDCGSGAVNPKGALDPGLVLDASHEDYITFLCSIPDVNQSEVSNIAGSACNSNSKGQRPFDLNIPSIAVSQLRGTVVVKRTVTSVSDETETYTIMTRMPPEVALEVTPPAVTVVPGASREITVTLTARSVTGTYSFGEIAMKGDRGHLVRIPVVAMGFK

SEQ ID NO: 57530 - protein, 173 aa, Zea Mays
MGAALWSRCAVLRRGAGAREHHLRPAGPYTGVADGRVVFWDGERWVPFAMAFPCWTQELHGGPKASPLEYLPASISATARSGSVSIRLGTCTSPTPTSACSKSAARPGWPRCSQRRPRACASTSPTTSTSTSTTRATSTSLTLAFTTKDVCDAMPSLSSLCFARLVGCSLDSY

SEQ ID NO: 57531 - protein, 1122 aa, Zea Mays
MSGFSAAANAAAAERCALAFRARPAASSPAKRQQQPQPASLRRSGGQRRPTTLSASSRGPVVPRAVATSADRASPDLIGKFTLDSNSELQVAVNPAPQGLVSEISLEVTNTSGSLILHWGALRPDKRDWILPSRKPDGTTVYKNRALRTPFVKSGDNSTLRIEIDDPGVHAIEFLIFDETQNKWFKNNGQNFQVQFQSSRHQGTGASGASSSATSTLVPEDLVQIQAYLRWERRGKQSYTPEQEKEEYEAARAELIEEVNRGVSLEKLRAKLTKAPEAPESDESKSSASRMPIGKLPEDLVQVQAYIRWEQAGKPNYPPEKQLVEFEEARKELQAEVDKGISIDQLRQKILKGNIESKVSKQLKNKKYFSVERIQRKKRDITQLLSKHKHTLVEDKVEVVPKQPTVLDLFTKSLHEKDGCEVLSRKLFKFGDKEILAISTKVQNKTEVHLATNHTDPLILHWSLAKNAGEWKAPSPNILPSGSTLLDKACETEFTKSELDGLHYQVVEIELDDGGYKGMPFVLRSGETWIKNNGSDFFLDFSTHDVRNIKLKGNGDAGKGTAKALLERIADLEEDAQRSLMHRFNIAADLADQARDAGLLGIVGLFVWIRFMATRQLTWNKNYNVKPREISKAQDRFTDDLENMYKAYPQYREILRMIMAAVGRGGEGDVGQRIRDEILVIQRNNDCKGGMMEEWHQKLHNNTSPDDVVICQALIDYIKSDFDISVYWDTLNKNGITKERLLSYDRAIHSEPNFRSEQKAGLLRDLGNYMRSLKAVHSGADLESAIASCMGYKSEGEGFMVGVQINPVKGLPSGFPELLEFVLEHVEDKSAEPLLEGLLEARVELRPLLLDSRERMKDLIFLDIALDSTFRTAIERSYEELNDAAPEKIMYFISLVLENLALSIDDNEDILYCLKGWNQALEMAKQKDDQWALYAKAFLDRNRLALASKGEQYHNMMQPSAEYLGSLLSIDQWAVNIFTEEIIRGGSAATLSALLNRFDPVLRNVAHLGSWQVISPVEVSGYVVVVDELLAVQNKSYDKPTILVAKSVKGEEEIPDGVVGVITPDMPDVLSHVSVRARNSKVLFATCFDHTTLSELEGYDQKLFSFKPTSADITYSPSGIIC

SEQ ID NO: 57532 - protein, 441 aa, Zea Mays
MPFQREGIRFVLQHGGRALIADEMGLGKTLQAIAVASCLRDAWPVLAIQSWLNIPVEDILVVLPHTGGSHKAGFRVAYSNSKGDFHLDGVFNVISYDVVPKIQSTLLDLDFKIVIADESHFMKNGQAKRTVASLPVLQKAQYVVLLSGTPALSRPIELFTQIQALYPTVYKSVSEYGNIYCKGGFFGLYQGASNHEELHNLMKATVMIRRLKKDVLSQLPVKRRQQVFLDLSEKDVKNVRALFIELETLKVKIESSDSKEMIDSLRFAYQNIVNKIYTDSAVAKIPAVLDFLGTMIEEGCKFLIFAHHQPMIDAIEKHLLLSIKAGGYGITLTAASTVIFAELSWTPGDIIQAEDRAHRIGQVSSVNVYYLLSNGTIDDLMWDVVQGKLENLGQMLDGQEKTLEVSQRDCRPSPSKKQKTLVGFLKRPSASTSAEEGMPST

SEQ ID NO: 57533 - protein, 259 aa, Zea Mays
MKIIMQYGVGLEGVDVNAATEHKIKVARIPGSTTGNAVSCAEMAIYLTLGILRKQKEMDTAVNRKDLGVPVGDTLFGKTILILGFGAIGIEVAKRLRPFGVKILATKRNWSSDTLPSYVDELVDKKGGPEDMYEFAGEANIVIACMTLTSETIGIVDHKFVSSMKKGSYLVNIARGRLLDYKAVFDHLESGHLAGLGIDVAWMEPFDPEDPVLKFPNVILTPHVAGVTEYSYRTMAKSVGDTALQLHLGEAFTEVEFVN

SEQ ID NO: 57534 - protein, 109 aa, Zea Mays
MATKRDTESDGEGSNPVGGGATPPPLAAAPVVCLLRSAGDFGGGAFVGSIFGYGQGLITKKGFKGSFSNAGSSAKTFAILSGVQSLVLCLLRRLRGKDDRAPQALLQSC

SEQ ID NO: 57535 - protein, 680 aa, Zea Mays
MKCIVFVKRIIVARVVVQILQNLKCLDFWRCEFLVGCHSGLRNMSRDKMSSIIEKFSSGEVNLLVATSVGEEGLDIQTCCLVVRFDLPETVNSFIQSRGRARMSKSKYVFLLERGNHSQEKLLDDYITGEIIMDKEINLRTSNDMFNCLEENIYRVNDTGASISTACSVSLLHRYCDNLPRDIFFVPSPSFFFVDDVDGIVCKLILPPNAAFRQVNGQPCPSKDEAKRDACLKACIKLHELGALTDFLLPGQGSRKIKVSTTNNSESNKDDDESFREELYEMLIPAVLRPSRCKLDSSFKLHFYYIEFIPIPADRRYQMFGLFVINRLPEESEKLDVELHLARARIVKAGIKYLGKIEFNKEEMILAHNFQEMFLKVLLDRSEFTPSYILLGNDGALDMDSTFYLLLPIKQKFYGDNMIDWPAVKRCLSSPAFQDPMGLSLHDSYLPNESLKLLGGTYNKADVIGSLVYTPHTDLFFFVDAILDGTNAKSELNGATYAEHFKQRLHIKLSHPEQPLLKAKQLFCLRNLLHNRQLESTESEARELMEHFVELPPELCSLKIIGFSKDMGSSLSLLPSLMYRLENLLVAIELKDVMSSYFPEASQISASGILESLTTERCLERISLERLEVLGDAFLKYVVGRHNFISYEGLDEGQLTRRRSDIVSNSNLYELSIRRNLQVS

SEQ ID NO: 57536 - protein, 70 aa, Zea Mays
MAGALQGKCPPNMIAALSEVIQEEGVMGLYRGWGASCLKVMPNSGITWVLYEAWKDVLLADRNKPRSLAN

SEQ ID NO: 57537 - protein, 453 aa, Zea Mays
MCMLCAVQRWSRRVATMLPWLVVPLIAIWAATQLLLPAAYRLEVTSPRLACVSVLLLTLFWYEILLPRLSLWRARRSARLREERRAHALELHKLRKIATRRCRNCSNPYREQNPGGGKFMCSYCGHVSKRPVLDLNSTGKASSRWPCAQDCGDWLDLRCSASPSTSFWGFSWHLLLSFFTTTVRWLLRKTFRFTSSGDGEGLGPDGKRLAKAGDNGGKAEESRVEKARRKAEEKRLARLEREMLEEEERKQREEMTKLVEERRRLRDEKAAAEERSKSATPVGEKDARKEAERRRQERRKKEDKGPSKSNSDCEDIDRRLGREGDMKRAFDRKIESDRREGYKPHYFEANNRSNKTVESRAKYFGRMTGGFLSSSRGFGGGSFFGRSIQAPAPQVNKVSRPIVPATDQGNAAKRDVQHASTQAAAKSTSAGETRNSWTNFNRPPKCAASPYQL

SEQ ID NO: 57538 - protein, 240 aa, Zea Mays
MEGLALLPLTMRAKVACFRPAHLPPVLAMGAGANNHEESSPLIPAAVAAPAYEKPPQAPAPEAANYYADGVPVVMGEPVSAHAFGGVPRESWNSGILSCLGRNDEFCSSDVEVCLLGTVAPCVLYGSNVERLAAGQGTFANSCLPYTGLYLLGNSLFGWNCLAPWFSHPTRTAPQGSPPWIQQWALRLCHDAAHGADHGAWHVSYSTTFPTLVLSVLPVVYHLLLLALMCDVSPSVNTSL

SEQ ID NO: 57539 - protein, 178 aa, Zea Mays
MIFTTPKEEEIQAKKKRLHMKRLKKQRLLAEVKFLRKRYKSMSENPSQTIVCRVRNPAMSSASWTAGSAGDTWHQSVRAAGSSSRSQLVQRTHGGSPRASPVIDLNEACEPGYEEMEIEGQHGYMSPLGVNKSKRYPMEGAAASPSQMRMHVFWDVQNPAGRSGKRKISWQDQLALRV

SEQ ID NO: 57540 - protein, 331 aa, Zea Mays
MELAATNNYEDMELQTRALTEPLPTSQQAYKDHHLYALEKWLHKNQIFHPKGPVLGFCKGHPVYPRSCVQTLQSRHGWLREGLQVRENELPAKVVTRPKRTFNAQSVQSSGNEDGLKPTLELYGEWQLEPLQLPHAVNGVVPKNERGQVDLWSDKCLPPGTVHLRLPRLFQVAKRLGIDYAPAMVGFDYRSGRCLPVFDGIVVCTEFRSAILEAYAEEEEQRRAVEKKQEEAQALSRWYQLLCSIVTRQRLKDSYKTPSHGIGNEGLPENDNVHRSTLSSRSSEREPSSSKLQTDHDHDHEFPKEDQSFDEETFVRTKRCPCGFSIQVEEL

SEQ ID NO: 57541 - protein, 254 aa, Zea Mays
MHAIATTQGLKGFWKGNFVNILRTAPFKAVNFYAYDSYRKQLVKWAGNEEATNFERFIAGAFAGVTATIMCIPMDTIRTKMVAPGGEALGGVIGVARHMIQTEGFFSLYKGLVPSLISMAPSGAVFYGVYDILKMAYLHSPEGKKRVSMMKQQKQEANALDQLELGTVRTLLYGAIAGCCAEAATYPFEVVRRQLQMQVKATRMNAFATCLKIVDQGGVPALYAGLIPSMLQVLPSASISYFVYELMKIVLKVE

SEQ ID NO: 57542 - protein, 568 aa, Zea Mays
MSLAKKEEVCSHRLVPRLDEPAVGVPIKKRPFFLSDRSVASAIPLSTKPPSPTNTMPVAATGSGCREEPFFNIANSDRKVITKGKGIPDTQIQDHVNTSLTALSMTNGNGVLFNASSEIPSIADSATRTSAPDDELQLQNFLALDLQLPSRQSGKNNNYSSLRKDEKLGQSRSEHYNNVPVANEINASGNSIVGRLPNLDLNIPPDPADSLEGLPKMHESGSGFYHHRTIQHQKAQVTPAAAISTINSGIGRNMCSTLNMSNSYGLSHKSGPADVTLDLQLKPPTRPELGINWKGLAPAPELSLSLFGKPMDEPEFPSTPNALFHSGTAGSSKKVSGEAAATLGSDKAPVEKIVTPVPCNVNPLNTTSATVSGIDQLPSNNLVKKEPEEISQQHIIDGAKKPNPLERQSVGQVIGCAESEKTDSAPQGARKIGFDLNSDIFANSSIHNESDVAAVDAPIPAKTLPDTCHDTSMPAVPEVDKFVKHEESTSATLSPVVETGNGHTTLLVEAKSQRSQGNVASPAVGLSESSSQPTVSTVCKPTAGHIRADEDTRQRSCDTNESCGALPS

SEQ ID NO: 57543 - protein, 348 aa, Zea Mays
MASSGLAYPDRFYAAAAYAGFGAGGATSSAAISRFQNDVALLLYGLHQQATVGPCNVPKPRAWNPVEQSKWTSWHGLGSMPSAEAMRLFVKILEEEDPGWYSRVPEFNPEPVVDIQMHKPKDEPQSVPASTNGTSISEPKIISENGSSVETQDKDVILEGLSTVISHDEWTPLSVSGLRPKPRYEHGATVLQNKMYIFGGNHNGRYLSDLQALDLKSLIWSKVDTKFQAEPADSTITTQIAPCAGHSLISWGNKFLSIAGHTKDPSEGITVKEFDPHTCTWSIVKTYGKPPVSRGGQTVTLVGTTLVLFGGEDAKRCLLNDLHILDLETMTWDDVDAIWNGQDPNNKA

SEQ ID NO: 57544 - protein, 1287 aa, Zea Mays
MGGSADPEAPSPSPTKPSPSSADGKPPRRCVQSKLSWGLVKPAGGGREGGGKGGGGEAGRGDAEAVPPVPAAGEAAATEVREGLEKGKKKRKPRKSEDGKKGSSSKQKQWQDQSNKDGVILVDESPQKKQRKGRKQDAILKEPNASRKRCKTSEAPDGPGSCQQLHISQIEASSPAAAPVIIDVDLMSTPSKAGHANSIDQDISPLKVDLRSEAKIAAEEIRRLSSGKKIHPFFHSRKLNKCASQDQDVINIENMHGLCDSERDPPFYPIHVVYQSEASMPIHWSNWIITDMSSFDTDTAVPLKKSVSYFEGLVKPLTIETNCKRHSNQLSDPILAECTTSGMPFPSFSGKQSEHSCFSDAINVDTQNLLRPGASCQASLLDLNVEPEDPQNGCQPACYLWTDKYRPETVAQVCGNSEHVKFLAEWLKSWDEKGHKIGVANGDTNDNSYQDISDSDYSESASDCENTLLITGPVGCGKSAAVFACAREQGFNVIEVNTSDMRNGAYVRQKFEEATKSHGLEKWSQEEVINPLRDDSLDPDSGTPDRTEYQCLMSCATRVMIDCDQQKSPVGYYSGLKACDEPPKQVANKTLILFEDVDTVFDEDRGFISTILKMAETTKWPIILTSNKKDPSLPNLLDQLVLDFKYPSTSELLSHVAMICKSEGVNVTVPQLKHVIDVCLGDIRRVVMFLQFWYQGHQFTERPKECLCGPFSLDLDAVHSTVPKMLPWEFPCKLSETLCMEVDKTILLAEEKKKQMEISDLEGLQLHVTAPLIKGRTSKTRRAKKSKLKRAHSTEHNDISPCKNELDDFHDLPDISLPSDKQIKRNRHRSLLLSESDDDPADVGTEKHNIFTVTEVGFFPQPSEVPPMHGQGISDQFHFPVESRETCEIADSFQNPPESNMYGSISQVCDTFMSQDVSCVPESSLILDGTSASISGDEFLSRAVSNGFSAFCEGTYTTSRMVLEDSDCVKNLMAERQKDVEDVVGETSETYMESFRRNEQASCSAAGFQLMDECSRAESIWLLSGKKSNDSCKVELVQDTWNRLRSCRLEFTSEANHNRATSGALKLVSEVSDLISESDLMLFRCYPLTKDTLDPSLTPCDEPVDSSWYSNQVEMGSVYAQHALRILSRNSQKIDGGSVDLSQELFASTAAVSFGKITCSGFRNDYGSTDLSHMKNPTTCIFKRRERHVHLCETLSPVVPPKLLQSLRGPAFVDYLSSISQISKLENLRLSENKVINKRRRSRQARHYLSSGALQLSHEDVVLLEESGCFSSRRERVEVVEQAPVST

SEQ ID NO: 57545 - protein, 333 aa, Zea Mays
MFHPLPPNLGPGVYLGAVERATSFITDDVWYGIYAGTNPETFVRADGAFIPFADDFDITSVSTSVKGVGVIGDVKAIDLQSSIGSLIGRQVVKVGRSSGLTTGTVVAYALEYNDEKGICFFTDFLVVGENQQTFDLEGDSGSLIILTGQDGEKPQPIGIIWGGTANRGRLKLKSGQGPENWTSGVDLGRLLDLLELDLITTSEGLQAALEEQRITLAAAAAAATNSTATESSPVAGPQENDKIDKIYEPLGINIIPRDSSSISTDQPNENVEELNLMSPMRNGQEGNGDLNNLMDLELENSPDGICIALNLGEREPKRLRSDFDSTLDMDLQK

SEQ ID NO: 57546 - protein, 336 aa, Zea Mays
MNKVLSAHFRAYIQALEKLQMDIATSTDLLGVETRSTGFIFSIGKEPLKTRPSVFALGERINILKEIDQPALIPHIAEAKSQKYSYEVLFRSLQKLLIDTATSEYLFTDDFFGEESIFHDIFAGPIQVVDEHFNTVLLNCYDAIGIMLMIRIIHQHQLIMFKRRIPCLDSYLDKVNMSLWPRFKMVFDLHLNSLRNANIKTLWEDDVHPHYVTRRYAEFTASLVHLNVEHGDGQLDLNLERLRMAIEDLLVKLAKMFSKPKLQTVFLINNYDLTISILKEAGTEGGKAQQHFEEVLKSNIAIYVEELLLEQFSSLIRFVKSRPDGCKFRESQHCRS

SEQ ID NO: 57547 - protein, 220 aa, Zea Mays
MELCIMLLECCSQERTYLRYYGLLGQRFCMINKVYQENFEKCFVQQYSMIHRLETNKLRNVAKFFAHLLGTDALPWHVLAYIRLTEEDTTSSSRIFIKILFQELSEHLGIRLLNERLNDPNMQGSFESIFPKDHPKNTRFSINFFTSIGLGGITESLREYLKNMPRLIMQQQKPESSESDSSGSESGSESSSSGSSSEPESESSPDERDRRRSNKRRKRT

SEQ ID NO: 57548 - protein, 249 aa, Zea Mays
MLDIRDGNSWYNMGNAYLTSFFVGGAWDHTKLHHSVKAYQNAEKDKTMNLNPDLYYNWATADKYLENYERALRGFEVAALKDPGLGANTEVQKIISLLDKLDNAMKGQLRSKRLASFVSSLSGVKLKSSHKKATISTLSVGLNKAVAVLGKVILFIRHDNVAPLYYLICDLERSYFILSVYGLHNDAIKDGDQVVLFEPYYRILDASCKDKHYQFKSIRVDFPEQILVNERVPAPHHVARASIHAHNKS

SEQ ID NO: 57549 - protein, 372 aa, Zea Mays
MRCLVGGGVQDSPRAAAKRVSPASWRLDAATAEADAGRAEAKGVRFCVRPPDVMETVHEVAIYIHRFHNLDLFQQGWYQMKISAMWEEGGNKTPASPARVVQYEASDVGADDALGIWKIDDVDNSFHTQPFRIKYARQDIYLSVMVSFNIFNIEEEGPAASAVMLKFELMYAPTLENGSELQASSVTSSAAVHEFRIPHRALLGLHSYCPVHFDAFHSVLVDLTLHIVYLKAGATKPSLKVPDQGLGPTSYHIVKALLTSRKLLLEELKKISGAIGKTVEELDVADLNLGRYESFNPSKSGLPNSSKVFPATGKGVGQLTGVLHDFLEKNNDMVNGTDDSMLYTLPQEELFELFLTLSGQLFTYMECIFEIS

SEQ ID NO: 57550 - protein, 168 aa, Zea Mays
MRRTTSMTEFAPPDALAAVMEDEEGPQLSDDSSRDGGQQDWLSALGGGGGGVGGAAAQEDWLAAYHARAAPARAGLRRNSADYSAVETAAFLRACGLCRRRLGPGRDTFMYKGEAAFCSLECRERHMTQEEWKDKCAVTSIKDAAAGSAKVKGRRAGSGKAGGTVAAA

SEQ ID NO: 57551 - protein, 98 aa, Zea Mays
MQIYIAAGEIYGGKHRMASLTSAYLNVVCAQIYYASIVAYLLHSTLPSLLFFLVDAKIKFTSMVAPHPQPVTYFSIIYLWKNEFSCLVSFIYRKTMCT

SEQ ID NO: 57552 - protein, 781 aa, Zea Mays
MKRARSSEVFIGVGRLRARRGLAPLLAAAAFAYLLFVSVKLTYLGSAGPAPAVGRLATTGAGEPAARARSSGGGAVSGYGRITGEILRRHEAFEERRKRWGQLGNFTELERVAAEAWALGAAAWEEASAFDGDVDYIASRDVAGEGTAKCPGSLALGAGETTAFLPCGLAAGSAVTVVGTARTARPEYVEALERSGTGNGTVLVAQFAVELRGLRATDGEEPPRILHLNPRLRGDWSSRPVLEMNTCFRMQWGRAQRCDSTPSGDDDLVDGLRKCEKWDWQDVVESKETKTSSWFNRFIGRAKKPEMRWPFPFSEGKMFVLTIQAGVEGYHINVGGRHVASFPHRMGFALEDATGLAVTGGIDVHSVYATALPKAHPSFSLQQVLEMSERWKARPVPEEPIHLFIGILSATNHFAERMAIRKTWMQFPAIQSGNAVARFFVALSHRKEINAALKKEAEYFGDIVILPFIDRYELVVLKTVAICQYGVHNVTADYIMKCDDDTFVRLDIVLHQISTYNKTSPLYLGNLNLLHRPLRRGKWAVTYEEWPEAVYPPYANGPGYVISAGIARDVASRHTNHSLRLFKMEDVSMGMWVEDYNASAPVQYVHSWRFCQFGCVDNYFTAHYQSPRQMLCLWEKLSAGRAHCFGAQRTAAGPVDRRDKETRAVSGGFAKTLPRLQARRQAIGETSGVVEGSRPSLPLSRPLAPSPPAFSPPATDGAHCAGSQPRLSPERLRSPHRVGVALYWHHPGPRALLAPDRRGVARRPVPARRPFRAIPVKMLFA

SEQ ID NO: 57553 - protein, 322 aa, Zea Mays
MESRNVVVCDNGTGYVKCGFAGENFPTSVFPCVVGRPLLRYEESLQEQELTDIVVGAACADLRHQLDVSYPVTNGIVQNWDDMGHIWDHAFYSELKVPVVDGYSYPHLTKRMNVAGRHITSYLVDLLSRRGYAMNKSADFETVREIKEKLCYISYDYKREYQLGLETTILVKSYTLPDGRVIKVGTERFQAPEALFTPELIDVEGDGMADMAFRCIQEMDIDNRMTLYQHIVLSGGSTMYPGLPSRLEKEILDRYLDVVLKGNKDGLKKLRLRIEDPPRRKHMVYLGGAVLAGIMKDAPEFWITRQEYQEEGVACLRKCGQS

SEQ ID NO: 57554 - protein, 205 aa, Zea Mays
MLCFFSVRVGSSWWDCDHAGFCGSRNRNMASRARWVEEAGAAEVVENRGKLWLTTGVTRAGKLYYNVEETGFLAEMGALILLNDKDETIGIEDIYGKLAGGNYGCSWDTFQAYKHLKSLGYIVGRFGVPWTMKHGGTHHTIAPQINILETDQSLNRVDGASNDITKLLKEIQIDGICPSFEVYLPNSKFKKSSPGCPSFLLCLLS

SEQ ID NO: 57555 - protein, 90 aa, Zea Mays
MCFLLVSFSYATAPGGTGCCLTRPGFEPASLMRLYRVFLWLTSSTLAFRCLSSTARDVTDMYGDPGGARHARNKRDHHFLVLSRQEKASM

SEQ ID NO: 57556 - protein, 738 aa, Zea Mays
MALAWMVSKENSSHCAGGILADDQGLGKTVSTIALIQKQRMEQSKFMFVDSDRLKSEALNLDEDDEGEQTVSNEPKKDQGACSLSTSAGTSAELFVNQPNNVVNKMVETKAERKKKAKVSTSSASTSRSMTRPAAGTLVVCPASVLKQWSNELTDKVSESAKLSVLVYHGGARTKDPRELAKYDVVVTTYTIVANEVPKQMADDDADQKNSEEPSASNKRKPSANMQNKAKKKKKKLKDSNFDLDSGPIARVRWFRVVLDEAQTIKNFRTVVARACCGLRAKRRWCLSGTPIQNAIDDLFSYFRFLKYDPYCTYNSFCTMIKHPIARDAINGYKKLQAVLKVVLLRRTKETVINGKPIINLPPKTINLNKVDFTQEERSFYLMLEERSRQQFKAFAAAGTLKQNYANILLMLLRLRQACDHPILVKGNQSEYGGDGSIEMAKKLPKEVVIDLLAKLEVGSTLCGLCNDTPEDAIVTICGHVFCYQCIHERITTDENMCPAPNCSRTLGLELLFSSGALKICISGKSSSAVASSSSDNESSSISQSSFVSSKIQAAIDILNSIIVMDPLTESYTMESSRSGLGPVKAIVFSQWTGMLDLLELSLNINCIQYRRLDGTMSLNLREKNVKDFNTDPEVRVMIMSLKAGNLGLNMVSACHVILLDLWWNPYAEDQAVDRAHRIGQTRPVTVSRLTVKDTVEDRILALQEEKRTMVNSAFGDDKAGGHATRLTVEDLRYLFRI

SEQ ID NO: 57557 - protein, 257 aa, Zea Mays
MPEMEAVSREEYLASLRRRSSGFSRGVSKYRGVARHHHNGRWEARIGRVFGNKYLYLGTFDTQEEAAKAYDLAAIEYRGVNAVTNFDISCYLDHPLFLAQLQQEPQVVPALNQEPQPDQSETGTTEQEPESSEAKTPDGSAEPDENAVPDDTAEPLTTVDDSIEEGLWSPCMDYELDTMSRPNFGSSINLSEWFADADFDCNIGCLFDGCSAADEGSKDGVGLADFSLFEAGDVQLKDVLSDMEEGIQPPAMISVCN

SEQ ID NO: 57558 - protein, 871 aa, Zea Mays
MQVKSVSSSDIRISVSSALSTSSHGSGGEDSESFGDIYVWGEVICDTISRSGSDRSAYSPGTTTDVLVPKPLESNVMLDVSYVACGVKHAALVTRQAEVFTWGEECSGRLGHGIGTNVFQPRLVESLSTCNVELIACGEFHTCAVTATGDLYTWGDGTHNAGLLGHGSNVSHWIPKRVSGPLDGLPVSAVSCGTWHTALITSSGQLYTFGDGTFGVLGHGNRASCSYPKEVESLKGLRTISVSCGVWHTAAVVEVIISQSNASSGKLFTWGDGDKYRLGHGDRSSKLKPTCVPSLIDYNFHKAACGHTLTIGLTTSGHIFTVGSPVYGQLGNPNNDGRYPRLVEEQLGGGGVVEVACGSYHVAVLTNAGEVYTWGKGTNGRLGHGDIADRKVPTLVEALKDRSVKRVACGSSFTAAICQHKWVSGMEQSQCSACRQPFGFTRKRHNCYNCGLVHCHSCSSKKALRAALSPNPGKPYRVCDSCYVKLSKVLDSGVSYSRNTIPRLPGDTKAERIDTKATRVAQSNSSDMIRNLDVKAAKQTKKSEYSSQVPATLQLKDIPFISAPDLQNLSTVANQYPYDPRSTLPSLRMPYLNYSSSMSSESSESLKDANELLKQEVQKLQAEVNSLRQEREQQDAELQKADAKAREAMNLATEEASKLKTAKDVINSLTAQLKEMSERLPPGACDVKNNGRVMGDLAPEMGREKQMRYGDRFSGLPAQVYQTSNYSETAMVPPQGSSRSEHVDGVREFFSPVQQMANGGGSTTIGYRYRSDDHDRRETDRFQINLQSLNTRSSNSPSNQVDAEWIEQYEPGVYLTLVSLRDGTKELKRVRFSRRRFGEHQAESWWKDNCEKVYDKYNVCGTDRLSSVTTA

SEQ ID NO: 57559 - protein, 97 aa, Zea Mays
MWRRLHTLAPALRRATAAAAGAPAASASSAARAAPLSSAAAAFRRTSPLLSGDKPASVEDVMPIATGLEREELEAEGRSGLTWIPWSAPSVPRRNHL

SEQ ID NO: 57560 - protein, 1379 aa, Zea Mays
MASPGQMTASNLLRTEGFPGNMVKICGLNPARSLGSRRLRMTQHSFHQQHLCCPRLQRVMTHNIRLLSSPGAVASKGFDSPLVEKPDTASDVKIIHLYRIPFLQESETMELLRKVKAKVSANIVDILTEQCFNIQLDNSLTPEKLTMLHWLLAETYEPEKLQTRSFLEDEVSRNSCTVIVEVGPRMTFSTAFSTNAVSICKSLSLVEVTRLERSRRYLLCLEPGSDPLDEVIERGEEALKEINVKMGLAFDKQDIDYYTHLFRDDIKRNPTTVELFDIAQSNSEHSRHWFFNGKLVIDGETMPTTLFQLVKSPLKANLNNSVIGFKDNSSAIKGFPVNQLRPTIPGFTSPLSIIMRELDILFTAETHNFPCAVAPYPGAETGAGGRIRDTHATGKGSFVVASTAGYCVGNLRIDNSNAPWEDPSFSYPVNLASPLQILVDASDGASDYGNKFGEPLIQGYTRTFGMRLLNGERREWLKPIMFSGAIGQIDHAHISKGDPEIGMLVVKIGGPAYRIGMGGGAASSMVSGQNDAELDFNAVQRGDAEMAQKLYRVVRACAEMGESNPIISIHDQGAGGNCNVVKEIIYPKGAEIDIRSIVVGDHTLSVLEIWGAEYQEQDALLVKLESRSLLESLCERERVSMAVIGKIDGSGKIVLIDSAAVEYSKLNDLPPPTPVEELELEKVLGDMPQKTFEFRRVSQVTEPLDIAPGVTLLDALKRVLRLPSVCSKRFLTTKVDRCVTGLVAQQQTVGPLQLPLADVAVIAQTYTDLTGGACSIGEQPIKGLLNPKAMARLAVGEALTNLVWAKVTSLADVKASGNWMYAAKLDGEGADMYDAAVALADCMIELGIAIDGGKDSLSMAAQCDGEVIKAPGNLVISTYVTCPDITLTVTPDLKLGEDGILLHIDLAKGNRRLGGSALAQAFDQIGNDCPDIDDVLYLKKVFEAIQELLSQRLISAGHDISDGGLIVCVLEMAFAGNCGFKLDIDLEDRSLIEGLFAEELGLIIEVHSKYLNIVKQKLEIAGISANVIGEVTNSPEIEVFIDGNLHLKEKTSDLRDLWEETSFQLEELQRLKSCVKLEKEGLKCRTSPSWSLSFTPKFTDGKLLTASLKPKVAIIREEGSNGDREMAAAFHAAGFEPWDITMSDLLAGKSSLKEFRGIAFVGGFSYADVLDSAKGWAASIRFNQPLIQQFQDFYHRPDTFSLGVCNGCQLMALLGWVPGSGVGGSLGTGGDMSQPRFIHNESGRFECRFTSVSIGDSPAIMFKGMEGSTLGVWSAHGEGRAFFPDENVLATVVKSNLAPVRYCDDSNNITETYPFNPNGSPLGIAALCSPDGRHLAMMPHPERCFMMWQYPWYPKEWQVEKSGPSPWLRMFQNAREWCS

SEQ ID NO: 57561 - protein, 894 aa, Zea Mays
MFTHHKYSNKGQMNSERNVKIISGRDGQKKGNSQYGQIVHMPKDMVTTVNGNVDAKFEDEVRVVKNDRFQRQRESWGGECKKGSKPWPGRKAATVDELVKHMSNVPSYLQRKETSDHLQDKALNVGVLEWGLLANWSQQEKHKLTRSYGPSPPNTSRSVLFPSPSHSSPSPSSRSLESNQSTPMSGHHHSSIRAQQNRLTDKHHERARCPPSPNSAVLSLLSGHGTHPCPENGHNYVGLGLSNVSLASDSLGSSSRSCGRHEMVGDEETRRKTEDVVHHCSRRLFADSDNIGKHFFASNTNDSMCNDPEQSIGLNGENFESLTSDAVMDTARNDSKSSDYLLEDIEPSLEFPRIPYSCPLPIIDSAAKEIGITSTEAGDAKVSKNSNRNQSAMNVTENPPQYSAKFSDKMPYCHLGSGMNRGSCSSSLKESPHIRQPNIVPPVDKTGDRSSPNSKGRRSPLRRMLDPILKPRHSSPVRPSFVPKCQLPVNTTKQSLDLGKSVPHNVQRRSVDLVVNSNYLIEENRNQPPPRVLLNSARYIQKGNDSATTRQALLQLAWKNGLPLFILSYGDSDILAATVRRKGIPEKDGLESTYAVFTVEEPKKKSGAWIKTGGKNKKHHLLSSIVGEIKVARRKSRCHHTTDVHVHREFVLVGSKFLPSSEESGDSNVSGELAAFISTLPQQEAETSKQSSSQNTRQRNSMPIGCGCPPLGNFHPSTRSANSASANVVAVLPDGFHGTITSGQPLPLIERWRSGGACDCGGWDEGCMLSVLTDASEENDAIQANQAKDGSQRFELLDQGRSREERHAFSMTSFKEGLYTVEFRSSIALLQAFAMCIVMLHGRYPRRTQVGSQAEQEHDLLAGHELKAMAASQGRRPPTSYVPHRPPLSPVGRA

SEQ ID NO: 57562 - protein, 392 aa, Zea Mays
MAFLFGAFLGLVVGVAVVMAFARFENSRAEQRRELAATAAAFSKLTVQDLRKLIPPEFYPSWVSFTQKQKLKWLNQELTKIWPFVNEAASELIKTSVEPIFEQYKSFILASLHFSKLTLGTVAPQFTGVSILESDDSAIIMELELQWDGNPNIVLDIQTTLGISLPVQVKNIGFTGVLRLIFKPLVSEFPCFGAVCCSLREKSKVEFTLKVIGGEMTAIPGISDAIEGTIRDTIEDTLTWPNRIIVPIVPGDYSDLELKPTGVLEVKLVEARDLKNKDLVGKSDPFALIYIRPLHDKTKKSKTINNDLNPIWNEHYEFVVEDISTQHLTVKIYDDEGLQSSEIIGCARVDLADIQPGKVKDLWLDLVKDLEIQRDKKPRGSPGAPLLPLREA

SEQ ID NO: 57563 - protein, 263 aa, Zea Mays
MDNPEMQRFIQEFFLQGRFIFGPDVRSVFLTMFLIIAPVVVFCVFVARHLINDFPDSWGISVMVVVVVFTVYDLTLLLCTSGRDPGIIPRNTHPPEPESIDGINDTGVQTPQQFRLPRTKEVVVNGISVRVKYCDTCMLYRPPRCSHCSICNNCVERFDHHCPWVGQCIGLRNYRFFYMFVSSTTLLCLYVFAFCWVYVIKIRAAEHLSIWKALLKTPASIVLIIYCFLCVWFVGGLSVFHLYLMGTNQVGPTLIPVLNFLCH

SEQ ID NO: 57564 - protein, 474 aa, Zea Mays
MSQQSQSISLLEETDRQIREKSCSEQVRRLKEARNSYHEDLVDCVRHCVWYRATLFSQWKQRGMYATCMWVVELLLVLSNSNSMFHYVPEFYVESLVDCFHALRRSDPPFVSPALFLMQGLASFVTLVVKHFDDTRIYKEFMLVFENNREAINKMPRSLLSAFDNRSWIPVTNILSRFCKGSGFASYKNGESASSATFQVLLRETCIHEQELFFSFLNRLFNTLSWTMTEFSMSIREMQDKNQVADLQQRKCSVIFDISCSLARILEFCTREIPCAFLMGPDMNLRRLTELVVFILNHIISVADAEFFDMTLRRPGQHQEKTNRTMILAPLVGIILSLMECSSTSERRELNDVIAVFASMDCPATIHFGLQYLLSYNWSNVLRGDSSLAKLAQLKEFSHYFRRITASVDGEEEDHSLNAGDEDDDHTCCICYNCDSDATFQPCHHRSCFGCISRHLLNNQRCFFCNAVVTSVTR

SEQ ID NO: 57565 - protein, 130 aa, Zea Mays
MHGFGIYSFANGHRYEGAWHEGRRQGLGMYSFRNGETQAGHWQNGVLDTLCTQNFIPGSPIAVNHSKVLNAVQEARRAAEKAYDIPRVDDRVNRAVAAANKAANAARVAAVKAAQKRNPNNGDDLPLSVV

SEQ ID NO: 57566 - protein, 226 aa, Zea Mays
MVAIMRSLRHPNIVLLMGAVTQPPNLSIVTEYLSRGSLYRLLHRHAARENLEERRRLSMAFDVAKGMNYLHKRNPPIVHRDLKSPNLLVDKKYTVKVCDFGLSRLKANTFLSSKTAAGTPEWMAPEVLRDEPSNEKSDVYSFGVILWELMTLQQPWSNLNPAQVVAAVGFKGQRLEIPSSVDPKVAAVIESCWVREPWRRPSFASIMESLKLLIKTLPPNQLLEEN

SEQ ID NO: 57567 - protein, 151 aa, Zea Mays
MEEREKLVCLAKLAEQAERYDDMVEFMKNLARMDVDMSAEERHLFSVGFKNTIGAKRASWRIICSHEQKVAADRQTGVMIDAYKKKVEEELRKVCNEVLSVIAIHCLPLASTGENIVFFYKMKGDYYRYLAEFSTGTEKKAASDQSLMAYQ

SEQ ID NO: 57568 - protein, 93 aa, Zea Mays
MSDILEKSEELATLTYYSNLLESEKTYLENQVDHLNEELKCTRKEHAAYVRKVLDAARAIPNDLEPINSATPMLCRDRGARRGSVSQPQAGHG

SEQ ID NO: 57569 - protein, 271 aa, Zea Mays
MVIFPNYESSIERDDIKDPFTEVSMFKKNYDHLPKDTYFGLYKEATRGNPNYFLTYGNGKSAARVQEHLRPNGAHRWHNYMKSPNEIKLEEAAILHYTYTKFSDLTSRRDRCGCKPTKEDVKRCFILEFDRLAFIIASTATEEEMRNWYKEHVVWTDRDTNLKLLRKSVLTRIYAPMAIIRGLKESGVFTNAVTSAKAQSKTKSSNMGLGNKDPIQPNGTAGQSTLEGSHGKLQATVRKILEMVDTQEEAAMPPMSPPGFLELTESVTAFS

SEQ ID NO: 57570 - protein, 55 aa, Zea Mays
MICCSCVGVPVGVDIVGVHGDGSIDVALFWDVVFIEPMPAPGRPVACLEADLTEQ

SEQ ID NO: 57571 - protein, 254 aa, Zea Mays
MSLYWCSVRPGFSSFSLGSSASSNALKVDLRRRSGCLSAGRDACGSTTDIRAIASSTDLASMRESSLLVFSTRTTRSYSSSSATRAARFLAASASRSRRSRSSSRRRTSSASVTLDGADAEAATAAASASARRRFSALRAAASARFSASSSRRRAARDLGPSASAQYCSSLARSWRSRRSASAAERRSRAASALEFTPIFFGITGPLVRRLARRRVADVTAGWAEATAIRTPLCGSGGMEVGEVSFCRNWPAVG

SEQ ID NO: 57572 - protein, 113 aa, Zea Mays
MDDDATVGSRQRQQQPASPAAADSRAMMAELDAPLHALGFEMEELSPSRLTGRLPITPICCQVWEVKLWKMDPSTGAKGPQIAESRVTLLSNLPLPEEHKRAGDALKKYSSKL

SEQ ID NO: 57573 - protein, 73 aa, Zea Mays
MIQTFSLLSLFNFLESMCFSSVLPLIQNFFKSSGEFMSILSAFLVVYPSASSCPHKINVFLMTSEVQMIKIFS

SEQ ID NO: 57574 - protein, 1022 aa, Zea Mays
MVLRERRETSKSIFQRYPRPEKECQSFSLISHDRSLDVICKDKDEAEVWFAGLKTLISRCHQRKWRTESRSDLLSSGATSPRTYTRRSSPLSSPFSSNDSIHKDGSDNYRLRTPYGSPPKNGLEKAFSDVMLYAVPPRGFFPSDSNAGSVHSMSSGHSDNTNGHPRGVPMDAFRASYSSAVSSSSHGSGHDDGDALGDVFIWGEGTGEGILGGGGSRVGSSSGAKMDCLVPKPLEFAVRLDVQNISCGGRHAALVTKQGEIYSWGEESGGRLGHGVDCDVSQPKLIDALSHMNIELVACGEYHTCAVTLSGDLYTWGDGTFKFGLLGHGNDISHWVPKHVNGPLEGIHVSSISCGPWHTAVVTSAGQLFTFGDGSFGVLGHGDRESISVPREVESLKGLRTVRAACGVWHTAAVVEVMAGNSSSSNCSSGKIFTWGDGDKGRLGHGDKGPKLVPTCVAALVEPNFCQVACGHCLTVALTTSGHVYTMGSAVYGQLGNAQADGMLPVRVEGKLHKNFVEEISCGAYHVAVLTSKTEVYTWGKGANGRLGHGDTDDKNTPTLVEALKDKQVRIVVCGINFTAAICIHKWVSGVDQSMCSGCRQPFNLRRKRHNCYNCALVFCHSCSSKKSLKASLAPNTNKPYRVCDTCYSKLTKGLETDMHSSAKRAATVPGVSDANEEDLETRSNAQLSRLSSMESFKHLDSRYSKKNKKFEFNSTRVSPVPNGSSHWSGLNISRSFNPVFGSSKKFFSASVPGSRIVSRATSPISRRASPPRSTTPTPTLGGLTSPRVVPNDGKPTNDALSQEVLNLRSQVESLARKSQLLEVELERTTKQLKEAISIAGEETAKCKAAKEVIKSLTAQLKGMAERLPGGAAKNTKLPPLPGIFIPSDIPSMPTESEGSPSSSGEQIINGHNGLLTSNGQSSIRNKTSHPEVGKNGGRLPDAESCHDAEWVEQDEPGVYITLTALPGGARDLKRVRFSRKRFSETQAEQWWQQNRARVYQQYNVRVIDKSTASVNSDIAAN

SEQ ID NO: 57575 - protein, 608 aa, Zea Mays
MDDSELHEEENPTNSAVDDDDDEDYEEPGGGNHLLGFMFGNVDDSGDLDADYLDEDAKEHLFALADKLGPSLKDIDLMKSSPAPTDPSEQDYDEKAEDAVDYEDIDEEYDGPEVEATTEEDNVLSKKDYFSSSTVYASVNSTVSVFDDENYDEEEEPPNDNEPPGDSAAQNLSSVSIEQADTTTSSDNLAMEKIGLLSHPEENMDFEYEDLENEKGTGEGQLEPESATSLPVLCIEDGNAILRFSEIFGIQEPVRKVKTDHHKRPVDKELQIANVADNVEEDEELILRSTMQNFSTLKHIHVNEDFVESDSDESISDVTLRLKDSCLSEQPMKDVHMDIRIVQRSPTCPDFYPLEHYDWESDIIWNNSPATDQQAYAKICESEESEDTHGEDQGKDYGQASRCWDVQSKTNGSPVIKETFCCTEMPAPANYCPPGKSYPPLTNEDNLDHIMPNNLDDAVKIDTMVRLNNLSVLNRELLEGSWLDNIIWDPNEVTPKPKLIFDLKDDHMLFEILDEKNVDHLQSHARAMIVSQSTKTSTPTVDNFGDQPKPLSGRFNISNDKFYSNRKTPQQAKSHTKKRALMGIKVVHSAPAHKLQTMKPVLSNEENN

SEQ ID NO: 57576 - protein, 726 aa, Zea Mays
MEPRTEGDASRNLRQGRLLEPPPVPAVRTSPEGVQRHTGQDVIASRSQSAAASETGSSLPCEDGNATAETIGSSTHPVHIGVQNQDIEQEQVHETGKRYKRLTSDVWNYFTKKKEIIEENGKKREQIWGYCNFPNCKRRYRAEGRQGTTAFKNHLRSAHSIVRGQQQLKFEKDLGNNITHIQPFMYDQEVSVKKLIMAIIMHDYPFNIVEHGYFVDFIKSLHPSFPIKSCNAVGKEVMDTYLEEKEKLYAHLKTVHCRFSVTMDMWTSCSNKSYMCVTVHWINDDWCIQKRIIGFFNVKGRHTGKKLSETFTEAMVRWNLDKKLFSLTLDNASANELAVKDIISDLKDGQASLVCDGLFFHVRCACHILNLVARDGLKVISKTIDKIKALVLAVKGSPLQWKELMKCASESELDTKRGISLDVSARWNSTYLMLRDALYYKDAFARLKSSNRHMYVKNYPSPDEWDMALKIFQCLKKVYSLAEILSGTSYPTANLFYRGFCDIKVLLDDWCSSDDATISEMAIAMSQKIEKYWEHSNLALAVACFLDPRYKKKVIEYYMKKFHGDGYHVELEKIVNVVRGLYCFYSSSTPAPAKSTSPEPANSASDILMASVSDELDSFLYGTNEPTLVRSNELEKYMADPLLRLGGPFDGPFDILAWWKSKREVYPILSQIVRDVMAIQVSTVASESVFNAAGRFVDPYRNRLEPEMVEALICTKDWIAAERKDS

SEQ ID NO: 57577 - protein, 488 aa, Zea Mays
MQKFVEKIVSMMKSEGLFEWQGGPIIMAQVENEFGPMESVVGSGGKPYAHWAAQMAVGTNAGVPWVMCKQDDAPDPVINTCNGFYCDYFTPNNKHKPTMWTEAWTGWFTKFGGAAPHRPVEDLAFAVARFVQKGGSFVNYYMYHGGTNFGRTAGGPFIATSYDYDAPIDEFGLLRQPKWGHLRNMHRAIKQAEPALVSGDPTIRSIGNYEKAYVFKSKNGACAAFLSNYHVKSAVRIRFDGRHYDLPAWSISILPDCKTAVFNTATVKEPTLLPKMSPVMHRFAWQSYSEDTNSLDDSAFARDGLIEQLSLTWDKSDYLWYTTHVNIGSNERFLKSGQWPQLSVYSAGHSMQVFVNGRSYGSVYGGYDNPKLTFSGYVKMWQGSNKISILSSAVGLPNNGDHFELWNVGVLGPVTLSGLNEGKRDLSHQRWIYQVGLKGESLGLHTVTGSSAVEWAGPGGGTQPLTWHKVLPSIRQRSEEMHGKAAWQ

SEQ ID NO: 57578 - protein, 152 aa, Zea Mays
MPGKGQRRREKNFRAAHGGVPCLPPPPKQRELEAIPTKLRRLIAFQNKHNANADASSGGAPKKQDDGLRKNKLATDKAKDKKTKKQALVVPADSKASDIKGNDKRSAANEDVNAEGSKGKRKRGNVKDLRFEELDKNISASKKQRRKQRCKQ

SEQ ID NO: 57579 - protein, 318 aa, Zea Mays
MHGGSYNAYTSSETTNFFFDVNVDNFEEALDRFAQFFIKPLMSQDAVLREIKAVDSEHKKNLLSDGWRMYQLQKHLASKDHPYHKFSTGSWETLETKPKARGVDIRLELLKFYKNYSANLMHLVVYGKESLDYIQGLVERMFSDIKNTDQRCFKCPSHPLSEEHLQLLVKALPIEEGDYLRIIWPITPSIQFYKEGPCHYLSHLIGHEGEGSVFHIIKELGWAMNLMAGESTDSNEYSFFSVSIRLTDAGHEHMEDIVGLIFKYLHLLKVDGVHEWIFNELEAINEMEFHYQDKVDPISYVMRTVSTMRVIYCLVVFS

SEQ ID NO: 57580 - protein, 218 aa, Zea Mays
MEKGASEASPPCARCGKPAQLQCPKCVELKLPRENAAFWKLEDGDIVNVDVTVYYKGVHGDLNETYFVGNVDEASKHLVRCTYECLEKAIAIVKPGVRFREVGEVINRHVSMSGLSVVKSYCGHGIGELFHCAPNIPHYSRNKAVGIMKAGQTFTIEPMVNAGVWNDRLWPDDWTAVTADGKRSAQFEHTLLVTETGCEVLTARLPSSPDVFPWLKKP

SEQ ID NO: 57581 - protein, 264 aa, Zea Mays
MLVYEYMPNGNLRDHLSARAKVPLDFPMRLRIALGSSRGILYLHTEADPPIYHRDIKASNILLDSKFVAKVADFGLSRLAPLPETEGSAPGHVSTVVKGTPGYLDPEYFLTHKLTDKSDVYSLGVVFLELLTGMQPISHGRNIVREVLAANQSGMIFSVVDNRMGSYPAECVEKFAALALRCCQDETDSRPSMVEVVRELDMIWRMTPGTENIASSESGVMGMGSNSTSTPTASGSRMDDHYISSMEVSGSNLLSGVMPSINPR

SEQ ID NO: 57582 - protein, 131 aa, Zea Mays
MAVARGDNTGESIPMLLRIPRFFDPWGGYDMIGFGDIIFPGLLVGFSYRFDRANRKGVLSGYFLWLIVGYAVGLFITYLALFLMDGHGQPALLYLVPCTLGVIVILGWLRGELYELWNFGKSPGENFVNEP

SEQ ID NO: 57583 - protein, 406 aa, Zea Mays
MAGPKFGSFKAEKGDSAAAAGAAAQRRDPYEVLGVGRNATEQEIKSAFRRMALKYHPDKNSDDPVASEKFQEATFSYNILSDPDKRRQYDASGFEAIEADSQELELDLSSLNTVNTVFAALFSKLGVPIKTTVSATVLEEALNGSVEISQLQLGKSLCRKLLYFELEDNGGLSLALQEDSAKTGKVTSAGMFFLGFPVYRFEQNNSAAAAKDPDSAFFKRLDGFQPCEVNELKAGSHYFAVYGDNFFKSASYTIEVVSAEPFSAQKEKLRSVEAKIIAKRSELSKFESEYREVLAKFTEMTSRYAQEMQTIDDLLKERNAIHASYTNNPTLQRSSSSSKGKSPSKGSRSEDDQTVKKEKKSKSQPMEGSKSDDEGPENKKEETPKDRIRRKKWFNIHLKVDKRRPC

SEQ ID NO: 57584 - protein, 543 aa, Zea Mays
MIVARSTISAAYRTAQIVASLPNLSHQSKAFPEALFHQLLLAMLYPDCETHLGAHRIFSVVLVPSSVAPFSFADTSQTRKIDLRRTLSRTTSVFSSSAALFGKLKRDMLSFRESALQDNTKLLPISENANEISANDAKLFKSQTIQRMVSTRDISLPSSTDTSTSSEPTSYQEKDAVTLMLSVRQANLLLSSLWTQALSPENVPRNYEAISHTYSLMLLFSRAKGSGAEVLVGSFQLAFSLRSVSLQAGFLPPSRRRSLFTLATSMLVFFSKAFNVLALIPVVKQVLTESTVDPFLCLIEDCRLQALDSANESCTKLYGSKEDDELALKSLSNIDMNENQSKETSVPLILDSLEDMSESELSAIRKQLLEEFSADDSCLGSHFTETPSQYPAQNGKLHHKSMEVIPLGFVFEDDTLAEASDSSVEPHLQHPPCNNILDVNRLLDSVLETSQHVGRSSVSTNQDLPFKDVANQCEALLIGKQQKLSACMSVCEKEAGESSVEQSSRQDPQADTFLCTADEQWHPNSCKLPALCPYDRFLATSGC

SEQ ID NO: 57585 - protein, 1175 aa, Zea Mays
MQANKPPKVNWPHHENAVQGYSSRDDFLSSSFLFSLPTQRPNPEARERMLSLRSSACKIQGPERLQAPLIEKAWRSLCNTQAACKSYLRPGLSAKARDCDRGHARTYGEGSYNTNKMSTVPGNRILSMESTGQPSERVSLQNNSSHQTVGICSSMRSHQNNHVVQEDMRATNQYNFARTNAALHQSMAADNMCSYDKFDAMDDDILATIDVDQIVMEHYQATNAPRGSASHNMSTPPGNKCSVNGMDEANLPRELSELCNHQCKLAFCREAMTHLQEMKDELLAVANELLDDDGELNPQHSQELHKRRLHLKKLVQLLEDHMTRSAQDEERQISHSMASTTSTQQHLPPMTPGSTFTMDSNRFQSQVYVGNGPRDSDLCYSPAPYSCSDNLSTPLNSVWKSYTPKVIDINYTEGSGDRKWSSTNFPWTKELEAKNRNKFGNHSFRPNQREIINATMSGHDVFVLMPTGGGKSLTYQLPALISSGLTLVVCPLVSLIQDQIMHLSQANIPATYLSGNLDWSEQQEIMKDLMSCRYKLLYVTPEKIAKSGALSRLLDNLNSQGHLSRIVIDEAHCVSQWGHDFRPDYKSLGVLKQNFPKTPVLALTATATARVKEDVVQALALENCIVFKQSFNRANLRYYLRPKTKKCVEDIDLFIRTNHSKECGIIYCLSRMDCEKVAEKLRDCGHKVSHYHGSMDPMDRTHIQKLWSKDKINIICATVAFGMGINKPDVRFVIHHSLPKSIEGYHQECGRAGRDGQPSSCVLYYQYSDYIRVRHMITQGVTEQTGAPRDLSSHEQALKTHKDNLLRMVSYCENDVDCRRLLQLIHFGEKFDPSLCARTCDNCLKESGWVEKDVTNIARQLVELVTRTGHSHSSTYILEVYRGSMSQNVKKQRHDALALHGAGRHLAKGEAARIMRHLVTEEILNEDVKKSDMYGSISSVLKVNHLKASGLLSGKHNIVLKFPASDKASKMRNLDASLLPQTNKNVQQQSEVDVKLASMLYEALLSLREQIMEECNEGFNAYHIFKTDTLKEMSIRVPRTKEELLDINGLGKTKVKKYGDRLLATIEDFLSKHPNPRRNSGGGGGGNEHSDAAKKRRGSTAISAASYGDYDFDERTGQQSKKRAAKTRTVSAHGPRCTDADLDGPEVVEVDGELRSVRKPVAYGNGRVLPKWAPL

SEQ ID NO: 57586 - protein, 590 aa, Zea Mays
MKFNSDGKTIFCGLHESLKALSWEPTICHDVIDVGWSTLADLTVDEGKLLGCSYNQNCVGVWVVDLMRNEPYVDSSAGSHLNGSINRPIQSDDSMSSVFGRLSISRSPANEIGSDTLLGCSMSGSKESPVSTSASMRGLSKPPGKGDLRLSRSISTPLLSPRVRLNPNFIDRQKNQAATAVPLPEPIVRFKANLSSDAGMLSRKSHASAAPMYRSRSNSSRYGIMESSSIPVLALRHSSRKDAGPVHSEAATGELADIEPQNIEKEGLVANHGKEDGKLVPVIASRSSKIVEEVGYRRITNDVGCKRVTLESGLRVNSDMDYRSRAPESHEVQQLIHLSEPAGLHGKFIRESSGAGDNNCSGSICTESAEFNEVDIWYRVSGFDKWNPAAARNPEFASIHRNEVIGIRQLMESSGKYVVDDRPSSSNYDNIQYVTTLYSSVVYRCWQRNDIKGSIDATWRMLDFAVTNDIVNALMENRNCITLDVCASLLRLTTSLLESTYDRHMSIALRMILSFVKSFGPTISSALLAIPPVGVDLEAEQRMEWCNLCFQELKNVSVSLKFLTRRQGEVGRLAQELSLFLQDLFQLSSV

SEQ ID NO: 57587 - protein, 315 aa, Zea Mays
MVPGRVARTTGRHGGGRRAAGGTSGGRRRRAARRRGDRGGLRVRDVGLVAAGQVRLRHLRLGPRRPAQPGNELSGTGVGARVGADQYAADVIALKALVDDVYRSEPSKPLVVAPGGFFDQAWFTELVVKTGPDLLSVVTHHVYNLGPGRDTHLIDKILDPSTLDGMVSTFSDLQRLLKSTGTSAVAWVGEAGGAYNSGRHLVTDAFVFSFWFLDQLGMAARFDTKSYCRQSLVGGNYGLLNTTTFQPNPDYYSALLWHRLMGTKVLAVTFSGTNKIRAYAHCARDSVSNSAALFFHLLENSRSLDVASSQESLCC

SEQ ID NO: 57588 - protein, 917 aa, Zea Mays
MPSASGPVAVASAPAPVKSAPSLAVGISPDLYPTEDDLPYEEEILREPFKLKGWWRYLVARATAPFAKRAVIYERALKALPGSYKLWHAYLRDRLDHARPHPIDHPAYSSLNNTFERALATMHKMPRVWVLYLTSLLDQRLLTRARRAFDRALRALPVTQHDRIWPLYLRLASLPACPVETSLRVFRRYLQFDPSHAEDFINFLISANHWQEAANRLASVLNDDGFRSVKGKTRHQLWLELCEILTKHADEVAGLKVDAILRGGIRKFTDEVGKLWTSLADYYVRRGLFEKARDVFEEGVSSVVTVKEFSVVFEAYTQFEQSMLAAKLEAAEEEGAEDENEGGGRKSGMDKLSKKFLNEFWLNDEDDTDLRMARFERLLDRRPELLSSVLLRQNPHNVEEWHRRVKLFEKDPARQVATYVEAVKTVDPMKAVGKPHTLWVAFAKMYEKHSRLDSAEDIFKRATQVNYKAVDHLASIWCEWAEMELRHNNFDKAIELMRQATSEPSVEVKRRAAAEGDEPVQMKVHKSLKLWSFYVDLEESLGTLDSTRAVYERILDLRIATPQIILNYAYLLEEHKYFEDAFKVYERGVKIFKYPHVKAIWVTYLTKFVHRYKRSKLERARELFHEAVQQAPAEEKKPLYLQWAKLEEDYGLAKRAMNVYDEAVRAVPNSEKMAMYEIYIARAAELFGVPRTRQIYEQAIESGLPDRDVLTMCMKFAELERSLGEIDRSRAIYVHASNYADPNNPDFWKKWNDFEIQHGNEDTFREMLRIKRTVAASRSQRDQKLNLDEAVDTLKRAGVPEDEMAALERQLATGPSTAPPAAPSTAPASANRMMNFVSAGVEAQVESSRQQAANNEDIELPDESDDEEPDVQIAEKSVPAAVFGELGKRAAENNEESSGAQGNEQLGALERIKRRRQ

SEQ ID NO: 57589 - protein, 148 aa, Zea Mays
MTLKLWDLNMDSGPVATFQVHEYLRPKLCDLYENDSIFDKFECCLSGDGLHVATGSYSNLFRVFGCSPESVEASTLEASRNPMRRQVADPARPARTLTGAVRRGGENTSVDASGNSCDLSTKLLHLAWHPTENSIACAAANSLYMYYA

SEQ ID NO: 57590 - protein, 886 aa, Zea Mays
MWNPLSWVMEAAAIMAIALANGGGKPPDWQDFVGIITLLLINSTISFIEENNAGNAAAALMARLAPKAKVLRDGRWAEEEAAVLVPGDVISIKLGDIIPADARLLDGDPLKIDQSSLTGESLPVTKGPGDGAYSGSTVKQGEIEAVVIATGVHTFFGKAAHLVDSTNQVGHFQKVLTAIGNFCICSIAVGMFVEIIVMYPIQHRAYRPGIDNLLVLLIGGIPIAMPTVLSVTMAIGSHRLAQQGAITKRMTAIEEMAGMDVLCSDKTGTLTLNKLTVDKNLIEVFEREVTQDQVILMAARASRIENQDAIDTAIVGMLADPKEARAGIQEVHFLPFNPTDKRTALTYIDSDGKMYRVSKGAPEQILNLVYNKLEIERRVHAVIDKFAERGLRSLAVAYQVVPDGRKESPGGPWHFVALMPLFDPPRHDSAETIRRALNLGVSVKMITGDQLAIGKETGRRLGMGTNMYPSSALLGQNKDESIAVLPVDDLIEKADGFAGVFPEHKYEIVKRLQARKHICGMTGDGVNDAPALKKADIGIAVADATDAARSASDIVLTEPGLSVIISAVLTSRAIFQRMKNYTIYAVSITIRIVLGFMLLALIWEFDFPPFMVLIIAILNDGTIMTISKDRVKPSPLPDSWKLAEIFTTGIVLGGYLAVMTVIFFWAAYKTNFFPRIFHVESLEKTAQDDYQKLASAVYLQVSTISQALIFVTRSRSWSFAERPGFLLVFAFLVAQLIATLVAVYADWGFTSIEGIGWGWAGVVWLYNLVFYFPLDLLKFLIRYALSGKAWDLVIEQRIAFTRKKDFGKEERALKWAHAQRTLHGLQPPDAKLFPDRVNELNQMAEEAKRRAEIARLRELHTLKGHVESVVKLKGLDIDTIQQSYTV

SEQ ID NO: 57591 - protein, 972 aa, Zea Mays
MEAHGDQRWLVDCLTATLDTARDVRAFAEESLRQASLLPGYGAALTKVTINKEISFGLRQLAAVLLKQFIKQHWQEDEENFVPPVVSASEKVVIRQLLLTSLDDSNGKIRTAISMAVAAIGQQDWPEDWPELLPVLLKLIGDQSNGNEVRGALRCLALLSDDLDDMCVPKLVPELFPSLYRIISSPHLYENSLRAKAFAIVHSCISMLGSMSGVYKRDTASLMTSVLDPLIEQFSIVLNYPVQSQNPDDWSMQMEVLKCLLQLVQNFPRLPEAKISAILPALWQTFVSSFKTYHLSYIQGAETLDSISYDSDGSEKSLESFEIQLFELWTTIVGNSRLAKVIGGNIKELAYYTIALQQITEEQVQNWSRDANQYVADEDDLTYSCRVSGSLLLEELVTAYEDYGIDSIVEASQMRFHESRELKEAGSADWWRLHEASLFALGSLSEQLCEAQDSGLTKYNVRDLLEQMLIDIMGTGVHQYPFLHARAFSSVAKFSSLISKGVSEQYLCNAAHAIASDVPPPVKVGACRALAQLLPESNQNLIQPNIMGILSSLVDLLRQASDETLHLVLETLQSAIKSGGEQSTLIEPVISPIILDVWAQHIADPFISIDAVEVLEAIKNAPGCLQPLVSRILPTIGSILVKPKVQPDGLVAGSLDLLTMVLKNAPVAVVKAVFDTCFVSTVQIVLESDDHGEMQNATECLAAFISGGRQELLVWGGEQGQTLKMLLDAASRLLDPALESSVSLFVGSFVLQLILQIPLHLSPHIPDLIAAIMRRMQTSSIAGLKSSLIVIIARLVHMSAPNVDGFINLLLSIPAQGYDNSLVYIMSEWSQLQGEIQGAYQIKVTTTALALLISTRHPELSKVEVQGHLIKTSAGITTRSKARVTPDQWTKIPLPVKIFSLLADTLTEIQEQIGAGDDDDSEEDNDWEEVQNGDASISDDIIHSASVPSMTNPSVEHLNAMAKVFDEKRSSI

SEQ ID NO: 57592 - protein, 435 aa, Zea Mays
MLAPFTAGWQSTDVHPLVIERSEGSYVYDSNGKKYIDALAGLWCTALGGNEPRLVKAATEQLNKLPFYHSFWNRTTKPSLDLANDILSMFTAREMGKVFFTNSGSEANDSQVKLVWYYNNALGRPDKKKFIARSKSYHGSTLIAASLSGLPALHQKFDLPAPFVLHTDCPHYWRFRLPDETEEEFSTRLANNLENLVLKEGPETIAAFIAEPVMGAGGVILPPKTYFEKIQAVLKKYDILLIADEVITAFGRLGTMFGCDMYNIKPDLVSIAKALSSAYMPIGAILVSPEITDVIYSQSNKLGSFAHGFTYSGHPVSCAVAVETLKIYKERNIVEHVNKIAPRFQEGIKAFSGSPIVGEIRGLGLILGTEFVDNKSPNDPFPAEWGVGSIFGAECEKRGMLIRVAGDSIMLSPPLIMTPNEVEEVRPFYSHFLPY

SEQ ID NO: 57593 - protein, 180 aa, Zea Mays
MFNTEKDKRPPRAFNPRTIVKDQVVENAERSHFDEKANHLHGSVPIGEKVERHARNRDRPDRGVWAARRYDKSTSAVSKLELNTGHGDRKTDTRGQGGSRGVPVENGLYAKIRCVAFLDQFHDTVFNPGHRHANRRGLPRGPKETEISASVPDAKNSKRGSASYGAHERQVWVQKSSSGS

SEQ ID NO: 57594 - protein, 98 aa, Zea Mays
MTIMLVGNKCDLSHRRAVSYEEGEQFAKEHGLIFMEASAKTAQNVEEAFVKTAGAIYKKIQDGVFDVSNESYGIKVGYVVPGQSGGAGSSSQGGGCCS

SEQ ID NO: 57595 - protein, 101 aa, Zea Mays
MYRVVSKEWDHEDREDDHGKAQGRRRRASRPSRHLHLLVLKHKRIGNQQLVSLVILKNHLLPNVVQRLLNSQTHETQKYRKTKYSHSSILFTGYNKWWCPL

SEQ ID NO: 57596 - protein, 246 aa, Zea Mays
MSELVRFRQHVERQLVCLTDETQVSFIWTSSAISRAPAKPKPLWSTRRRTACCTAGVSQVRGLPFQEAGGVEDGGRALLQAGRHRLEAPVLEAHRRPRIGAARQIGELLQQGQRRGGHGRAEQRRGDEAAAVPGRSLRLRRAGPDQGGHGRPVVRLHGARLEGEPGRQRDADADACEVGEQPRRWRVEDAVAGVPAGLPGVQLRRRPGRAGGQADEHPGARDRGASAPVSLSVRRVRFFFFWCVRV

SEQ ID NO: 57597 - protein, 447 aa, Zea Mays
MDHAEVSGLLCIGTRETDGGEESYAAEYPKMDQDTNATTKFDVVMETSAMYTDQINTNACLDEYHMSGKQPMEEMGFGSAHPFELPSEGMVADSGEESMPSSPDTSTSNYDAPGYTEQNLQHIYNSYDALVDKDGVVLTPAFMICDKTLYLEPHLTFSLDGIKIEYLDLDSFEDEKLSALQWEISNIISISCKWTRSVGSALITLLVGSTAETGNAGPVRARFSLDDSQWPRRQQRIWELGPRYQEIWKDIPSDDFALENWSIEPCLFFPRQYFSSTEDFEDVIYPQGDPDAVSISKRDVELLLPETFVNDTIIDFYIKYLSTRIESTKKRRCHFFNSFFFRKLADLDKDQGRAPEGRAAFLRVRKWTRKINVFDKDFLFIPVNFNLHWSLIVICYPGEVATFEDGDAKLSAKLPCILHMDSLKGSHTGLKDIIQRGGKQFQQGRKA

SEQ ID NO: 57598 - protein, 1250 aa, Zea Mays
MCYTCTFSLCKACMKDAKFSCVRENKGFCATCMNTVMLIENREEAADPMEVDFDDKSSWWYLFKDYWLNLKTNLSLTVEEISAAKSQKSGELPDTNDEINSESSSGRHLENNTSKKRGRNRSKQAAIEQGSEGKETTGKSAKLGLSGIRDAQTSSGKKVRKLSRRSLSSQHSPKDSESVGTSTSSADEVSWASKELINFVAHARNGDKSVINQYDVQPLLLDYIKRNNLRDPRRKSQIICDSLLQSLFGKDRVGHFEMLKLLESHFPTSEVSPIDADENHGGVVDPDPSQDADGNSEASVVMSSEKRRKSRKYDLKHQPNIDDYAAIDNHNIGLMYLRRNLMEELIDDVDTFDEKVVGSFVRIRIPGTGQRQDIYRLVQIVGTGRSAEKYKSGKRTTDITLVILNLDKREAVTIDIISNQEFTEEECKRLRQSIKYGFIPRLTVGEVQEKAKVLQTLKVNDWIESEKMRLGHLRDRASDMGRRKELRECVEKLKLLSTPEERARRLNEEPEIHADPAMDPYYESPEEQEQEIERSSFNKSRSSFLRKDGSLVSPGKGDGRNAAQRDPKTNWESNRNTRAESSSHMESPLSRRSTYSSQGESVGYTNKPEGLNIDAQTVRLEGTTRSAPQGSPGASSGSLATNIGSGAKTASQSAINESEKIWLYMDPSNKIQGPFSIIQLRKWNSNGYFPPSLKIWKASEKQDDSILLTDALAGKFEKDLPPWEPPHVSLSQINKTPLEQSTIADEQTPKSVIAKSFSSSDQRHDYSSTNLGTTMIHSGSQGYYGMQNSHAAYTSQQSLTGSWNATSSQFGVAISPLTPTQPAMQSLSGQNIVAAENMGHLTTGMAPATANAEMVNSDLTSQNQMLSSLPQTDDRLADGIESKSGEDVSHGRVRSSAEAIGPQDAQLGPVQLNAQQLENTRNHMSSIDLSKSMMPSQMMSAPSAASVQPSLTTTARSDNQSSGWAVPAQMANTPGQSQITGNLTWGNTPQGDASLGWGMVGQSNMNMPWVASAQGASGYNMGVAMPTQPNAVPNMGWLPNPGNTSMNMIWAATQGQGTPNAAPMMGGQMQGVPMAPWGGVAAGSANSYPAWGNQQAGNMNQNVGWSAPVQGNPGQANNNMNWNAPNGNPNWNNQQRENGGRHSGHRGAFSGGDSGGRSWKSRSGGDGGSRGHSRFSHSTNTEGYPSRTDRHYDRQNSGNERRYENHNERNGRQFDRQPSDNERNHDRPDGRHGGRDDDRQADRSESRELR

SEQ ID NO: 57599 - protein, 553 aa, Zea Mays
MEQRNVLALGEHVLKATVWKRKHKTAMEHPEGNDVMVFSQHDQRKHPVIFDDRAKCKKSKLISCGSGVILESYWNFKTSGLPVRVLFYQHGDWSDFPEDVVNLAQQDFQLKKPITTAVFQNKHILLDFIHMICIDYEMTIDKPLAWVDDNGKRFFPDLSAGLYTSKPSQHENGEADECDGTPTSVAESSSSVSVGEVVSHGPSFHLNEYSSGTIQATGKPNDCRRIDSAVRNLLLKGLGQPFSEEDIIGIYRTPLLDQRGQVRCGLFQKEIEETRSRRGNANVRYAWLPCSRYTMEQMAMRGALEIAKPHKGSICGVGTCLAPANCTNSCARYSDFHEDGIIRMMLCRVIMGNVEVVLPGSKQFQPSNGSFDNGVDDLQNPQNYIVWDANVHKHIYAEYAVIVQAPLVTNECSGLKDSVPNISEIISSGSRDNLTKEDRFAPCGVEQEAPRLGRAPRAPSSPWMPFSMLFAAISTKVPRSDMELVIRYYEEFKRKRMSRSDLVVRMRQIVGDKILVSTIMRLHHQKKPPSMAAAAAGLARALARGEEGGGVAE

SEQ ID NO: 57600 - protein, 769 aa, Zea Mays
MDGDHRRQAAAAVTVTQVSPARRLIAWLRLLFRAFVHRYGKVASWNAAGRPVFVVLAVFFLQRSLRRRYLSWKESSRLPLMAAAAVTVQTTVRAMAAQRELSVRKQTRAATRIQAQWRAHRAVWSYLTTKRAAVICQRAWRQSVARKELRKLRLCVQENLEREMLEEVCRLREMVDVLQQAVNDAETRAVNEREAAKDAMAQLEAASAIEETVVMVEDTEKVKSLSAEVDRLKDLLGAEMSETFAAKKALSEAELRNEKLARLLGVEEVKNKRLQDTLKRMEEKASSLDEENRMLRQAVASNPAIVRSPSGENHEAPGIQAAPDNEKSRNGTVKPIAVDREANVHEKGAEQPSSNGQEAGKQQQELLIKCLSEDLGFSVGRPIAAYLIYRCLVHWRSFEEERSVVFDRIIQKITAALEARDNNDALAYWLSNSCALLVLLQRTLKINGVAALARQRRRTSSPLKVPQQENQDPAPDGQLICGLAQVYQVEAKYPAIAFKQQLTALLEKVYGMIRHNLKKELSPLLGLCIQAPRTFVVSPRGSCSQGTDLAQQASMAHWQSIIKILTNSLDVLKSNYVPPFLICKMFTQVFSFINVQLFNSLLLRRECCSFSNGEYVKAGLDELEHWCFWLTEEYAGSAWDELKHIRQAVTLLILDDKHSRSLAEITDDFCPVLSMQQLYRISTMYCDDKFGTLGIPSEVVSSMRTKMIEGSSSSPSAHDDINSFLLDDDFSIPFSVDDFTKLIVHVDVADMDLPPLIQESSGGGSKMGH

SEQ ID NO: 57601 - protein, 609 aa, Zea Mays
MAQIPNLDNAPLNLAALREQSQKDLFGILKNIRGKKCLVIDPKLAGTLSLVVQTSLLKEYGAEVRILSPEPLQTECPKIVYLVRSQLRFMKFIASQIKNDEPKGLQREYFLYFVPRRTVACEKILEEEKVHQKLTFGEYPLYLVPLDDDVLSLELDHSLQECLIEGDTSSIWHVAKAIHKLEFAFGVIPNVRAKGVASTKAAELLNSMQLEDPVNMDDMGIPEINTVILLDREVDMVTPMCSQLTYEGLLDEMLQINNGSVEVDASIIGAQQDGKKVKVPLNSSDKLYKEIRDLNFEVVVQVLRQKATSIQQDYAEVKSTNTQSVSELKDFVRRLHSLPEIARHVHLAQHLQSFTGKPSFHARLDIEQTILEVQNFEICFEYIEEMIHKQEVIENVLRLLVLLSLTNAGLPKKNFDYMRREILHSYGFEHMHLLYNLEKAGLLKRQESRSNWVGITRALQLIVDVNDTANPTDISYIFSGYAPLSIRLVQHAVRSGWRSIEELLKLLPGPHLDLKRGGLTINSSPEVHPGLGAQQSIDRVGHRSLVLVVFIGGVTFAEIAALRFLSAQEGMGYDFLVATTKTNPSLWVFLFGCEFVFGQQLDDKANHAC

SEQ ID NO: 57602 - protein, 678 aa, Zea Mays
MGAKENGEERDDHSSDVERDGKQGKVTESDYEPARNSLSSPGEATSNEDTKVKRVSRVPKKLSRKESKENSPRSARSISKSQIHTKLQYISSNSNQNKSPKTNKAVNGAKTVEIKRPETPKAPSCSSSEMSEETDDKAIEDRPTDDKAIEGRIKDDSAVEGRATNDKAVDDKAKNDKDIEDGMKDDNAIECEVTDDKPIDSKVTDDITIEGREIEGKAIEEAKEIDILDEAPKSDQSTGTDDEIVDTEENIADNGNSVSYKINEELYSKIEKLEQELREVAALEVSLYSVVPEHGCSSHKLHTPARRLSRVYIHASKFWSSDKKASVARNSVSGLVLVAKSCGNDVSRLTFWLSNTVVLREIIAQTFGTSQHSSPVKVFSSNGNANKPDRSFTSSQWKSNYNGKYVNPNIMQLPDDWQKTSTLLDALEKIESWIFSRIVESVWWQAMTPHMQTPVEDLSTPKIGRLLGQSLGDQQHGSFSIDLWRSAFQDAFSRICPLRAGGHECGCLPVLAKLVMEHCIARLDIAMFNAILRESENEIPTDPISDPIVDSRVLPIPAGNLSFGSGAQLKSSVGNWSRWLTDTFGMDAAESEKGGQDVEVNGDDRRDAAESTCFKLLNELSDLLMLPKDMLLEKAIRKEVCPSIGLPLVTRILCNFTPDEFCPDPVPGMVLEELNSER

SEQ ID NO: 57603 - protein, 180 aa, Zea Mays
MEIYVDDEAKLTLHGLVQHYIKLSEAEKNRKLNDLLDALDFNQVVIFVKSVSRAAELNKLLCECNFPSICIHSGMTQEERLTRYKNFKEGHKRILVATDLVGRGIDIERVNIVINYDMPDSADTYLHRVGRAGRFGTKGLAITFVSSASDSDVLNQVQERFEVDIKELPEQIDTSTYMPS

SEQ ID NO: 57604 - protein, 149 aa, Zea Mays
MVTDRVSTACLLALLSQFYRPGLVFLILLGLDITSHWFQMYSSFLSGKTSHKDVKHTGNWLLKLYYGYRPFMAFCCVSCEVLYIFLFLFADEESTSLLSVCKGILNQSPVVILVFVSTLVGWAVKQATNVIQMKTAADACVVYDLKRSK

SEQ ID NO: 57605 - protein, 341 aa, Zea Mays
MSNRMWESLIEHAKTCVLSGNHYIYYSSDARNVGAIFNNIYEFTGLIADDQFISAENLTENQRVFADTLVKQAYADWINVLEYDGKALLKFNQKKKYVTTRSETAKASASYPASNGLVNSQKELPGGPVNAEQSSLNNASQDRTRIPSMSMGNQVAREYAGNPQHMTPSITMQCDTRSLIPGGQFSGGSSVQTQTSRSSNMLALRPTQQPQNLDFSGLGQSTQPSGTNPFADWSRLQESSVDEYLMDEIRARSHELLENDEMQHMLRFLSVGGAPTGLNNVDGFLSYPSPAPAFGFDEDDRARSSGKAVVGWLKIKAAMRWGIFVRRKAAERRAQLVELED

SEQ ID NO: 57606 - protein, 65 aa, Zea Mays
MSPVKGASPFIPSPEEYARAALRCVGYEARLDYYSLPDSTRDRALIYLSALFRTYANPWGRSPVY

SEQ ID NO: 57607 - protein, 696 aa, Zea Mays
MSGFVGVVVSDPSLQGQFTQVELRSLKAKFVSLKRDSGHVTTKNLPVMMKKLRGLNEVVSVEEIAAFLSESYPDSDQEIEFESFLREYLNLQARVSAKEGGAGGGRGGKSSFLKSSTTTLLHNLNQAEKSSYVAHINTYLREDPFLKKYLPMDPSGNQLFDLIRDGVLLCKLINVAVPGTIDERAINKKRVLNPWERNENHTLCLNSAKAIGCTVVNIGTQDLVEGRPHLVLGLISQIIKIQLLADLNLKKTPQLVELFDDSKDIDEVLSLSPEKMLLRWMNHHLKKAGYKKTVNNFSSDVKDGEAYAYLLKALAPEHSPETTLDTKDPNERAKLVLEQAAKLDCKRYLTPKDITEGSANLNLAFVAQIFQHRNGLTSDTKQVTLTQTATPDDVLVSREERAFRMWINSLGVESYVNNVFEDVRNGWVLLEVLDKVSPGSVNWKLATKPPIKLPFRKLENCNQVVKIGKQLKFSLVNLAGNDIVQGNKKLIVALLWQLMRFNILQLLNKLRFHSQGGSQGKEISDADILDWANSKVKASGRTSRMESFKDKSLSNGLFFLELLSTVQPRVVNWKVVTKGETDEDKKLNATYIISVARKIGCSVFLLPEDIVEVNQKMILTLTASIMYWSLQNQHQSQSEMPEQSEPSSMASDAASDIASEDGASTTAPSELDEGTVLFMVLKVVATRSGFFNTSAS

SEQ ID NO: 57608 - protein, 790 aa, Zea Mays
METYLLMSSIRTLMEEEMASSTQPLKQAQSNVAGICSEDIDLNLAGSLMEIYRSHTEGQETRRSIESGRSSISTDEEKNTDPPAHHYQIPSSIQRALEDVAEAVIRHQSANKKYINSGDETRSREFVDALQLLSSNKELFVMLMQDPSSRLLECLQNLYMSLGSTRLDSEEYDEGTELQGTTDSLEQSATSPSKVKRRHNSFLKEDGLVTRKPPKLNDGSRGLSRIVILKPSPARGHSSLISGSATSSPLSNHIDWQVQEGSDKHDCHFSLRELKRRLRIAISNNQKDHQLNSTSSDIHEAEADSGKLLPVTSMSETESLASTDSSDRAKEPSIVDEKIVPEDSESGMRNDVAHGVGVSSFSYEKAKMYIIERLNDQGEESCQIVQKSESFERLISLPENGTFSPIDFPQEEKISIAHEATKPLNLHTVEQEDGSASPYSTMQYEETESADTSNLGTETLIEPTIDHGSYSQNEGAISQELVREGVKIMLDIMENSSLCAETGTSQEGVGVKNPDECSLEEPQSMNLLPEPALYSPDDFVNEQENHSPSEIVELVKPSVLTFPYSPENTNDKEEKLSPQSVLDPIAEVTSPRHKTPKQDEFSMPTSRVLFKEVDAPSASPTLWNGPQVAILDDRATRVSFIKAVLEASGLLSEENSQIWYTEEPLLDVSVLAEVGNSYCLTDDAVLLFDYVEEVLLEIRDKFFGSDPWVNSLKHNVRPAPVGRRLVREVAKGIDSLVGKEFPHTLEQVMMKDLDSGSWLDLGGDTGSVVVELWDGLLDDLLEELVFDLWL

SEQ ID NO: 57609 - protein, 377 aa, Zea Mays
MFGIQTRDVAEDFNSWRRTLRNTPTVSMPMNNHNIMYNTGKSLFNVHLMSVKFEDLYGFMVEGNVDDVNVLNEVRERIREQGRVWWALEASKGANWYLQPKISSNEGVISVTSLKLSVLTNTITLRRLIRKGVPPVLRPKIWLSVSGAAKKRSTVPETYYDELIRATEGKTTPATRQIDHDLPRTFPCHPWLNSDKGQASLRRVLVGYSFRDSEVGYCQGLNYVAALLLLVMKTEEDAFWMLAVLLENVLVSDCYTDTLSGCHVEQRVFKDLLAKKCPRIAAHLEAMGFDVSLVATEWFLCLFSKSLPSETTLRVWDILFNEGANVLFRVALAIFKMREDDLLRIQHIGDVIDILQTTTHHLYDPDELLTITCFAKH

SEQ ID NO: 57610 - protein, 251 aa, Zea Mays
MLTKFETKSNRVKGLAFHPRRPWILSSLHSGVVQMWDYRMGTLLNRFDEHDGPVRGVHFHATQPLFVSGGDDYKIKVWNYKTQRCLFTLHGHLDYIRTVQFHHECPWIVSASDDQTIRIWNWQSRTCVAVLTGHNHYVMCASFHPKEDLVVSASLDQTVRVWDIGALRKKSASPADDILRLTQMNTDLFGGIDAVVKYVLEGHDRGVNWASFHPTLPLIVSGADDRQVKIWRMNDVILPPAVRIFSSTISQ

SEQ ID NO: 57611 - protein, 99 aa, Zea Mays
MRRANLIDRHRDMRLDVDNMSYEELLALGERIGYVNTGLSEEKILSNLKQRKYVLISLEDPPTGVEPCCICQTTRKARTWADWTVVTTSTPHASNNGWL

SEQ ID NO: 57612 - protein, 338 aa, Zea Mays
MDSKKKRNKKKKGNQGKNAADVTSIAGEAASQNHNHELAPIDHHKGSDADDVMSSVGEELPQYKNHQPNIQADYNGTSAYDTTSSIGECIACYQNNEPMMTQENHKASNAVPADQRSVGLSESSVELDMHRLHEAKLDKLHETIKQLENEKSLWLQKVITMEGELEKLHNEVGCHAQNEVLLEEKLNSLQSGYDVLIKKEEVVDNKVRCIDNINDTLTHQESLLKERLSGLEETNKSLLVQVKVLEEASNNTSEENQMLVKKIYELDSRLQALEAKAAPSEALMIEKSVTKTVMQFPDNKVMDQVHFANSPLQQQTIDFSEYLLYQIISYYHWHGRSR

SEQ ID NO: 57613 - protein, 80 aa, Zea Mays
MERTVDINGGSHFLKDLEMLRGITCEEMPNLVGEGSPGFQLGSSNALAKLGLYMKDDEDDEEGDLADAPVVVDIEEGEID

SEQ ID NO: 57614 - protein, 324 aa, Zea Mays
MKPMSHSTYLRLQVLREIFWDVDKKLELLMKLTFTDLVAFVPKILSQLHIEGLCHGNLSEDETINISKIFLNTLSAQTLPEEARHEERVICIPNGANLVRSVRVKNDLEENSVVEVYFPIEQDVGKEATRLRAITDLFSNIIEEPCFDQLRTKEQLGYTVDSSPRMTYRMLAYCFRVMSSKYSPIYLQSRIDNFIDGLSALLDELNEETFEHHRSGLIADKLEKEPSLSYQTSDYWSQIADKRYMFDMSKLEAEELKTVQKADVIAWYNTYIRSSSPKRRRLAIHVYGCNSDIAEAAKLQEQSWTIIDDVESLKASSQFYSSLC

SEQ ID NO: 57615 - protein, 687 aa, Zea Mays
MDSSGEELLKKIRELEVGQAQLKQEMSKLIPGAVERRRSQSVSPRRGAPVPPPTKAKAGPPGRLLSGGFEGGQRAWARGSASFPHSSPLHREGRATGAGNGSTSARLPERQYSRVLQSLGHSVHILDLDGRIIYWNQSAENLFGYPASEALGQDALMLLVDSGDHNVVNDIFRRISMGESWTGKFPVKSKQGDRFSAVATNTPFYDEDGSLVGIICVSSDSRHLEQIFCKPPTSARPQSESSRTSCDGSCSNTSRRINLLNRSPFDPQIPLQSTFASRITNLATKVTNKVRSRVSTDDYGIEREGGSGESHCSDRGAKEEPTSSGTNTPRGNAPHGPFSTDENSPGKSTNPSSDELEGKVGLHKFLSSKAEALLNKKGISWPWKVRENDGPDERNHVILLHGDQENVMNHQKVSDSSIAPDSQGAEHNLPSKNEASGSWSSYNNNSTSSASSTGSTNSSALYKVDHEADCLDYEILWEDLVIGEQIGQGSCGTVYHALWYGSDVAVKVFSRQEYSEDVILSFRQEVSLMKKLRHPNILLFMGAVTSPQRLCIVTEFLPRGSLFRLLQRSATKLGVRRHVHMALDIARGMNYLHHSSPPIIHRDLKSSNLLVDKNWTVKVADFGLSRLKRETFLTTKTGKGTPQWMAPEVLRNEPSDEKSDVYSYGVILWELVTQKIPWENLNSMQLR

SEQ ID NO: 57616 - protein, 82 aa, Zea Mays
MIGATSFFPYPQIFHLAVVPFALGAESMGRCCRPAGQYTATLRGSQRSHGRGRLMVVGGVDQVLVVGSKMEHGDEPYLARKV

SEQ ID NO: 57617 - protein, 302 aa, Zea Mays
MDVSTTAQEISNTDVTVLEGHSSEVFACAWSPSGSLLASGSGDSTARIWTIPDGPCGSNMQSSPPGVHVLKHFKGRTNEKSKDVTTLDWNGEGTLLATGSYDGQARIWSRDGDLKQTLFKHKGPIFSLKWNKKGDFLLSGSVDKTAIVWDTKTWECKQQFEFHSAPTLDVDWRNNNSFATCSTDNMIYVCKIGEQRPVKAFSGHQSEVNAIKWDPTGSLLASCSDDWTAKIWSMKQDKCVFDFKEHTKAQEQTILISSCFWPARLLIQLSSFGKSSKDAFCTACLVIGNQCILLHLAPTANT

SEQ ID NO: 57618 - protein, 113 aa, Zea Mays
MILLNKVFQQDMLLLFQISVNCCGNCPILSQFLPMNWFLRAQLVSYKFPISTIRCVECLKRVVLMRSVPSLETSPHLLVWPIAFDSLKLCARMSSRPCDHTKMVLAVPSKRNW

SEQ ID NO: 57619 - protein, 229 aa, Zea Mays
MVLAQLGGSISRALAQMSNATVIDEKVLNECLNEISRALLQADVQFKMVRDMQANIKRIVNLEALAAGTNKRRIMQQAVFTELCTMLDPGKPSFTPKKGKPSVVMFVGLQGSGKTTTCTKYAYYHQKKGFKPALVCADTFRAGAFDQLKQNATKAKIPFYGSYMESDPVKIAVEGVERFKKENCDLIIVDTSGRHKQEAALFEEMRQVSEATGRSNKKSCYIHWNWRAH

SEQ ID NO: 57620 - protein, 60 aa, Zea Mays
MLYCPVIRWQREPPPSCLHSSCHAWPIHSLRSGLPHTCRCFPVSFSLVTPPRFVLRSFGV

SEQ ID NO: 57621 - protein, 217 aa, Zea Mays
MDKYSCKHNVCTYSIRMSGYCNGGHVDKARTLWDEMIQEGIQPDITAYNTMISGYCHSGEVGVAEEMFKNMLMGGIDSSATTFEWLVRGHCMARDVEAAMLVRADMKRKGFGLAPEVVEELLDGLCQNGRVEDGLSVLREEMKREEFVPTRRSYEVLIMGFCDGGKVEVAIRLQAEMAGKGFTAGSEVYYAFISAYEKSENYEMVEKLRKEMSAMGT

SEQ ID NO: 57622 - protein, 388 aa, Zea Mays
MVQCNVLGRSESRMQQKLEKAKEILKKLKARVQELEKELEDKENGLLRDLRSSKKFKADHIKSGNVTANSAFTSSSPGYENQTNKLDEVMQDPCNDKTHFDRLKSEAGSVLNAQDNLDNKDVDVIDLEANDSVFGDEQKAQFSAKPFGTDDSTPNSENKSSLCQNDDRHSVASECTTAHAANGGPFLKHREATVKSTFMANIRAKLHIPRESPSVRTNATSSTLESETLTIDGISKQATRLASGTGPQQIHNFNSFSDDFQAPGIPGTDGARRSIGKWCKGPADPSSASGSRGNLIAVGPDGRGGKVKILRDLGRPQQVPSAVAQGAEGCRQRWPVPDPSVLWQEMILLLNEYVVPHGAWLAEPKSCMQLCRYAMRAVEQLNVYLCCA

SEQ ID NO: 57623 - protein, 617 aa, Zea Mays
MAAKDGSGSQDQGHRLWPMLSYACGELCVIMLLYVAAFASHAATRLARICGLRPPCILCTRLDRALHGNLPWFSADLVCSVHRSEVSSLAHCKSHGRLARSGDLCKSCLLSCTAVGAREEVVNSRPTTSSSRLCSCCSDPFKNNTGDTQRHSGAANAVVSWDSVPADHPNEKTSVVGIEEVQESDGPTKDSAAPSANGGAAKSNHRSAAPTRIAVDSNGSVKNASVVARANLTSPRPSEIISARDSSSTTQQEVKALLSQMSYARGGLDSSSIEGSPDAPNEESNATSNKSPYLERNYCVLEPSDGSLADDVEGGSSLENVKRQLELNRKAMAALHKELEEERSASAVAASQTMAMINRLQEEKAAMQMEALQHLRMMEQQADHDHLAIQDLHDLLTEREKELLDLDAELAHCRRLLQNDDPFNGDRFDGTDYTTNNNTDFVGSAMSHFEDDKAYILESLSRLEENLGISTIRLASGDARNCQEDILFEDQARADASPSSCDESSGVASLKIQISLLNIRLRALEEDQEFLNQVLLCNGKPICSHLDSRLLSDEEEQELQILPVPSDIHVCIHGYDHRHLRSNALLWGLRISLLCSWVLHPMDFVLPAMALIKTNDD

SEQ ID NO: 57624 - protein, 66 aa, Zea Mays
MREPPSRERSTDGSAKDHQPEQLATNQQEPIQCHQQNLELCHRVRWPLKRLLDRRLGLSPCNQSVE

SEQ ID NO: 57625 - protein, 393 aa, Zea Mays
MLQSTDQLPINMGFTGKGNTSKPEGLAEIIKAGAMGLKLHEDWGTTPSAIDNCLSVAEDFDIQVNIHTDTLNESGCVEHTIAAFKGRAIHTYHSEGAGGGHAPDIIKVCGVKNVLPSSTNPTRPFTSNTVDEHLDMLMVCHHLDKNIPEDVAFAESRIRAETIAAEDILHDMGAISIISSDSQAMGRVGEVITRTWQTANKMKVQRGSLPGSGDANAAPDSDNLRIRRYIAKYTINPAIVNGFSDFVGSVEVGKLADLVLWKPSFFGAKPELVVKGGAIAWANMGDPNASIPTPEPVVMRPMFGAFGKAGSSNSIAFVSKAAKEAGVATEYRLEKRVEAVGRVRGLTKLDMKLNDALPKIEVDPETYTVTADGEVLTCQPAPTLPLSRNYFLF

SEQ ID NO: 57626 - protein, 526 aa, Zea Mays
MEAEASVPATDYVYDALPGLHLAFSPEETLDDAAAGQDEDDATATYAVFRNEITEAGDVLADIPAADFFSLDVSTSASVEPEPEPEPPSPAPTAAAATPSISRALEDQPPQGSERAWFRGGRRFRSPMLQLHKEILDFCDFISPSTEEQSSRAAAVQDVSDVVKHIWPQCKVEVFGSFRTGLYLPTSDIDVIAKARVPIVKFVERKSGIAFDISFDIDGGPQAADFIKDAVKKLPALRPLCMILKVFLHQRELNEVYTGGIGSYALLTMLITHLQLVWGGKDILGYHRSKEHNLGILLVRFFDFYGRKLNNWDVGVSCNSSRTFFLKSDKDFMNHDRPHLLAIQDPMAPDNDIGKNSFNYFKVKSAFSKAYSVLTDANLFISLGHNRSILGTIVRPDSVLLDRKGWNNEDMLAEPWEPITQQFDTENDAVYNWHVIDEDEPLPRNSQSTSEDTSSSPSKKRKSPKSRRKSRKKSKATASGSSDVANGFRKDRSSKREAGSSKRRKGPKEYDRFTNTLPKYTHVSKW

SEQ ID NO: 57627 - protein, 251 aa, Zea Mays
MSSMLLSGCSGSLLQLALLHRLDGYSVHADSDPEAVLLRLGYVKPEVISWTPRIIVFHNFLSSEECDYLMAIARPRLQISTVVDVATGKGVKSDVRTSSGMFVNSEERKSPVVQAIEKRISVFSQIPKENGELIQVLRYEASQYYRPHHDYFSDTFNLKRGGQRVATMLMYLTDGVVGGETHFPQAGDGECSCGGNVVKGLCVKPNKGDAVLFWSMGLDGNTDPNSIHSGCPVLKGEKWSATKWMRQKMTF

SEQ ID NO: 57628 - protein, 286 aa, Zea Mays
MNYNFIRPDLIVGSCLQSPLDVDKLRKIGVKTVFCLQQDSDLEYFGVDIRAIQDYSLQFKDIVHCRAEIRDFDAFDLRLRLPAVVSKLHKLINCNGGVTYIHCTAGLGRAPAVALAYMFWILGYSLNEGHRLLQSKRACFPKLEAIKLATADILTGLSKNTITLKWEADGSSSVEISGLDIGWGQRIPLTYDEEKGAWFLEKELPEGRYEYKYVVDGKWLCNEHELITKPNADGHVNNYVQVSRDGTSDEEKELRERLTGPDPDLTDQERLMIREYLEQYADAAER

SEQ ID NO: 57629 - protein, 117 aa, Zea Mays
MGKVEGQGESWHGHVTAVSVASEFRRQKLAKKLMNLLEEISDKMDKAYFVDLFVRASNMPAIRMYEKLGYVVYRRVLRYYSGEEDGLDMRKALSQDVEKKSIIPLKRPITPDELEYD

SEQ ID NO: 57630 - protein, 69 aa, Zea Mays
MWTNRIYPQSLEDQASVVWLPPLLLQYYRVYVPSFLEWWKRAAETVQGMVKKAGFSRHFGSLEDLEPLQ

SEQ ID NO: 57631 - protein, 1697 aa, Zea Mays
MAFFSNSGSKADSEGYNLNEKADDDGIHESIRDGNDGLNSRQWNLNEKAEDAYHSEAEQYESGQSGLYASRQHVQRGGRSSGGPWGTNFLKDSRSKQTAKEVASNSGRGMDAANSHDDMDGSREDDELNRANGEVPAEEMLSDDYYEQDGEDQIESLHRGGMKQSSCSTSGGAAKSGSRQMKKMSKYNAYDNDEYNDENDDDSDADEDDPADMDFEPDGETDKATDKDKFMDSENSDGDDDDDLELSDDEDDFVENRRQPKRLKIVATKTSKGGQLPMPVQPKRGVSHSDEEYFSGKDSDVPSDSDFKHIPKKPDRLHQKPVGRSDVAPISSHNELRTSGRRRTVKKISYAESEESDDSEEKSNKRQKEEPEEEDGETIEKVLWHQPKGVAEEAIRNHRSAQPTVASLTSDFDQQWDELEFYIKWKGQSYLHCQWKILSELQSVSGFKKVINYTKRVSEEQRYKRALSREEVEVERIFADRVSKADGDDLVPEYLVKWQGLPYAESTWEKDTDIDFAQDAIDEYKAREAASAILGKTVDFQRKKSKASLRRLDGQPEWLKAGKLRDYQLEGLNFLVNGWRNDTNVILADEMGLGKTIQSVSMLGFLHNAQEINGPFLVVVPLSTLSNWAKEFRKWLPNMNVVVYVGNRASREMCQQHEFFSDKKGGRHVKFHTLITTYEVILKDKAVLSKIKWNYLMVDEAHRLKNCEASLYTTLLEFSTKNKLLITGTPLQNSVEELWALLHFLDPVKFNSKDSFVERYKNLSSFNETELANLHKELRPHILRRVIKDVEKSLPPKIERILRVEMSPLQKQYYKWILERNFQNLNKGVRGNQVSLLNIVVELKKCCNHPFLFESADHGYGGDSIGDRNKVERIVMSSGKLVLLDKLLVRLRETNHRVLIFSQMVKMLDILAEYLSLRGFQFQRLDGSTRADLRHQAMEHFNAPGSDDFCFLLSTRAGGLGINLATADTVIIFDSDWNPQNDLQAMSRAHRIGQQETVNIYRFVTCKSVEEDILERAKKKMVLDHLVIQKLNAEGRLEKKESKKGGPIFDKNELSAILRFGAEELFKEDKTDEETKRNLESLDIDEILERAEKVETKGGEGEEGNELLSAFKVANFSSVEDDATFWSRLIQPDPADIVQETLAPRAARNKKSYIEDPQLDKNNNRKRRAVETQEKPRRLSGRTVETVNSLPLVDGAVAQVREWSFGNVPKKDASRFVRAVKKFGNATQIGLIVDDVGGVLAKVPHEAQIELFDLLVDGCQEAVKENTDIKGTVLDFFGVAVKAYELLARVEELQFLAKRIARYKDPIKQYRIQLPYKKPQWSASCGWTETDDARLMVGIHWYGYGNWEKIRLDPKLGLTTKIAPATLGERETFLPRAPNLDNRASALLQKEYAKFSGKSLKVKGNTRQTVNNDSNSGVRSMRGRQKDVPEKDDNKPNKDDIQKRRVIVEAEAREEGEISESEAETRYRQDKEEKWLEWCSEVLDEEQETLKRLDRLQNTSVNLPKEKVLSRIRKYLLIIGDKIGEVVRQHSESYRQSRMVMRLWNYVATFSNMSGEQLHDLYMKLSQDQLEGGVGPSHGGNFTSIPPNKGGNSNQLHPSRNQRPTRSLQYNSESFHNESSGSSEAWKRRRRADTDNQFDTQPLCQPPIMTNGNRLQESSSSAGILGWGPVEIRRYGNERPKRAVHPSHFPTGHGPLL

SEQ ID NO: 57632 - protein, 239 aa, Zea Mays
MSPQGKYFCYLKGFNCSKSEDDLKQFHLALLPEYLQRDYVILENSQSCSAVSPNAMVPLAQHFAVAHLCCMPRLLTLVQKLCQSPALEMVEDVNIGLRLSFAQRILKLVCGLTIEFPPDASDAMMLSSVARCADSLPALFRLRFNFSNHDRVFSVDGVGTILLQILEEFLQVVQNISVCNSDICCTVKACILSSMLEIFSPNIWRYEKSGACLVPPLSYSPHVVQFVLQLFKDTKRWTS

SEQ ID NO: 57633 - protein, 181 aa, Zea Mays
MSSFNLFSHRRNTSKLVFGRGGEEMDFLQQQGIKVEIIPGIAAELGIPLTHRGVATSVRFLTGHSRNGGTDPLYVAGNAADPDTTLVVYMGLSTLASLAPKLMKHGLPPDTPAVAVERGTTPQQRMVFALLKDLVDEVKSADLVSPTLIIIGKVVSLSPFWVESSEHDALKIESSYASEAR

SEQ ID NO: 57634 - protein, 374 aa, Zea Mays
MERLESYLKEHFDVPPKNPSEEAQRRWRSAVGALVKNRRRRFRMVPDLHRRSLDEAQRRSTQVMARSLPLDKHTLVTNLRGMFREVVAVTGDGTNDAPALHEADIGLAMGIAGTEVAKESADVIVLDDNFTTIINVARWGRAVYINIQKFVQFQLTVNIVALVINFVSACITGSAPLTAVQLLWVNMIMDTLGALALATEPPNDDMMKRPPVGRGESFITKVMWRNIIGQSLYQLVVLGALMFGGEQFLNIKGADSKSVVNTLIFNSFVFCQVFNEINSREMEKINVFRGMVTNWIFIAIIAATVLFQVVIVELLGTFASTVPLDWRLWLLSVGLGSVSLVVGAVLKCIPVAKSNGAPASPNGYAPLPSGPDDI

SEQ ID NO: 57635 - protein, 203 aa, Zea Mays
MTRIRPSLFGGARPREQVLKERGVDVLASDLERISPVGRSKGEFAKVEQKVEALSINPSLERADGFSAGHRGPRSVDKKDYRRDTEKADAYRPSRREDNRRVARDMEKPQEQPRPEPETWRKPVEPPKPEVATPRFGKAATALELAQAFSTSMSDTAPQNRLTSVPSPRVPLSPGARDQSGFSRLTDSRTLRSSPSQRKINGY

SEQ ID NO: 57636 - protein, 322 aa, Zea Mays
MAVSLFYYVSSFLKKKYRDLGWQQRYARFCGRIIVLSVLVLLLYPFLWVWTVIGTLWFSTARGCLPEEGQKWGFLIWLLFSYCGLACIACVAIGKWLHRRHALQQRAQQGIPVSEHGVLVDMIRVPDWAFEAVGLEMRVGQDTAYHPGLYLTDAQREAVEALIQELPKFRLKAVPTDCSECPICLEEFHVGNEVRGLPCAHNFHVECIDQWLRLNVKCPRCRCSVFPNLDLSALNNLRSTSEPDHPSASASNVTTATAATRYVRSQPAGQSYLVRLQGLLLRPVRHDSVESDGEPAVGNSRLVGTEELPSILVDDGHQLPDR

SEQ ID NO: 57637 - protein, 283 aa, Zea Mays
MSLVKSSFTHATESGSSSSASDVEPQIVPTENAECHGVNPTIGPQEHDQCTTSNGHNMLAIAGQESSQVELWDITSARKIVTLPQTCSANATDHPTKKKGLCMAVQAFIPHESAGYVNILSSYEDGSTLWWDVRKPGLPLSSVKYHSESALSIAIDGFCNGGISGGADDKVVMFTLDHPKGTFILRKEIELERPGIAGTAIRPDNKIAATAGWDHRIRVYNYNKGNALAVLKYHSASCNAVTFSSDCKLMASCSADTTVALWDLYPPKPQSKADITETDEASC

SEQ ID NO: 57638 - protein, 67 aa, Zea Mays
MTVPASGISKVMGKHGTNLDNIRKISGAHIEIIEPKSSRHEHIAYISGTSEQRHSAENLIKAFIMST

SEQ ID NO: 57639 - protein, 742 aa, Zea Mays
MPMGDALEQIRVCVEIGTMCIESNPLNRPDLRHIIELFDEMENMRLVTKTTSSLGTQGSDEHDSEETIASAITDEKREKLSVLSTLPKYLPFAFLEDITDGFSKERQLGRGGFGVVYKGILSDGYTIAVRRLLRFQGIEMKQFDNEVNILMELRHKNIVNLLGYCHEVRGTYVQYKGKPVFAETSEQLLCYEYLHCGSIDKYIFGKNHELDWHTRYKMIKGICEGLHYLHENDRAPIIHLNLKPANVLLDAAMEPRITDFGLSRLIGEGNTRIVNTHTPGPIGYMAPEYRYMGEVSRKVDIFSLGILILEIVTGQDNSTKVDFIDHVCEHCMEGPQIKFMYPSLEPELHDQVELCIKIGLECVQTDRKKRPTAGDIIRKLEEGTKLGPTPSRENITTEIGKPQMFSFELLNDITESFSPGRLRGTGGFGYVYEGIPHGNEGAMAVKRLKEKIGISPKQFENEVHNLSRIEHRNIVRLIGYCDEIREILSHGKNKNDPPIREHIQERLLCYEYMPKGSLDKIIYDNLDWHTRYKIIEGICHGLHCLHEGQQDIQIAHLDLKPANILLDSDMVPKLADFGMSRLFSLEQVYILASKPMGTIGYIAPEYLDHKKVSTKADIYSFGIVVLEIVTRKQCPRSYADINAQHFIHHLRQNLTKDNYVKSMYPALEADCLQQVKLCIEIGLNCVEKEPTKRPTAREIISMFNQKKDSSRSGVSNCIVNVIEAWLSRLPWHPWPLTLLRQT

SEQ ID NO: 57640 - protein, 807 aa, Zea Mays
MKGVDDGFLGAGDKPGLDIWCIFGSSVVPVAKSQHGKFYTGSTYIILNTTQLKSGVRRHDVHYWVGEEAKEEDCFMASDKAVELDAALGSSTVQYRETQGEESDKFLSYFKPCVIPIQGRFFSHLKGSGDRSSATTMFRCQGEHVARVTQVPFSRSSLDHKSVFIVDTPSKLFLFSGCNSRMQTRAKALDVVKHLKENRHLGRCEIATIEDGKLVGDSDAGEFWNLFGGYAPIPRDLPDAIKEEPLTAPSKKLFWINKKNLVPLEAHPLDREMLNSDRSYMLDCSTEIFLWMGMTTLVSERKSSVAVLEDYVHSQGRNVELKLYEAGREKVAAIFKHQGYDVTEIPEDKPQQFINCNGSLKVWLVDHGCTNLLSTEDQEKLYTGDCYIIRYSYFENGKNYHLFFAWSGKNSVKDDRMAATSLMSSMVDSVKGHPVVAQVFEGGEPELFLSVFKSLIIFKGGRSAAYKSSVLQKSPRNGCHESEGVALFRVQGLKHYCVQAIQVDLVASSLNSSHCYILQDNGLFLTWLGGLSSPSDHNILDMIMSKLCPMEQSLLVREGSEPDHFWKALGGRSEYSKEKRVKGWPADPHLYACRFEQGLLKVKEVFSFCKDDLATEETLILDCNEEIYVWVGLHSDITSKEQALNVGKMFLKDAVHGGRSMETTVYAVTEGDEPGFFTSFFDWDNSKQSYMVGNSFERKLAVLKGVSPKLETPDRSLRRPSRRPGVSSEPTTPEHQQPTARRAFGSTSAGRFARERSPAVAPPTLSPSPKSRSSSSTPTTVARRLFPASVHASEAVHVVSTATARRR

SEQ ID NO: 57641 - protein, 176 aa, Zea Mays
MSLPGIAATGLKRNRFSRKPRVLLTWCARYMVGWHRGIKLGLPSSALAAATPAGPSSALTIGNQTSGASFRAHCRPAFVEGLGGSPPRVDRARTANWSLRVSGRWQSLAVNPAPPSDRQVPGSATSACMISARGYESCEDHPGTWNLKSQASCALDHFFLLNHVLINHNDMHRLIL

SEQ ID NO: 57642 - protein, 147 aa, Zea Mays
MTLQQILARAVGDDAILNGSHVVDFTDDGSKVTAILEDGRIFEGDLLVGADGIWSKVRKTLFGHSDATYSGYTCYTGIADFVPPDIDTVGYRVFLGHKQYFVSSDVGAGKMQWYAFHKEEAGGTDPENGECLEKFSSLTSEIGTASL

SEQ ID NO: 57643 - protein, 98 aa, Zea Mays
MDFFTEYGEGSRYKIEEVIGKGSYGVVCSALDTHTGEKVAIKKINDIFEHVSDATRILREIKLLRLLRHPDIVEIKHILLPPSRREFRIFTLCLTYGV

SEQ ID NO: 57644 - protein, 532 aa, Zea Mays
MSSIGELLVTPFLSKFPIPSHGEDASSVAVRNYFGVLMAYGGLQDFLTEKKDLTITLIRNRILPLYSLDPCSPYLISTANWVIGQLAICLPEDMSSSIYESLMKALTMEYVEDITCYPVCASASGAIAELIENSYVPPDWLILLQVVLKRISTGDENESALLFKLLGTIVEGGQEKVLSHIPEIVSNIASTVMELLPPVPDPWPQVVEQGFAALVAMVQAWESSAPDENKTPEKRFWQSGQSAIAQTISLLLQKAWLLQADNMEGSALPPPSCVNDASVLLEFVMSSVTCMEETANLKVFELVATWADAIANWDSWEEMEDQGVFNTIKEAVNFHQRFDLDGLFLKTLPSQSENGSQSSVIGRVSNFVTRAIAAYPSATWRACSCVHTLLHAPKFSLGAQDTRKTISESFAQAAFSRFKSVSDSPAGLWKPLLLAISSCYICYPDAIEQVLNNVDGNGFAIWASALAQVSSSLFNPGLSSESEIKLAVLTLSTVINHLVSLSTGGTKFVARLLCITDGVLHSAEGSSGRWGQ

SEQ ID NO: 57645 - protein, 151 aa, Zea Mays
MYNFGSPRVGNRRFAEVYNAKVKDSWRIVNHRDIIPTVPRLMGYCHVEAPVYLKFGDAKDAPVNNSILDDEDQGDVIGEYTPDVLVTEFMKGEKQLVEKLLQTEINLLRSIRDGSALMQHMEDFYYVTLLENVRSSYQVADTANDEYQLTA

SEQ ID NO: 57646 - protein, 381 aa, Zea Mays
MAALARERLNYVGAEAAEKKTEGLAPVPKLEDVQANKAADPFEPPWTISAAVMKQTSGTGLEELKNLACYTPVSLDCKGSANRCVSEDNKFTDFKAFDPLFPKPQKEYCEMHAPWKETRKSQPWWQLADADGLASLVAERAMENIVDNDLPRPTQTVRVHGGEVKVPENKDDYGLSALCADKELDPAHDTMECSYSVSSTTNNDTNSSDGGHWQQHQRNKEPGEAHDSYSSTANTPGGKPAYQNASERAKLLDALRHSQTRAREAEIAAKKAYDEKDHVIKLLFRQASHLFACKQWLKMLQLENICLQLRFREHQIATMFPELPWMVTKEKVAPSQEHSDRKKGRRLNRKGGLRDAVAFAVGVGIVGAGLLLGWTLGWLLP

SEQ ID NO: 57647 - protein, 221 aa, Zea Mays
MEQPKWSVVKTEADVFQDQYYPAVHLNGAGGGAIGSHFHGKEQKHFPFLTSHSNGGGGGDVATAAALGCQPFTITTTASSESDSKQSNGNCALSLLSDNPTSAQTAMIPTTAQSLAAAMQYGGRLPGSVSVSGGGGGDVSLTGMSYMRVGDSRQASILTASSPGHAAVASPVPATTAAATPPPPPQLLQYHHGYGYYHVSGGEQGNNPDGAAVHALPFSSW

SEQ ID NO: 57648 - protein, 669 aa, Zea Mays
MSSYPVLNNRPIDQWRVTDLKDELRKRKLPVKGLKEELVKRLSDSIQSEREADEADEDVGVNVDDQLPDANAIEENTVTVTEVHQETVVDVTHQVEVPTTEVGQESIISPTRGPPSVDVEEASTTKGKVPESVARGNLTFEEVQVHTKSTNEPLHEKTTDVDTNDAVDVNSDLIPAEVKFGATEASKIEEQDFPPAPVDDLTSDSTGPLGTDVVTAATSGAGPMDTDVFIATTSDAGPMDTDVVTAAPVSDEGEKLAPKDASGNKVSMHDEEQNNSDTMNEDCKPIISQSNNQNQTSLEDIDSTDNVDSYKKDSPEGGSPEKLNLDRSSGDESMEEDTVEIKQDESNMKSDDLGGKNEFNSEDVKEVILPDSVVEASKEAMAEEKSAASTEKRKLEAEEGVASTEPIKRQRRWTADIAKVSGRQALSQTGPETPKESFQPAFKRSFGRSDSTASVDSPKERIVPPSEKPPTTSLRIDRFVRPFTLKAVQEFLGKTGSVQDFWMDHIKTHCYVTFSSVDEAVATRDAVYNLQWPPNNGNKLVAEFVDPQEVKLKVDPPPPPAAPVSPAAATRAPPVQHTQTNQSVPRQAAAPKEELPPPPPPPLAKPPMADLTPLGRERLPPTPKKPEPPVVTLDDLFKKTQSSPRIYYLPLSEEEVAAKLAAQGKGKKG

SEQ ID NO: 57649 - protein, 91 aa, Zea Mays
MGETAMSIQKAAFRYRLPIDDDTDPVLETVYNCIVASTMLGSLFVMIPLSSEEHQLLQDVQEKLSVHPLTAPVLGNDHAEFRQRVGSASHS

SEQ ID NO: 57650 - protein, 779 aa, Zea Mays
MVARMMRWPRPPPARNIRVRLVVRRAEGLPPPPAPLSPDGSPGPEAEAKAFVEVSWKGPKMSPLSSLRRAQRPPRNQTRKEALPAVAAAALEDGAAAAPALAVSAVAWDEEFERDAALTATSHREPAAFHPWDVTFSVVSESNKISKSKLVLGTASLNLADYASAAEEEIEIILPLSVPSSATDLVPSLHLTLSLAEVRTSQQSPGASQRSVIAPLSPSSGDSLASGKDEVSVIKVGLRNLKMLRDLVSTRRFKKTNQDFDGSEKYYVHSDGAEFSCDTDSLDDDLDDREHDDEFGGSAVRKSFSYGSLQTMNVGALLYAPRIDGDDEGWVHYSHRNSDVGYHVEQVPPPTAEEHASIPLRRKRSILPARWRKVKLPKAKGEPLLKPYGEEGGDDIDYDRRLLTPSDGSVSEGSNGSNSMVSVFGDDDFVVGNWESKEVFSRDGHLKLSTQVFFASIDQRSERAAGESACTALVAVVADWFQTNQDLMPIRSQFDNLIREGSLEWRRLCENETYRERFPDKHFDLETVLHAKIRPLTVAHSKSFIGFFHPQGTEDVTGFDFLDGAMSFDNIWDEISRAAECSSGKPALYIVSWNDHFFVLKVDANAIYIIDTLGERLSEGCNQAYILKFDDTTTIHKTPAEKKEPSPDHRGRRKDSSETCSTEQGSGSDTEECEPVLKGKDACKEYIKSFLAAIPIRELQADIKKGLMASTPLHHRLQIEFHYTEPRPAEIAAPSPLPPFEAPFEFCWPEPPSPPAATESTVTHPPAMEAGITQAVAVV

SEQ ID NO: 57651 - protein, 562 aa, Zea Mays
MRDDNSSKNKLSWSKTLVRKWFNIKTKAKDFHSDYAAEEAGVQWRTSFSDRDACKSKKSRTERLTKRNVERDGRVENGFDGAYITNTQDYRVFVATWNVGGRSPSSHLNLEDWLHTSPAADIYVIGFQEIVPLNAGNVLLTEDNGPAKKWVSLVRKTLNNLDQQGSGVYNYHTPSPAPDPIVELNVDFERSSRRQRNSSFFHRRSFQSLNRSSRIDMMDPHSLVDRRFSVCDRISFGSRPSDVDTSVRCGGSSDDETIDEESPSGMFFPPMPCAYGAPLCDGSRYCLVASKQMVGIFLMVWVRSDIREHVKNLKVSCVGRGLMGYLGNKGSISMSMSLHQTSFCFVCTHLTSGQKDGDQLRRNADVVEILRKTRFPHVHGAGEEKSPETILDHDRVIWLGDLNYRIALSYRSVKALVEMHNWKQLLEKDQLRIEQRFGRVFAGWREGRIYFPPTYKYSYNSDRYAGDDMRPNEKRRTPAWCDRILWYGRGLSQLCYVRGESRFSDHRPVYSVFTAEVRIPSQQQAAAQFGGGGGGITRSASLLGLALDELPYPRSYMDINFY

SEQ ID NO: 57652 - protein, 335 aa, Zea Mays
MKCFFKRPPETQKALGATLSAGLSDTQQDVHDRALFYYRLLQYNPNVAERVVNPPKQAVSVFADTQSSETKDRIFDEFNSLSVVYQKPSYMFTDREHREPFEYSEDLTSLTVGAEDPENVISAQRYQENDNDLLLSTSDKEDNGTRASNGSSTSAYNAPSDLISPSLISSQTPAETSLVNTGGPTHSSQSNFSLDDLLGIGVTEAPAPTPPALTLNSKPVLDPGTFQRKWGQLALALSQECSLSPQGAASLMNPQSLIRHMQSNYIQCIASGGQPPNYKFFFYAQKDGATAFFLVECIVNTASAKAQLKIKADDGTAAEAFSTLFQSALSKFGLS

SEQ ID NO: 57653 - protein, 954 aa, Zea Mays
MDSNSSSIKLLWGPPGTGKTKTISSILWAMLIKGRRTLACAPTNTAVLEIAARIVSLTVKSSDGTVFLNDIVLFGNKKKMKIDNDYYLSKVYLNFRAERLLPCFKSNTGWRHCLCVLIDLLVNSVTKYQLNNEDKTFKQHLKDDYNKLSRNLHSYITILYNDHPRNLETGQSFQCMLEVRELLKILHTLINAGNGGDIWSDELLRSTIEEEVNPELWPSQLACIRTNSCNKSKFVAARSLCLQELIYLCKNMELPNCYSAQDVRLYLLSRTRLIICTVCSSFKLYNIPMRNSSPSLHQLLNKPKILIPLELLIIDEAAQLKECETLIPLQLPGIRHAVLIGDEYQLPSLVKSKISDSANFGRSVFERLSSLGYSKHLLNIQYRMHPDISRFPVGTFYDGKLSDGPNVSHKDYNKMFLAGKLFRPYSFINIDGSHETNEMHGRSLKNSLEVDAVVMIVQSLLKETLSTRSKLSIGVVCPYNAQVRAIQEKVGKPCRKYDYFSVKVKSVDGFQGAEEDIIIISTVRSNGAGTVGFLSNLQRTNVALTRAKHCLWIVGNGTTLFNSNSVWQKIVKDTRDRGCFFNATDEKELLNAIFKPAVEYPHADNLAKHEQHGQNISDLSATDTIQQLACQFTPGSDLPPKFSITLNVGYTTRKFSSSSTLLNSSPLQLTATAVPNAEPASHGSSATGAVELPVTEDGRLVDGKISFQNTVRSTLIRIDHDPRLAFDFLAVATTREQAAPLTREQFKKHDRMVESPAPVTAEGSECCIRLNEQEQVAPPTKLQSKKRGRNVKDPAAATTGALKCSIGLDEIATRQQAAPPTPEQSKKRGRKSEPLPQVITEGLRRSSRLSEKGKHHQVAPSQEQAKKHGRKGATLSPVTTEALRRSSRLNEKGTHQQIALSIPEQAKKCGRKAKRLPRVTIEGLKRSKRMSRNNSEELADVDCNPCECYHKKPF

SEQ ID NO: 57654 - protein, 531 aa, Zea Mays
MAAASSAPFFGLGDTQMQPQQGSSSSLQQNSTAAPGAAAVPPPKKKRNQPDPDAEVIALSPRTLLATNRFVCEVCNKGFQREQNLQLHRRGHNLPWKLKQKNPREARRRVYLCPEPTCVHHDPSRALGDLTGIKKHYCRKHGEKKWKCDKCSKRYAVQSDWKAHSKTCGTREYRCDCGTLFSRRDSFITHRAFCDALARESAQMPPLGAGLYVGPGSMSLGLSQIHGFADQAQSSSAAAAPQFDHIMPSSSGSSSMFRSQASASSPSYFLGGSAPPAAAQDFSEDGSQGSQGPLLHGKAHFHGLMMQLPEQQHQPGSSNAAVGANGSNILNLGFFSAGNSGGTSGSLQDARIAIQDQFNLSGSGSGSAEHGNNVMVASIGSHLGRGFPSLYSSSPSAGMAQNSATALLMKAAQMGSTTSSTTHNNHNGPTTTSTLLRATGFSGATGSGQLGTTGGRAAAGEEGAASHEAHFHELIMNSLAGGGFSGTAGFGGGVDDGKLSTRDFLGVGRGAATMAPPGLHMGALDPAQQMK

SEQ ID NO: 57655 - protein, 695 aa, Zea Mays
MWRLRIAEGGGDPWLRTKNAHVGRQVWEFDASADPDPAVDAARRAFAGSRGHLKHSADLLMRIQIITLYVTGALNTVLSSEHQKEIRRYLYNHQNEDGGWGLHIEGPSTMFGSALTYVTLRLLGEGPDSGDGAMEKGRNWILDHGGATYITSWGKFWLSVLGVFEWSGNNPVPPEVWLLPYLLPFHPGRMWCHCRMVYLPMCYIYGKRFVGRITPLVLELRKELFKDPYSKIDWDKARNLCAKEDLYYPHPFVQDVLWATLHKFVEPVMMSWPGSKLREKALETAMQHVHYEDENTRYICIGPVNKVLNMLACWIEDPNSEAFKLHIPRVYDYLWLAEDGMKMQGYNGSQLWDTAFIVQAIVATNLTEEFGPTLKLAHNYIKKSQVLDDCPGDLNDWYRHTSKGAWPFSTADHGWPISDCTAEGLKASLLLSKISPEIVGGPIEANRFYDAVSCLMSYMNDNGGFATYELTRSYAWLELINPAETFGDIVIDYPYVECTSAAIQALTSFRKLYPGHRRKEVDSCISKAANFIESIQKSDGSWYGSWAVCFTYGTWFGVKGLIAAGRTFESSPAIRKACGFLLSKELPSGGWGESYLSSQDQVYTNLKGNRAHAANTGWAMLALIDAGQAQRDPAPLHRAAKVLINLQSEDGEFPQQEIIGVFNKNCMISYSQYRNTFPIWALGEYRCRVLGAGKR

SEQ ID NO: 57656 - protein, 334 aa, Zea Mays
MRRWLCCNCHYDVEEDDHAKEQAKAQSNKTDSKQKSSKPPGSQPEPEFSPPTIDVPELSLDDLKLKTDDFGSSALIGEGSYGRVYHATLDDGRQAAVKKLDASENEPNDEFLKQVSLASKLKHENLVEMLGYCVDGNYRILAYEFATMGSLHDVLHGRKGVQGAQPGPVLDWMQRVKIAIEAAKDFNLLNQAPDMAARLHSTRVLGTFGYHAPEYAMTGQLTQKSDVYSFGVVLLELLTGRKPVDHTMPRGQQSLVTWATPRLSEDKVKQCVDPRLKGEYPPKGVAKLAAVAALCAQYEAEFRPNMSIVVKALSPLLQQRPAPTTEEPAPQPGS

SEQ ID NO: 57657 - protein, 1431 aa, Zea Mays
MKRGTRDDALMGSQLKRSNVVRSDPSAQPQHMSVPGSASAAAPPPQAGAAPPAQPQQPSGAAFTNQKLTTNDALVYLKAVKDKFQDKREKYEEFLEVMRDFKSERIDTNGVIVRVKTLFNGYPELILGFNAFLPKGYAIKLQEEKKPVDFVEAINFVNKIKHDEQVYKAFLDILNMYRKDNKSIQDVYHEVAMLFKDHKDLLEEFQHFLPDTSVAPQAVASKGGLVKREDRSSLVPPANKILHNDKRDRVYLSHADRDFSVDRPDVEHDRQRRRLDKDKERKVERDRRDYEREDKDGEHDSRDLELGQRKRKPFSRNIEDNVGAETHQGGPSENHGIHSVSASSYDDKDALKSVYTHEFHFCEKVKEKLEHEAYQEFLKCLHIYSQEIITRSELKNLVNDILQHYPDLMEGFNEFLEHCENIDGFLAGVFNKRPSTRAVKTEDKEKDRDRDREDKDRDREKEREKERERLDKGSTFNSKEGSSHKPSMFSGKEKYNLSKPISELDLSNCQRCTPSYRLLPKNYPMPPASNRTDLGASVLNDHWVSVTSGSEDYSFKHMRKNQYEESLFRCEDDRFELDMLLESVNAATKRVEELIEKMQDNSVKPESPIRIDEHLTPLNLRCIERLYGDHGLDVMDVLRKNASVALPVILTRLKQKQEEWSRCRSDFNKVWAEIYAKNYHKSLDHRSFYFKQQDTKNLSTKSLLTEIKEINEKKRKEDDVLLAIAAGNRRPIVPNMSFEYIDSEIHEDLHKIIKYSCAEVCNSSDQLDKVMRVWTTFLEPVLGVQQKHGSEDPDLVKTKSRTTKLGLANVRESNTIAGIVSKQSNGDESEQGPSSRARLANGVAAGTQNGFHDADRIARKGEEPSNAILNGRVHGAVSADETLSLITQNIASTERPAENAAAVRTEQHKANLVLTPGMNASRSSHDAVEVAGEGKTGNETLLSAEGGERLGPSLNGTSEGIKGRLNNDGSVPHTSKVEREEGELSPNGDFEEDHFVPFEDGTSKGKEDSTSRPFHGRPGEVVPSSAEAAGENDADADDEGEESAQRSTEDSENASEAGEDASGSESGDGEECSREDHDEEEEDMDHDDQDAKAESEGEAEGTTETHDVEGGISLPLSERFLYSVKPLAKHVPTALHDREFSRVFYGNDSFYVLFRLHQILYERLLSAKTNSFTAEKKWRNSKDTNPPDLYAKFMSALYNLLDGSSDNTKFEDDCRAIIGTQSYVLFTLDKLIYKVVKQLQAIATDEMDNKLLQLYLYEKSRSPGRFFDLVYHENARVLLHDESIYRFECCSSPTRLSIQLMEYGHEKPEVTAVSIEPNFSSYLFSEYLCSTPDKKLSEGVYLGRNKRKYSNNDEPSDSLKAMDGINVVNGLECKISCKTSKVSYVLDTEDFLFRLRKRRKILRGGNVPDRLQISSISAAKVQRFNRFLSKP

SEQ ID NO: 57658 - protein, 267 aa, Zea Mays
MLIRATDCRYFCMMQREGERQSLGLSPVKYHGKWPFLRVSVFQEPLSTALSAVNLLMHFTGWLSFFLLVNYKLPLRPQTKRTYYEYTSLWHIYAILSMNAWFWSSIFHTRDIELTEKLDYSSAVALLGYSLILSLLRAFNVKDEASRVMFAAPILAFVTTHILYLNFYELDYGWNMKVCVVMAAVQLLTWAVWAGVSRHPSRLKLWTVVFGGALVMLLELYDFPPYMGFADAHSLWHASTIPLTYLWWSFIKDDAKFRTSTLSKKAK

SEQ ID NO: 57659 - protein, 501 aa, Zea Mays
MEEHQVKPSDLPPTSLHNQDSAATPVTSADPARPAASNDSPSQVASAAPAAVSAPTAAPAEDAAGREASASVFSASGLSSWAKNLKIPQPSPGQESPTGKNTFARLTSGLGLRLSPKAAQQDEGAEGSTSPTTGQPGVFGSLTKGIVDSSKNAVKAVQVKARHMVSQNKRRYQEGGFDLDMTYITENIIAMGFPAGDLSSGLFGYFEGFYRNHMEEVIRFFEMHHKGKYKVYNLCSERLYDASLFEGKPEDFWFSAPKKGIMVFALPGEPGLAEVAGDFKIQFHDRQGDFYCWLNTTMMENRVTLNPTDLDDFDKRKLPSPGFQIEVVLVDYDGSQPAKPKPGAGPAADKSHADSSASTVAKENSAAPEESNKGTGSNNDRDEVFSDSDGEDGSSNGRKEKTAGGGQSSVNAAKPSQTGNMEEAAASAAASRLDKVAISSEQGTTKAPDGTSLKTEVSSKASSTTAPPPPAADSSSMSEFKAIAADASVFSFGDEDDYESE

SEQ ID NO: 57660 - protein, 165 aa, Zea Mays
MHHTSNNLDEAPYRQEDILSEHCSYGTPVYLEPDQTPCSQESIACINDQSGISGTSETGPMTESFIMQETRKLCTLKVSKGSSSTLVKVKENLTTSVAYPFTLIKPSWEEGDVTLQDINQRIRAPPKKAPEILGTSAFSGKPVIGKTRIRTEGGKGSITILRTKG

SEQ ID NO: 57661 - protein, 94 aa, Zea Mays
MSSAPPHVRSCSKDSCTSPASLGGDHHRSMDLGEWRSRIYSTGVDEVCFPVLEKRRRNRSSCTAESSPPSRKGITPLHPRSLNRSVANVFGCWP

SEQ ID NO: 57662 - protein, 92 aa, Zea Mays
MKVCVVMAAVQLLTWAVWAGVSRHPSRLKLWTVVFGGALVMLLELYDFPPYMGFADAHSLWHASTIPLTYLWWSFIKDDAKFRTSTLSKKAK

SEQ ID NO: 57663 - protein, 505 aa, Zea Mays
MRSSWADSVANAEESAPATAAANGSVANHSNSRPTRSSYVPPHLRGRSAGAAVGAQAGSVAPAQGGPLPLAAAQPSGQGAVVGGPRWAGIVNGGGGGSVGAPRQGYGGGGGGGGRGAWNSRPGGWDRRDREPDPFAKAEAEEVDFDGQENTGINFDAYEDIPVETSGHDVPAPVNTFAEIDLGDALNENIRRCKYVKPTPVQRYAIPISIAGRDLMACAQTGSGKTAAFCFPIISGILKSPKPHQRSRSTRTACPLALILSPTRELSVQIHEEARKFAYQTGVRVVVAYGGAPITNQLRELERGVEILVATPGRLMDLLERARVSLQMIKYLALDEADRMLDMGFEPQIRKIVEGMDMPQRGERQTMLFSATFPKEIQRMAADFLADYIFLAVGRVGSSTDLIVQRVEFVLDSDKRSYLMDLIHAQKANGTHGKHALTLVFVETKRGADALEDWLFRNGFPATSIHGDRTQQMIMFIGLEGPDVLGNLVLRLHSSTRATLRLQGH

SEQ ID NO: 57664 - protein, 605 aa, Zea Mays
MGSATTICSDKTGTLTLNKMTVVEAYFAGTKLDPCDDVSQMSDSAASLIIEGIAQNTTGTVFLPEDGGAAELTGSPTEKAILSWGLKIGMDFDDVRTKSSVIHVFPFNSEKKRGAVAVQLDDGVHIHWKGAAEIVLSSCKSWLSVDGSVQSMSAEKHDEFKRSIEDMGANSLRCVAFAYCSFDIEKIPMEDITSWELPEDDLTLLGIIGIKDPCRPGVRDAVRLCTTAGVKVRMVTGDNIETAKAIALECGILDANSVISEPVVIEGKVFREMSESARGEAADKIIVMGRSSPNDKLLLVQALKRKGHVVAVTGDGTNDAPALHEADIGLSMGISGTEVAKESSDIIILDDDFTSVVKVVRWGRSVYANIQKFIQFQLTVNVAALVINVVAAVSSGDVPLNAVELLWVNLIMDTLGALALATEPPTDNLMKRNPVGRREPLVTNIMWRNLFVQALYQVAILLIFDFDGVRILRLQNESRSDAEKITNTFIFNTFVFCQIFNEFNARKPEEKNVFKGVTKNHLFMGIIGITTVFQILIIQFLGKFFKIVRLGWRLWLVSVAIGLVSWPLAYVGKFIPVPVRPLPDYFKPRCCWKPPRRDEEEGGQS

SEQ ID NO: 57665 - protein, 64 aa, Zea Mays
MPTCTISRSPFFLFCHILFFSLSIVFSRPLYHMRLPCYLLQGFWIPDIMLFYFVLLLTYLVMAC

SEQ ID NO: 57666 - protein, 713 aa, Zea Mays
MESTDKNDKRNAVTEESSNPGQNCEDDGDFSMKTEMLNVEEAPSFSNDKLNNESEVQIQEGGNDSEEGLNGQMNERTSSDVMECASSNEITKENLSEDKTEEPVFDGTEVLEIEEMRRSSNQSGELDSEAQGSVLNDRAVAIKNFVKERSAIAVSTFMRRLSGKKDENEFKAEADKTIGSEYMDCEKTRTDAESNPKEVQQKSVERTVWNPLNFIKIGRDSDTFVTGEALNENVPGLLEIPPLKGRIIIYTKLGCEDCKKVRLFLLRKRLKYVEINIDIFPGRKLELEKNTGSSTVPKVYFNDLLIGGLIELRKMEDSGILDENIDVLFNEESPYSAPLPPLLGEDDESGSGKIDELATIVKKMRESITPKDRFYKMRRFSNCFLGSEAVDFISEDQYLERDEAVEFARKLARKYFFRHVLDENVFEDGNHIYRFLDHDPIVMTQCYNIPRGIIDVAPKPIAEVASRLRLLSCAIFEAYVSADGRHVDYQSIQGSEEFKRYIRTVEELQRVEIDYLSREEKLAFFINLYNMMAIHALVTCGHPAGPLDRKKFFGDFKYIIGGCAYSLSAIQNGILRGNQRPPYNIAKPFGQKDRRSKVALPYHEPLVHFALICGTKSGPALRCYSPGDIDKELMEAARDFVRNGGLIVDPEAKIASASKILKWYSTDFGKNEMEVLKHAANYLEPAESEQLLELLASTQLKVMYQNYDWSINI

SEQ ID NO: 57667 - protein, 1275 aa, Zea Mays
MPKVFGTGVFEFRHPRAAEYPLPADAAPATAAAPDKVPASTGGGSITLLDIQRDRLTRVATEHWGTAAAAAAFDADLVRKIYGTELRVEGRGRKTVPLQRVMILEVSQYLENYLWPHFDPVDASFEHVMSIILMVNEKFRENVAAWTCFHDRKDAFKGFLWRVLKLKEEERALNMAEKTNYLLFMINSFQSLEDELVRETILQLVSLKLWNTLSFGRLQMELCLNPELIKKWTKIRRREAKEAKKADQPINPSEMLENKFLRNLIEEFVEILNSKVILSNQDGAEESVLNESFSGQIDDSCVLYCERFMEFLIDMLSQLPTRRFLRPLVADVAVVAKCHLSALYTHEKGRLFAQLVDLLQFYEGFEINDHSGTQLGDDDVLQAHYSRFQAFQLLAFKQVPKLRDFALSSIGSLHKRADLTKKLLVLSDVELQDLVCNKLKLISEKDPCSERRDFLIEVLVAFFEKRQSQKDAVNALPLYPNEQIMWDESLVPSINYSGEGCLALPKLNLQFLTLHDYLLRNFNLFRLESTYEIREDIQEAVPHLHAYINNEGETAFRGWSRMAVPIKGFKITEVKQPNIGEVKPSAVTADVTFSISSYRYQIKSEWDALKEHDVLFLLSIRPSFEPLSPEEAEKSTVPERLGLQYVRGCEVIEIRDEEGALMNDFTGRIKREEWKPPKADPGPYPQDKPKQNSVRFTPTQIGAIISGIQPGLTMVVGPPGTGKTDTAVQILNVLYHNCPSQRTLIITHSNQALNDLFEKIMQRDVPARYLLRLGQGEQELATDLDFSRQGRVNAMLVRRLELLGEVSKLARSLRLPEDVGYTCETAAYFWLLHVYARWEQFLAACAQNQDKPSFVKDRFPFSEFFSDTPQPIFTGESFEMDMHAAKGCFKHLSTIFQELEECRAFELLKSTVERANYLMTKQAKIVAMTCTHAALKRRDFLQLGFKFDNLLMEESAQILEIETFIPMLLQRQEDGHARLKRCILIGDHHQLPPVVKNMAFQKYSHMDQSLFTRFVRLGVPYIELNAQGRARPSIAELYNWRYRELGDLPYVREQAIFHKANAGFSFEYQLVDVPDYKGKGESAPSPWFYQNEGEAEYIVSVYIYMRLIGYPANKISILTTYNGQKLLIRDVINKRCKPWNIEPPNKVTTVDKFQGQQNDFILLSLVRTRFVGHLRDVRRLIVAMSRARLGLYVFCRRSLFEQCYKLQPTFQLLLQRSDKLALNLEECTPFTERPLEETGNIHYITGIEDINSSSKVQAGTSSSSAIHAVLCSSGK

SEQ ID NO: 57668 - protein, 202 aa, Zea Mays
MAHQLNSSDDNIEDHVKSQSHSMADIPITNGVRKHYRDGAFVKASSFSASSGHDAMQMLKSEMQDHGFHYMPPRKPRKSDGYLRYRRRRLSGGFIFVAHADYYLLLRAFAKLAEIDIRIMHIRIPPPFLLEKNMWCHCVTVVLKNIRSLIPQELRASFCGLLALVSNLSTRTGQDVGLYLLKQYVPRIMPPFFRTDIIISGS

SEQ ID NO: 57669 - protein, 256 aa, Zea Mays
MANAGGGAAEEGEWLKVAQLRALVQEDHRAKEVDNLTLRRFLRARGHNVDKAAAMLLKFLRWRAEAAPGGGTVREEQVRGELEQDKIYMGGVDRTGRPIIVGLLAKHYSANRDMAEFKSTSTTWPFFLHQSKCVCTIPRGQEKFLAIMDLKGWGYANCDVRAYIAAIEIMQNYYPERLGKALMINVPYIFLKVWKTMIYPFIDANTRDKFVFVDDKSLRETLRREIDESQLPEFLGGKMPLVSLKDYAQQPQPVCE

SEQ ID NO: 57670 - protein, 397 aa, Zea Mays
MQQRRKSVFASAPFAMKQAALGAGVAARKNGAPLSLAAVVFALFVFATFLYNEDIKSITDFQFSSGAIRAKSPDLHLLQEAEAAAHAAVNTLAKRGEEVIVRVLEVEAPPVVNTSSVLAAAAKASAKANAVDVGQEKERDVTLPTVTGGRGGADEAQRRADEEVAEKAASAKAAAATAALRGVVSVPQTCDLYRGSWVYDEVSAPVYKEGECEFLTEQVTCMRNGRRDDSYQKWRWQPAGCDLPRFDARLLLERLRNKRLMFVGDSLNRNQWESMVCLVQSVIPDRGQKTLTKFVNGGSSNVFYAHEYNATVEFYWAPFLVESNSDNPKVHSVPDRVIQWHAIAKHARNWIGVDYLVFNTYIWWLNTLDIKVLGRPSMTRAPPSTWRWTGPWRTRRC

SEQ ID NO: 57671 - protein, 2217 aa, Zea Mays
MAASEREAALLTRVAANHLFLAQFEPLRAVLLSLRRRDPVLCADFLRAVAAAGGRVPGVLWSAPPACPSPSHLAWLAVLELAALPSTPNPEALRLKAEFLVLLQPIADDPAIGAEAREILTKLLDLGVTRLKLEVEGGGDAGASAEEASVKDLRGLWEVFLDNAFVFDALCIGVSRQIALDRGFGVDVLLWLRRNVQLAHLDAVKTLVTEGDLDAAPGHLRFLCLDHGLEKDEYKVVIAELLRKGWAKTSNYGGTWSELQNRITKLYGAALQSTSPELVQLVQLILDNILSEEIEDHDVSDANGMPLPFEKFLETLLLERDTDSDDKVLLDAAITSCKKDLYHYCRLSGKHMLEVVLETALSSIKREQLLEAVDVVSLFPLLHPLVAVLGWDILKGKTGLRRKLMQLFWTSKSQGLRLQEYSHYRSPTDETSCEEYLCDLLCFHLDLARFVSSVNSGCLWNLRNSLLFTQQEQGSDVNNAEILDPFVENLILERLAVQSPMRVLFDVVPGIKFQDAIELVGMQPLPSTTAAWKRMHDIELMHMRYSLQSVALALGEMEKCTGDENECYYHKALSYLREMQNFMEAIKSSPRKIFMVSIILSLLHMDDCAKLSQSVPSECYVSHECHDINIESEGKNVVVYFVGLLLDILRHNLESKGSDTDHLSSTGLSPAGRQALEWRLKHAKHSIEDLDWRLSVLKRLPPLSERQWSWKEALVLLRAAPSKLLNLCMQRENYDIGEEAVQRFSLPAEDKASLELAEWVAGAYKRALVEDAVNRVTDNTNAAHELDILSLRTQLGSLTTILLCVDVAATSAKSVHMCRFLLDEATSMLSEIFPGRSPKVGPTYWDQIQELATISVIKRILQRLHDILDLDTLPSLQVFFTEMSISSSTECSRVGQKQRPLGLLHQMIDDAFKGKRQFLSGKLHNVARAIVDEDFDTVYSKEGVNLEKKDILSSEKGILLGHGLRILKQASRSDLASSNVVDSGPEHKGSANRYLGPLSTKPSTYLSNFIIYTATIGDIVDGTDTTHDFNYFSLVYEWPKDLLTRLVFERGSTDAAAKVADTMSVDFVHEIISACVPPVLPPRTGQGWACIPVIPTICNISSENRLCTKSSPAQGWSAHDSSLSSRQEPLYPLQLNLVKHLAQLSSVRAVLACVFGSSILSGDNESSFTHVKDSTQAPETERSFFEFALEQSERYPTLNRWIQMQSNLHRVSESSITDKSEVSLHQSKGKFCMKRTRESDSDGESELEENVISGNTSSSSLESTKHEDARLEPTTFISFDWENEAPYEKAVERLISEGKLSDALAVSDRCLRNGASDNLLQLLIEQKEEKGPGTGQIHPYGSHSLGNDTSQYCLRLRDKKVAAQLALKYLHSWDLDAATNVLTMCMCHLPENDPMRSEVLHMKQSLQRYGHIMSADEHYTRWQEVEADCEDDPEGLALRLAAKGAVSAALEVAESASLSIDLRRELQGRQLVKLLITDPLNGGGPAAASRFLSTLRDSNDALPVAIGAMNLLPDLRSKQLLVHFFLKRTVGNLSDAEIARLNLWALGLRVLSLLPLPSQQRCSSLHEHPQLIVEVLLMMKQLQSASLILKEFSSLRDDKLIIAYAKKAISINREARKAFSWVPRDSGTKTPPKDILRKRKSSGSGGDRSSWEAMPGLQEERTPVYPSEAQERLPFVSAPDEWVLTGDPDKDDATRSSHKYETSPDITLFKALISLCTNESVAAKGALELCMTQMKVVLSSQQLPLDASMDNIARAYHATETYVQALSYAKNLFKKLVGSSDLSSGSERSKEVDDVSVDTGSSSTGSQYLDELSDFLTQADMWLGRAELLQSLLGSGIIASLDDIADKESSSRLRDRLVNDERYSMAVYTCRKCKIDAVPVWVAWGHALVRMEHYAQARVKFKQALQQYKGDATSVVTEIINTIEGGPPVDVSSVRSMYEHLAKSAATIFDDSLSADAYLNVLYMPSTFPRSERSRQSRGHVDSQFRTASSYLEDGPRSNLDSVRYAECIHYLQDYARPQMLAFMFRHGHYTEACSLFFPFSQPTTEGETSLSSAPWSDPLTTDYGTIDDLCDLCLGYGAMAVLENTIRTITQSPTYHEAHMIQYMNTIITRICNYCETHRHFNYLYNFLVLKDDHVASGLCCIQLFMNSMSQEEALRHLGHAKTHFEEALSVRDRTIEATKLVLRSARNKGAPGKMTRETIMKYSTRVSYQAKVHGC

SEQ ID NO: 57672 - protein, 192 aa, Zea Mays
MEILPVDDLDIALHDFVNKDDKMAFYSCLQRNLEETRNKLSSEADKSKFEEEDIIVKVGECMQERVKERSLHSKDGTRLTTGSHNLDTGGKSFTAQSNQNSFSDDEDTREMLLGARSTDVGRKSSGFTRPSKDTADVAKRGTSKRGRGRGTSSMKQTTLSFSQSRSATVIRSEDVASSEEEADANEVVENSV

SEQ ID NO: 57673 - protein, 65 aa, Zea Mays
MAQQAFPIIRSKSHEASLLNPGKNERTRWPDPSCNSVNVLLRKSCMLYSNQVPGTVTAFQIMFSQ

SEQ ID NO: 57674 - protein, 176 aa, Zea Mays
MTNTYTNIKSMCHTAPDVLKGLLSHLAQAISDYIIYQVNSGAQCIQIFDSWGGQLPPHVWEQWSKPYIKQIVSRIKKECPNVPLVLYINGNGGLLERMKNTGVDVIGLDWTVDMTDGRRRLGNGISVQGNVDPAFLFSPLPVLTDEIHRYGALGKTLIEASNTCTRFSKTRYSKMM

SEQ ID NO: 57675 - protein, 275 aa, Zea Mays
MEESLRGVRVPTVQNMSSGGATIRTQGITSDPAPNRDNPNESLLVGSSTVHVEEMMLDTTVTVQTDTRSSGAFSGFVELDDVSTESIKISAPLFLRPFGPRAIVQHKGSPLQLICPGLEVLWVNTKGFPNSPHRPKVGIKVDIPENLSKVLGFCDDLAQSSSSSPGPGAICSNSRWKSLIERDADRRPTVWLKIPTFGSGDTAACRTHVYEKECDGVVPRLVSERVDPSELASMLQGNKVVDAFVSVETFDHYQSAGIRLVANRLDVHFKRQQQA

SEQ ID NO: 57676 - protein, 1620 aa, Zea Mays
MEVGMQTEVSAAADDLIEVGAALVSSAEDCTAVAACLVNDDCNIIFPGGVHRSDDQTDQEFGGNSLDADEVALLVNDIQDDSARMDMDVSAHGDVHAQDRESSQLDVATALLNEVGTELVEAGDHAVQECTNMDMRIQAGDNNEAERVGTIADTATNEEHRHMGEVTMTRDDSEKHDVAGGVDVPDERIQMGRGGLPGDDNEQKEVATADEDRVEDEGMQVDAVNITGDMVEEGRIAVEYIAGEAVIGEGGIDVPEEKAAQIDRAGNDIPEEEGLQMGEAGLIGSDNGLKEAVIADHDGVEVNAIPTEATGTTNDDDENNTIVGEDVAEAVNDITGDDVPDEEAAHMEDDDDDEPPPLVEKKGGGRRKRGRPSSKVQGVVKPSVKRKDEEEVCFICFDGGDLVICDRRGCPKAYHPSCVNRDDDFFKSKGRWNCGWHICSNCQKPARHMCYTCTFSLCKACMKDAKFSCVRENKGFCDTCMNTVMLIENREEAADPMEVDFDDKGSWWYLFKDYWLNLKTNLSLTVEEISAAKSRKSGELPDTNDEVNSESSSGRNLESNTSKKRGRKRSKQAAINEGSEGKASTRKSAKRDLSGIHDVQTSSGKKVRKLSRRSLSSQHSSKDSESVGTSTSSAEEDSWASKELINFVAHVRNGDKSVISRYDVQPLLLDYIKRNKLRDPRRKSQIICDSLLQSLFAKERVGHFEMLKLLESHFFMSEVSPIDADENHGGVVDPDPSQDADGNSEASVVMSSEKRRKSRKYDLRHQPNLDDYAAIDNHNIGLMYLRRNLMEELIGDVDTFDEKVVGSFVRIKIPGTGQRQDIYRLVQIVGTGRSAEKYKYGKRTTDITLEILNLDKREAVTIDIISNQEFTEEECKRLRQSIKYGFIPRLTVGEVQEKARVLQTLKVNDWIESEKMRLGHLRDRASDMGYRKDLRECVEKLRLLSTPEERARRLNEELEIHADPAMDPYYESPEEQEQEIEKSSFNKSRGSFLRKDGNPVPPGKGDGRNAAQRDSKTNWESNRNTWAESSSHMESPLPRRSTFSSQGESAGYTSKSESPNTGAQTVKLEGTTRSAPQGSPGASSGILANNICSGAKTAPQSAINESEKIWLYMDPSNKIQGPFSIIQLRKWNSNGYFPPSLKIWKASEKQDDSILLTDALAGKFEKDLPPWEPPHVSLFQINKTPLEQSTIAGEQTPKSVVAKSFSSSNQRHGYSSTNLGTTMIHSGTQGYYGMQNSHAAYTSQHSLTGSWNATSSQFGVAVNPVTPTQPAMGSFSGQNIVSAENMGHLTPGTAPAAANAEMVNSDLTSQKQISYLPQTDGILADDIESKSGEDVSHGKVSSSAKAIGPLGAQLGQGQLNTQQHEDIKNQMSSTDVSNSTMPSQMMSTPSAASVQPSLSTIAGSDNQSSGWAVPTQVVNTSGQSQITGNLTWGNTPQGDASLGWGMMGQNNMNMPWVASAQGASGYNMGAAMPTQPNAVPNMGWLPNPGNTNMNMIWAATQGQGIPNAAAMMGGQMQGVAVAPWGGVAAGNANSYPAWGNQQVGNMNQNVRWSAPVQGNPSQENNNMNWNAPNGNPNNWNNQQRENEGRHSGHRGAFSAGDSGRKSWKPRSGADGGSWGT

SEQ ID NO: 57677 - protein, 123 aa, Zea Mays
MEAFDHISKGIDKIYKQLTKSHTHPLGGTAYLNLENEDEPFLNGIKYTAMPPTKRFRDMEQLSGGEKTVAALALLFAIHSTSWVFGYAKTNKLAHEVFRISIYWPSQEFDKVLGHHRSSYWTK

SEQ ID NO: 57678 - protein, 649 aa, Zea Mays
MGGLCSKVSAVDKSPSDTALGRNQVADHEPGASLELEKPPVSRESAAPAKRLDEQLQSFSFLESVVPGVAFHAGANTGGEAGSRTSPQLTRSLSQRAGVGKAKAGAAKVSEVSSILGRASTAGLEKAVEVLDTLGSSMTSLNSSSGFVSSSAAKGNKISMLAFEVANTIVKGSNLMRSLSEPSIKHLKEVVLHSEGVENLISKDFDELLKMASADKREELEVFTREVVRFGNRCKDPQWHNLDRYFEKLASERTPQSYLKEKAESVMQKLVTCVQNTVELYHELHALDRFEHDCRLKQKEQDGLSSRGDNLDILKQELKVQSKHVKSLKKKSLWSKNLEEVMVKLVDIVHFLYLEIYNAFGRPDSEEPQEPAKHHNRLGPAGLALHYANIINQIDNLVSRSCAMPPNARDTLYHSLPPTIKSAFRSKLQSFEVKEELTASRIKAEMEKTLRWLVPFASNTNRAHHGFGWVGEWANTGSELNCKISGQMDMSRMETLYHADKEKTEALILELVVWLHHLISKSGNASGGVRSPIKSPVSSPTQKGAAITLLSGKTNNLPPILTQEDQDMLRGVKYRKFVPGISKSQEFDTKSSHSKHSRLSKSNSHSPASGSRKDLLPVRRSSMLPVIDFEIDRTKALDLIDRLDNLKVQ

SEQ ID NO: 57679 - protein, 67 aa, Zea Mays
MADIMGAMVITEDELDSSSLTSAVDEIFGDEKLMADMSQKALTAARPNASADIIRHICSLIGSTYPS

SEQ ID NO: 57680 - protein, 171 aa, Zea Mays
MKQNMLIEYALRPETSNGEDSDDKIRVFSSTVNVGTNGAGSSDSHPKSVEKESFELRNEAHAIASMADDAEQSALQMSDSFSFLNNSDPANYIKNHSAYDDLIEHINLQMKSLEYEIEQFINSQSVEEVGSEKQRSDKWQRLSDIQMLIKETREKIARILGMIVEETESGT

SEQ ID NO: 57681 - protein, 1120 aa, Zea Mays
MAIVESKSSDQDKEIHGGVIPQATAISVDLLDGIIQKIKLLSISRPDNVVAEIPKDALVPYEGEFGALVAFEGKTKKNRSRAKVNIDPVTTMMWNLLMGPDMGDGAEGLDKDKEKWLDEERKVFRGRVDSFIARMHLVQGDRRFSRWKGSVVDSVVGVFLTQNVSDHLSSSAFMAVAAKFPAKPEVPEKPVAEMSHTPEQKDSCSCSGLFGDSIKLQGKMFIEEISDVRSLITTEDNEESNSNELIGSSAGYGVNHATGGCHVSYRKSLTESHENGLSGSVFPTTGFSSVVETEDGSLEDVISSQNSAVSSQNSPDYLFHRTDPIGSSSLQNFTEEGYIMRNISNGTGSSTDCSGFLPIQDPKGTLGLSEYYGHNPLLVSGVNKGVLLDLNRSYQPLHTSMPYVQNSESDFTGVSCFSHMDKSFHTGPNRVNLSSVTQSEASLYPTDPLQQDEFSPVIKQNFQPLYSSDKVSLFKEHCSYGNDFSRNKTEAAIMEPLVYSNPQELYTTSTEQMGVEQFQSGCGQQDNDVRVQTTSYERHQSSTLCGNQNSQLEILQGVASGSTQKFIDTQKSPSEVQQNGSKAKKVRGRPKTKTYDWDSLRKEVFSNGGDKQRNNDARDTVDWEAVRQAEVREISETIRERGMNNMLAERIKEFLNRLVTDHGGIDLEWLRDVPPDKAKDFLLSIRGLGLKSVECVRLLTLHHMAFPVDTNVGRICVRLGWVPLQPLPESLQLHLLEMYELHYQMITFGKVFCTKSKPNCNSCPLRAECKHFASAFASARLALPAPEEKRLATSEDPNVVEFCHQTYINSGAVGELEWSANYPKHAVCGNLQPFIEEPLSPEPEPENVEAKDGAIEDFFNEDPDEIPTINLNIEEFTQNLKNYMQANHVEIEYADMSKALVAITPEAASIPTPKLKNVSRLRTEHQVYELPDSHPLLEGFEQREPDDPCPYLLSIWTPGETAQSTNAPKTFCDSGETGQLCGSLTCFSCNSLREMQAQKVRGTLLIPCRTAMRGSFPLNGTYFQVNEVFADHCSSQNPIDVPRSWIWDLPRRTVYFGTSVPTIFRGLTTEEIQQCFWRGFVCVRGFDRTVRAPRPLYARLHFPASKVVRGKKPGAASVEE

SEQ ID NO: 57682 - protein, 229 aa, Zea Mays
MALKKGRRVVPKLTAEPMDVDVKDMDDAHDTAIDVEPLAMAFESLPTEESPDKSVARLDDLILEAIRKLKEPSGPSKAAIAAYIEDQYWPPADFQRLLSTKLKALVNSGKLIKVNQKYRIAPSPPPSGRIGTKVSSAEGMKAENNNAKRLTKHQVIAELEKMKGMTKEEAAAFAAKAVAEAEVAIAEAEEAARVAEAAENDAEAAKAFLDAVTLSMRNRNAASMMLRAC

SEQ ID NO: 57683 - protein, 168 aa, Zea Mays
MGWMSPTVVADMGLELLSVTFIFSVIVSFALYIAGIKSGHKSSSLRPHVSGSFMQDWWFGVQLNPHFMEVDLKFFFVRAGMMAWLFINLSLFAKSYFAGSANLSVILYQFFCAWYIIDYFVHEEFMTSTWDIIAERLGFMLVFGDLVFIPFTFTIQVSYIPANVDPWC

SEQ ID NO: 57684 - protein, 991 aa, Zea Mays
MRRDAVPPPTAPSASSSSSLFSGGGGERLFESGPSPLVFLPLLLIQGGGMDLSRVGEKLLSSVRSARSLGLPPIPTAPPPRPEVPERAAAAAAAARAIAGLPPHERINLPSNSEDLVSIYGSNPQGQPVEELEEVFYEEEFDPIKYILQSIPEEGGGDATYFDKQSTLRLEQLDKIAERLAHHVMGHHEEMVKGMQLVMELEHDLKVANVICMNGRRHITSSKNEVSRDLVVNVKSKKKQALLDVLPILTELRHALDMQMELETFVEKENYFQAFQLLPEYLQILENYSGLSAVQEMGRGIEAWLVRTIQKLDTHLLGVCHIFDAENYLTVVDAYALMGDVSGMAEKMQSFFLQEVLSRTHYVLKEMLEEEVGNNTQKNRFTYSDLCVQIPEPKLRLCLLRTLEFLFSLMCSYYTIMSFSSGDKNIDSKGQDEAYKDGTSQNSSETLVNLGRGHSSAAVTQDGSAAEKIDRASSSEVSNPDTSTSETGSPFYQLRTDATKLVAQTFQRGRRNLWQLATSRLSVLLSSSAVCSTSTYQFLKNYEDLAIFILAGEAFCGFEASEFRQKLKTVCLNYMVSFHRQNVYALKMVLEKESWTIMSAEASQIISLAGLTGDGAALCSPTSRSPKLPINCYHGTTTANSGKEKLGFASWLVIENPFSFKLENGSAESPKSNMLVDSSASNNHGNGNNSSLDEENEDLLADFIDEDSQLPSRTPKAKMVKGNSLHWKDGDISSQTGSSLSLLRMMDKYARLMQKLEIVNVELFKGISQLFGIFYHYIYETFGNQDKSQSSKPLPDHQSSRLKAALSKITQDSDQWTKPNTVSYSPSSPLSKNSTFGQMDVMPTAPPSSMFTSYGLKERCAAAETLSLVARILNRSRAHLHSVLSKNNSSVVEEFFRTLVDSVPDLTEHIHRTSARMLLHIDGYPDKIANAKWEVKELGIEHNGYVDLLLGEFKHYKTRLDHGGISREDAVLSYSESFDDGFTDQCKFTHV

SEQ ID NO: 57685 - protein, 323 aa, Zea Mays
MRKRDLLLRRYWRREDDGTYVILYHSVFHYKCRPEKGYIRACLKSGGYVISPVNQGRQSVVKHMLAIDWKFWKSYLFTSSAKYITIRMLGRVAALREFFRAKNGNCSCMEFSSGELTRDTGLPQGENQRINLEMQQENENGRLEGPTEGSLGGSNRHLSSTGSFVQLNDAADEFFDVPDESEYDQREVMFPSDESLHAADQRHAKLSTAAVFVKRLHDLAVQKRGYIDLQGAADADNGPCCYGYTLPKDSSYTVPSTWAMTDPTTFLIRGETYLHDRIKIKANSTLMQMVGADWIKSDKREDDLAGRPGGLVQHKGAPDSSSL

SEQ ID NO: 57686 - protein, 662 aa, Zea Mays
MSNVKPSEKFARTLALLPSVRVSEDSWSLMIRRILIVVNNLLNDAFIGLEEEKKGHDIMLLLVPPGTDPLPTLGDEVMPGGNVHIMKKFRVFTVPTISALTLCCSVMLTSYYPVQVNVPIHALIALMRRVLLVDGSLHNKLFPSTTSLHQELICFDLPSLHSTFLDLLNATIKGMRSQLLPHGASIIRLITEYFKIAKLPTLRTKTYSILQLLLTSMGVGTSLHLLEATVRNAVADLNDDGEINMTMINTNSSQLTNESSSKVYSKKRKQEPQMQNSTISGSEKVAISPRKRKGSSIPITSKGVAPESTGDVTLSTPHSVKIAALETLEVLLNVGGSLRMDRWRSEVDMLLINVARSACGMGGSYEQKPSTFGEPNISDFQLASLKGLLASFLSSHARPPYLANGIELFRKGKLEIGTKVAEFCSHALLALDVLVHPRALSLERTVPASSGFNYTAQKKTVFGAGTHQISPFGDQPQAMEVEDMYDDWLISNNNEPPEVPVNGSDAVVSKGVLVEDGKQLNPIAEDPKVDPPRITDAAQDAPASTKTDVKVVDAAAATAAKPNTAENPSSSNAVPSPVRTTDSDSRKHASFPEQDSPHENKSAAVHPGEASATPGVGSSHHRHEAPEARSASFTELFGSESGIESESEDLMPDIVDGDPDSD

SEQ ID NO: 57687 - protein, 275 aa, Zea Mays
MPVKRAHLKPHAADIKRNPHVHELYKLVYRLPENLSWLLAPPEIPKRPASKKKKQKDEIVAGNSFGVILEWEGVVVDDDDPDLEPRVWYVLSLEEGKSFPPDALLKKIEGMRTDQAIAEVLCWSEDPAEIQRLATHKEVIYQKLQAPRSRKSLEEGIKTVGLQGYFDAIVALEDFCLGKPDGEMFEVAAEQLGLEPDACVVFGNSNLTTESAHNAGMRCVAVAGRHPAYELQSANHVVRWLDQLSIVDLQRLANGEVIGRRGRESDMDMEIVIEE

SEQ ID NO: 57688 - protein, 728 aa, Zea Mays
MEARSSSSAAAVPPPLSIPSSSDQCVWADASPLLAAACRDLEDGELVHGENFSLFAAMSALEIMDPKMDSGIERSRYNSIDEAIEDGVAPIPLSLDRTLDVQRSIDVMDHLFSCEATWHKGHTLAQTVFTCIYLMRMERTSSHAVLNSFCRILRATCNAVISAVSTARTHEEEDLFTMSFGLPLRDEGDDKCLSILNSVEEIISRQLRACKAQALSKKKTLEGLESLQDNPDLEEDYCRALLCRLRFRKHFYHVIMCMRKPHGRGLELARKHVASCLTELNLMHKSRKFLKSQSSTMVQQSDGNCTTASGCQPVGFDVSLNSRLLSPTPPRAVKVLSWSNAIRYFERLLHDLDVICALSLNPVLDNVLHFIVQFQKTVPDLVPRAFLQTLLVQDGKLYGEYFFSDVISRALSLPDIIGDKEFQMNEFVVQLGQLVINLIKILCTNTAWQRRKLGKSLQDWSTISIQLELALKREFGETRNVLQNENMCMRVSKQLLIWTQEHAYWVAFRFLTLGFELDLYSPGEYSMVYWYMYVVLTKLIEKMQLRVLASSETSRRKGKKKKDHLKDSARDMAFSSSCLLPQCYLLLSEGLSMMLAVLRNESRSFQLPSIFNTEQERFMQHFDLLLKARVPEHISFYSFKESSSRAGMSDLVKYNFFKEIQKIVPSLRGSFASEPEKLAEVRRIEQVAEHNRIALNIISQVGAGDPSLRVSFEFTHHPHFAVAVVKRS

SEQ ID NO: 57689 - protein, 1389 aa, Zea Mays
MYYMRLHHSLCYVASLLKLLQTFGLSYHLSKLYFQEAGQSLARSRAALKYVVLAISGHMDDVLTEYKEAMHKLLFVLEMLDPFIDPSTSAMEDTVIFDGISAIYLEKQSSVYDIALNIIHTAVKRAAVLPSLELEWRRGAIAPSVILSILDPHMPLPPDIDLCKSSVHEIDKVPLAVLDNHAPQPCNPENIAGRDASETTIRPENFEQCSFLFAPEELNQSELTSLYTLKGKGHDVITQTSLNHDIPEGRSKEKLSSDPFLLDNVVAADYFDSQADYQQLENYQDCELRAQEFHRIALNLCMQQEPTLEGHNAGIDALLLAAECYVNPFFLLGFQSNLEPLDKIERIHSELMQGNASSVSKNLHLKDFNKKTIYNLENKRDRSVIDLLLQAARFDFEYHGKIPEGELYPNIAEDGKRSVEISPEALQFADAVTLVRKNQAMLCHFIMKQFQRKGHLGSEILLQSLLFLLHSATDLFCPPENVVDIILKSAESLNDQLTCLYSFFSAGNKKLDRIKIHGLRRRWMLLQKLVLASSGSDSTRELARNKRDGFHFRSLVPPSTWIQKISDFSMFSSPLPRFFGWMAVSCYAKEYLNEKLFLASDFSQLTSLLSIYMDELCLMDGVAIPKVRSAKGEQFSCTDLFLKKETTLSDQPSMTEQFKILLPELHFFFPSMGKLFNAFGESILEAVGLQLKCLPNSAIPDVLCWFSELCLWPYLEHIKEHLVVANGVSYIRGSIAANAKSVVFYLLESIVTEHLEAVIPEMPRIVHILVSLCRASYTDVAFLKSVLCLIKPLISYFLRKGTNETKVLGHIKEGSNFELLCFEELFEIVRCGKDSVDTTEDNIQAPLVIFILGSMFLDFSFERRIEMLGSLLVWIDCISSDPPSLLCNYLQGFQTLLDGFEAVLIQNIELLGVGILSATNSSIESSDSLGIDGTMLLEKKAQDNEEQTLMKSVTYCENDGNHKGLRNLHPNSIIEFCGTLEKFILHLTSYIEDSWKWHHQLASRISLSMAKCLLFAKFLKSIAQEDTISSSSEQDVAVKISCELAQKHWQSALEGLGDTILINQETQFWQVASAMLDYIMGIPNVLAWGNVLNTTCSAVKHFCSHAPRLSWRLQTDKWLSLLVSGGIEGFKNSEICLIDLFCTMLNHSEPEQRFVAVQQLGRIINSTSSTEADLKYPNYDQNFLISVSTVTSLLVTHTWDRVAALALHDSSMLLRNHAMALLTEYVPFVDRKHLQSFLSSSNGILTGLGQLSGVIEEGYFTRMSLLLFSKACLYSNPEDIALIPECVWQKLENMQTSTGGFGYMEKDLCLALCQLKSESDATTVAKVLSGCNSQPVSPDFKSIRESILQVMSSLSSIEAYFEFFAARSAQEHEELEEAEIELELIEKEK

SEQ ID NO: 57690 - protein, 1203 aa, Zea Mays
MVKARMTTTDVAAEVKCLRRLIGMRLANVYDITPKTYLFKLMNSSGITESGESEKVLLLMESGVRFHTTQYVRDKSTTPSGFTLKLRKHIRNKRLEDVRMLGYDRIILFQFGLGSNAHFIILELYAQGNILLTDSEYTVLTLLRSHRDDNKGLAIMSRHRYPVEACRVFGRTDFAKLKDMLTKPDKADDKEEITSGSTDAQETSQSTNDEVLVTEISEKSLSKKEKKAAAKAKQFGSNAKVNNGAQSNKATLKTILGEALAYGPALAEHIILDAGLVPSTKVGKDPESTINDSTVQSLMESITRFEDWLVDIISGQRIPEGYILMQNKMTAKNITPLEEASINHKIYDEYCPVLLNQFKSREYNEFATFDAALDEFYSKIESQKVNQQQKAKEESAAQRLNKIKLDQENRVHTLRKEVDHCVKMAELIEYNLEDVDAAILAVRVSLANEMSWEALTRMIKEERKAGNPVAGLIDKLNFERNCITLLLSNNLDDMDEDEKTAPVEKVEVDIALSAHANARRWYEMKKKQESKQEKTITAHDKAFKAAEKKTRLQLAQEKTVAAITHMRKVHWFEKFNWFISSENYLIISGRDAQQNELIVKRYMSKGDLYVHAELHGASSTIIKNHKPDTPIPPLTLNQAGCFTVCHSKAWDSKIVTSAWWVYPHQVSKTAPTGEYLTVGSFMIRGKKNFLPPHPLVMGFGILFRLDESSLASHLNERRVRGEDEALHEMEAESRKKQSNPESDEDIGSEGANKETHEDESNGQTTNIQQNNDLELPDLSSNIGTANSSELLPEIQAEETLDNGSSILKEETIEASVSSQLDDLLDKTLCLGPAKVSGKSSLLTSIPSSLAEDDDDLEVKRPTIRDKPYISKAERRKLKKGQVNDETATDSQNGEAVETPGTSKQEKGKAETKATDSKASQPDTSQQEKGKANTKATGSKLSQPGNSQQEKGKGSTHAGNAKVSRGQKGKLKKIKEKYAEQDEEEREIRMALLASSGKALRKDKPSQDVEETSVKESKPSAGEDDSSKICYKCKKAGHLSRDCPESTSEVDRNDGSISRSRDDTGTNTAPAGGNSPMDEDDVQEIGDEEKEKLIDLDYLTGNPLPNDILLYAVPVCAPYNALQTYKYRVKITPGTAKKGKAAKTAMSLFLHTPDATNREKELMKACTDPELVAAIVGNAKITAPGLTQLKQKQKQKGKKSAKQN

SEQ ID NO: 57691 - protein, 363 aa, Zea Mays
MEYLPGGDMMTLLMRKDTLTEDEARFYIAETVLAIESIHKHNYVHRDIKPDNLLLDHSGHLKLSDFGLCKPLDSSNFPNLNEPDYMSGKVTTPLPDTTRLSNPSAPRRTQQEQLSHWQKNRRMLAYSTVGTPDYIAPEVLLKKGYGTECDWWSLGAIMYEMLVGYPPFYSEDPMSTCRKIVNWRSHLKFPEEAKLPPEAKALISKLLCNVEHRLGTKGAHEIKAHPWFGGVQWEKLYQMKAAFIPEVNGELDTQNFENFEEIGTQIQSSSKSGPWRKMLPSKDANFVGYTYKNFEIVNDDEVAGIAELKKKSSKPKRPTIKTMFERMDEEEPVQGSFLSMLPPEGQPSSHSSVPQEKYQPRRK

SEQ ID NO: 57692 - protein, 378 aa, Zea Mays
MFSFGCLAYHLVARRPLLDCHNNVKMYMNALTYLTSEAFSNIPSDLVSDLQRMISMDAVSRPSAVAFTGSSFFRDDTRLRALRFLDHLLERDNMQKTEFLKALSDMWKDFDSRVLRYKVLPPLCAELRNMVMQPMILPMVLTIAESQDKGDFELATLPALVPVFTSASGETLLLLVKHADLIINKATQEHLISHILPMLVRAYDDNDPRLQEEVLRRTVSLSRQLDTKLVKQAVLPRVHGLALKTTVAAVRVNALRCLGDLVPSLDKEGILGILETVRRCTAVDHTAPTLMCTLGVANAIYKQCGVEFAAEYVIPLIFPLLTAHQLNVQQFAKYMLFVKDITRYCLSCIALLCPLICQLNYYLFLQQDRREAWCDCYR

SEQ ID NO: 57693 - protein, 145 aa, Zea Mays
MFESIVANAMAAKAKLLLRELKTVKADLAFAKERCAQLEEENKMLRESYDKGDNPEDDDLIRLQLETLLAEKARLAHENSVYARENRFLREIVEYHQLTMQDVIYVDEGIEEVTEVYPTQVLPRTGSSVSRAATAATPKSAPTST

SEQ ID NO: 57694 - protein, 488 aa, Zea Mays
MARWPGAGEGAEGGRRRGCGGQASKGASTAGKGAADGSRRGRAGRARSRRRASQFLYPFCPSQFLQYRIEASPGSLSVGALPAACTSPWQWRLPPPSAPPRSLVLTCSLSRTLICPCSRINPELSCMDPADVPEGIDPKSACRVEVTVNSYFTMQDGRKEYNRGKTVSYVVDSEEYSVIDLEKDIASEFKWGSDQQPNFWVLTRGNMTSKLASDAQLLDLLRASRVVKLLMIVGNCEHNVGHGHIPATWNIQEEIPVAVNIEEEMLDAMDNNLEEADGGFAWAEIPEYGETTAGPPMAKEEEKEHFITVGCDPNGDKPAGINEEWRYFKSVDHVAIDPLQNLKVEGQKRKRARPVLEIRDFDTEAVPEDETTLLDVFIVPHTSHDSENPVIKEGDTFVDKIAFVHTIKQYAIKNEFETRIEHSDKERYRARCVDENCDWRVYAKKLHGGNTFMVVKLSELDVHTCSSQTSQNASTIGLKITKISQSLI

SEQ ID NO: 57695 - protein, 370 aa, Zea Mays
MDRLICGDVGFGKTEVAMRAIFIVVSAGFQAMVLAPTIILAKQHYDVMTERFANYPEMKVAIFSGAQSKEEKDELITMIKNGDLHIIVGTHALLTERMVYSNLGLLVVDEEQKFGVQQKEKIASYKSSIDVLTLSATPIPRTLYLALTGFRDASLMSTPPPERVAVKTYVSAFSKERALSAIKFELQRGGQVFYVVPRIKAIDDVLQFLKDSLPDVPIAVAHGKKLSKNIQLAMEDFTSGKVKILVCTHIIESGIDIAHANTMIIQFAELYGLAQLYQLRGRVGRSGTEGFAYLFYTDKSLLSRVATDRLGAIEEHSELGQGFHVAEKDMGIRGFGSLFGEQQSGDVANVGIDLFFDMLFDSLSKYNYWG

SEQ ID NO: 57696 - protein, 192 aa, Zea Mays
MPSAEAMRLFVKILEEEDPGWYSRVPEFNSEPIVDIQMHKPKEEPQIVPASTNGTSISEPKIISENGSSVETQDIDVILEGLSTVSSLDEWTPLAISGHRPKPRYEHGATVLQDKMYIFGGNHNGCYLSDLQALDLKNLTWSKIDAKLEAESSDSAKTSQIAPCAGHSLFFSIAGHTKDPSEGVTGLLKFSF

SEQ ID NO: 57697 - protein, 1235 aa, Zea Mays
MASASFQPVAASAASAPPRPAPRHPFAAAAAARRSSLSLRPAAHRPVIPLRSSAVAANTLRATHRRAVSARSRRRAQGLGAAPALAASTWGGGDKGGCLSCFPKSRRGRSGLAPCALPHASGLSFRSRLSGSKVRPSHILHAAGPDEPHVASPTWSDTSLDTTDMDHAISKEELEDVLNTPLPEHPKLIRGQLKNGLRYLILPNKVPANRFEAHMEVHVGSIDEEEDEQGIAHMIEHVAFLGSKKREKILGTGARSNAYTDFHHTVFHIHSPTKTKEYGEDLLPFVLDALSEIAFHPKFSSSRVEKERRAILSELQMMNTIEYRVDCQLLQHLHSENKLSNRFPIGLEEQIHKWDPDKIRRFHERWYYPANATLYLVGEIDDIPRAVREIEAVFEHTLSENEGNPVPSANPFGAMASLFAPKLPGGFTSNLTGEKSPATDKIKPAKRERQAVRPPVEHKWSLPGVAQDAKPPAIFQHELIQSFSINMFCKIPVSKVQSYKDLRSVLMKRIFLSALHFRINTRYKSSNPPFTSVELDHSDSGREGCTVTTLTVTAEPQNWRSAIKVAVHEVRRLKEFGVTMGEMTRYMDALIKDSEQLAMMIDSVPSVDNLDFIMESDALGHTVMDQLQGHESLLAVAETVTLEEVNTVGAEVLEFISDFGKLNAPLPAAIVACVPQKVHVDGAGETEFEIYPEEITEAIKAGLEEPIYREPELEVPKELITQSELDDLKSQCNPSFVPLTKEENAVKVFDSETGIAQRRLSNGISINYKITQNEARVGVMRLIVGGGRATEDSESKGSVIVGVRTLSEGGCVGNFSREQVELFCVNNLINCSLESNEEFIFMEFRFALRDNGMRAAFQLLHMVLEHNVWLEDAFNRATQLYLSYYRSIPKSLERSTAHKLMLAMLNHDERFVEPSPHSLQKLTLQSVKNAVMNQFVGGNMEVSIVGDFTEEEVESCVLDYLGTVRASSSLNTEERIEKISFRPFPSDVHFQQVYIKDTDERACAYIAGPAPNRWGFTTEGNDLFNVIRISDADAEVSEPVSLDLTGKRHVDVRSHPLFFGITLSLLAEIINSRLFTTVRDSMGLTYDVSFELNLFDKLGLGWYVIAVTSTPSKVHKAVDACKGVLRGLHSSRIVERELDRAKRTLLMKHEAETKTNAYWLGLLAHLQSSSVPRKDVSCIRELTTLYESATIEDLYLAYEHLKVDDSSLFACIGIAGAESGEDTNGQARYNGEGYP

SEQ ID NO: 57698 - protein, 1649 aa, Zea Mays
MGCSPEGGSAACPDCLRRLVLRDLAGSGLSFVYGLSDSPLPFAASAVVQIASDGDEGSIGRQHISSFVLVGLCGGKVPFNSQQCDNSSLENCIHKDPQAEQTLYNGDNEYTEQSDSSSCIECIEGCKSSSGPCKQPLAISTITKLAPACYLSIGHTSEVRELITGYLTSSSEEYVINSLNLLFENKISGSAGLDFLSFVGFSAFDDLHSSGCVRHPNILPVLGILETSDCCYMLQPKAPYTLENIMHYSPEAFCSDWHIRFLVYQIISAVAYLHDLGVHHGNLRPSKILMSDSLWPYLSISDTCPVKHSWGVANHKCSPNSCCFMEDCSSKAIYSGFKLQSSLDWHSHFKQWWKGELSNYEYLLVLNKLAGRRWGDPGFHTVMPWVIDFTGIPDESSDNGWRDLTKSKWRLAKGDEQLDFTYSSSEVPHHVSDECLSELAVCSYKARRLPKTILRSAVRSVYEPNEYPSSMQRLYQWTPDECIPEFYSDPQIFTSLHSEMSDLALPSWATSAADFIYLHRDALESDRVSQQLHHWIDITFGYKLSGEASVEAKNVMLPSNDPSRPKSIGRHQLFTRPHPKRLVSTPHAVYHNNLDSCARCCGKRSGATTDAVLNGCGSPNMVSEIGRLEEFEKATLFAELEYQLNPVYDYADGDPSTCFSSNKYPKKQNADQILQHDNALPAAPNFDLGSFLECFESDDNSHMGYQELLLWNKKSNSQNECHANDVFSIGCILAEIYVQKPLFDNALLSAYKEIGIMPGALQGLPSHVTLLVESCIQREWKRRPSAKHLLESSYFPPSVRSAYMFLAPLQVLSTSRERIKYAAKLASEGALKAMGEFAAEMCAPYCLSLLSSSLSDVDTESALSLLKEFLGSLTIQATKDLVLHIIQKILQAPEYSHLKVAFLQDSFIRDLWKKLGKKTYIEKIHPLVISNLYSSPNKIIASAASTVLIVSSEELGIPITIHQTILPLIHCFGKGLCADGINTLVRIGGLLGENFVVKQILPLLLNVIFSCIDSSKMSKPEPQHSWNSFALIDSLSALEGLVLVLPVKTVIKELLQDQACLYVKVLMQIPLDLRVIQVAATALIDLCQRIGPENTSIYVLPQLKELFAELAFSHDSSGLNHPIKGFKSSDENKNKPIKVESRIDLLLLLYPFLASLVGIEKLRESCSTWFLLEQALQRLYNWKWEPSGDCSKNAENMKGQRLQPGNYMSSEFVPTKLLFNGVGWSMPQSETTKKNGRNTAASNLENETSSDNLSTSSSGNQPWFWFPTPDSSWGVPEFLGRGGGLRDELPWKIKASILYSARAHPGALRSLAVHDDECTVFTGGVGPGFKGSIQRWELPNMNCTSGYYGHEEVVNSICILSITGRVASCDGTIHIWNGQSGKLIAAHAESSTTFPLQTPSIEQANMLNQDALSGGILSNAFRGSLYTTMHYMESEGILVAGMGNGSIRFIDISQDQKLHLWKSDTAEISFSSLVSAICSCGSNKLRKGSLMASSWIAAGLSSGYCRLLDKRSGNIIAVWRAHDGHITKLAAPDDHLILSSSLDKTLRVWDLRRNLATQSNIFRSHSDGISNFSVWGQDVVSISRNKIALTSLSRPESEIGHQQLALQNLYSADRGVKHKNLSVLSTIAVLPLSRLFVVGTEDGFLKMCH

SEQ ID NO: 57699 - protein, 415 aa, Zea Mays
MEWIVRERPYKLSELDYSYLLEFTAKVHGISEAESLFLRVPQECRKELLYNNLVMAALDLNHIKHSYAYMRKMRELSLPISPYVYNRLIILHSSPGRRKTISKILSQMKADRVVPHTSTYNILLKIQANEHNIDGLARVFNGMKRAKIEPNEITYGILAIAHAVARLYTVCHTYVEAIENSMTGTNWSTLEILLILYGYLGKEKELKRTWEIMQDLPHIRSKSFTLAIEAFGKVGSIDQAEKIWIHIKSTKKLSLTEQFNSMLSVYCRHGVVDKASSVFKEMRANGCQPNAITYRHLALGCLKSGLVKEALNTIDMGKKEVVTKKVRSSTPWLETTHLLLENFAEIGDLENAKRLYSELNESKYSLNSFVYNTLLKAYVKAKVYEPDLSRTMILRGAMPDAETYSLLRLIEQFKI

SEQ ID NO: 57700 - protein, 575 aa, Zea Mays
MRAAISETFPEPTRRLLQRILKMMHTVASHTAENRMTPSAVAACMAPLLLRPLLSGECELEDDFDMSDDSAAQLIAAANAANSAQGIVTTLLEEYESIFNDEHFRCSLSPDSQTGDSGSEESTDDETVDIKDNGFHDAENDVDQELDDAERILNGKLSETSACVHADLHDYKQEVNGNDSDAELFVEDNTFEPNVNLNDTPLSRLIENGKKPSNLASSHETPLSVGEILSSLDAGVPLPGRAAEYSKDRLSSKPNGIQQHVKRTNLWGRSNARKGQRSELVDPSSEEELAIQRLEVMKNDLQVRIAKEARSNAILQASLERRKQALHERRVALEQNVSRLQEQLQAERDLRAALEIGLSMYSSQFSSSHSMDSKTKAELEEIALAEADVARLKQKVAELHLQLNQQRQHQYGSSVDANDCPPHLPNHLSQNTVQTGFDRTVAFCNQEKQRNEESLPCTSHWRSIKQHVLSQDSSRPFSRKHSSDTSLSDSMEASTSVLAEGGPLLVNIARTTEGVEYGRPPTVPSSTLVELTTRLDFFKERRSQLMEQLHSLDLGHGSASHGFPYKSSSPWNNPR

SEQ ID NO: 57701 - protein, 1469 aa, Zea Mays
MHHPQEEIHSSPNTMSLPSPCRLNGDVTPCEAEKIAEDRGKVDGIVDAVSKEVKTDLVGCHARQEELQCTLQDLSEIACSIDLVRNKSSPQEEKKSVSPLNDMGHNVDNNSCNGDTNYKGQELNMGNVGDEDHAVALWVKWRGKWQTGIRCCRADCPLPTLRAKPTHDRKTYIVVFFPRTKTYSWVDMLLVLPIEECPLPLVNGTHRKWRKLVKDLNIPRRFNIQNLAILMINLIDELHIEAVVDNARKATTWKEFALEASCCRDYTDLGKMLLKFQNMILPDCISCEWVQNSIETWNQKCMNAHDAETIEMLCEELRQSILGNKLKELRDASVQPELVPEWKTWKQELLKQYFSLHPAGNVGNFEKTNCYDDPALDQQGSRKRPKLEVRRGEIQILHMGEADYRTPTEDPNQNKLPSNSVMHENIGALGATSQKNAVMFPGSSGTNENTISGSSNAALQNARLDLDSFKSSRQCSAYIEAKGRQCGRWANDGDIYCCVHQSMHFLDHSSREDKTLTIEAPLCSGMTNMGRKCKHRAQHGSTFCKKHRLQTNLDVMHPGNLLDPSEVLHMGEEPPNKWVEGISKSQALYSIDLETDKNVQAVVQVKLMPTVAIENSGEKGCAMEKTDMCAASTSMTNTDDTSLCIGIRSHDSIVECQDYAKRHTLYCEKHLPKFLKRARNGKSRLVSKDVFVNLLKGCSSRKDKICLHQACEFLYWFLRNNLSHQRTGLASEHMPQILAEVSKNPDFGEFLLKLISTEREKLANIWGFGTDRSKQIYSENKEGSVALQEEKTNLSSGPKCKICGHQFSDDQALGLHWTTVHKKEARWLFRGYSCAACMESFTNKKVLERHVQDVHGAQYLQYSILIRCMSCNSNFLNTDLLYPHIVSDHAQQFRLLDVPQRPSGQSAQQTEGMSGLPLYDSHNVEDENGSQKFVCRLCGLKFDLLPDLGRHHKVAHMVSGAVGHIPLGRGKYQLNRGRHYYSAFKKSLRPTSTLKKSSSSGIDKNLKFQISGLTSQIVESETSSLGKLQDFQCLDVAQTLFSKIQKTRPHPSNFDVLSVARSVCCKTSLLAALEVKYGPLPENIFVKAAKLCSDNGIQIDWHQEGFICPKGCKSRYNSNALLPMQLTAVDFLEAPVDSRNDDEMWGMEEYHYVLDSKHFGWKPKNESVVLCEDISFGREKVPIVCVIDVDAKDSLGMKPEELLPHGSSLPWEGFHYITNRVMDSSLIDSENSMPGCACSHPECSPENCGHVSLFDGVYNSLVDINGTPMHGRFAYDEDSKIILQEGYPIYECNSSCICDSSCQNKVLQKGLLVKLELFRSENKGWAIRAAEPILQGTFVCEYIGEVVKADKAMKNAESVSSKGGCSYLFSIASQIDRERVRTVGAIEYFIDATRSGNVSRYISHSCSPNLSTRLVLVESKDCQLAHIGLFANQDIAVGEELAYDYRQKLVAGDGCPCHCGTTNCRGRVY

SEQ ID NO: 57702 - protein, 221 aa, Zea Mays
MTAFSSAAFSFAGAALVTSTSTSTFLASSSVMLLSARRSLAVAVEGWELAVPVGRACERGGGGAFNCWPCLDSGRSWTPELESSPQRKGRERKGSRQGMKEPMRAYVTATRAGASWHWARRGPRAQRIGSQRNRPVLCAQTRRAGPHRWALGSRERGDSLVAVARRASPFTPARQQRSFRSTSSCPGARPVGTVDRTTDHGDVQCICSSTRPGRSSDGSAA

SEQ ID NO: 57703 - protein, 378 aa, Zea Mays
MDGSDDELDQPTSKATEHITAMDVRKGKDMQGIPWNVMPTTRDKYRQSRLQGYANFENVPNSGRLSEKECMPAEKGQLYYEFQHSTRSVKPTIRHFQLRNLVWATTRHDVYLMSNFSVLHWSAMTYKKQEVINLQGHVTPCEKHHRNHYEGFYQTPVSTLAVKHNLLVTGGFHGEIICKFLDRQGVSYCCKTTNDDDGITNSLEIFEKPSGSLHFLASNNDCGLRDFDMEKFRICNHFHFAWPVNHTSLSPDGKLAAIVGDSPDGLLIDANSGKTVHKLHGHLDYSFASAWNPDGRTFATGNQDKTCRVWDVRNLSRSVVVLGGNIGAVRSIRYTPDGKFMAMTEPADFIHIFDVESGYSRKQELDFFVQSATVLLVP

SEQ ID NO: 57704 - protein, 76 aa, Zea Mays
MSKLKKSEAFTREREREIEQVVESVNELAQIMKDLSVLVIDQGTIIDRIDYNIQNVAASVEEGYKQLQKDSKLYGA

SEQ ID NO: 57705 - protein, 965 aa, Zea Mays
MASPASVTNLGSNGRSGPLPAAAARRAQLVTRIRFTGFDGIRRWQYEPGRLCRCMVVTNLIEEKVVQFSSRGSVSVKADDDNDLLLKPPQKPVRSNGPPESMKTASLPDQKPAGATLDDREKVRESLDAVLEKAEKLEASSFGNADGGNLGSRQSNVSMSNGPGPTAVEEGGNSRKTKTLKSVWRKGNPVPTVRKVIREQPRTETRSQSIPVAKPSVSSASKPSPLLLSKPSVAQPPRRPIKSDTSNEKKGPILIDKFASKRAAVDPIVPEELLDPLKPVRGPPAKVRVDRRKKPDTQAGSRRRMSNDDGLVDEDTTDVPISGVPVRKGRRWSKAKRRAARLEAMQAEEPVRVEILEVGEEGMLIEDLAYELAIGESEILRFLSVRGVMLDNVQTLDKDLVKMVCMEYDVEVLESGPVKVEEMAKKKEFLDDEDLDKLEVRPPIVTIMGHVDHGKTTLLDYIRKSKLVASEAGGITQGIGAYQVLLPVDGNHQACVFLDTPGHEAFGAMRARGARVTDICIVVVAADDGVRPQTSEAIAHARAAGVPIIIAINKIDKEGANAERVMQELSQIGIMPEMWGGDTPMVEISALTGDNVDELLETVMLVAELQELKANPHRNAKGTVIEACLDKAKGPLATLVVQNGTLNKADIIVCGEAYGKIRALYDDCGKLVDKAGPSNAVQVIGLNNVPLAGDEFEVVDNLDVARERANGRAEALRIERISAKAGEGKVTLSAIAASVSSAKQVGIDTHELNVILKVDFQAIRQAIQTLPQENVSLRFLLQGPGDVSVSDVDLAVASEGIIFGFNVRAPGSVKNYAKKKGVEIRMYKVIYDLIDDLRKAMEGLLEPAEEEVPIGSAKVRAVFSSGSGKVAGCMITTGKVVQDCNVRVLRKGKEVYVGSLDSLRRVKETVKEVGAGLECGIGVDDFDEWEEGDIIEAFNTVNKARTLEEASATVTAALKDAGVQL

SEQ ID NO: 57706 - protein, 311 aa, Zea Mays
MQRNDAVRALDVYKRATNQAERLSEFYEVCKTIHIGRGEKFLKIEQPPASFLNTMEEYVRDAPTGQKEKAILAIEYKKEPEEEEKPSSPPAAPEPEPEQVPEPEPEPVKEEAPEAEPDLLGLNEPNPAATAIEEQNALALAIVPIDDAPKAAPTFGNGVTGWELALVTAPSSNETAVAPSKKLAGGLDLLTLDSLYDEANRRASQPASYNPWEATPAAPAPMMTMAPVMHDPFYASNGYAAPHGVQMAAMAQQQQAFMLQQQQMMTMAPAQPVVHHPMQMQQNPANPFGNPFAAAGMPLHAGPGNVYTGLI

SEQ ID NO: 57707 - protein, 175 aa, Zea Mays
MTSASGAPTPNREALVIGVVALLVFGPKGLAEVARNLGKTLRAFQPTIREIQDVSREFRSTLEREIGIDEVSQSTNYTPTTMNNNQQPAADSNIKPAPAPYTSDELVKVTEEQIAASAAAAWNPQQPASSQQQVYTTPSEDAPTSGGSDGPAAPALAASDSDPKQVNLDKAETQR

SEQ ID NO: 57708 - protein, 324 aa, Zea Mays
MSCFACCGDEDTQVPDTRTQYPGHHPARADAYRPADQPPKGSQPVKMQPIAVPAIPVDELREVTKGFGDEALIGEGSFGRVYLGVLRNGRSAAVKKLDSNKQPDQEFLAQVSMVSRLKHENVVELLGYCADGTLRVLAYEFATMGSLHDMLHGRKGVKGAQPGPVLSWLQRVKIAVGAAKGLEYLHEKAQPHIMHRDIKSSNVLLFDDDVAKIADFDLSNQAPDMAARLHSTRVLGTFGYHAPEYAMTGQLSSKSDVYSFGVVLLELLTGRKPVDHTLPRGQQSLVTWATPRLSEDKVRQCVDSRLGGDYPPKAVAKLTGSKQT

SEQ ID NO: 57709 - protein, 85 aa, Zea Mays
MHPGAILDCCFHDDSSGFSAGADHTIRRLVLSSSKEDVLGRHDGPVRCVEYSYAADTFISMDLLLDFFSSVSFSSARYFCSLMQL

SEQ ID NO: 57710 - protein, 115 aa, Zea Mays
MKTRPDPSPPHRDQWLRTIFEPVQIGSNLGRYTQNPWPRIHLPTRPPPISPRAASYNTHGGGPPRRGKSTILASHPLIQVALCDAEMKVNTDKGTLSRMMRVGGQSTQKSGTAAD

SEQ ID NO: 57711 - protein, 644 aa, Zea Mays
MQRQGRHLERSNSKRALDHGGGGDDDDRPSKRPRVPALASVIVEALKVDCLQKLCSSLEPILRRIVSEEVERALAKLGPAGPARIQGRGSPKRIEGPDGRSLQLQFRTRLSLPLFTGGKVEGEQGAAIHVVLLDANTGHVVTSGPESSVKLDILVLEGDFNKEEDEGWTEEDFESHIVKEREGKRPILTGDLQVTLKEGVGTIGELIFTDNSSWIRSRKFRLGLRVSSGFCQGIRVMEAKTEAFTVKDHRGELYKKHYPPALKDEVWRLEKIGKDGSFHKRLNSSGIYTVEHFLQFLVRDQQKLRSILGSNMSNRMWESLIEHAKTCVLSGNHYIYYSSDARNVGAIFNNIYEFTGLIADDQFISAENLTENQRQAYADWINVLEYDGKALLKFNQKKKYVTTRSETAKASASYPASNGLVNSQKELPGGPVNAEQSSLNNASQDRTRIPSMSMGNQVAREYAGNPQHMTPSITMQCDTRSLIPGGQFSGGSSVQTQTSRSSNMLALRPTQQPQNLDFSGLGQSTQPSGTNPFADWSRLQESSVDEYLMDEIRARSHELLENDEMQHMLRFLSVGGAPTGLNNVDGFLSYPSPAPAFGFDEDDRARSSGKAVVGWLKIKAAMRWGIFVRRKAAERRAQLVELED

SEQ ID NO: 57712 - protein, 995 aa, Zea Mays
MKLNDELADPEVLAQENCNDQPVLAQTDLETKLNDELADLAMESGCSITERNEGLVAHNLDQEGFLEATPECKQECGLPEETVISSKETGSLLCADQSPIGLESLFSQESIVESVGHCALASATTHTENGFDDSKDCHNKSALENVHVPEPCSHNDTKGGIFKNVDCMHTSQRDDRMEGVPEANTDEEHVLSAFLLDANHLNVVINSEEVVCEGEDSKELLHSEDCKASSEKTDVNDGNVYGISDAVVRCALHAPADDNYEIFLGPNTDVPRQVYNDGCSDVKEDRFASKPWTIDIIEDASVKERSNLKDWQLDSKLEGTEIVESGLYFNKDIGNILHSGSIGEITPSGSGLSKDSSVDYRGEVLDGFSMEASLERSSTRGEQNGCRLDAIENPSITLATSGYKHEGALSEEAVYTKKNYAGTCLSNPRELIMELQSHFSKENINESDPHDSLVFPTAENSADEQLVKVHHGSNLSQLGLTDLLDGPIGCSNTDVLCQCDNHKNQSNEDKVEEVEAVSAAKYIESEVVLLPSQERSNLNNEQLNTKLESPNIMGSCLNCDNDVCNTSDNGSVFVIGKRTPSASGLPEDYPKDSDLQQPVLDSFSVVSSFQDNISGKKTVSGVAGSEILSLSLATPDYKHEDGFSEEAVCRTKNYTGTSSVDPRHLDMEGHSIYSEGGTEKSNLQDNLAFLSAESGKDEPIICHVEKLVDAHASSDTYQGPCQDLGRHEEQESCMSIPMQAKESGGVLRSSHTKGSVTAAQIDLAGDAHLIVSDNAAAKQVFSEEKEETKSISSSDIDILHEKSYSSGHDDHAACAAETQFYHPQKASISDGLHLGPSSLQVESLDALDSDILYVNTGVLEQHHKEGYYEPSVYQITSGICTMSEAEPFEVLETGKDVKTPSKLDEQLNPGLDGDEAEKHSLDCGTDTSPVMSKRTLSSPGSGPCQQYVNESTTSTQSTDNHPNDLPAPRSPEQSACFQNDNDSGSAFVKAAGEEV

SEQ ID NO: 57713 - protein, 1040 aa, Zea Mays
MPLFERDRYQRLDGVGARRPPPPPSSFCSSATVVVFVALCLVAAWMMASSNNIAVTVTPENNSGAKDQDGSVDVGGDTRQASDEVADTGSGTQSTEVSGDAGKKDDRSGGDASQTKEDADGDTDNKDGGDASQTKEGADGDTGNNKDDGAGATQTAEPVTTVGNDVNQSDVTGRTDATANGTTRGTDAEDSGEPDSGTVAEGDTPARNQTFSDENGKTEGGEVAKPEDPDKKVEQSAEQTAIDGNTTTSGQDQDENNTDKNTNETGGQADKREEEASTDDKSTGGQADNTTVQEASTTDDNSTGGQANNSTKETPTESKETVGGDDGTAQSQTSFDDMNGSTNDSQPMKEDGKVAENSSDETASGGKVESTDDDATTGAASNNATSGGQNVAAETMAFAAADDGANGNITENSYATNSSATTEGKIPTVGEGDAAEKADLLPSGQAELLNETASAVAENGAFPTQAAESSEEKEALAGKNKKKNQKKKKQKSKDQGAASGETAEGKETYAHTWKLCNASTGADYIPCLDNEAAIKKLKSTKHYEHRERHCPADAPACLVPLPEGYRQPIPWPYSRDKIWYHNVPHTMLASFKGHQNWVKVSGEHLTFPGGGTQFKHGALHYIEVIEEALPEVAWGRRSRVVLDVGCGVASFGGFLFDKDALTMSFAPKDEHEAQVQFALERGIPAVSAVMGTKRLPFPGNAFDVVHCARCRVPWHIEGGTLLLEVNRLLRPGGLFVWSATPVYQKVPEDVEIWHAMAALTKSMCWEIVKKTSDTVDETAMVVFKKPTSNECYDARTRAEPPLCGASDDQDAAWNVTLRPCMHRVPTDASARGSRWPTQWPQRLATTPYWLSADQTGVYGKPAPADFAADQEHWRKVVDNSYRDGMGIDWKNVRNVMDMRAVYGGFAAALSDMKVWVMNVVTVDSPDTLPVIYERGLFGMYHDWCESFSTYPRSYDLVHANHLFSKLKSRCKLLPVIAEVDRVLRPEGKLIVRDDMATVKEVQSIARSLHWEVRMTVSKQGQGLLCVRKTMWRPTQVEALS

SEQ ID NO: 57714 - protein, 390 aa, Zea Mays
MARDLAPEVERLLQNRDPNTKKKAALCSIRIVRKVPDLAENFMSAAASLLKEKHHGVLISAVQLCMELCKASHEALEYLRKNCLEGLVRILRDVSNSSYAPEYDIGGITDPFLHIRVLKLMRILGQGDADCSEYINDILAQVSTKTESNKNAGNAILYECVETIMGIEATSGLRVLAINILGRFLSNRDNNIRYVALNMLMKAIAVDTQAVQRHRATILECVKDADVSIRKRALELVYLLVNDTNVKPLTKELVDYLEVSDQDFKEDLTAKICSIVEKFSLDKLWYLDQMFRVLSLAGNYVKDDVWHALIVLMSNASELQGYSIRSLYKALQASGEQESLVRVAIWCIGEYGEMLVNNLSMLDMEEPITRLLFSVTRRMLLPGLCVLSLF

SEQ ID NO: 57715 - protein, 446 aa, Zea Mays
MSKLLHKAIREKRDNAYTVYQQHLASRPVNVLRDLLELKSDRAPIPIGKVESATSIVERFCTGGMSLGAISRETHEAIAIAMNRIGGKSNSGEGGEDPIRWNPLTDVVDGYSPTLPHLKGLQNGDTATSAIKQVASGRFGVTPTFLVNADQIEIKIAQGAKPGEGGQLPGKKVSAYIARLRNSKPGVPLISPPPHHDIYSIEDLAQLIYDLHQINPKAKVSVKLVSEAGIGTVASGVSKANADIIQISGHDGGTGASPISSIKHAGGPWELGLTETNQTLIQNGLRERVVLRVDGGFRSGQDVLIAAAMGADEYGFGSVAMIATGCVMARICHTNNCPVGVASQREELRARFPGVPGDLVNYFLFVAEEVRAALAQLGYEKLDDIIGRTDLLKPKHISLVKTQHIDLGYLLSNAGLPEWSSSQIRSQDVHTNGPVLDETILADPEV

SEQ ID NO: 57716 - protein, 351 aa, Zea Mays
MDDDDGSLGIRNWGFYDTMKGNLGLQLMSSMPPDRDTKPLLPRAGFLQQHGHHNASHQLHAQQSQHYRDSTCGGGASGGMPTEQHSIHMDFSRNEAWLHPSHHHQHPHDQKVLHSRPTVPAGHVGHPGHGSHPVHGGHIVHHHPTGYGSISDAQHTLQMMQPQLESQLQEPPPCKGDEAPPPPIEDHSVVSTGPPVKKRQRGQQQSRQPKSPKPKKPKKVAVLPEGGALNGHAPRRRGPKKAVGMVINGIELDLANLPTPVCSCTGTPQQCYRWGAGGWQSACCTTAISTYPLPMSTKRRGARIAGRKMSQGAFKKVLEKLAGEGYNLVNPIDLKTFWAKHGTNKFVTIRC

SEQ ID NO: 57717 - protein, 927 aa, Zea Mays
MLRLRAFRPTSDKVVKIQLHPTHPWLVTADANDRVSVWDWEHRQVIYELKAGGVDERRLVGAKLEKLAEGDDSKGKPTEAIRGGSVKQVSFYDDDVRFWQHWRNCSAAAEAPTAVSQQSSTFIAPAPSTRGRHFVVICCENKVIFLDLVTMRGRDVPKQELDNRSLLCMEFLSRTSSSDAPLVAFGSSDGVIRVLSMLTWKLVRRYTGGHKGAIACLMTYMSAAGEVHLVSGGSDGLLILWSADHIHDSRELVPKISMKAHDGGVVAVELSRVMGSAPQLITIGADKTLAIWDTVTFKEIRRIKPVPKLACHSVASWCHPRAPNLDILTCVKDSHIWAIEHPTYSALTRPLCELSSLVPPQVLALHKKLRVYCMVAHPLQPHLVATGTNIGIILSEFDPRALPAIAPLPTPTGNKEHSAVYIVERELKLLNFQLSNTANPSLGNAGVASDAGRSMNNSIEQLIVKQTKKHISTPAPHDSYSVLSVSSSGKYVAIVWPDIPSFAVYKANDWSVVDSGTGKLFAWDTCRDRYALVESALAPRMPLVVKGGSSKKAKEAAAAAAQAAAAAASAASAATVQVRILLDDGTAHVLQRSIDGRNEPVIGLHGGALLGVTYRTSRRISPLTATAISTVQSMPLSGFGGSGSSFASDDPFSSKEGPPQNFQLYRYLGDVSIPFATGAVWHRRQLFVSTPTTIECVFVDAGVAAIDIETKRIKQEMKAREAQSRAAEEHGDLALITVEAPQVTVSEKVSLRPPMLQVVRLASFQYAPSIPPFIVPKQSKFDGDDSVFQKELDDRRYAEVAVAGGGVSVAVTRFPPEQKRPIGPLVVVGVRDGVLWLVDRYMCAHALSLSHPGIRCRCLAAYGDPVSAVKWATRLGREHHDDLAQFMLGMGYATEALHLPGISKRLEFDLAMQSNDLKRALACLLTM

SEQ ID NO: 57718 - protein, 352 aa, Zea Mays
MGRPLFYGLKMGVLPSGERALKLSMQAFFLSLFMIFFLPWQFRTGGSIGSQILTEISIFIVTTGVSLCLEINHHFVQVVHTRRCSFAPPQSTAAADTNPTEFILESLEQSDPRSLIQYLAYQDLCVASECNLEPWRRAAFFEESGETYKRIVTTCLKPLEEFTSKIAESLEDFSSDKPELMLQQSKLFSAFDDFQICAWCARTLTGLTACSRQEDRYGVAQLTGCNAAVMTTLLSALVAIETCLGKKTNPQPVHSLGPENIRWVNFSTGRKGTGVAIACTQKGGLHKKAYTMADVLRTSVYQIVSAFIDDLRANAKPSSLEKNWISEGRKPVYGSQAVLVQKLILFIEYRAV

SEQ ID NO: 57719 - protein, 777 aa, Zea Mays
MEERIGISRESMPAPGYLLDYISAFTVPTYSYLLQGGNPLDFNFAHLETVGVHSASLTNQVEAQTVISDAKGSFSASPLGDSVESTDKPGGSMCRETNTADNLMLLGGGKNDIAEEKVVKRGTKRLNAAQPKHSLPSDGHKNTKKPAASGLSHLGVKSQAYVRRNRSKPSRESGNVTSIRSSMIPAKVYEPNDEKVTAQKNNADDHGVLSVSSIKQSGPNRDIAPKSIASDDHAAMELDGIQTILESECVVNDKVNKAGNNNKAKQLSSNDTNHDRFLVGCGEIAAEVSSAETPDANLKVVIKPCYSSASTYDEKESCAVHEKADDGHLDECMAHIREGELGHSRTLPCVVEASTSHNDVVGPSCEGTVNIVDEHADGDINTVAGKIDSHEDLDSSRHSNMILKVSGTSIDFSRPASLKESSDLVRPEASNISHVKDEIEVCNSAIVAQKDTECLSSGRSMNIEESPVSVRKNSYVGNSNSAHPISVGIDLSDALSPPKNDESNVESEIKKYENLNKMEKKAYEDSILKNARVIEANIKKAGQRSPCNIALEKRRKSHWDFVLEEMTWMANDFMQERLWKSVAAAQVCHWIASDAHAKFEKASILKKQKAVIKIIAKGIMSFWRSAEALQTADRTAKVMPHNSTMLEEIDPSGVKAGKEQGHNSLEAKESSQQRSQIHDYAVRFLEYNRTADLHVLPEAPPTPDRLNDFGVLKVSDHLSEESLFYTVAAPGAVLAYRDSLESLFMYHKARLRKKRNFISKLEDEGRIVTNHEQMQEV

SEQ ID NO: 57720 - protein, 129 aa, Zea Mays
MEGAGKDGNPLRNYRIGKTLGIGSFGKVKIAEHISTGHKVAIKILNRRKIRGMEMEEKVKREIKILRLFMHPHIIRLYEVIDTPADIYVVMEYVKCGELFDYIVEKGRLQEEEARRFFQQYSLSCPLLI

SEQ ID NO: 57721 - protein, 206 aa, Zea Mays
MHYEFMQDYKVHLKHLDGHIEEVPYFCLPANDLVDVIAPSCYSCFDYTNGLADLVVGYMGVPKYAGVSMTQHPQYITVRNDRGQEMLNLVAGLLESTPTISSGSRQPFVMETVKADDAAKLGKGPSKPAPRFVGDILAFLLNLVGPKGLEFARYSLDYHTIRNYLHVRRAWGKQRAEQHIPGYAKKIVEAYDKDGRIEAMVTQSGD

SEQ ID NO: 57722 - protein, 309 aa, Zea Mays
MSWLFHSIVPARIWLRMLLNKRILLCYLNYKESLWYPKVVLGHHLDLRLVRNQWLLLDPGADCLMSEANEDKTSGDFKEMGSRLAGEVIAFLKKKMDKLSRYGGCKELKLSFVGHSIGNIIIRSALAEPALQPYLKNLYTYMSISGPHLGYWYSSNSLFNSGLWLLKKLKNAQCIHQLTFSDDQDPHNTYFYKLCKLKTLENFKNIILLSSPQDGYVPYHSARMELCPAASSDTSKKGQVFTEMLNNCLDQIRAPSSDTRTFMRCDVNFDQSNHGRSLNTMIGRAAHIEFLETDIYAKFIMWSFPDLFR

SEQ ID NO: 57723 - protein, 240 aa, Zea Mays
MLGHGLVTDPSRTLRCPVNSRVSSAPLGLVSSLNFNRGCKGKNKIFNVDRHTKYSTSFCYAPRNARITPLATASFGDMADSSTPIFPRIHVKDPYQRLGISREASEEEIRAARNYLISKYAGHKPSVDAIESAHDRIIMQSFFDRKKPKMNLKKKFRELSQSRAVKAIQGRFQTPRSKVIWQTAIAFVLLGVLTLAFPTEEGPTLQVAISCAANIYFIYQRVKSGWRAFFYGGSPLSLIA

SEQ ID NO: 57724 - protein, 475 aa, Zea Mays
MGPSSLPPPLRSSHLTPAPRRLDPTRSVRVPASRWSAVSSREHGEIRAGSGARRGGTEAGAGQVRAGPPAGAGHLRQGLLREGPERRRRHGPQLQRSHQGDRQGAAAAHGGDGGAAAPGDLHHADGAAPQRGGHPGGARQPLPRLRRHGVRARRGALRQGGPGPPRRGPRAPLLPAAGRRRRLLPPPRRRAPGPQAREPAAGRGGAAQGHRLRAGRAARAAAPRRPAPHAVRHPRVRRARGAQEARLRRRPRRPLVLRRRALRPPLRLPPVPARQLRQVVPEDLQGRLPGAALGLRRRAPPHRAPARRRPRQARLHRRDHVHAVVQEGLRAARPFAPGDAQETAAGRRRCPLRQRRRRQQQQQPLWRHLPSVVQRVPAHLVHVLRVRPVGAVRERAEDRDRVHGPRAGGHRGGEAGVRGARPRIRGHQGERLEGEDGGQGRGHERTARGHRRGARGGRGRDRGRVRARRRGRAGL

SEQ ID NO: 57725 - protein, 150 aa, Zea Mays
MKVEGLTIYHVKSHLQKYRFAKYLPETKEDMKSSSEDKISKSEMPGSNAGRKKILRSLQVAEALRMQMEVQKQLHEQLEVQRQLQVRIEEHAKYLHKILEQQKARNSLSATTSSIETELSESTKEEKPETQADTSSAQLPNKKNSDTDME

SEQ ID NO: 57726 - protein, 361 aa, Zea Mays
MHNRIEEMYHHQQQLQSHSHFLSSRQTFPPERHMLLQGGSIPAEPGLVLSTDAKPRLKWTPELHERFVEAVNQLGGPDKATPKTIMRLMGVPGLTLYHLKSHLQKYRLSKNIHAQANGVNAKNVIGCTMAMDKPLEGNGSPASHLNLGTQTNKSVHIGEALQMQIEVQRRLHEQLEVQRHLQLRIEAQGKYLQSVLEKAQETLSKQNAGSVGVETAKMQLSELVSKVSTECLQHAFTGFEEIDGSQILQGHTIQLGDGSVDSCLTACDGSQKDQDILSISLSAHRGKEIGGMTFDIQEKERGREDLFLDKLSMTPPGQLDRRERGSFSMTRKAAKLDLNINDTTDGPQNCKKIDLNGFNWT

SEQ ID NO: 57727 - protein, 363 aa, Zea Mays
MSNIRRMIGVCPQFDILWDALTAKEHMELFASIKGLHPAAITSVAEESLAKVKLSQVTNARAGSYSGGMKRRLSVAIALIGDPKLVFLDEPTTGMDPITRRHVWDIIEEAKKGRAIVLTTHSMEEADILGDRIAIMAKGKLRCIGTSIRLKSKFGTGYIANVNFSGNGHMQSPNINSNTEAPVNPNIEAVKWFFKERLDVNPKEESRTFLTFVIPHHKEPLLTRFFGELQDREGEFGISDIQLGLTTLEEVFLNIAKQAELETSTAEGTLVTLNLSSGTTIQIPKGARFVGIPGTETEEHPRGIMVEVYWDQDENGSLCISGHSDEMPVPVHAELRRPPSLSRRASMDRGRPVGYMIDLNQVP

SEQ ID NO: 57728 - protein, 1256 aa, Zea Mays
MANLGGGAEAHARFKQYEYRANSSLVLTTDSRPRDTHEPTGEPETLWGRIDPRSFGDRAVQNRPPELEEKLSKSRTKKSKRDAAAALDSADLPRRDAKRRRRAASAQEVSVLSLTDDAVYKPQTKETRAAYEALLSLIQQQLGGQPLDVLAGAADEVLATLKNDKVKNPDKKKDIEQLLNPISSQLFDQLVSIGKLITDFHDAAAGDASGAPSADAVDTTLDDDVGVAVEFEEDEDEESDFDQVQDELDEDEEDDMAELNGPGGMQMGGELDDDDMQNANQGLTVNVQDIDAYWLQRKISQAYGDGDIDAQQSQKLAEDILKIIAEGDDRDVENRLVMLLDYEKFDLIKLLLRNRLKIVWCTRLARAEDQEQRKNIEEEMASDPSLAPILEQLHATRASAKERQKNLEKSIRDEAKRLLNNDAAAAGADGARDHRAAEWDMESGWLKGQRQLLDLESLSFHQGGLFMANKKCELPTGSFRTPHKGYEEVHVPALKAKPYETGEKIVKISDMPEWARSAFDGMTQLNRVQSRVYDTALFKPDNILLCAPTGAGKTNVAVLTILQQIGLHMQDGEFDNTKYKIVYVAPMKALVAEVVGNLSKRLAGYNVTVRELSGDQNLTKQQIDETQIIVTTPEKWDIVTRKSGDRTYTQMVKLLIIDEIHLLHDNRGPVLESIVARTVRQIETTKENIRLVGLSATLPNYEDVALFLRVRKESLFYFDNSYRPCPLAQQYIGITVRKPLQRMQLMNEICYEKVMAAAGKHQVLIFVHSRKETAKTAKAIRDTALANDTVSRFLKNESASQEILGTHAELVKNNDLKDLLPYGFAIHHAGMARVDRELVEELFADKHIQVLVSTATLAWGVNLPAHTVIIKGTQIYNPEKGAWTELSPLDVMQMLGRAGRPQYDTHGEGIILTGHSELQFYLSLMNQQLPIESQFISKLADQLNAEIVLGTIQNAREACSWLGYTYLYIRMLRNPTLYGLPADILESDKTLDERRADLIHSAANLLDRNNLIKYDRKTGYFQVTDLGRIASYYYISHGTISTYNEYLKPTMGDIELCRLFSLSEEFKYVGVRLDEKMELAKLLDRVPIPVKESLEEPSAKINVLLQAYISRLKLEGLSLSSDMVYIRQSAGRLLRALFEIVLKRGWAQLAEKALNLCKMVDKQMWSVQTPLRQFTGIPKEILMKLEKKELAWERYYDLSSQEIGELIRYPKMGRPLHKCIHQLPKLNLSAHVQPITRTVLGFELTITPDFQWDDKR

SEQ ID NO: 57729 - protein, 126 aa, Zea Mays
MAAASYDRLAVAASAVVVAAVALAVAGLPAAGALGVNWGTMATHQLPPATVVRMLEDNGIRKVKLFDADAGPMDALAGTSVEVMVAIPNNMLDMMTDYGTARDWVRQNVSRYNFDGGVNINRTNVC

SEQ ID NO: 57730 - protein, 229 aa, Zea Mays
MGSVDAAIAVPVPAAEEKAVEEKAVVFRSKLPDIEIDSSMALHTYCFGKMGEVAERACLVDGLTGASYTYAEVESLSRRAASGLRAMGVGKGDVVMSLLRNCPEFAFTFLGAARLGAATTTANPFYTPHEVHRQAEAAGARLIVTEACAVEKVREFAAERGIPVVTVDGRFDGCVEFAELIAAEELEADADIHPDDVVALPYSSGTTGLPKGVMLTHRSLITSVAQQVT

SEQ ID NO: 57731 - protein, 65 aa, Zea Mays
MGHSNVWNSHPKNYGPGSRVCRVCANPHGLIRKYGLMCCRQCFRSNAKDIGFIKVCNISFKLLCE

SEQ ID NO: 57732 - protein, 551 aa, Zea Mays
MSLSPLDSSSPPAAAAAAATEVPLAPGFRFHPTDEELVSYYLRRRVLGRRLRVDAIAEIDLYRLEPWDLPSLSRIRSRDAQWYFFARLDRKVAGAGAGGRGGPGNRTNRATPRGYWKTTGKDREVHHRGKPVGMKKTLVFHAGRAPKGERTNWVMHEYRLLDADGPQDLHVVCRIFQKHGSGPQNGAQYGAPYMEEEWEEDDDAIENGSTHDASGQIAATTCAVDEESNEDDENAYCETNRPARVEPSHLPSVHEMLNPPEMAPLQGNDTNGVAYSRQQQADGFPAPRQVDESMVFYDAPSDYNLVDGKDDFVYLNDILNEPLGNESLFDGDDMMAYFDATENDFKYDILGSGQGLDYPLADMPLNFAQKSDKEDKFTFEGISEVPEANPQYGASSSGSHEDLYTDTEFLGVPTDDTADKTYGNRLASMLGSIPAPPAMASEFPPSTGKSAGMLSAVSSSSIRFTAGIIQLDGLTFSSGSGQWPLQKNGDLSLLVSFAVEGDVASKLPVGLGRATRISTVPMVLRSGFYLFFMSAMILLFSYKVGSCIYSR

SEQ ID NO: 57733 - protein, 228 aa, Zea Mays
MAGGGGAGAGSSSGGGGGGGREGDWDCGSCGNRNYAFRSLCNRCKQPRLLVDPNTPRDSKWLPRAGDWICTGCSNNNYASRKNCKKCGLPKEEAAMPALQMAGMTMPTYATYIARLQSLAASASAYKMNFGMAANSPLQQQLLANANWPYGMAGRYGMQSSGWPFGNGNPNQFLGVPKDWRNGDWLCSCGFHNYSSRTQCKECGAPVPSGIPSTTMKATSDASSMCML

SEQ ID NO: 57734 - protein, 103 aa, Zea Mays
MYYRDVSRCFSFLFLFFRVIHSLFPCARFFICAGNRQLCFSREMKCTHTYGFLHILFEKKDGPIESPTTTGSVSLTSKCLIFRLSNKSHFAIVGFEFNQSYLF

SEQ ID NO: 57735 - protein, 210 aa, Zea Mays
MELCEGGELLDRILSRGGKYSEDDAKAVLVQILNVVAFCHIQGVVHRDLKPENFLFTSKDENSHLKAIDFGLSDFVKPDERLNDIVGSAYYVAPEVLHRCYSTEADVWSIGVIAYILLCGSRPFWARTESGIFRSVLKADPSYNEAPWPSLTPEAMDFVKRLLCKDPRRRMTAAQALSMLPFILFWWLLLNIALLCVFMFFSRSSVDQKL

SEQ ID NO: 57736 - protein, 671 aa, Zea Mays
MGKRGHRRSASQDDDNVGCVWGLMRMLYFRRDPKLLLDAKQLSGRHAFREVSGRGHSAKRPNDFDGIEEDGNIEDRTLQKPTVKNLMEDELEKLMLLKKFPNDEVQRRKADLGIDVSLDTISEHTNKSTDNSYHQAGISTPSTPSMDYGVLNYTEEYNLESVLVNFLGEIYSCHNECPHSDCKNKNELCPSLKSLIHKKVNELNNLPHNIGRGQSQEGSDAKPSDQNNLYNTMAAQSKQFKDALEILGSNSELFVKLLQKPNQHIADSIQQHENSKVSAGLEPDKIHGQTNFVGGRGSSKQHPLATKEQAKERKYMFFWRKSKSNRRQMLDATDGAQTVSKIVILKPNPERGINQKAATARTLHQQPCTSNAPGCSGRENSKFSIKEVKKRFRFVTGERSERNLSPAEDLQGDPRKIKDSVVAINKYFRHLPEGSLANKSASDIENGIKPFISSKQKNQNGSITEISGHIVAPKGASVFYEEARRHLSEMLKGNDCSINYPEVQISKSLEGILSLPHGNVSTTGSSLRGKDYLDPSPGETDVYDACEVEREECTQERSQSQEDFGSIAHCTCTTVDDQVTVREGYYTNEAQEGPRHAHDEPDTLYIEGLDKFICRENIRNEESSPAEQSRDDIRQVSLNKCIFFFLVINFSKCPMFHKGDTRRNKSGKRAC

SEQ ID NO: 57737 - protein, 439 aa, Zea Mays
MDDGSSNKVVEDVAEEDPGRRGGPWRTDEADANEKAPRPSRRVASLDVFRGLTVALMILVDGAGGEWPVIGHAPWNGCNLADFVMPFFLFIVGMAVPLALKRIPDRGRAVRRVVVRTLKLLFWGILLQGGYSHAPDELAYGVDMRHVRWGGILQRIALAYLVVAVLEMVTKDGAKVHQDQPPGSSGRFSRVFRMYLSQWIVACCILVVYLSLAYGVYVPDWEFRVRNADSPDYGKVLTVRCGTRGALDPPCNAVGYIDRRVLGINHMYQKPAWRRHRACTDDSPHEGPFREDAPAWCVAPFEPEGILSSLSAVLSTVVGVHYGHVLVHMKSHTDRLRQWVTMGVALLVLGIILHFSHAIPLNKQLYTFSYICVTAGAAGVVFSALYFLVDVVSLRYAFAPLRWVGMNAMLVYVMAAEGVFEGFLNGWYYESTNNTLFGA

SEQ ID NO: 57738 - protein, 281 aa, Zea Mays
MEMFGENGRDGVWTVIANVMDPESLHEAFDGCVGVFHTSSHVDPAGISGYTKHMAGLEAKAAELVVEACVRTESVRKCVLTSSLLACVWRQNYPHDRRRFPTTIDENCWSDESLCRDNKLWLSLGKTMAEKAAWRAARGTDLKLVTICPALVTGPGFRRRNPTPSIAYLKGAHAMLVQGLLATANVERVAEAHVRVYEELSGTAGGRYICYDHVVRRGEEFAELQRQLGLRVPATATPDGYGGDDDDGRAPRFQLCNRKLAALMSARRRCTYDAYFPMPQE

SEQ ID NO: 57739 - protein, 73 aa, Zea Mays
MATGSRAPVIKPSDQPNSRAERPSRAGFRKQPRVPSPPLPFLRCGCGALLYSPSSTSFPLPRKYFVPLMDDRA

SEQ ID NO: 57740 - protein, 741 aa, Zea Mays
MSNVVALKLMDGALIGRRYESSAAAVDSTDQLAEKHEYQAEVNRLMDLIVHSLYSNKEVFLRELVSNASDALDKLRYLSVTDPELLKDGPQLDIRIQSDKDNGVITITDSGIGMTKQELIDSLGTIASSGTAKFLKALKESQEAGMDNNLIGQFGVGFYSTFLVSEKVVVSTKSPKSDKQYVWEGQADSGSYTIREEKDPEKLIPRGTRLTLYLKHDDKGFAHPERIQKLLKNYSQFVSFPIYTWQEKGFTKEVEVDEDPAEAKKGDDDIKTEPKKKTKTVVEKYWDWELSNETQPIWLRNPKEVSTEEYNEFYKKTFNEYLNPLASSHFTTEGEVEFRSILYVPATRKDDITDNRKTKNIRLYVKRVFISDDFDGELFPRYLSFVKGVVDSNDLPLNVSREILQESRIVRIMRKRLVRKAFDMVLGISCSENRDDYERFWENYGKILKLGAMEDKENHKRIAPLLRFFSSQSNDELISLDEYVENMKPEQKDIYFIAADSLSSAKNTPFLERLTEKEYEVLLFVDPMDEMAIQNLSSYKDKKFVDISREDLDLGDSNEEREEIKQQFSQTCDWIKNRLGDKVARVDISNRLRSSPCVLVAAKFGWSANMERLMRAQTMGDTTTLDFMRSRKVFEINPEHEIIKALNAACRNNPDDPEALKALDVLFETAMISSGLSPDNPAELSGKIYEMITTAIAGKWSSQSQAQPDNTTLQHAAPGRSDEPLEGEVVEPEPVEADQHK

SEQ ID NO: 57741 - protein, 247 aa, Zea Mays
MDGNARSTAASQKKSIVPDDDLVELLWHNGSVVAQPQGHHRPAPPSDRDCPGTSGLTAEETAAWFPDTLDDSLEKDLYTQLWYSTIADAAPQHEGMFPGPTSQPSPPPPVASSGVESSWAGDICSTFCGSNQVPRTPAGIRGKDAALQPEVPSGAGAHDGTSSSGGSGSNYGGSGLPSDSVHVHKRKGMCRDESDSRSEDAECEEARRPNPGGGMGGNAGLVQLKSIISQRGEEGTGSKKRCVRCKS

SEQ ID NO: 57742 - protein, 262 aa, Zea Mays
MPDPTTKPPSPRPRRRRRLCGLCLGTALLALLVAALVHVVAPLPRAASASARFSVIIDGGSTGTRAHVFVTGHDGSPDLALSTVMRVSPGLSSFAADPARAGESLKPLIDFARDKIDGAGSAAGEAEVRLMATAGLRLLEERTQEAILASCRDVLRASGFRFEDAWAKVIPGSDEGIYAWVAANYALGRLGGDPNRTVGIIELGGASAQLAFVSDEVLPPKLSYNYTFIETTYTLYTNSFLNFGQNAAQDSFHEMLRSRVQK

SEQ ID NO: 57743 - protein, 343 aa, Zea Mays
MDKTVRLWHMSSTYCLKTFSHTDYVTCIQFNPVDDRYFISGSLDEKVRIWSIPKREIVDWVDLHEMVTAACYTPDGKGALIGSHKGSCHLYDTSDDMLCYKTQIDLQNKRRKSSQKKITGFQFVPGDSSMVIITSADSRIRVLDDFELVHRFKGFRNTSSQISACLAGNGRYIISASEDSRVYIWRNDDGSKPSKKKGIVSVTNTHEHFHCESVTVAVTWPFTSTTMTSLMNPRKQELELGSENGYSPQDLQTKLAKAQEMTDVEYRSTNITSYNSKHNSDRTSPAWPEELVTPPNQSLSATTCHANEGDQALNRSAWGLVIVTAGRGGQIRTFQNFGFPVRV

SEQ ID NO: 57744 - protein, 870 aa, Zea Mays
MSGHDSKYFSTTKKGEIPELKEELNSQYKDKRKDAVKKVIAAMTVGKDVSSLFTDVVNCMQTENLELKKLDSQDPNPLIRALAVRTMGCIRVDKITEYLCDPLQRCLKDDDPYVRKTAAICVAKLYDINAELVEDRGFLEALKDLISDNNPMVVANAVAALAEIQDSSVQPIFEITSHTLSKLLTALNECTEWGQVFILDSLSRYKAADAREAENIVERVTPRLQHANCAVVLSAVKIILLQMELITSTDVVRNLCKKMAPPLVTLLSAEPEIQYVALRNINLIVQKRPTILAHEIKVFFCKYNDPIYVKMEKLEIMIKLASDRNIDQVLLEFKEYATEVDVDFVRKAVRAIGRCAIKLERAAERCISVLLELIKIKVNYVVQEAIIVIKDIFRRYPNTYESIIATLCESLDTLDEPEAKASMIWIIGEYAERIDNADELLESFLETFPEEPALVQLQLLTATVKLFLKKPTEGPQQMIQAVLNNATVETDNPDLRDRAYIYWRLLSTDPEAAKDVVLAEKPVISDDSNQLDSSLLDELLANISTLSSVYHKPPESFVSRVKAAPRADDEEFADTAETGYSESPSQGVDGASPSSSAGTSSNVPVKQLAVASPPAMPDLLGDLMGIDNAIVPVDEPAAPSGPPLPVLLPSTTGQGLQISAQLTRRDGQIYYDISFENGTQGVLDGFMIQFNKNTFGLAAGEALQVTPLQPGQSTRTLLQMTPFQNISPGAPNSLLQVAVKNNQQPVWYFNDKIPLHVFFGEDGKMERAGFLEAWKSLPDDNEFTKEFPGSVISSIDATVERLVASNVFFIAKRKNANMDVLYLSAKMPRGIPFLIEVTAVVGVPGVKCAVKTPNREMVPLFFEAMEALTK

SEQ ID NO: 57745 - protein, 888 aa, Zea Mays
MPFQVMDPRHHLSQFTNTTVAASSFSEEQLRLPTERLVGFWKQESLHHIVGLRSNDVLLHQPLEKVEPTHVDDEPFELTEEIEAQIIGNILPDDDDLLSGVDVGYTAHASNGDDVDDDIFYTGGGMELETVENKKSTEPNSGANDGLGSLNGTMNGQHPYGEHPSRTLFVQNINSNVEDSELKVLFEHYGEISNLYTACKHRGFVMISYYDIRSSWNAMRALQNKPLRHRKLDIHYSIPKDNPSGKDINQGMLVVFNVDPSVTNNDIHKIFSDYGEIKEIRDAPQKGHHKVIEFYDVRAAEGAVRALNRSDLAGKKINLGTVGLSGVRRLTQHMSKESGQEEFGVCKLGSLSTNSPPLPSLAMTSSGRENGSIHGLHSGLLTSMSPFREASFPGLSSTIPQSLSSPIGIASATTHSNQAPLGELSHSLSRMNGHMNYGFQGLGALHPHSLPEVHDGANNGTPYNLNTMVPIGVNSNSRTAEAVDCRHLHKVGSSNLNGHSFDRVGEGAMGFSRSGSGPVHGHQLMWNNSNNLQRHPNSPVLWQNPGSFVNNVPSRSPAQMHGVPRAPSHMIENVLPMHHHHVGSAPAINPSLWDRRHGYAGELTEASSFHLGSVGSLGFPGSPQLHGLELNNIFSHTGGNRMDPTVSSAQISAPSPQQRGPMFHGRNPMVPLPSFDSPGERIRSMRNDSGANQSDNKRQYELDVDRIMRGVDSRTTLMIKNIPNKYTSKMLLAAIDESHKGTYDFIYLPIDFKNKCNVGYAFINMTNAQHIIPFYQTFNGKKWEKFNSEKVASLAYARIQGKTALIAHFQNSSLMNEDKRCRPILFHSDGPNAGDQEPFPMGTNIRARSGRSRTSSGEENHHDIQTVLTNGDTSSNGADTSGPTKDTE

SEQ ID NO: 57746 - protein, 126 aa, Zea Mays
MSDKAAPSVNVLPESARITCREYKKLADDGEPHLLLDVRPAHHFQIASISPSHNIPLSMLEEKLPALEASLKEAGEGSALVVLCRRGNDSQRAVQLLREKGFASAKDIIGGLQAWGRDVDPDFPVY

SEQ ID NO: 57747 - protein, 476 aa, Zea Mays
MISCAFATISHSQALGCFPRVKVLHTSRQYRGQLYIPEVNLLLALVACVVTLASKTTAVIAEAHGICVVLVMLITTLLLTLVMLLVWRVNAACVALFFAVFAAAESVYLSSVLYRFAHGGYIPVAMSAVLVAVMVLWHYVHVKRYKYELERTVSHESVVRDLLPRCRTVPGVGLFYTDLVQGIPPVFPHLVDKIPSIHAVLLFVSVKHLPVPHVDATERFLFRQVASSSESDTAAGPRVFRCVARYGYRDLLEEASDFAGSLVERLQYYIRDVNLYGVEHQQPGAKVSYPSSRCDSMILMARQRSSVMMLRQSSAASYYSSYAAAAETQQLQLARARSTSGAGGILLHSASERAEQLARARSTGIFAEEMLTPAESFSELSRMGSIGGGGMQAVKISLEEMARIEEEQRFIEREMEKGVVYILGESEVVARPHSSLLKKLLVNYAYAFLRNNCRQGEKMLAIPKSQLLKVGMSYEI

SEQ ID NO: 57748 - protein, 614 aa, Zea Mays
MVGGLVLSQAQTHHTAAPRTAAPAPAQALEKRPRDQAQPCGTAAAAVSVRSLDEVRKAHARHIKLGLDRSPRHARPLLAACALSGWPGGMELAASIFESLVEPEAFDYNTLMRGHVGGGREPAAALRMYVDMLEAGVRPDSYTFPFALKACAQLAALQEGRQAHIVKLGFQHDEHVQNSLISFYGKCVEPAMARLAFDRVEAEERTAASWSALLAAYTKAGLWGECLESFGAMVLDGWRPDESSTVSALSACAHLGAFDVGRSLHCALLRNTARLNTIMQTSLVDMYAKCGSIEKAAAVFDAMDDKNAWTYSAMLSGLALHGDGRKALQVFDAMVRERHAPDAATYVGVLNACSRAGLLEDGLRCFDRMRLEHNVAPNAQYYGCMVDLMARAGRLDDARALIGSMSTGPTDTAWRSLLNACRIHGDLDLAERALQELRRLGAANAGDYVIVADMHARAKDWAAAAQLRTEAVDWGLAQSPGVSAVEVRGELHRFVSQDRSHPRTSDIYEMLHQMEWQLRFDGYKPDTSEVALDVGEEEKRRVVAAHSQKLAMAFGLLSTAEGAPVRIVTNLRMSKECHAYSALISEIFGREIVIRDRNRLHRFRRGVCSCRDYW

SEQ ID NO: 57749 - protein, 359 aa, Zea Mays
MEHVLSSRRFPTDPNEYKLYEEIGDGVSATVYRALCVPLDILVAIKVLDLEKCNNDLDGIRREVQTMSLIDHPNLLRAYCSFTNGHQLWVVMPYMAAGSALHIMKTSFPEGFDEPVIATLLREVLKALVYLHSQGHIHRDVKAGNILIDTNGAVKLGDFGVSACMFDTGNRQRARNTFVGTPCWMAPEVMQQLHGYDYKADIWSFGITALELAHGHAPFSKYPPMKVLLMTLQNAPPGLDYERDKRFSKSFKDLVATCLVKDPRKRPSSEKLLKHSFFKHARSAEYLARSILDGLPPLGERFRELKSKEAELLLNNKLGQESKEQLSQKEYIRGISGWNFNLEDLKNAAALTVQMALVI

SEQ ID NO: 57750 - protein, 805 aa, Zea Mays
MLEKVCKDPQMLADVFVNYDCDLEGPNLFERTVSALSRIAQGSQIADTNSIVSSQTVSVKSSSLQCLVIILKSLADWEQLRRDSSKQGSIVESHEEDASRRLTTDEMKNQEDGRNQFERAKAHKSTMEAAISEFNRKPSKGIEYLLSNKLVENKASSVAQFLKSNPSLDKVMIGEYLGQHEEFPLAVMHSYVDSMKFIGLKFDAAIRAFLKGFRLPGEAQKIDRIMEKFAERYCADNPELFKNADTAYVLAYAVIMLNTDAHNPMVWPKMSKSDFVRMNTASDAEECVPNELLEEIYDSIVKEEIKMKDDSHDTSKSTKRPETEERGRLVNILNLALPRLKSASDTKAESEKIIKQTQALFKNQGQKKGVFHVAQQVELVRPMLEAVGWPLLATFSVTMEEGDSKPRVVSCMEGFRAGIHLTRVLGMDTMRYAFLTSLVRFTFLHAPKEMRSKNVEALRTLLGLADTDMDALQDTWNAVLECVSRLEYITSNPSISATVMLGSNQISRDSVVQSLKELAGKPAEQIFVNSVKLPSDSIVEFFTALCGVSAEELKQTPARVFSLQKLVEISYYNMARIRLVWARIWSVLAQHFIAAGSHNEEKVAMYAIDSLRQLGMKYLERAELNNFTFQSDILKPFVILMRNTHNSKIRGLIVDCIVQLIKSKVGSIKSGWRCVFMIFTAAADDEDESIVESAFENVEQVILEHFDQVVGDCFMDCVNCLIGFANNKCTPRISLKAIALLRICEDRLAEGFIPGGAIKPIDVVPEANFDVTEHYWFPMLAGLSDLTLDSRPEACWKGWAFFFWG

SEQ ID NO: 57751 - protein, 200 aa, Zea Mays
MRKGSFQRSNGGAEQNTMDLREKLSRNHKKLPRYDSRGHAAESRASYDMRDEPPELRSRYFSREDVLGSRNSSVVSRVPYSRTADDLLKSNPSRKSYPSWTDDGLRHRSPERILSVRSDVSPPVGYDQIRSMPPLRSAGSSRPQSFITRGAPDTPRSQPYAGKATISVDTVQRTNGITPSSAPLPKVPVMVCICTSSHIP

SEQ ID NO: 57752 - protein, 371 aa, Zea Mays
MRRASPSLSPARGPAVFAAAVVVFLPVLFPGLFSPLGHAFPSVFSEWNAPKPMHPSLLNEALRWTATDGQKKDLWSPLPYQGWKPCLTPSVSHKLPLEPSGYIQVFLDGGLNQQRMGICDAIAVAKILNATLVIPHLEVNPVWKDSSSFEEIFDVDHFINSLKDEVSIIKVLPKEFSWSTREYYGTGIRATRIKTAPLHASANWYLENVSPILQSYGIVAIAPFSHRLAFDDLPVDLQRLRCKVNFQALVFRSHIISLGETLVKRLRSPVRVHSSKSIHQVVGDTNQAEKYAVLHLRFDKDMAAHSACDFGGGRAEQLALAKYRQVIWQGRVLNSQLTDEELRNTGRCPLTPEEIGLLLGKSGSFKSISTR

SEQ ID NO: 57753 - protein, 926 aa, Zea Mays
MGSEKGGAKVIGGGGGGGGIFNLFDWKRKSRKKLFSNSPEASKLVKRSEETLLSVRLHLGDEDEGIGVSSFKGSSDYSCASSVTDEEGREMKAPGVVARLMGLDAMPTLGVPEPYCTPFRDTISFRDSHSLKRSPEYSTNDQFGHVPRRVDGYIRKPLDFRAPKMPSSPIERFQMEALPPRSAKPLPMSHHRLLSPIKNPGFTSARNAVQIMEEAAKILQPRAQTSSREKVCSFSPARIPLRVSEPRENIPFSQRAVPLKPQSSRTAPELPNVRISRAQQMNRSWNSEEDIVIFRPSVDSYEINNPSCSKNNKGKSVSLAVQAKNNVQKREGATGSGRNSRVQKEHDEKRVNQPFRSQSNLQRNKQQKKPSSSGTSSPVLWQNNQKQNSLVTKGKVALNKTVSTQQGRKVMAGDSSSGKIKSGSKNSKVGRKDIVESISGDREGSSSNNKDFPQKKRLIERNSTNEKGTFVPENPVGKLLKQVQPNVVMDEHIKWNKECKDTTDVVSFTFTSPLVKPSAGPSRLAGKWDTRSNLDMDAGCDKDDSDNKAQGLSSVGLNFVNGDALSLLLEKKLKELTSKIDPSITFTRGDTFAPATFTLEEPPTSSCSNWGSESGAFDCSPSELKPSQYDYCPSAQSSTKGQNFRGSKIKVEEQEECSSISNARKEQENEDLSPLSVLEPTTSLSESCWSSECSDSSGGGKVYPSLFDVKNGQGNFLINPASVDIEAKTTDSASSASADTSDVSDITQCSKRSRHTELEYIADVLSSVNLTTDELGSLFVNQDRSALHPLLFEKLENTHAYTQGKEPFCHRGYRRLLFDCVNECLETRRTTYFRAGYAAWSKGAATLGMEEAQVCSEVTSWKRMGDWTEDELVDKDMSGGLGTWVDFRVEEFEAGEEVENHVLSSLLDEVVGDMVARRRRPGVFVI

SEQ ID NO: 57754 - protein, 514 aa, Zea Mays
MRRWWPAALLGCAVAVSVLVAAVECAVTYDKKAVLIDGQRRILFSGSIHYPRSTPDMWEGLIQKAKDGGLDVIQTYVFWNGHEPTPGNYYFEERYDLVRFIKTVQKAGLFVHLRIGPYICGEWNFGGFPVWLKYVPGISFRTDNEPFKTAMQGFTEKIVGMMKSENLFASQGGPIILSQIENEYGPEGREFGAAGQAYINWAAKMAVGLGTGVPWVMCKEEDAPDPVINACNGFYCDAFSPNKPYKPTMWTEAWSGWFTEFGGTIRQRPVEDLAFAVARFVQKGGSFINYYMYHGGTNFGRTAGGPFITTSYDYDAPIDEYGLVREPKHSHLKELHRAVKLCEQALVSVDPAITTLGTMQEARVFQSPSGCAAFLANYNSNSYAKVVFNNEQYSLPPWSISILPDCKNVVFNSATVGVQTSQMQMWGDGASSMTWERYDEEVDSLAAAPLLTTTGLLEQLNVTRDSSDYLWYITRWRQASVSQCAVCWSCLACLCQWTTSRFCLWYQGRSKNQI

SEQ ID NO: 57755 - protein, 430 aa, Zea Mays
MVLKNMPPATTTVPGTATGALPVEEQKEVRDPEADPHMPNLPEVTEKDQQEEATATKPEAKITCDENGVDEGFPYARPPVCELAGDIRVSPKEKTMYFVNPSGAGPFDSNGEKKIRPFARKDDFLLPGVVEVTIKSVSSAAAAPRCTRRHDVPVVVFSVAGYTDNFFHDNTDVLIPLFLTTAHLQGEVQLLVTNYKPWWVRKFTPLLRKLSNYDVIDFGKDDEVHCFRAGHLGMYRDRDLIISPHPTRNPRNYSMVDYNRFLRRAFNLPRDAPAVLGEETSAKPQMLIIERKGTRKLLNLPEVSALCEALGFAVTVAEADADVRVFAEKVNAADVLVQIVPWGKMDWMATNFYGQPARDMRLRYVEYYVSEEETTLKDKYPRDHYVFKDPMHIHAQGWPAIAEIIMKQDVMVNMTRFKPFLLQALNELQD

SEQ ID NO: 57756 - protein, 531 aa, Zea Mays
MKTSGASTCLFVDLMPSAHALKQPVKTLLVLLLSSYEFMYSKVDIKDLPNDINIFGELALLSVSLLPILCKLAENRECSDLAVASMDLILKGSVPSNLWMPILQKHFHLQTILHKCQNGDLLSTQVILNFLLTLGRTKDGAKVLQSANIFAFLKLLLSQLSLDDSCLRNSLSAQVKDVNLWGLGLGIVASLNHCLDDDISHNNVVSNTISFLSGHVPLVSSYLSTQSATTHQSKKRALSQKSQTSLSALSLTENILILLCILAKYHFPRDTGKKEVDSELREIIIHLLAFISKGSVKTGNASKWNSSFFCPAVIKEEVALNEKPPLICSKYGWFRFAASCTLSTAGVSVSPSAALSVVRRDKTSGDSDSIRQTRFTEILAVQIYRIAFLIMKFLCSQAKEAVKRAEELEFLDLAHFPELPMPDILHGLQDQVVCIVTEIFEANGSSTLNPETEKVCQLLLVTLETSLYMELCVSQSCGIRPVLGRLEDFCKGIKAMLQAIEKHSSFEPFVRSLTEITSLLYPGLLHNNLLM

SEQ ID NO: 57757 - protein, 59 aa, Zea Mays
MGLKACHDRNITHRDIKPENMIICFEDIETGKCLREVPSEAKQNKLNMRLIDFGSAIDD

SEQ ID NO: 57758 - protein, 78 aa, Zea Mays
MPANTDCSEDLFQSHEAEMLENAEFWSKSNYSPVEHLECHMEVNMELNEGEQMIDHTEASRYELFSNDLQSKSRTSNL

SEQ ID NO: 57759 - protein, 71 aa, Zea Mays
MVMHDAFGVRLHAGKQAEVLNQIVYELPEEHPLSETKPLREILGHTVPQVVAGCILGVLMAAVMHLSLGSS

SEQ ID NO: 57760 - protein, 79 aa, Zea Mays
MFSLICIEYQIPYLPRFLAITAAMPPRLLSIVFIIPLRAYIICVMVTSLMFLFFFFISFLIFCTMGVQISTIKLHFISP

SEQ ID NO: 57761 - protein, 239 aa, Zea Mays
MQALIKADFWLLFFSLLLGSGSGLTVIDNLGQMSQSLGYEETHIFVSMISIWNFLGRIGGGYFSEIIVKDYAYPRAIALAIAQVLMAIGHFNFAMAWPGTMYIGTLLVGVGYGAHWAIVPAAASELFGVKNFGALYNFLTVANPAGSLVFSGVIASGIYDSEAAKQAQQRHNSTSLAMSGRVAGMVSGAAPSLKCEGAVCFFLSSLIMSGFCIIAFGLSLILVYRTKIVYTSLYGKPRT

SEQ ID NO: 57762 - protein, 716 aa, Zea Mays
MAAAACAGAEAGRGCGGKDALFVELWKACAGPLSCVPPLGEKVYYLPQGHIEQVEASTNQLAEQQGTPLYNLPWKIPCKLMNIELKVEPDTDEVYAQLTLLPDKKQDENTSTTVEEEEVVVPPALPATNEGPHIHSFCKTLTASDTSTHGGFSVLRRHADECLPPLDMSQHPPNQELVAKDLHGAEWRFRHIFRGQPRRHLLQSGWSVFVSAKRLVAGDAFIFLRGENGELRVGVRRALRHQTTIPSSVISSHNMHLGVLATAWHAVNTDSMFTVYYKPRTSPAEFVVSRDRYYESLKRNYSIGMRFKMRFEGEEAAEQRFTGTIVGIGASDPSGWADSKWRSLKVRWDEPSSISRPERVSPWQIEPSVSPCHVNPLPVRFKRSRSSVNALPSDVSTVTREVTSKVMADSQQNSLTRALHNQGRTQLTVRYHDNSDVKTTQDLTVWSSGTEQQRNNIAAQTKLCLEGWTPTRSPEGYNQIFSAFKPLKDIHNPLGPFPSQISGTHSNSWDTADARYPVQQANYSMLPGTWSLRPHNSGFRMNQQNYLVMPEGANFTGKSAFTSLQDHGTDKCSTGCFGHIESSSHTDHASSSLIRPQPLVLGNGVQKSKGTSFKLFGIPLGSPEKSEPLVSPPSVAYDGKLQTSPSEKGNQLDVVEVDNCSHPSKTVKPLDGPQSDSITENNQPSPEATLNIQNKVQSSSTRSCKKVHHMLHLFPC

SEQ ID NO: 57763 - protein, 254 aa, Zea Mays
MGDKNIIKFDGDHNSPRPQSYYDSVSIFFYKSLHPPLLPAARSKLHMGAFKVGNITNENFFFEIINGLRPANTAGCSSSTDAPNIPHDGTSVIELLSDSMNQLSIKNENHLLQDFLLDENHSLPEIDSDSVGSRLQDKRSRRNEESFSFTSSNRESWGRCSSLGAASDESFSGDNNDKQNLTVKALATPVRQNQRQSQRKPIEKAKQKKIQALWKKIKREKVEMGDSLSSRLKMCLGQSPQHKRNRSSGTITTS

SEQ ID NO: 57764 - protein, 191 aa, Zea Mays
MPLYDILNEFQKGSSHMAAVVKAKPKTEPPPDRTEPNREAVGPAQLTVTLLSNAEESADNVVVDIERPHNRQINGIPASNAVPRSSEDIEDGEVVGIITLEDVFEELLQEEIVDETDEYVDVHKRIRVAAAAAASSVARAPSVRRLTGQKAAGAQNRQGQQPPGILKKPTEGDSNSSKQVNLVEPLLEKRR

SEQ ID NO: 57765 - protein, 88 aa, Zea Mays
MMKTKTSRSLQKSGRGNQVQGEGPNWVLVAGGFLLSALSVKIGCKLKQWFNGKQQNNTSKAKRRPEACELHSDLYRFSDQTGCCYSVS

SEQ ID NO: 57766 - protein, 109 aa, Zea Mays
MRPWGTRGHSRPTTRVLCTAAGSVQREGKELLVQHLLVGEKDVRLLVDLEKNIIAGDLSDLAVEHSLCPSKANGGMLGGFEGDRWYNINFVAMMMCFHMLACVLFSLIY

SEQ ID NO: 57767 - protein, 74 aa, Zea Mays
MLTEIITAGNVSECTDWYRAIGIRFFFFFLVLGAVLYTSTQMMWGLAEFSCGWILGLCYIGRRVIILSNAIVYS

SEQ ID NO: 57768 - protein, 3815 aa, Zea Mays
MASSQHVEMEAAKLLHKLIQESKDEPAKLATKLYVICQHMKLSGKEQSLPYQVISRAMETVVNQHGIDMDALRSSRIPFAGGPQAGDSSGVMSKDKEVIGNQSPMVGSDASQSSGQAGLWQLPSGRVPTGPNRGDFSAADIHQGSMSQKSGRSSGIESPASLQMEDTRSMNSHDSLKSDEKTSKKTSSKRKRMDSKGAGDLRSEDNSKSDVISTGQNTRKGKQVGKAGRQGQPSMGIEHEQQPHKLQGGTGQVPPIHGGAPFLRTRSEGPSGRTMDKTKPSNPFSMGQIPNFPEGLASTGAPIELQKSIQGGASLFNPGFGWNQNPQVQTLKNSQGSIHNLVRSGVTVEGKVNVGAQGAFNSASAPQMEFPTVPPYNPSSFGASSQFLDKGKELVSSIISTEPHSSKVASQPGISHGSPMQERQGMIRVPQRGEASFQERRPSSLPSRSTGPSPMSHISSNTPFKEQQLKQLRAQCLVFLAFRNNLQPRKVHLEIALGRGPPAESDSAGQRGSEGRVSDALGKENGSSRENSGVFCRQTDISRLPATSAGSIAEDDSLSKDPENATKKIKLAEQEKSLMEVENVQQASVMQGTSSEMRSQETASQNPYRPQQSYYQGDTRRIASDIHRTDAEILNQNLSWGGQGSTALGGTRQLLNQETKESLAPSKSHHMPVDGYNSNIQGIDRTPEIAGAGNDVENCSHVADIVPEQAADEGDEDLSEHEDLLSSPKHTMTEKWILDYQKRIYNEKQKRTLEQHKVHSRMSATYEELKESVNSSEDLSAKTKSVIELKKLQLLPLQRRVRSEFLLDFFKPNTSDLERIKSLKKHRHGRRVKQLEKIEQKMKEERQKRIRERQKEFFADIEAYREKLEDNFKVKRERLKGFNRYIKEFHKRKERIHREKLDRIQREKINLLKNNDVEGYLRMVKDAKSDRVKQLLRETEKYLQKLGNKLQSAKSTDGRSSFVTDKSDTANDIEDESYQPQHYLESNEKYYQLAHSVKETVNDQPSYLQGGKLREYQMNGLRWLVSLYNNNLNGILADEMGLGKTVQVISLICYLMETKNDRGPFLVVVPSSVLPGWESELSFWAPSINKIAYAGPPEERRRMFKEMIVHQKFNVLLTTYEYLMNKHDRPKLSKIQWHYIIIDEGHRIKNASCKLNADLKLYRSSHRILLTGTPLQNNLEELWALLNFLLPNIFNSSEDFSQWFNKPFESNGDNSPDEALLSEEENLLIINRLHQVLRPFVLRRLKHKVENELPEKIERLVRCEASAYQKLLMTRVEENLGGIGAVKVRSVHNSVMELRNICNHPYLSQLHVEEIEGYLPKHYLPSILRLCGKLEMLDRLLPKLKATGHRVLLFSTMTRLLDVMEDYLVWKKYKYLRLDGHTSGHERGALIDKFNDPNSQAFIFLLSIRAGGVGVNLQAADTVIIFDTDWNPQVDLQAQARAHRIGQKKEVLVLRLETVRTVEEQVRASAEHKLGVANQSITAGFFDNNTSAEDRREYLESLLRESKKEEAAPVLDDDALNDILARSEAEIDIFESIDKQRREEEMAAWQKVVQDGSTSGLDPGVLPSRLVTDDDLKPFCHAMKLYEPSNVKTVNVNVRKKGELGGLDTQHYGRGKRAREVRSYEDQWTEEEFEKLCQADSPESSQPGGMSKDLDILNKGIKTEILVESSKEPEQTKMEASPTVGDSPPAKRRRGRPKRSDVFVSPTAGLTDAVKQDTGTTQDGSSATPASTIHSDAPATAINSAVSDVNIHSIPPADTKKQEFSTDTKVSSSVSVLEGSVPNEIGTPLQSVHNVAVSAPPHQSARGRKCQAGETPRRRGRKPKSLSSSGVDDVSLNPTFSTVSGVADTSYVPSYSQVSSQGTAVALAGIQKDFVTVKLDTLLPDSGKGAPPVNEGDKGATVTTPVAKDICAGTVTTSDNTVTLTPNTLKENIGLVQVASAPSMLVASEELMKIAHVAVADKPVEKQTASRRRRKKTSSSEDTGVSTRQRSAMKRSYYNTSVAVDDIGSAVIPNEKSGITKERDVSSIQSTSNELPNINSPLYEKSGYDSQPSTPIAVPINEDTLPSGFDTCTNSMITLATSANSAEDDKPVDLHLNAPVSVDSQNQEQHMTGKDHLAVCSRIFATQLQTDTANPAIDHKPGTAQFEPSASLPQNSGKDATALPSEVDSAAPNRASSRRRKGSTREPRTRSNSASAASERRARLTGLKQAEDIKKLEMSATPTTTVCISSVEQQGAASLSAKITNASVSEGQKNPGNYMPSAISIPVGSHVLGLGATSIEETTATMITQAPAVSKSERRKLPGGSQQGIQFESSASKTKMVSAVEPAPANVECMQGTEVNSSEQTIVSATEPAPANDEHMQEQPTNIVSSVESEPSNDEEHTKHEVFLATTGDNMLASSAGTEILRDTVEHAACQPEAVCTDGTARQSELSQLDRKAFHDASYKYTHGSTKDDGILPSEGTSVDVTGSKQDDVNIVGTQTDDVSRGSSHFPVILQSTESDRPPGQVKNLESRMEQVKTEEALVNSSGGNQTHSLGDEPSHNTSLARNSPSEHSNERCSDQVIGENFKSKENIVEVHSGINTDGPDEALNALHTQSKEASMTDIGVPTDGDRCEGKGTSVEVCADMNTDGPVATQDASSTKSDKESCMMECGVSTDGCPTVCKTHNDLQGHVSCEETFVRTGGDDTTHITNANYGSNNESEATIASPVETTQKLMEGSTVIVSENSDLNKQCHTLHTRNDPPANTLLIVESNKVTCDAEIVCASRLESSGIEAETVGIQESALTDFEGTKGTGDLGDRTNSQLHDDVHGTSCSTIALVSEKEPSEDLTTGSHSEASNLLAAVEQTQETTVENQEIIDAVVFMDACKAEPVGDFTIAKGAEQTVEMVHYVDKQSAVLDYVETQTKRTSVCGSTLNESPQAAGLEEDCSVLKHGDPTSSELLTVAPNPIGETSVIQVEPEARNSDGYCTTEAGSALSETVMGLEPNKETAVPMQENIGEANDNFNNCEAHNNSEIHAFEVSMETQSSEVKEVSSIQSGAANLSTQTTALPDVTGQTSMASTGELVSTNEHIHMQGTEINSEQQTKMVSPAESAPANDEHVQDIVILSSEQQTKMVLAAEIDALCVQETAIIDLGGARGTVDLNDIRTQVPALPGRDVLDVEAHILEQKKTSSPGDEIKGSEQAKIESIAEIETVGVKENVIADHKETGNNSGVSIHAPLLVESGQKASPGVELRGIEVDAHVLEQAKMVSALEPDSTPEVCADKLEPSGADDVGMIVVQEAASVDDHNRAQGGEAHCSEQIKMASIAQAVSSMALVGYSSSEDSMVDAAARVTDADFVDSKAAGVYRQETMPTQTTSTLPENMDSPATAATMVESKFAASSEHVAGPEPIDETSVMQVELATSTGDGCAADGHNLVSSETVVEVKLAQEIVVPSPGGSIEANNTSTISEVYKDTQSRASGEACNDGQSHGDENMKLGEAYTELQLAPSSGEEAMTCMCSELPSQEVEAPSSDPLENNEETKNEAAAQGSVNEDSAPRAENAKIDEADTEQELLPSGEATVDESSELLSQDEKVARKDAKMEESAAAAAAQRQLTTEVAHASENAKLGEDGTELQLPPPSMVDISREQLSQEVEVASSGPSGTDETAEMKRLNTEHSPGDETSKLVGTDLGLQLSPSGDAMVDISNKPPSCQDVKEAPSSDILGNDENSDTEKTPAALHGRLNTELAPSGRNTEFSEADTGKQETPVSAEAMVESSSEPRSHEAKEAPTPDLSGDDEKAKSARAAVVAELFGDATEGGSDQPLPSPREQGKEAEADGGF

SEQ ID NO: 57769 - protein, 401 aa, Zea Mays
MEERPSSEAGAGNSRAEDDFRSCCGDEEEWEDTEESFTAGVTKGELDEASVRLFFKGVSSPEAEGKKLSGIGVVMERSPGVPVLKVQKKLDFYVEELVADHLALMDGLLVALQNGIRKIFAFTNSEKLYFQIAEAEILEDQLLVALGHRILELVDKLEDFDLILLPSFELERPLQLAKEAIGIRYLSPYEVGTCPICREEKLGSQMIKAGCSHTYCYNCLTGYVEEKLLTSKLPIRCPQLRCKYIISASECNSFLPVSSYDSLERAFAEAGTSGMERFYCPFPNCSVLLDLSQHFSRASSSSQSDLSCVECPECHRDICINCGVPWHIMMGCDEYQSLPAEERDAGDLSLHRLAQNNRWRRCQRCRRMIELTQGCFHMTCCSPDCAVGLPYSGPSKQHLLK

SEQ ID NO: 57770 - protein, 239 aa, Zea Mays
MVSSALRRCLPCHASLCHAFPPHPLLAAAGVFRRSFQSGDGETMDEFEERLFGGKDTDKGSLYEKLDRAENTGRRYNMGSGMGGLTGLSDKSRSGLSKGGFTWLSDSSSSGFPGFPASGDRSNSGWMDGYDSFNDGLNDTIANAARNIQMEEDEDVDGDWEDDFEFRPDVRFRQGSTYSVRDLDLRKPAAAKNPPRRQFETTTAEVLKKADFRIPLQLSYGSWNYHQEKPDPYKCKSSA

SEQ ID NO: 57771 - protein, 115 aa, Zea Mays
MQTPRSTVVSWRCSIDRAGWMRHAAVVLGGPSPSPGRGIVSRLARTTSNQRTATTHRRTFKEKKIIWVCGLVLKIYKKNLWNSPLDSPQCQMKKFEGKFTGCQMKLNAIQPCSLQ

SEQ ID NO: 57772 - protein, 1192 aa, Zea Mays
MAPKKKQPDSKQRQKPKSSSSSSAATAAPRLQISSENERRLRRLLLNSSAPSPSPANVSEVRGESREQKARRLRGVYDKLALEGFSSAQIEQALSAIPDSATFESALDWLCFNLPGDELPLKFSSAGDSTMSSLTGAEGSVKVLSTAKDNWVPQSREPEEVKVSTEGLEVRIGGRRDENVSLDDGRLSQAAWIRQYMEQQEEEEDANSNDSSTWEDHCLQSFEVVEAKPSRRKSKAAKKNSKHGNLKEQISYPTNSVSSNSETANVEGVQNDLEASEERSESLGNIDEGSDLKKEIPKDIDKTCAKEVDEEVIELDNMFFEDSSAWEAVAPEILKQQQIEKLSHDGYGHLIGNIDDIWKKGDSGKMPKAVLQKFCQKLGWEAPKYNKISERDGKFVYSVNVLRGATGRGKSRKAGGLTIIQLPKLHEEYGSVQEAQSRVAAFALYQFFADLPLRQLLTEPYSSLILRWQEGELSSTSRVLVTEDRRRSGFVDMLLNIDADTIPSSEIENSDTDVISMDSGNTEGSKSVNEKRQTTMTSCMAERAESAILKKQLEDKRKLPNYLKMLEARASLPIARQRQHFLQLLKENDVVVVSGETGCGKTTQVPQFILDDMIESELGGSCNIVCTQPRRIAAISVAERVSDERCEPSPGSNDSLVGYQVRLDSARNERTKLLFCTTGILLRKLSGNRDLSDVTHVVVDEVHERTILSDFLLIVLKNLVEKRSNQQGRKLKVILMSATVDSSLFARYFGECPVISVEGRTHPVSTHFLEDVYEKMEYCLALDSPASGAYFAQHGEKWKHASSSVNNRRGKKNLVLSSWGDESTLSEGYVNPHYISDYYRSYNERTNQNLKRLNEDVIDFDLLEDLICYIDENCPQGAILVFLPGVAEIDLLIDRLSALVRFGGASSDWILPLHSLLGPSDQRKVFQSPPDNFRKVIIATDIAETSITIDDVVYVVDTGKHKENRYNPHKKMSSIVEDWISRANAKQRRGRAGRVKPGLCFCLYTRHRFENVMRPFQVPEMLRMPLTELCLQIKSLHLDDIKSFLLKAVEPPNEEAISSAVDLLYKVGAFEGHEELSPLGYHLAKLPVDVLIGKMMLYGAIFGCLSPILSVAAFLSYKSPFLSPKDEKQNVEKAKATLLNENLDGSSSVTDNKQSDHLLMVIAYDKWSRILLQGHASSVWYLVSRHWTYRSS

SEQ ID NO: 57773 - protein, 157 aa, Zea Mays
MARKLRELLQKSGNRVCADCGAPDPKWASANIGVFICLKCSGVHRSLGTHVSKVLSVTLDQWTDDEINSMIEVGGNSYANAIYEAFLPEGYQKPHPDSSQEERADFIRSKYELQEFLKPSLRLVSSNKGSLEATSSRKHMDNSVSLSASFSSEVSFT

SEQ ID NO: 57774 - protein, 643 aa, Zea Mays
MAPPRPPTGPILFLPLVFLFLFTTAAASAAAPEDEKFTEELLLRPLPDRKALAHFHFRSSAPPAASVGRHHHLFPKAISQLVKKYHISELELSFTQGRWNYEQWGGFDPMSTNNAKPPGVELWAVFDLPLSEIDATWKNLTHTLSGLFCASINFLESSTAFSAPRWGFKLNEGNLRYGALPREAVCTENLTPWLKLLPCRDKAGIASLLYRPSIYKGYYHSQKLKLRSSQSLGIILDQTLTVVLQPNNVHGEQLHSNHGQLQPNWSMRHLFNRKLSGKCLVSKSSRVFIEVDKGIADEVNISGSVHSWSNEFFVLSNSPDKLIKGQNHLEMQSSFLYVYDASNYSEEQPLDLGITWKLPLIWTCTPSPFHASRFLMGSGNERGSIALSFMSTNLHKKISGSANDCSIKAVIFQVVPWYVKVYYHSLEIFIDGSRKTVSEVVDKIHVIPSEDKLLPGTLEMLLRFPCSMQSGTLTLDFDKGFLHIDEYPPDANQGFDIPSALVSFPEFSSARSYPEIDPVLGSPLLENFQEDSVVKSYTEVLLVPLTTPDFSMPYNVITFTCTVLALYFGSLLNALRRRIGEEERELKKRATRHGLISRLLAKLRGQKVDPSESGSSFESTGSKKLLFKVKFSFEEPTTFFTLI

SEQ ID NO: 57775 - protein, 358 aa, Zea Mays
MLSHPKRRSQLPEPIEKEKGVSLWSMIKDNVGKDLTRVCLPVYFNEPLSSLQKCFEELEYSYLLDRAYECGLRVSHHPMVMACHCEGKGWKFWGDSNLKSKFWGQSIRLDPNGVLTLEFDDGETFQWSKVTTTINNLILGRVYCHHHGTMNISGNRRYSCKLTFKEQSFLDRNPRQVQGVVNDADGSKVATLMGKWDESMHYIINNDASKTNSHGSHEGSGATLLWEKNEPPVNPTRYNLSTFAITLNELTPELKEKLPPTDSRLRPDQRHLENGEYEKANAEKLRLETRQRMARKMQESGWKPRWFQRDSEDGTYRYVGGYWEAREQRTWVGCNDIFGNLSSSPKLPPSGLNTSSSI

SEQ ID NO: 57776 - protein, 115 aa, Zea Mays
MSSPPTTHRAQGHHSPDTEAVAKQTSKSRQVWNGPTDPTQSPNRIPLVSHHATVYPPPHWQRRWRRRRRGPCSAASRNWPAAASAPTTACSHPPFHPLPPPRGFRSRRRSPRRCS

SEQ ID NO: 57777 - protein, 394 aa, Zea Mays
MAKLMAMLDEVDRKYKHYYHQMQSVVSSFDMVAGAGAAKPYTAVALQTISRHFRCLKDAINDQISVIRKKLGEEESSSGREGRLTRLRYIDQQLRQQRAFQQYGMIPQNAWRPQRGLPENSVTILRAWLFEHFLHPYPKDSEKLMLARQTGLTRSQISNWFINARVRLWKPMIEDMYKEETGDIEQDSNSSSDNAPAGSKAKTASSRDKEDHLARSCCTPRAVCESSSQLSEPPGGASMRAMSVAAAAAGAPMGLFQNEPGHDHDHDDSFMSLMLKEQRPNDGGGGLLLHHSAVAQHQDENARFMAYHLAELGRYGNGNVSLTLGLQRSSSSLSVPHAQQSFPGVGIGVGDDDIYNATAAPLGVSVASPDYESMSQMDQRQRFEQSPLLHDFVA

SEQ ID NO: 57778 - protein, 1125 aa, Zea Mays
MVFKGRFFSSRHKSSESSSSPDGSNSPRTPTSAPASASAASPASSSSSRSDKKKTKSETPKKRDKLFGSAATAPKSAASSASSSPAGDGRKGSVPHHRDAGVGGGGGASAAALSPILASSLGLNRIKTRSGPLPQEGQRMAAVIGSSNLSRGQGQAEPSAASAGVGGRKGVTSWADTSSSSRGKGKTTELPMRSTAGTSLGPVGKSAVKAKPSAQRNHSGDLRTPTHIPEAACAYDPCETPKESESPRFKAIMQATSAPRKRLPADIKSFSHELNSKGVRPFPFLKPRGIYNLKEVIKVIHVRFEKAKEEVNSDLAVFAGDLVSVMEKYADSHPEWKDALEDLLILARTCCVMTPGEFWLQCEGIVQDLDDHRQELSMGVLKKLYTRMLFILTRCTRLLQFHKESGFAEDEVVIDQRDKIIQSADRQILTQSGVGDTTSRASKSEARKSYSQEQHNLKWKRSQEIKPVNLLPPLDTDVKKVADSPTKERISSWKPFPSPVTKVPKESTPTKLESPNKKTDAHSTVSSHVELSSPVESLPQQQLPVKHQHKTSWGHWSDQPNISEEGSIMCRICEEYVPTQYVEDHSRVCAIADRCDKKGVSVDERLIRVAEMLEKMVESYSPKDLPNAAVSPDVAKVSSSSINEESDGPSPKLSDWSRRGSADMLDYLQETDNTISLDDIKNLPSMTCKTRFGPKSDHGMATSSAGSMTPRSPLTPRSNHIDMLLAGKNAINESGDLPQIVELADIARCIANTPLDEESALSQMVTCIEDLQEIVNRRKHEALTVQTFGTRIEKLHREKYLQLCDSVDMDKVDSASTIMDEEDDVVRSLRASPVHPVKDRTSIDDFEIMKPISRGAFGRVFLAKKRTTGDLFAIKVLRKADMIRKNAVESILAERDILITVRNPFVVRFFYSFTSRENLYLVMEYLNGGDLYSLLRNLGCLDEDVARVYLAEVVLALEYLHSMHIVHRDLKPDNLLIAHDGHIKLTDFGLSKVGLINSTDLSGPAVSGASLYGDDEPQMNELEQMDHRARRQNRSAVGTPDYLAPEILLGTGHGCSADWWSVGVILFELIVGIPPFNAEHPEAIFENIMNRKIPWPHVPEEMSFDAQDLIDRIRMQSAALDCGRG

SEQ ID NO: 57779 - protein, 123 aa, Zea Mays
MKFEAEVKKSSNLQKSLKELQDKCLEFSNRCVQRLRQIFNSVGASSEKFIPSIEDLPGTFKHIKGEVDAPDEVIAGHGDFCALLASRGTAVAFMKSGCTHGKIVNRPNFSLSLADLIYIPSLA

SEQ ID NO: 57780 - protein, 751 aa, Zea Mays
MDGSELENPTSRSSSQKSSRRSSSRRSQKSAGQHSLTGAQEKRSKSKSSRQKHLVIDDKEAKKGKKHDHKIDVADERSNFLGYEVYAGKLILQKKNRSASDNNQLPSNGKADAIDARLTSKALIWGSSVLLLEDVVSVSYNSGVKHFTLHAYSTKKSLFKKTCRVQKDFCFIASTLDEAILWVTCFAEQSIYVNLLPRLGASSINQDSENPLSESLFDQPPIKCKSPQRVLVILNPRSGHGRSSKVFHEKAEPIFKLAGFQMEVVKTTHAGHAKSLVSTFDFSACPDGIVCVGGDGIVNEVLNGLLIRSDRAEAVSIPVGIIPAGSDNSLVWTVLGVRDPISASLLIVKGGFTALDILAVEWVQSGQIHFGSTVSYYGFVSDVLELSEKYQKKFGPLRYFVAGILKFLCLPSYFYELEYLPSPKEMAVNGKGTDQDKAHLSNVYTDVMHSRSKKEGIPRASSLSSIDSIMTPSRMSLGDVDTSGSTVASTEPSDYVRGLDPKAKRLSLGRSNIVSEPEEVLHPQPHHGSFWPRTRSKARADRNSVGITSTNDTRSSWAAPSMHDKEDISSTISDPGPIWDCEPKWDTGPKWDSELTWEPDHPIELPGPQEDMGIGAPMELVPNLDEKWVVRKGHFLGVLVCNHSCMTVQSLSSQVVAPKAIHDDNSLDLLLVGGKGRWKLLRFFILLQFGRHLSLPYVEYVKVKSVKLKPGANTHNGCGIDGELCRVKGQVLCSLLPEQCRLIGRRCRQSI

SEQ ID NO: 57781 - protein, 245 aa, Zea Mays
MLCYKTQIDLQNKRRKSSQKKITGFQFVPGDSSMVIITSADSRIRVLDGFELAHRFKGFRNTSSQISACLAGNGRYIISASEDSHVYIWRNNDGPKPSRKKGIVSVTDSHEYFHCQSVTVAVTWPFASTAMTCLMNPGKQEELERGSEPQDLQTKLAKAQEMPDVEYRSTNITSNNSNHNNGDRTSPTWPEKLNTPPNQSLRATTCHANEGDQALNRSAWGLVIVTAGRGGQIRTFQNFGFPVRV

SEQ ID NO: 57782 - protein, 803 aa, Zea Mays
MLTSAVADFFMQLGTVYEVCKLGTHSPQNNGGQMELSPGKYLPSGLVLVDCPEQLKKVRCGHLGPISSTSDCLQAFSKHWSVKSFVTSISRILKDIKLTSNISTNQKESSSGPCTVIYVVCPFPEPCAILQTLVECSVALGYVISSPERERKLLYSQVAKALNSSASVDEASASNVVMLSGFSIPKLVLQIVTIETVLRMDKPNKELAVLKDIAFTVYNKARRIPRAVSTSDMFQSPTYLGRSQSTMMHVTSPAPTLWKECLVPRMSGPTLSRETDFDASMRSATWDNSWQPARSGGLLDPSKLPDLCAQDDRKYAFEPLFILADPGSADLNALMEPSKSGADASGSRVYGSISGSNSDSGVSPLLDVSESDSAASLHCCYGWTEDWRWLVCIWTDARGELLDSLIFPFGGISSRQDTKVLQSLFIQILQQGCQIMSSSPEASNMRPRDVIITRIGGFLELEIQEWQKAIYSYGGNEVKKWPVQLRRSIPEGIPPSSNGPTLQQQQQQDMALIQDRNMPSSPNPLYSPHPKSSFMKGALGQSGNKKQILVEQSGMDTSRGSLHLVRSISLVAVSQDHSLHLTCQADLLSRPASAGEGSQGSSGPWSYLEGFTPVKSIGSMSASHSYLLVPSPSMRYLSPATLQLPTCLTSESPPLAHLLHSKGTAIPLAMGYVVSKAVPPVRRDSAQLTKDEQPSVLSVSIIDHYGGSSGTVQEKMSRGGGGGSKQARNLSQETTGRECEMEMHSVLEAVAAELHSLSWLTVSPVYTERRTALPFHCDMVLRMRRLLHYADKYLSEPKGETTH

SEQ ID NO: 57783 - protein, 298 aa, Zea Mays
MWRWQQQAAAAWRVVVVVGRVVVQGRHAAEAAFGVLRVPHGGGGQRLHEGHHHLPLPGLRRGVRQAGEPPAPPVHQARMSELGTDDTSRNIIEIIFQSSWLKKQSPVCKVDRILKVNNTPRTLARFEEYRDAVKARAGAEQLAVAAANSNRHPRCTADGNELLRFHCATLACSLGLNGATHLCDAAGTCAACGIIRDGFSSGGVLTMATSGRAHDAAEAGAGLDEETTPRAMLVCRVIAGRVKRPKEAVPEEEAVADAAEESEYDSVAGSAGVYSNLEELLVFNPRAILPCFVVVYKA

SEQ ID NO: 57784 - protein, 348 aa, Zea Mays
MSMLLGRFVSRIIRKQWSQQSPRSLVAYVLPMTPCLLYGLYYGGFLIQFLIEKMGMMGSLPKPYGYFVPDVIVGAVVGLVVGWCFGPLSPVASRWLSKTSIIHGFLQITVVALAISSQLFPYSTGAPKRVVLQHTFVTDANNIVDSSYGFSVVDSNSLEFLFNNAPEAAKWLKDNSELSFEEKYRSDRSSWLALYPVPFLFSGSLKFQAQTEEIKKYYQHFPQLAVQEIWDNNGQRRVHLKLALGSLSEIWTSVLNITGPLSNWSFADNMLPAPQTVSGGPPSYICRLSGKSDVDWSFWLEANSSESLRVDVAVLDQYLVDSTKKLKSLFPSWADLTAFTTFFSTYHL

SEQ ID NO: 57785 - protein, 809 aa, Zea Mays
MLFGWHLFLMLHLRSPELFKDLVSCIHGLVAVLAILLIHVPAKFRSFTIEGSSHLIKQTEKGVDLIASLCHNYHTSEERLKEMLHKSHNAIEDIFHMKALSASECKPENLDKIDTDDLMYFKGLIDMECFQSNLEKMEKLCNSNSCKGELDFKSILINNDYIPYDENSTGDSTNLGHSKCAFETLASPTKTIKNMLTVPSSPLSPATGGSVKIVQMTPVTSAMTTAKWLREVISSLPDKPSSKLQQFLSSCDRDLTNAVTERVSIVLEAIFPTKSSANRGVSLGLNCANAFDIPWAEARKVEASKLYYRVLEAICRAELQNSNVNNLTPLLSNERFHRCLIACSADLVLATHKTVIMMFPAVLESTGLTAFDLSKIIENFVRHEETLPRELKRHLNSLEEQLLESMAWEKGSSLYNSLIVARPSVASEINRLGLLAEPMPSLDDLVSRQNVRIEGLPATPSKKRAAGPDDNADPRSPKRSCNESRNTVVERNLQTPPPKQSHMVSTSLKAKCHPLQSTFASPTVCNPVGGNEKCADVTIHIFFSKILKLAAIRIRNLCERVQCVEQTERVYNVFKQILEQQTTLFFNRHIDQLILCCLYGVAKVCQLELTFREILNNYKREAQCKPEVFSSIYIGSTNRNGVLVSRHVGIITFYNEVFVPAAKPFLVSLISSGTHPEDKKNASGQIPGSPKPSPFPNLPDMSPKKVSASHNVYVSPLRQTKLDLLLSPSSRSFYACIGEGTHAYQSPSKDLAAINSRLNYNGRKVNSRLNFDMVSDSVVAGSLGQINGGSTSDPAAAFSPLSKKRETDT

SEQ ID NO: 57786 - protein, 124 aa, Zea Mays
MLGCKRCATPVDMQAKVYLYMHDLWKPHLSAVKWILWYLPVSPDGLLQQSSTVADSSLFTFADGITESIPRSYIEFAERLLLPQFKDLQDEEVKEYHRRDGFEVGNADKIFESTSKDQLTRRSA

SEQ ID NO: 57787 - protein, 75 aa, Zea Mays
MCRPSQTPHLTMSSARIGPARPGLGAKRRGGAPLPTHGISKITLKVVVFHLRPEAPTYPTPLKSFHKVGLESSST

SEQ ID NO: 57788 - protein, 278 aa, Zea Mays
MRAIASPLAPPRPEPPIAVRSRSNALKRATLPPVPLTAARLRLRRQPEPGPSPPTRLSHPMPPPTATMSPAAGGSFPELTCPADFATVAAPGGRFSVVGFGSLLSERSARSTFPELEGFRVAVLRGFRRVFAHAAPIFFERGIAIEATKEFSSLSVEPCDSELIVVTVFEIKEEEVPAFIEREHEFRFLAVVPEGLDGVPFTNRAVVCARYSNEEYFQERCRGSKEIYNKYYGRYNIDKIWRDDILPCRLYLRHCCTYRRPRISKDADPSRQAAAPHH

SEQ ID NO: 57789 - protein, 1092 aa, Zea Mays
MAAPPRRSLLVLLSGLLVFASLVALTTAIYEDQVGLADWHQKYIGKVKQAVYHSQKSGRRRVVVLTEENVISSLDLRSGDIFWRHVIDKNDPLDQLGLSLGKYVLTLSSGGTILRAWNLPDGLMIWETNLRTSTASNSQLHVMSNNKAARDNLVLVSAGRWIYAVSSIDGAISWEKEFSLDDLEIKRILQSPENDVVYALGLAGSSKLALYHLSAKTGEILKDIQESFPGGLCGKTVLGSDNVFVALDKARSSLLLIEFKGERISYNKVLVSDLVQDLSGSFELQSLSSDIISLQTSSSISLLKLKGTDGLEVLQRFDQPAAVSDSLPITEKEKAFAVVQHLGSEIEFIVKFTSDLSSEIIREKVNIDQNKGNVERVFLNSYIRTDKSHGFRALVVMEDHSLLLIQQGEVVWSRDDGLASIVDVTTSELPVEKDGVSVAGVEHNLFEWLKGHMLKLKGTLMLANADEVAAIQALRLKSSEKNKMTRDHNGFRKLLVVLTKAGKVMTLHTGDGRVIWSKLLPSLRASRFGGVPSALRIYQWQVPHHSVMRENPSVLVVGRTGAESSAPGVFSILDSYSGEELNSMKLDHSVFQIIPLTLKDSSEQRLYLILDSNSNAHLYPKSADTLNIFLHEMSNLYFYSVDIQANVIKGYSLQKSCDLNFGDDYCFSTKELWSIIFPSDSERIVISETRNMNEVVHTQAKTIGDHDVMYKYLSKNLVFVATLSPKAAGDIGSVLPEEASLVAYLIDAVTGRILHRVTHHGAQGPVHAVLSENWVVYHYFNLRAHRFEMAVIEIYDQSRADNKDVMKLILGKHNLSAPITSYARPEVAVKSQSYFFTHSVKAMAVTQTAKGITSKQLLIGTIGDQVLALDKRYLDPRRSVNPTQQEKEEGIIPLTDSLPIIPQSFVTHSHQVEALRGIVSIPAKLESTTLVFTYGVDLFYTQLAPSRTYDSLTDEFSYALLLITIAVLVAAIIVTWIWSEKKELGDKWRSLNFNEVLVCHCGVQSRLACLRFFHVMPTLKVEVGVQVAHARVPPRSGFFGRGCEMSAMIARGERRASASSASCGAGALPTGGLPFAAVLLGAPAKVGDVRPT

SEQ ID NO: 57790 - protein, 64 aa, Zea Mays
MALSLAIVPTKVLLLLVFLEVSTNNSPLRRASTERCTRRLREWWFSIPAAPVVVEKEKEDKKTR

SEQ ID NO: 57791 - protein, 631 aa, Zea Mays
MCFIRACLPARLAPRIRYVLSDLPSDIVVHVDDARFYLHKFPLLSKSGLLQRLIVEASQNGSDEVAIQDVPGGAKTFEICAKFCYGMVVTLNAYNVVAARCAAEYLGMTEDVEKSNLVFKIEVFLSSGIFRSWKDSIIALQTTDALLPWSEELKLVGRCVDSVAAKATVSASNVVWSYTYNRKSASSDEIVEARRSSQAVPKDWWVEDLCELDVDLYRRVMVAVKSRGRIPSDAIGEALKAYAARWLPECCDALVDDAYSGAYKHLLETIVWLLPSDKGSSGISCRFFLKLLKFTVLVGAGELLKEELMDRTVLQLHKASVSDLLIPSRPPAQTVYDVQLVQTLIGRYMSHAGVSQGGIFLNDLDQEMFETNVDGESLLALCKLVDRYLAEVASDPNLSVSSFVDLATSMPETARPTHDGLYTAIDVYLKLHPGLPKMEKRKISNLMDVRKLSKGACIHAAQNDRLPLRVVVQVLFFEQLRAAGAAAAAGTPSASVARCIARLAEQEEEEERWNDGRALPEPPTPGALKRQLGSLKLQGDHHQGAGDDGRRLVARSNSVANQSSRMSLSSRSRRIFDRLWVGGAKLPGEAAAAGKGSSDTSGSSQSPRSSAKPPESKSSSSSSRNRRYSVS

SEQ ID NO: 57792 - protein, 548 aa, Zea Mays
MFFNIVSREKYLSRFLQCRGPFARRRHPLVNAAVVSEIQRCINNSIEFRGDLLNFRKDGSPLMNRLHLTPIYGDDETITHYMGIQFFTDANVDLGPLPCPMTKEPVRSTRFAPDNSFRPISAGPEHSNFCREYSSLFQLTDEVLCQSILSRLTPRDIASVSSVCRCLYHLTRNEDLWRMVCQNAWGSETTRALETVPAARRLGWGRLARELTTLEAVAWRKLTVGGAVEPSRCNFSACAVGNRVVLFGGEGVNMQPMNDTFVLDLNASNPEWRHINVSAAPPGRWGHTLSCLNGSWLVVFGGCGRQGLLNDVFMLDLDAKQPTWREIPGVAPPVPRSWHSSCTLDGTKLVVSGGCADSGVLLSDTYLLDVTMDRPVWREVPASWKPPSRLGHSMSVYDGRKILMFGGLAKSGPLRLRSSDVYTMDLSEEEPCWRCLTGSGMPGAGNPAGAGPPPRLDHVGVSLPGGRILIFGGSVAGLHSASQLYLLDPTEEKPTWRILSVPGHPPRFAWGHSTCVVGGTKAIVLGGQTGEEWMLTEIHELSLANNSV

SEQ ID NO: 57793 - protein, 269 aa, Zea Mays
MALAAIYNLFIINKSGGLIYYKDYGSAGRMDTNDSLRLASLWHSMHAISQQLSPTTGCTGIDLLQAHNFDLHCFQSLTGTKFFVVCETGAPNMEMLLKAIYELYTDFVLKNPFYEMEMPIRCELFDHNLAQVIQKDRVALLDADLREDPRRQEHHPGGGELGHGRERQGQDPGQGGHPSGPAAPHLRRQAAGRRPHLGRLQHPEGVHAPPRPPPPWWWRRPVIWSADRLLPWGLASTCRLPACQCVLVSSFITSCLAQAVSCISISLLS

SEQ ID NO: 57794 - protein, 194 aa, Zea Mays
MADMELVLPEKKNPSLTPMDWVQFIVSVVIGLVTLISSLEMPKADFWVVIAILSALAGYCAKIYFSFQQNMATYQNLITQSMYDKQLDSGKGTLLHLCDDVIQQEVKEVIIAYYILMENGKATSDDLDLQCEELIQEEFGLQCNFEVMDAVQKLERLGVITRDSIGRICCVPLKRANEIIGATTEELVMKARQS

SEQ ID NO: 57795 - protein, 74 aa, Zea Mays
MYYRQCGVKMLNRRWDRRALVASALPIFVIYFYQILNNAKLLAVGIILVPMMPSKLANSGHLQTSQPRVCFFCK

SEQ ID NO: 57796 - protein, 277 aa, Zea Mays
MAAGSIVVDFPSMGAALCFPSLDSLLRDSASGFLAAVSNAPAPGAADLTNFHRVFSRVLSAYPDPPLEAVWFFSALSFHDRPDDLRSLLQLLSAFTASSPGTAKPLALLAPVVSELFHADKPRRETETLVEAVLSYISICSNRSAPSSTVGATADAVSLLPAFGELVKVWSVRYSRERCPFQVLFPLAGDEARRELMKEGCSVDYLAGVVLAEAFLLRLCLKVQNATGVPRSELQKELKIWAVSSIPVFQNHRFFGVLLNMLLNSPLPVYSLVVCVS

SEQ ID NO: 57797 - protein, 146 aa, Zea Mays
MAASAPIHLLLSPSRSTWPPQDPSLRPIPPLHAWPARQRHLRAARCALSPPTPSLDLPLLPFQPAEVLIPSESKTLHLYEARYIALLEEALYKREKSFVHFVLDPVVDSSTKASFAVRYGCLVHIESCRFKSWRLERCYQLEECAV

SEQ ID NO: 57798 - protein, 226 aa, Zea Mays
MAVGVGWKKRGEQGKRVESGGNEVLDEACTRGGAMCALGRELLASQRVLHGEHGLRLLQTRGSARQLFQRLQGPFEEGTLKTHFEKIILLGQKLHQTRRKDEIHELRQKNPLHTSHGFALSQACPGNLSGVILTPLDLCDGPSNSDALSIGYTGSNTSGLGLPNNNCSVGATLPTSNMNLRLPGSPGMVLGSNSPLPLNAPSRGMVCLDQPRYRVTSNQEFIITRW

SEQ ID NO: 57799 - protein, 214 aa, Zea Mays
MIYLDKKVILPILSCLSAVTCAITLSMCFQTGKWEWKFENKPVNIYYEEHEQEVAENMKNILMIPTISDVSTVEEWRVVAKDIVGRKGELGYRVTIVDWPGLGYSDRPSLNYNADVMESFLVELMNSPNSPVANADDELIIVGGGHAATIAVRAAGKDLIKPSAVAAVAPTWAGPLPIVFGRGSDMETRYIWCSILIGMKGIQNSVGCEAIKTI

SEQ ID NO: 57800 - protein, 397 aa, Zea Mays
MHLVEDKSNKVLALFSNFEAAHETMEEAELMLSALLKANEGLKLERDNCRQAVELLLSEKSSLIGELKELEASSSCTSQKYDKLHQQINECVTEMTKLAATIRKSFQQIQSVSTVELFALCSEIITFGQDLKRYIIDSRSYIANMVSLIEEKSRSIEQFHHLSTHACGSARQQVESNSCQWGSRKLSQSDYSTDYASLRREFNRKSNVVEGLSFDLKLLQESASNAKDMKDKADEISIALSNTQRELDMKTSTMETMLKKQKVLEEELAENGARLINLRLELEQSQSLSSALLKENKGLRVMLEDETMKNSETKVLLEEKVKVIEGLESQILFLNRCEVGQLMSDIEELNNSIKIMSSDRDNLQAEIFKLRDKLEMALALAEENEAAAIEVRQVSIL

SEQ ID NO: 57801 - protein, 305 aa, Zea Mays
MDSMEQPEPKTAGHYYALQVGSVFLTGYYNVLTNQPHLANQFYTDNSSVVRLDCETGRWSFGETVEVINDMMMSMKLSKVEVKTANFLESWAGAITLLVTGLVKLKHYPVRKRFAQNIVLAPKEDGYFIFSDIFKLICDEYDDQYPFADYNCADNMPQVEASYTMAEIGSDYLDGEPEAQETVDPAENHVQHQDYLEYKAGNVIDDETHLEEHIPPFPSSTDVKRDSPLALPHPPSPTLEEPVEEAPKTYASVLRTKSKATLAITESQQAQQLAQQPQSASVHEKSNLDNHRDVSVPEDEGFWKN

SEQ ID NO: 57802 - protein, 418 aa, Zea Mays
MNFLTGAIPSSGSLVNFNETSFVGNLGLCGKQINLVCKDALQSSSNGLQSPSPDDMINKRNGKNSTRLVISAVATVGALLLVALMCFWGCFLYKNFGKKDMRGFRVELCGGSSVVMFHGDLPYSSKDILKKLETIDEENIIGAGGFGTVYKLAMDDGNVFALKRIVKTNEGLDRFFDRELEILGSVKHRYLVNLRGYCNSPSSKLLIYDYLQGGSLDEVLHEKSEQLDWDARINIILGAAKGLSYLHHDCSPRIIHRDIKSSNILLDGSFEARVSDFGLAKLLEDEESHITTIVAGTFGYLAPEYMQFGRATEKTDVYSFGVLVLEILSGKRPTDASFIEKGLNIVGWLNFLASENREREIVDLNCEGVQTETLDALLSLAKQCVSSSPEERPTMHRVVHMLESDVITPCPSDFYDSE

SEQ ID NO: 57803 - protein, 137 aa, Zea Mays
MDRRILRTSSCNGSGKNPSPSSPAAVSRPASSGGIGSKDDAAAGERKALLPRQPPGGMARKGRKGSNRRVQWKDKHGSKLTDVREFQPRYVENKHPHSFYVCFHNVLVQLLMIDATDSKNLLIPNYTIELYEFCNFC

SEQ ID NO: 57804 - protein, 501 aa, Zea Mays
MKSFFEKSSQDLSPAKGKKAKGTKSYLPRKNTAAYAILITLHRAKTSGKDFMMKQELIDAAEASGLSRDAIGPNKSKAKQSYGKDWYTGWSCMKTLLSNRLVTKWSNPAKYMLTQEGEGTARDCLSRSGLDDSARPLTIIGAHNTSAMDPSVARHSPELVSDSSLTKKKSNCYRQVQATNYEGIICCDSDSEEPCGKDIPLKGMEPITSCGPPDISRPFQGTPKLQSSTMGSAKLAMPPRRANENFLEAYEVILILDDREKFGSRSRKVADNICSLSHFAVDVRQLPVGDGIWIARHKEDHTEYVLDFIVERKEVMDLDGSIEDNRYRDQKLRMKKCGLRKLIYLVEGDLNRAPKRVKTACFTTEILDGFDVQRTTGFADTQKRYVDLTRSVIAYYDASFSIVGKASPVCPTYDDFKRKCYDLKKKTVSDIFGCQLMQVPQVTEEAAQAVVELYPTPLLLAKAYSILGGDTSAQEKMLKKKNEMVNAGASRNIFHLIWGDG

SEQ ID NO: 57805 - protein, 341 aa, Zea Mays
MNYNAAAMDESTEFLHLILSGNDEGYNSTTELQVWDVVDFYVSENFSALQFDSLMGFTNEVSTSYNDCMNLVDMVERPVARLSLDDTPKPSNSDDAVPADNVTMDPDETSLYLQTKPTDSETESSSAAGDVETEYLDLKLLSRCMPDLMDVDSPNCLSKTPVKKKHVTLVLDLDETLVHSTLDHDNADFTLEVFFNMKNHTVYVRKRPYLKMFLEKVAQMFEVVIFTASQRVYAEQLIDKLDPDGKYISRRIYRESCVFSDGCYTKDLTILGIDLAKVAIVDNTPQVFQLQVDNGIPIKSWFDDPSDQELIELLPFLESLVDSEDVRPIISKTFHDKLEQN

SEQ ID NO: 57806 - protein, 116 aa, Zea Mays
MMNRIREGEIKGGEEIGRRGPGREMRGWSGGLPGGGGGRWQFVRVGGAQPLTVAAARLGLLCSCAGAGVTKYSEGHTGQGVAEPCSTKDDGCTLCTDEGATHEDRTTAAGKSCLWT

SEQ ID NO: 57807 - protein, 1248 aa, Zea Mays
MYAVGKVGSLISRSVYTVSGPFHPFGGAVDIVVVQQQDGSFKSSPWYVRFGKFQGVLKSREKVVDISVNGVDAGFHMYLDSNGEAYFLRNADPNGEEGEFIVSPASSGDEREVPIQEAQLRKSKSTSCDSSTMEADVGEGKILARTTSRRITILERMFGRKSIKNNAHAVDRVSSLERAEVAAELLDTKWSTNLPRSSKPNGSNDEPSKSNNDQMETSKPVFSEHSLDHGKEMDSNDNAHCNSCSPRGGRNSSADETDPCLQATIVKKEVVEIHARESSDFTDNITSITHQQGSESSSNDLGTDKLMQQSVDTQDELLHDVEDVTERETHAEEVISNDIFEIHVVETDITSGKSEVDSEIVTVDPEPDRANQNFTDTNYQNYGTTDISSERHEVSLIPSAQDAVQEKIVILSSSEAVEGSLDAVPEKVVILSSSETVDSSYAVSCILDDTVHDASDISQADGVQHEEHSSISDGSTEKLISEESSLVCYGVPSNKKDLVNIAVQESKAFILKNPASQILEESGPGLDVSTDSVSLSHADSAPDLACQHVSPNVEDTTSYEPGIGPEDVTKNSVVENGACSGELVVSVIQTSAGDGLTKCIAHPAVFSNKIEVEGSPTSAGFSSLISVEVQNTKLEDDTNKSSSVIGDEAGFVPEATAELDEEAEPVISLSEYTEEIQFQFSDAENFADRKATDDMVANKTTGEVEHDESDCDTEKQEEGDVGLVNDLENCSASLKPVSSPVSIPAIDFQSGNSNREAKSLPNLRSHIHDLERSYSFQLSRSLQSTAENNGIDLVKSMNYAFLEQKSEAIGDFSEENNSPPEVTNTVALDGNHADDLKVDAFIPFAELSLCRHLLSEGMGEDAACSAFDSEKVTLEEFRNMKQSLMRNNKLVVRIAGRYFPWDAAAPIVLGMISFSEEQVFEPKGMINVERVEQSAAPGGSWSIWPFSFRRTRTITAIQPVCESIVETSVSTPKELTHFKELDRERNKSRVKRIERKVRSLTPTSDELASLDLREGRNVVTFTFSTAIVGKQQVDCHIYLWRWNTRIVISDVDGTITKSDVLGQFMPLVGVDWSQNGVAHLFSAIKENGYQLLFLSARAISQAHITRQFLFNLKQDGKALPDGPVVISPDGLFPSLYREVIRRAPHEFKISCLEAIKDLFPHDSNPFYAGFGNRDTDELSYLKVGIPMGKIFIINPKGEVAVNRRVDTKSYTSLHALVHGMFPPILSSSEQEDYNAWNYWKMPLPDVDL

SEQ ID NO: 57808 - protein, 453 aa, Zea Mays
MCGHCKNLAPEYENAAKELSKHDPPIVLAKVDANEEKNRPLATKYEIQGFPTLKIFRNQGKNIQEYKGPREADGIVDYLKKQVGPASKEIKSAEGVAAHFDDKKIYIVGIFKEFSGTEFTNFMELAEKLSSDYDFGHTLHANHLPRGDASVEGPLIRLLKPFDDLVVDSKDFDVAALEKFIDASSTPRVVTFDNNPDNHPYLMKFFQSSAPKAMLFLNFSTGPLDSFKSVYYAAAEEFKDKEIKFLIGDIEASQGAFQYFGLKEDQTPLILIQDGDSKKFLKDHIEADQIVSWLKEYFDGKLTPFKKSEPIPEVNNEPVKVVVADNIHDVVFKSGKNVLIEFYAPWCGHCKKLAPILEEAATTLLSDEEVVIAKMDATANDVPSEFEVQGYPTMYFVTPSGKVTSYDSGRTADDIVDFINKSKETASAVQATATASGKAADAAEKTEPVKDEL

SEQ ID NO: 57809 - protein, 145 aa, Zea Mays
MVEASPESGAAATGGASSTAAVRKGKSCKGCLYYSSVLKSRGYNPICVGIPRSIPQVPNYVVDEPKEEATAQGHDLRRFSYWWTADWSRESHRQLNKLQHMLQRMQLPSALTNKDNRDLRTCRGRNSWTGLRGALDWSLQVLRRI

SEQ ID NO: 57810 - protein, 222 aa, Zea Mays
MASNMQASGLPQPPRPPMMGSSAQPQNLGPPMPMQFRPVIPSQPPPQFVPPAAQQFRSVGEPMPGANVGMPGQMPHFPQPGQHMPHSNQVPPVSQGVPMVYQPARPMSSAPMQPQQQAAYAGGHLLTMGAPMQPLTYTYQPTSIPPVVQPWSTGPGQSVTHVPPLVQSGHQQVSAPTTLPPVNLSEPSSSDWQEHTAAEGKKYYYNKKTRQSSWEKPVELMT

SEQ ID NO: 57811 - protein, 66 aa, Zea Mays
MHIENAIEKPVFRKTEKPNKLCLETTLGTINVTKITLLMFCRFRLHVERFAKIVKMFIISVIKFIL

SEQ ID NO: 57812 - protein, 906 aa, Zea Mays
MAEQEGRDAEAGGDAAAAAVASHTSSMQRVKVYRLADGGKWDDQGTGYVSIDYIEGSKELGLTVLDEDDNDTLLMHNITSDDIYRKQEETIISWRDREAATDLALSFQEAAGCSYIWEHICDIQRNLQFSNLGALEVGPRQSSESLEASRIMHSNDDSFRSANGGEFRELPPVELSNLPFILKTVLEAGITDQMHVAELITQDNDFFPKIVDIFRMCEDLENIDDLHMIFKLVKGIILLNSPSIFDKIFSDEFILDIIGALEYDPEVPRVQNHRAFLKDHVVFKEAIRIENVSVVSKIHQTYRIGYLKDVILPRILDDATLASLNTMIHSNNASVISLLKDDTLFIRRLFARMRSSDISMESKRELVLFLHEFCTLSKSLPLVQQLRLFRDLSGEGVFEIISDVLQSQDRKIISAGTDILILFLNQDPNLLRSYIVQQEGNSLLGLLVKGMVTDFSEEMHCQFLEILRILMDSFTTSGAHRDVVIEIFYERHLDYLVDVIASSCPPRSLSRSSSNSVHVGGNAEGHCIKPEILLNVCELLCFCVVHHPYRIKCNFLMNNAIEKILTLTQRREKFLVVAAVRFMRTIISRNDDHLIRHVVKFNLLKPIIDVFVDNGERYNMLHSGVLELLEYIRKENIKTLIIYAIESFWDELAIFEHFGSIQAFKLKYQQYLESAEPRLNASVPDMRKKAEQRGLEKEEEDYFNEDSDEEDSGSGRRAKHAQNQNNKPKSKVPNGSEADDTDGASRPKSAGLVDYDDDDDEDFNPPPKEPSRPAEDDVPLNISPLKRKPVNAVDGKHSDGEGRRRQKIETRISCAKIAAVTSTAIKHTDLQNKYASHLLTSATPSTEANGIFSEHGTNYEEQQHPMENTETSRQTGGDCIKDVGSMSPEKAVNTTNTSDSEPYSVR

SEQ ID NO: 57813 - protein, 50 aa, Zea Mays
MLGTLGIVDGAWAPPRIHPSPWVGNSANRPTVNRYLLCSLLSSLRVAPNR

SEQ ID NO: 57814 - protein, 573 aa, Zea Mays
MADMRSCYDNLLSVAAAIANSAYEFSEALQEMGTCLLKRVTPNKDGINDKVLLLLGKSQFELRKLLDSYRVHVLNTITTPSLSLLNELQTVEEMKHQCDEKKELYEFMVNTQKEKGRSKNAKGDNGASEQLKQAQEDYQEEATLFLFRLKSLKQGQFRSLFTQAARHHAAQLNLFRKGVKSLEAVEPHVRLAAEQQHIDHQFSALEEEDYLVEDENDDDYNGSHDGELSFDYGENKEVEESGNASRNHTEGFFNRSKEEYSSVPHERQRIVSQSAPLFPEKKLNTEERIKDLRRSATRKLNTYVLPTPNDVGATSQRASGNPTSEPLESKGAFHSSPLHSSADIRDLGDSNLPSPTRLSNVQSVLKDSNTNKTETRKVLPVGDLALPSYHDLKTSDNKKVKRGSFSGPIASRPRSTENIDVISAAPRHSSAHQPVHMRVSPGNSPPPISSPKIKELHELPRPPVNTSKNIAFPSLVAHSAPLAPNPASLTPKVQDHFRTKQTLQRTASPLPTPPPGSIARSFSIPSRGISDSKETEDQHKGAARMSLSSLPSAQTFLEDRQPLSSAAGSVSKT

SEQ ID NO: 57815 - protein, 727 aa, Zea Mays
MASASTAVRMLPDGGADDEERWLAEGIAGVQQNAFYMHRALDSNNLKDALKYSAQMLSELRTSRLSPHKYYELYMRAFDEMKKLEMFFREETRRGSCSVVDMYELVQHAGNVLPRLYLLCTVGSVYIKSKEAPAKDVLKDLVEMCRGIQHPLRGLFLRSYLSQISRDKLPDIGSEYEGDAETINDAVEFVLQNFIEMNKLWVRMQHLGPAREKEKRGKERNELRDLVGKNLHVLSQIEGVDLDMYKETVLPRILEQVVNCKDDLAQFYLMDCIIQVFPDEYHLQTLETLLNAFPQLQPSVDIKTVLSQLMDRLSNYAASSPEVLPEFLQVEAFAKFSNAIGKVIEAQPDMPVVGAVTLYVSLLTFTLRVHPDRLDYVDQVLGACVKKLSGKAKLEDSRATKQIVALLSAPLEKYSNIVTALELSNYPRVMDYLDNATTKVMAVVIIQSIMKNTTCISTSDKIEALFDLIKGLIKDMDGAQDDELDEEDFKEEQNSVARLIHMLHNDEPEEMLKILCTVQKHILQGGPKRLTFTVPSLVFSALKLVRRLQSQDGDVTGEDVPATPKKIFQILHQTIDALSCVPSPELALRLYLHCAEAANDCDLEPVAYEFFTQAFILYEEEIADSKAQITAIHLIIGTLQRMNIFGVENRDTLTHKTTGYSAKLLKKPDQCRAVYACSHLFWADDQDGIMDGERVLLCLKRALRIANAAQQMASATRGSSGSVLVLL

SEQ ID NO: 57816 - protein, 2268 aa, Zea Mays
MSHPGKFVSVNLNRSYGQSAPSSHHGGGGRPSRPAGAGSSAGGGMVVLSRPRGASSLAKPQAPKLSVPPPLNLPSLRKEHERFDGSAAAAGGGVASAPPRSGGPAAGWTKPASASEKPPGSAALPGGVPRPPSYGFAEKAGVLRGEDFPSLKAAVAPPTPPQPAQRQKDADGVRVVTPEARPGSLGMRPQVTTSRTTETLASGVSLGPGGRTSAERVQKPDLGPLPMVRLRYDSDWADDERDTGLSLPERDSRERGFGRTEAMLPGRDLYVSMRDPFKKEMFGRDVAATNKEGGQDRLWRSPVSNQHDRERTDGRPYSGGRGSSGQSYRENIAASGSKDVWSNGKEPPMSAYGQNGVEAASERYGDSSNNWPRLNSFQNNVGSKVQPFGGNKGPLNNDPVAKFGREKRLTGSPAKPLIDDSGFDSISAVNLTAIKKKKEAAKPADFHDPARESFEAELDRILRVQEQERQRVMEEQERAREVARKQEEEQERMIREEEERQRLAEEQAKQAAWQAEQERLEAARRAEEQRIAREEERKRIAMEEERRREAAHQKLLELEARIAKREAKTNIDSTRAVNDEFIPGDVKDRDLSHSANFGDRKDIDKMNERINTSTPLESSSINRFSETVPRVRTLTDGRPSFIDRETAHYSSRPAFPEQENVHHRPQHDPFASKRGNFPKKDLNDGFGSVSVRQSSTGRTTDSSWALEDFHHEKVPRWDAPREIDRFSKQSEFDNEFFNSDRFGDTAWLPSSSHGSLNAQQGDRMFQSPDVNELSSFTRPRYSMRQPRVPPPPIVTSVHRSSIGASAQRFNSSFVDGGNRECSGRDDVQIMQGQYGSVYQEASRQHGIRSDHISVNEQQIVDRKSPVLGSQSSLSVSSPPSSPPHVSHDEMDVSGDSPVLPTSADGEHTALSDNHHAALTVDADNTSRIAASGVPHLEEDEWSSVNNDDRRKQDEYDEDNDSYQEDEMNEADDENIDLDDEFLEGQDTPVELEPVILGFDEGVQVEIPPNSQLELASVRSTERTVGVHLNSGVAEQENVSGSVVHSDPVTEAEKALQALTLDGVNGLTEDSNGEPSNSSRTPASSSQLPQASSVGPIFSSASTVVGQNEVPVSLQFGLFTGPPLIPTPVPAIQIGSIQMPIHLHNQFNPSLPHMHPSTTPLYQFGQLRYVRPIAPSVRSLPSQATRPAHSSISAQHTLNQNVSSVLPELMDGGTNQNIPAQASSSTFINKSAAPTTKVPLGMDNSNSQYLNAPANNQMAGVDGFSSQVDREFAEGTTPSGRNQGLSLKRNYRPTSNNVESSQYGLEGRAMGDPKALGVVSDRRGRRYGYAVKDINMRSTGSIVEPSHKDSKGGFQRRARRNVRRTEFRVRENIEKNQNETSESFCHGEQDEITSSNGTRDIPARNTNRRELDMSKASRINGASDQSLSFRSTHNVPYERSHGGNKKSRTGAVPDGDTTSLQAGAVRVVKQQGIEVPVDADGFIEVRSKRQIMSVRREQREKENRSKIRMAKAPRKQHSISLQSSVGPSVNKRAAPSSGEVTKKVSSGSAITVEGRIVDYAESSIPLMGDTASMNLIGPPSTNAETHTNCFANQPIQIQASSDLVTSSPAKLVSGLSDGDNKGPSISTPFNMVSWDNSQINQQVMPLTQTQLEEAMGPAKFEQQAGPGFSLESNNALSPTVITEKVLPSSASPINSLLAGEKIQFGAVTSPTMLPPVSRTVSSGLGAPGSSRPDMKIDRGLPSDNSGPDKANSKELCPSTEDAEAEAEAAASAVAVAAISTDEGSPADATTASAPDKSFTSKDLSGLTSGGARTGQAGQSSTEEPLAVALPADLSVDTPSMSLWPPIASPQASGPMLSQFHGAQPSHFSCFDMNSMLGGHIFAFGPSDESAGSQGQHPQRSNALPSAPLGAWPQCHSGVDSFYRPPTGYAGPFITPGGIPGVQAPPHMVVYNHFAPVGQFGQMGLGFMGATYIPGDKQPDWKQSQGPPIVGVSQSDPNSQNMVSGQVNAPSVPAPVPHLRPTSIMPIPSPLTMFDIAPFQTSTDIQMQTCWPHMPVPPLHSVPLSVALKQHPVEGTATQQFVHNVPIDKSGTNNRFQESSASAGPSDGNKTFPNAAVSQYRDELGLVEQPASTSSSSQTVQPSFGQAGLISNEVPTSAKAMVRVTPSKVNPGIAAGAAGSTNAPQVTSIPSKTHQSSSSSSDPQYQHLVNNQDRRARATQKAGTGNEWQRRSGYQGRNQGSGSDRSSGTGRMKQIYVAKPSATSGHASSG

SEQ ID NO: 57817 - protein, 51 aa, Zea Mays
MMHRAAFVLPTFARRELEAYCVSTETEQAEETPAAPLKLTLASRSEIFATS

SEQ ID NO: 57818 - protein, 1106 aa, Zea Mays
MRGARPGVLPIYPQEQCRQARISYHGEFKVEVCFQYNEGAQIRHTFNFGHLPIMLMSKLCHLRGADPHKLVFHGEEATEMGGYFICGGMERLVRILVLQKRNYPMGLVRNSFLKRGAGYTDKAVVIRCVQRDQSSVTIKLYYILNGSARLGFWLGGREFLLPVGIVLKALIDASDREIFTSLTCCYSDKHGRGKGVVSTQLIGERAQIVLDEVRNLSILTRTQCLVHIGQYFRSVMEGFENDDYITVAEAVLKDYIFVHLENNHDKFNLLIFMLQKLYALVDQTASPDNPDALQYQEALLPGHLFTVFLKDRLQEWLRKSKRLILEEAAKNKGFDLGNALEIRKFLTKYTTSVGRAVESMIKVGNVNSRSGLDLPQREGMTIHAERLNFHRYISHFRSVHRGSAFAKMRTTSVRKLLPESWGFLCPVHTPDGEPCGLLNHMTSTCRVSSFYNSEGVIKNFGEMKKLLSAELVRVGMNPVLPKIEQTGPPEVLHVHLDGCILGTIASAMIEKAVNYLRTLKLLAHSGIPEDLEVGYVPPSFNGAFPGLYLFTNPARFVRPVRNLFILSDGKQSIELIGPFEQAFMEIRCPDGGDGGRQEPFPATHEEIHPTAILSVVANLTPWSDHNQSPRNMYQCQMAKQTMGFCGQALKFRTDVKAFHLQTPQTPIVRTGTYTKYCMDEFPSGTNAIVAVLSYTGYDMEDAMILNKSAVERGMFRGHIYQTECIDLSTKSRDNVPETFAKSILTRDTSNVIDSDGLPRLGQAVHPNEQYYSVHNSLTNVIRPVKLKGTEPAFIDYVAVNGTGSKCGLQKANIRLRRVRNPIIGDKFSSRHGQKGVCSQLWPDIDMPFSANTGMRPDLIINPHAFPSRMTIAMLLESMAAKAGSLHGKFIDATPFANSLKKDKDSDKPNSIVDELGPMLASYGFNYHGNEVLYSGVFGTEMDCEIFIGPVYYQRLRHMVSDKFQVRTTGRIDQITRQPIGGRKHGGGIRFGEMERDALLAHGSSYLLHDRLHSCSDYHIADVCSFCGSLLTATMIKSDTQKKVKHEMLGLPTVRPAKNFACQACKTSKGMETVAMPYVFRYLAAELAAMNIKLELRLSNKSGLPLS

SEQ ID NO: 57819 - protein, 71 aa, Zea Mays
MRLMDHQSVILVTCWCGEVGVLEWMLILKSFLLSGETDSDYKTKRWMVILICFVETCSFCSMPHTNLVWMQ

SEQ ID NO: 57820 - protein, 264 aa, Zea Mays
MVRLTADLIWKSPHFFNAVKERELDLRGNKIAVIENVGATEDQFDTIDLSDNEIVKLENFPYLNRLGTLLVNNNRITRINPNLGEIDPLASLPKLQFLSLLDNTVTKQPDYRLYVIHKLKHLRLLDFKKVKQQERVAAAKKFHSKEAEEEAKKVPAKTFTPGLPDAQDITMEPQGPKVVAPTPEQITAIKAAIANAHTLEEAARLEQVLSTGQVPAEFAVPRPDANMAEASDGAEKMDTDGENQEGGEADGQKQGEGSTPIQED

SEQ ID NO: 57821 - protein, 354 aa, Zea Mays
MECDYAWQSEYIAIFDADFQPEPDFLLQTVPFLLHNPEVALVQARWSFVNDTTSLLTRVQKMFYDYHFKVEQEAGSATFAFFSFNGTAGVWRTGAIRDAGGWKDRTTVEDMDLAVRATLKGWKFVYVGDVRVKSELPSTYKAYCRQQFRWSSGGANLFRKMAKDVLFAKDISLVKKFYMLYSFFFVRRVVAPTAACILYNVIIPISVTIPELYLPVWGVAYIPMVLTVVTAIRHPKNLHILPFWILFESVMTLHRMRAAMTGLLELEGFNQWIVTKKVGNDLEDTEVPLLQKTRKRLRDRVNLPEIGFSVFLFLCASYNLVFHGKTSYYLYMYLQGLAFLLLGFNFTGNCSCYQ

SEQ ID NO: 57822 - protein, 137 aa, Zea Mays
MLKEFRGHSSYVNYAIFTTDGSRVITASSDCTVKVWDTKTTDCLHTFKPPPPLRVVKSFSSGKREGGDFVAASVSPKGEWIYCVGEDMNMYCFSYQSGKLEHLMKVHEKDVIGITHHPHRNLVATIAEDCMMKIWKP

SEQ ID NO: 57823 - protein, 163 aa, Zea Mays
MADAPASPGGGGGGSVREQDRFLPIANISRIMKKAIPANGKIAKDAKETVQECVSEFISFITSEASDKCQREKRKTINGDDLLWAMATLGFEDYIEPLKVYLQKYREGDSKLTSKSSDGSIKKDALGHVGASSSAVQGMGQQGTYNQGMGYMQPQYHNGDISN

SEQ ID NO: 57824 - protein, 1091 aa, Zea Mays
MCDLDMAMRVENNGRPRQVPIMVRKKRTGPGGSGETSGESSGASGQGSSQRPERTQQPGAGRGWVPQQGGRGGGQHQGRGGHYQGRGGPGPHHPGGLPEYHQREYQGRGGEYQGQYQGRGGARSRGGISQPYYGGHRGGSVGRNVPPGPSRTVPELHQAPYVQYQAPVISPSPSGPGSSSQPMAEVSSGQVQQQFEQLAIHGQSSMSQEVQVAPASSKSVRFPLRPGKGTYGDRCIVKANHFFAELPDKDLHQYDVTITPEVTSRGVNRAVMGELVTLYRQSHLGGRLPAYDGRKSLYTAGPLPFTSMTFEITLQDEEDSVGGGQGGQRRERVFRVVIKFAARADLHHLAMFLAGRQADAPQEALQVLDIVLRELPTARYSPVGRSFYSPNLGRRQQLGEGLESWRGFYQSIRPTQMGLSLNIDMSSTAFIEPLPVIDFVAQLLNRDISVRPLSDSDRVKIKKALRGVKVEVTHRGNMRRKYRISGLTSQATRELSFPVDDRGTVKTVVQYFMETYGFSIQHTTLPCLQVGNQQRPNYLPMEIVEGQRYSKRLNEKQITALLKVTCQRPQERELDILQTVHHNAYYEDPYAQEFGIRIDERLAAVEARVLPPPRLKYHDSGREKDVLPRVGQWNMMNKKMVNGGRVSNWACINFSRNVQDSAARGFCHELAIMCQISGMDFSLEPVLPPVTARPEHVERALKARYQDAMNILRPQGRELDLLIVILPDINGSLYGDLKRICETDLGLVSQCCLTKHVFKMSKQYLANVALKINVKVGGRNTVLVDALTRRIPLVSDRPTIIFGADVTHPHPGEDSSPSIAAVVASQDWPEVTKYAGLVSAQAHRQELIQDLFKVWQDPQRRTVTGGMIKELLISFKRATGQKPQRIIFYRDGVSEGQFYQVLLYELDAIRKACASLEPNYQPPVTFVVVQKRHHTRLFANNHNDQRTVDRSGNILPGTVVDSKICHPTEFDFYLCSHAGIQGTSRPAHYHVLWDENKFTADELQTLTNNLCYTYARCTRSVSIVPPAYYAHLAAFRARFYMEPDTSDSGSMASGARGPPPGAARSMRGAGSVAVRPLPALKENVKRVMFYC

SEQ ID NO: 57825 - protein, 237 aa, Zea Mays
MAGRGGVVANRWDGVVPGDCAPSPAVLRLSPDLRWEEAREPLHAGIDAANHAVGVGPGMAFANALLRSGRAGGAVVGLVPCAVGGTRMAEWGRGTELYAEMLRRARVAVETGGRIGALLWYQGESDTVRWSDATEYGRRMGMLVRDLRADLGIPHLLVIQVGLASGLGQYTQVVRDAQKGIKLRNVRFVDAMGLPLQDGHLHLSTQAQVQLGRMLAQSYLNYGKTFHPIKPEMGQAK

SEQ ID NO: 57826 - protein, 882 aa, Zea Mays
MVPSGLFGWASPHVQPLTPVSEVSEPPESPSPYGDGPAGDAGVGTREGEGAGAGEEEVEDDEVEPPPAAVSFWRLFEFADGVDWALMAAGALAAAAHGAALVVYLHYFGRALNLLDSERVGSSLYGRGEELLHRFKEHALYIVFIAAGVFVAGWIEVSCWILTGERQTAVIRSKYVQVLLNQDMSFFDTYGNNGDIVSQVLSDVLLIQSAISEKVGNYIHNMATFVVGLIVGLLNCWQIALLTLATGPLIVAAGGISNIFLHRLAENIQDAYAEAASIAEQAILYIRTLYAFTNETLAKYSYATSLQATLRYGILISLVQGIGLGFTYGLAICSCALQLWVGRHLIHRGKADGGEVVVALFSVILSGLGLNQAATNFYSFEQGRIAAYRLYEMISRSTSSTNQEGATLPQVQGNIEFRNVYFSYLSRPEIPILSGFFLTVPARKTVALVGRNGSGKSSIIPLMERFYDPTLGEVLLDGENIKNLKVEWLRSQIGLVTQEPALLSLSIRENIAYGRSGTFDQIEEAAKTAHAHGFISSLEKGYETQVGLAGVALTDEQKIKISIARAVLSNPSILLLDEVTGGLDFEAEKAVQEALDVLMLGRSTIIIARRLCLIKNADYIAVMEEGHLVEMGTHDELLNLDGLYAELLRCEEATKLPKRMPTKNSRERKSLQAEDTSVSQYFQESSSPKMAKSPSLQRTHGMLQFWRSDTNRNSHDSPKDPSPPSEQTIDNGIPMVAIETERTPSIKRQDSFEMKLPDLPKVDVHRIQRQSSKNSDPDSPISPLLTSDPKNERSHSQTFSRPQSERDDTSSEHSELDEVQHQKPPSFWRLATLSIAEWPYALLGTIGAAVFGSFNPLLAYTIALIVSAYYQIEIRDMRHEVR

SEQ ID NO: 57827 - protein, 100 aa, Zea Mays
MQIAKLLKDSISSICSYSSTASCFLLCSWIAILDKIMMDVVCVLITISKIYSIGKTILRYRSELDSLHIHKQIKKQPVYNKNMSSVLPVAQFSFSVAYLQ

SEQ ID NO: 57828 - protein, 375 aa, Zea Mays
MGNTCIGPSAPSDRHSFFNTVSLAVLWRPPAAADRAEPSPTAEPSSSTPCSPPSRAPNPVTISDSEHPPHSTSTALGPAAPPNPNGKPKPKPKVKRVQSAGLLAGSVLKRDSERLKDVYTLGKKLGQGQFGTTYQCVEKATGKHFACKSIAKRKLVTDEDVEDVRREIQIMHHLAGHPNVVSIVGAYEDAVAVHLVMELCAGGELFDRIIQRGHYSEKAAAQLARVIIGVVEACHSLGVMHRDLKPENFLFVNQKEDAPLKAIDFGLSIFFKPGEIFSDVVGSPYYVAPEVLKKRYGCEVDVWSAGVIIYILLSGVPPFWAESEQGIFKQVLKGGLDFSSDPWPSISESAKDLVRKMLNRDPRKRLTAHDALCHC

SEQ ID NO: 57829 - protein, 1026 aa, Zea Mays
MVMDRAGWLWRRKSSDKSPGGSDSSLSVSSHSEQCSDDQYDYSQETGVARSLNGKLAAGVNMNNFNPEHGQSFEQHISSNVGDEEIKETLESLNYKLSAALSTIRAKEDLVKQHAKVTEEAVAGWEQAEAEVTTLKGLLEASCRKNASLQDQVSHMDEALKECVRQLRLAREEQEDKVREVVSNSLVPQSENPELQNHIAELKKRLEMTRLEASSSMILQHDLHERLRAIERENLDLKAKHQAIEKENIDLKAKLLVQSKDLKILMLERDLSNQVAETASKQHLESVKKIARVEAECRRLQHLTRKTTLINNSRSTQNNCCMESLTDSQSDHGEHMVGVDNDLQNSDSWALALIAELDQFKNGKDGSRNIVNNPVEIDIMDDFLEMERLAALPESDGTSSNFEMETDSDKAVTRNSSLKVKNEELQNKVANLQEKFEAIACEKRELELALVEVRDQLEISCDALVVAKNRLVEMQMQLDSANDSKLSALDDVERLDSERKALELQLESKSVEVEELLIAVASLEENAEQKELESQLELMSAQATELRLTVASLEERIQAERDLSVQQKQNAEAMLNAKEELEAQLCSANTEMGKLRDIIKALENEVKKERALCEELTAQLQIKVEAAVNAVKESLEAQLCSANTEAGKLRDVVKALQDEVEKEKALREELAANLEVKTRAARTAEVVKESLEAQLSSAHAEMHKLEEITKQLQNEVEKEKEFSAQLEMKIEVERARSIESAKESLEEQLLLVNSEAAKLHDMVSALEHDVEKEKFFSAELQMQLEALEVVKKVLESEAESAHQDAKILKQKVESLEAKLEEQMSSADEFTETLQSERMVIEHKLKTADGEILKLTNKVSLLHREIEQERLLSEEYEQKCQKLEAQMSRDSRDAKLWRLANSNGDLKVKKEKELANAAGKLAECQKTIASLDRQIKSLTDLDSVVLEPERLESSRDMPLPLDFRNGDAEFAMFADDLYDFDLPNNDTSFFSPPPSSIQPSSPPSEMSVFAGGLSTLSSYRSKRAIRR

SEQ ID NO: 57830 - protein, 357 aa, Zea Mays
MKAYYKQTLSFACALLIVLTTQILGYGWAGLLRRYLVDPAEMWWPSNLAQVSLFRALHEKEEEGGKSRGPSRMRFFLIVFFASFAYYALPGYLLPILTFFSWACWAWPHSITAQQVGSGYHGLGVGAFTLDWAGISAYHGSPLVAPWASIANTAVGFVMFIYVIVPLCYWQFNTFDARRFPIFSNQLFTASGQKYDTTKVLTKDFDLNVAAYDSYGKLYLSPLFAISIGSGFLRFTATIVHVLLFHGSDMWKQSKSAMNAVKLDVHAKLMQRYRQVPQWWFLMLLLGSVVVSLLMSFVWKEEMQLPWWGMLFAFALAFVVTLPIGVIQATTNQARGAPALLPSPLPSSYRLNPAVCP

SEQ ID NO: 57831 - protein, 754 aa, Zea Mays
MRIKEVDVGVVAIFDGHNGAEASEMASKLFLDYFLLHVYFLLDGIHSLRFRKSTGKLTYREVTIFNNVFNLYKHGQSDHAERSCWASPAILDRSFHTEILKESLMRAVHDIDLTFSKEALQNNFESGSTATVVLIADGQIISANVGDSKAFLCSEGYNLHHRNRKRRRKRNSINHEEFALANYDGPLYHARELTKDHHPNREDERNRVEAAGGYVLEWAGVYRVNGELALSRAIGDVPYKRYGVISTPELTGWQILSENDSFLIASSDGIFEKMTMQDVCDLMLHAKIRVKHDFGSSAITQRNLADYVVHVALQKGTTDNVAAVVVPLGSPGSTGTTLKDSSQFEEDLKISISPMLNVPYGLKPDHGHSSAVIDMEYFKRSSIKFQRFLVEAKPKKLGCFYLSESLDEDMDYIFRVPEAYQREEVHDFNHIPAETALYSDGNLEKYKDKHFCLYLGPEDGEMGQCNGPEAFANFFGLLDSLPHNGSKPNGSHSFGNTIDFRYKLKRRFDRGSYGEVWLAFHWNCSEDTDVHKEPPHFTNISQSEMYNCTSSGRMSSDEDHGSGTVNGDLFILKRIMVERGNAAYLSGLREKYFGELFSNASRTLEGLSRIESSTISVDMLYDPDIHLEKNLSATEEPLKHVARFIESFESESREIWLVYHNEGHSLSKLIYTAEETKLVTGNNNERVRHIQVLHPSKWWHWLRTTKAGLKQMQNLLWQLLMGLKACHDRNITHRDIKPGRNDVTAYFFLVFYTS

SEQ ID NO: 57832 - protein, 93 aa, Zea Mays
MVRPSIQVSVCPTFGGSDPGVRAEVVHSLKEELNLMCGLSCSQRPSAYTALSIGRSKWNGQVGSSGVVITLETPLNNIGRPSLSVQLNGGFEL

SEQ ID NO: 57833 - protein, 428 aa, Zea Mays
MLFRTALALLEFYGPALVTTKDAGDAVTLLQSLAGSTFDSSQLVLTARMGYQSVNETILQELSNKHRPPVISAMEERAKGLGVWTDTNGLASKLYNFKRDPEPLVSLSDSTDQLSDVGDGDTNQESDLGNMDDEYGGVIVNSEIDSLPDPKDQVAWLKLELCRLIEERRSAVLRADELETALMEMVKQDNRRQLSAKVEQFEQEISELRQALSDKQEQEQAMFQVLMRVEQELKIAEEARISAEQDAAAQRYAANVLQEKYEEAMASLAQMENRAVMAETMLEATLQYQSSQQKAMSPCPSPRPSMLDASPSQSSQNSSQEFQPRRKNLLGPFSLSWRDKNKEKPNNADDSTNTKSTNNDEMVETSNTNDEKHRETLDLNSEQRAESPKADVKMRAETPEKDNDLPGVQLVTDDLNGHHEQMQEIKLD

SEQ ID NO: 57834 - protein, 478 aa, Zea Mays
MAGPTSRLLILARRADRRRCLPFLVPRALQAAPPTFSPALPLPPCLPASTPVMSYSSAFTSVHGERPSSEYAKIRKESLETQFGRILGSSSRRHFADRGFGPFLALYRAATISFHVVKLTIWHLLLNDMHKRAEKFRETLIRLGPFYIKLGQALSTRPDILPSAYCQELAKLQDQIPPFPTRIALRTIESQLGSRISDLFADISPEPIAAASLGQVYKAHLRSGELVAVKVQRPGMAPLLTLDALLFHMIGGQMKRFAKARKDLLVAVNEIVRHMFDEIDYILEGKNAERFATLYSHGSSGVNSEASTSIKVPKVYWNYTCKTILTLEWIDGIKLTDAERISKANLNRKRMIDEGLYCSLRQLLEEGFFHADPHPGNLVATEGGSLAYFDFGMMGDIPRHYRVGLIQMLVHYVNRDSLGLANDFHSLGFVPEGTDLLAVADALRFSFGDVRRQSNDFQKGLQKHWILSLKLLRVHILL

SEQ ID NO: 57835 - protein, 389 aa, Zea Mays
MNSPEPRISQEDDYLGVSQMPAYEESLGRSDQIRNNTSMEPPGYEFDSNDGKVIEHPDILYDDIIFRILCPNDKVDNLVATNDGILEMLQADVGVDVRLSDIIAGSDERVVIITSREGPDHELFPAQEAVLHIQTHIVDLGPDKDNIITTRLLVPSSEIACFDGREGSLSDIQRQTSANVQILPKEDLPLCALESDELIQIVGEISAARNALIQVTTKLRSFLYREMSGPIQVGNINVHGAISPVAGSPGGPNLGNDMPMSAYHQASQLATSWHSKDSGGSASGSFDQGSNIIDEIRQGATKRFAVPLVTRSTLEVVIPNSAVASLTMRAGSKLAQISEISGATVTLAEDRPDILEKVVRISGTPEQASKAENLLQGFILSIPDDIPSG

SEQ ID NO: 57836 - protein, 315 aa, Zea Mays
MDEKFLFVSGKDRLILSKGVSAVHKIIQEGKGKHSPSSPKHDRSRSPVRNTTEFRSKHSDSHRSPSPRNFDSQWSHSPRNASLSQSKGYYNERHRDGRLHNNMPKFSKGSPQAHANFGAKGRPAQSKSPRHTSYLDELPRTHGENNQFAASRVPNDWGIERHGADASSSLRFDMPSHQQTLEELEMEFKKEATQLARARDQEEDEENYRHRESLRVIRENYMERVITLRNVHAKKWEEFLDTFKSQQQAQPSYIQTGYLGFEQRTAHISATHQPMDSKSTYPYASDSYSAPKAHAAYGEFQHERHDDLGRAYRRY

SEQ ID NO: 57837 - protein, 506 aa, Zea Mays
MGEVAPVIPVTRRRTMSRKAAGAVEADRPAEDVSEEKTSKITIALNQEAEAVAVASKEEKGCNFRSTVAATLYIKKFDRVQQFFESILKNEHSYVYINTSPHITQTTPSDLTKNVNILNLDLGLGLLSKPKLADIGWPRRRCRQCGARRLLVATDAAFWRMVVHGDGRLNGISIGTRLTRVNRRRVVNHLEVCLVKCALFIKIVFRMPFVNGNDCYLVYDKNMNIFITVYFKECAPVIPDFLLFNIDLILSCRKTGCTVPLRLYHFLNIVYKTREYEFLRLTSLGVIGALVKLFQLPELFDDQVSYMVVPQGMRILNHQVDDDRIVCLSHHLKKVVLKEILDKNSRCGPCSSCYCFDEKMHRCCQFLWADLIPCRTQQSSIIFLHDSKMSQVAAATPQTTAIRADQKRQERAPHVFILLSHPPFLAPTHCHCTCVVLCCVLQEEEEEEEHVLRSLPARFTTSIYGGDHQAFAKQKLPKMAYDYYASGAEDEWTLQENMEAFSRIFG

SEQ ID NO: 57838 - protein, 113 aa, Zea Mays
MEEVEEKLESGQGKSTIRRFFARFCTPIFLEAFILTFLAEWGDRSQIATIALATHKNAIGVAVGASLGHTVCTSLAVVGGSMLASKISQRTVATIGGVLFLGFSVSSYFYPPL

SEQ ID NO: 57839 - protein, 171 aa, Zea Mays
MEMFPSRVAKAVFLCAAMLANGNSALDMFQKQMDTNGTLQKAQEFVYSNGKDRPPTAINIDRASLRDLLFNQSPSKDVSLASVSMRPIPFAPVLEKLVLTAENYGSVRRFYVETTEDNTIPLPLQQSMCGANPPEKVLRLKGADHAPFFSKPQALHKTLVEIATMPHVRAS

SEQ ID NO: 57840 - protein, 610 aa, Zea Mays
MHLYVQPQERTREVKDDEAPKEVSGREKSSDVLPRSKHQTHSGHTIESSEATSRRRSNREWKGIGRKGNEKFPLRNVLTDILHGEDKRSQKSNEVRPPPSKQQNDRKRERDDETHQTKKDSSSRSMLGDGASRRLLQFAVRDAVKAVQPTSTSAEPASKRLCSVVATTSTEHMRDRRSERSQDYLNDRRSERSQDNLSDRRSERTRPMLQVHGAALALRAAAEAAADSAKVRSTGSVFKRLGQGNVVKQPSRSREEKRDYEDFEPVTIADEHDSDQYVNNEESEEESGELTMADRVAGSGMYVDSSSEDDMDRDEGITRYQTSLSHDDTFSPFAEKKTVSAPCSVELETNAIRPSSVNDEEQPVPSTPTASKAVAISVDVNMVEPPSYATPKDVHVVEKPYVAPMNSNAASIATNAKELGHAEVQKDSQRSAPSVPVSYSTAHPMEDADSRTLYVNNVHFAATKDSLSRHFNKFGAVLKVVIVTNAATGQPTGSAYVEFLHKESAERALSLNGTSFMTRILKVVRRSSHEAAHFYGWPGSGRSSIYGRHGRMAYPRAVIPGGSFRGRAPMKAGARSLQWKREPSGTDSSAGAKTDMSVAFSSEQVLPRAT

SEQ ID NO: 57841 - protein, 1300 aa, Zea Mays
MVMSESDDDDDEPQLNAVESYYFVDSTNDNEPVCFSTLPFLFGDTDDLPDCKKRLVLRGTGGDPGVKVYSEVVAWSLGLEGKQPQFAVLTAEGRRWVRLVRPLNSYEEMIRTVLITAHMLHFLMRKPHEPERTLWNHLCKVFNKFDVRPSEDDFRNHISLMKQFVAKDPILAKSEILRVFVEGKSGKIFTEAGADHIDVKQPFITDDEDIDEMIVEDADNESDEEEDGDLFDSICAICDDGGDILCCDGPCMRSFHAKEGSGEDSYCDTLGYTEAEVEAMKLFLCKNCEYKQHQCFICGVLEPSNGAAAKVFLCNNATCGHFYHPKCVAQQLHPNNIDEASELEKKITDGFSFTCPIHWCFHCKGLEDRTQGPLQFAVCRRCPKSYHRKCLPREISFDEIEEKGVIIRAWELSKMILIYCLNHEIDSELETPVRDHIKFPRIEKPLQFVKKGANLLPKKKKRTYSESILEQPPKDTVKMKSKVRMQESEQNKHDTREVSVKSFTQNVVDTPVKKKGKLKENKQLPYVAKDHFVSSPKSVKEQEQELVPLPLSGIRKSSFPKVDSEIEKRVISILGNEISSLTIKDVTRNCSLPSTHVYSGRPTDKMPLGKIERSVQAVEAALKKLKNGGSVNDAKAVCEPDVLRQLARWHTKLRVYISPFIHGTRYSSFGRHFTKVEKLVEIVDRLHWYVESGDMIVDFCCGSNDFSRLMKEKLDKVQKKCHFKNYDLIQPQHHFCFEKRDWMTVQPNELPRGSQLIMGLNPPFGVKASLANKFIDKALTFKPKLIVLIVPKETKRLDKKKIPYDLIWEDSECLAGKSFYLPGSVDLNDNTVEGWNASAPPLYLWSHPHWTKKHMQVAEEHGHTCMGKIASHVEKRNLSDDLPVRKQSEAANKWNSRSGKETTCNDRKDNLLDDVTAKKQAGPEEEKETLGKMDHHVKKATIPDSLTVKKQTEASSKALSHCGNDRKIGRYSSRKYDDWRSKRTPDHEESFPPEKQVEVAYEETKVIIPSKKITHNEQSGACRENRKNSCVEETKNVEYNYEQQTAAGMRFREGEDSDMSISPPSRPVEPFDMIAHPIGSLTKEPFDPVLNRGATHQDSYAVTKEEYLGQFKRKNDRTFTDIDDSSRMRGSSIEEVTRPYIAAPTSDPYSLRYRGDGSFYRHPSSEDLNTTGISAGYGQIGGDSYPQATGSQTHNTRMHGGTSDDNYLSARYSLGYSGSRFSQPASTVPAFGLSGASSQRGSVIDKYSYGLSGPTGPQDSGINRYAPPDDGTSTRSKSSLAEQQYPFGQSGSSGGEWPHI

SEQ ID NO: 57842 - protein, 267 aa, Zea Mays
MDGVTMGFGIGLSGHGRYRIITERTLLAMPENGIGLFPDVGFAYIGAKAPGGGAVGVYLGITGKRISSPADAMFIGLGTHYVPSANLGSLKESLLSANFTNDPHRDVESVLTGYKKEPESEPQLKKLLPYIISSFSPDKSVAESVEELKKCSRSGDAAVAEWANEALAGIEKGAPFSLCLTQKHFSQVASAYGTSEHYLSKLAGVMKLEYRIALRSSIRNDFVEGVRAVLVDKDQNPKWNPATLEEVNMAEVESVFEPLGAEAELSV

SEQ ID NO: 57843 - protein, 647 aa, Zea Mays
MLQFEWLVGTQYKPMELSKSDWASIRKSPPWAIDSWGLGCLIYELFSGAKLARTEDLRNTASIPKSLLPDYQRLLNSTPSRRLNPSKLIDNSEFFQNKLVETIQFMEILNLKDTFEKDSFFRKLPNIAEQLPREIVLKKLLPVLASSLEFGSAAAPALTVLLKMGSWLPADQFNIKVLPTIVKLFASNDRAIRACLLHHINQFGESMSAQIVDEQVFPHVATGFSDTDGTIRELTLKSMLVLAPKLSQRTISGSLLKYLSKLQVDEEPGIRTNTTILLGNIAGYMNDGTRKRVLINAFTVRALRDTFPPARAAGIMALSVTSSYYEMTEIATRILPNIVVLTFDPNSDVRTKAFQATDQFLQIAKQHHEKIQGFWYFSWFRSQLNTGDNSVAESTGVKLKPGNAGLLGWAMSSVTQKGKPFDHAPISTANANNSQASTTSTATPDTQASTLAYAPSTSTSLDQAASASARSSVDGWGELEDGNIHEENSSDKDGWDDVDPFEDKPSPSLLSNIQAAQKRPVVQPKQPVANSSKPNPLKAPKSEDDPLWGPIAAAPPKSAVKSADIKPSTSHNDEDDLWGSIAAPPKSSGKPLKPAVANSDDLWGAIAAPPPATKARPLASSGRGRGTKPAQPKLGAQRIGRTSSTGM

SEQ ID NO: 57844 - protein, 669 aa, Zea Mays
MTVDRLELVEVEKSKLDEKRKLGEQDMVRLMQEKENAENTIASLQQEIQVLSRMHEQYHERKETEARQMEEHLAMRLKEAEFLLMQSEKKVEEIESVSQLKSQLWTRKANIFQSFMDNQKLSIKDIRISSQSIKQEMFALQMKWIDEISSIGRELKGLVDAADNYHKVLAENQKLFNEVQELKGNIRVYCRVRPFLPGQDGKTTIIDYIGENGEILITNPFKQGKDVCRMFKFNKVFNTHASQAEVFSDIQPLIRSVLDGFNVCIFAYGQTGSGKTYTMSGPGTSKEDWGVNYRALNDLFDISLSRRNAFSYEVGVQMVEIYNEQVRDLLSNDIAQKRLGIWSTSQPNGLVVPDASLHPVKSTLDVLQLMEIGQTNRAVGSTALNERSSRSHSILTVHVRGVDLKNGSTSRGCLHLIDLAGSERVERSEAIGDRLKEAQYINKSLSALGDVIFSLAQKNAHVPYRNSKLTQVLQSSLGGQAKTLMFVQINPDTGSYSETISTLKFAERVSGVELGAARSNKEGKDIKELLEQVSSLKDTISRKDMEIDQLLKNKAKSPGSSIDRNDSRQQIRRLSGTGSSEAECEDNMSDDGCSVAGTEYSVGGASEATAERMQKAPSRIARLFHTKNGQPANSKPKPRESALKPPGRTTSTGGSQATGGSLVKPPKRR

SEQ ID NO: 57845 - protein, 1028 aa, Zea Mays
MAEIRKYAMSNQPPDIPQILLEAQSRWLRPTEICQILSNYKKFSIAPEPPNRPQSGSLFLFDRKILRYFRKDGHNWRKKKDGKTVKEAHEKLKVGSVDVLHCYYAHGEENENFQRRTYWLLEEGFMNIVLVHYLEIKGAKQSFNHAKEAEETAGLSNADSPACSNSFASQSQVASRSMDAESPISGQISEYEDAETDNSRASSRYHPFTEMQQPVDGTVMGNFFGASSPSVSVNNLAAGYLGEMQPTGANFTSHFATRNDIASVFNDTGSELGGGPKTSIDSVLLGEPFPEYPGGFMESTLYSSVATLGNSLEDGLQTFMSEALYTNNLTQKEVDALGAAGITSSKTENDGYTDQSVRYPLLKQSSSDLFKMEPDGLKKFDSFSRWMSNELPEVVDLDIKSSSDAFWSTTETVNVADGSSIPINEPLDVFVVSPSLSQDQLFSIIDVSPSWAYNGTKTKVLITGTFLAKKEDVENCSWSCMFGDSEVSAEVLVDGSLRCYTPVHHSGRVPFYVTCSNRVACSEVREFEFRDSETHYMDISDKHTTGINEMHLRIRLDKLLSLEPEDYEKYVLSNGNKSELINTISSLMLDNNLSNLALPSDEKELCTVQDQNLEKQVKEKLYYWLIHKIHDDGKGPNVLGKEGQGAIHLVAALGYDWAIKPIVAAGVNINFRDIRGWTALHWAACCGRERTVGALIASGAASGALTDPTQQYPSGRTPADLASENGHKGIAGFLAESALTSHLSALTLKESPSGNVEEICGLTAAEGFAASSSSQLACVNSQEESLKDSLGAVRKSTQAAARIFQAFRVESFHRKKVIEYGDDDCGLSDERTLSLVSLRNPKSGHGDSHSAAVRIQNKFRGWKGRKEFMLIRQKIVKIQAHVRGHQVRKNYRKVVWSVGIVEKVILRWRRKGRGLRGFQPEKQLEGPSWQIQPAKAEAEDEYDFLKDGRKQATGRLDRALARVRSMNQYPEARDQYRRLQACVNSLRESQAMQDRMLADSAGTDGGDFMTELEELCRDDGDAPMSTIS

SEQ ID NO: 57846 - protein, 54 aa, Zea Mays
MAEQGGKRAGEKLELHRDRRRAQQGPRRAPRRAESRAESTAAELGEEDAGRAGP

SEQ ID NO: 57847 - protein, 236 aa, Zea Mays
MAIVIKEDLQLFDHPFSNRSAFNGLWAVPFTFGVAVFCFEGFSMTLALEASMADRRKFRSVLSQAVAAIIAVYVCFGVCGYLAYGEATKDIITLNLPNNWSSAAVKVGLCIALAFTFPVMMHPIHEIVETRFRSNRCFRKLSHNDGGAEWIGLHASRVLVVAVLTVVASFIPFFGSFISFVGSTMCALLSFVLPALFHLSIVGSSIPLWRRVLDYGILLFGLAFAGYGLVTALSSH

SEQ ID NO: 57848 - protein, 275 aa, Zea Mays
MQVCLRRGLSLVRQHTSRVLPPLSLHPTRFFLHQSASDPMGEGSVPGKDAKGKGKAKHPAQASALVARDDSYLEAVTHKRIRLFEEIQARQAVERLNIGGEVIKITLPDGAIKEGKKWITTPMDIAKEISSGFAASCLIAQVDETLWDMGRPLEGDCKLQMFKFDTNEGRDTFWHSSAHILGEEKQPFERIEVSRAEALEMFAENKFKVEIINELPEDKTITVYRCGPLVDLCRGPHIPNTSFVKAFACLKASSSYWRGKADRESLQRVYGNIFP

SEQ ID NO: 57849 - protein, 128 aa, Zea Mays
MLEYLSQTYNNIPVYVQENGYGALFNDSIHDHERAEYLSAYMGSALAALRNGANVKGYFVWSFLDVFELLAGYYSRYGLYHVDFQDPELPRTPKLSALWYSKFLKNEIDIIENVVSDTDDARSHAAEQ

SEQ ID NO: 57850 - protein, 656 aa, Zea Mays
MRRSVYANYAAFIRTSKEISDLEGELLSIRNLLNTQAALIHGLSEGVQIDSLTSGPEGSAEDDISNVEDQEPSEIQKWSADFPDMLDVLLAERRVDEALDALDEAERVAVDAKRKQTLTAAEVLALKRSISDNRQRLADQLAEAACQSSTRGIELRAAASALKRLGDGPRAHSLLLSAHNQRLQCNMQTIHPSSTSYGGAYTAALAQQVFSVIAQALSDSVDVFGDESCYASELVTWATKQVMSFALLVKRHVLSSCAAAGGLRAAAECVQISLGHCSLLEARGLSVSSVLLKQFKPSLEQALDANLRRIEESTAALAAADNWILTYPPTGIRPLTRLSAANLALQPKLSSSGHRFNSMVQDFFEDVAPLLSLQLGGSTMDGITQIFNSYVNLLINALPGSMDDEANLDGLGNKIVRMAETEEQQLALLANASLLAEELLPRAAMKLSSINQSMDDLCKRGTDKQSRVPEQREWKRKLHRMVDRLRDSFCRQHALELIFTDEGDTHLSAEMYISMDNTVEEPEWVPSPIFQELYAKLNRMASIAAEMFVGRERFATLLMMRLTETVILWLSEDQAFWEEIEQGAKPLGPLGLQQFYLDMQFVIIFGQGRFLSRHVHQVILDVIDRAMAAFSATGMNPDSLLPSVAYSNCNWQPVVT

SEQ ID NO: 57851 - protein, 332 aa, Zea Mays
MQVIYVDRFSPASRKAAVNEIKRKAACNSFPRVLLFPEGTTTNGRFLISFQHGAFIPGYPVQPVVVRYPHVHFDQSWGNISLLKLMFKMFTQFHNFMEVEYLPVVYPPEIKQENALHFAEDTSYAMARALNVLPTSYSYGDSMIMARAIEAGKVNGSNYMVEMAWVKDIYGVSTAEAMDLLEHFLAMNPDNDGRVKAQDFWAHFGLDCSPLCKKIFHYFDLGIKESITFRQFLVGCAHLRKQPLFQGACETAFEKCRDPETSEISRAQLADVLRLSMLLPSGDRMLDLFKTFDIDGDEKISKDDFMTCLGRFPFLIAFFAAPINGEVYIEIV

SEQ ID NO: 57852 - protein, 331 aa, Zea Mays
MDRGERLGRALDAFGGNLWALVDAALDAAARDRPDELRARRDSIVERLYAAAAGCSNCAGRPPSVAALAAAGLEEEDGEEAAPASPWAEADAQAGGAEAQTEPENELVSLLQNLADMDVTYNALQETDIGRQVNGLRKHPSAEVRRLVKQLIRKWKEIVDDWVRLDNSGGDGSASVMTADGDSPHKIQGRSHQSPRVSGFQYSPSPQRFNGSTSEMANNGFESTMDAKRRASPVPAHHNSRQMNNNHHSTTITTSTSSAPAKVTREQKQSLVDLDRLDSARKRLQENYQEAQNAKKQRTIQVMDINDIPKPKSRNAFIRKSGSGGLPARHR

SEQ ID NO: 57853 - protein, 309 aa, Zea Mays
MQAKIEQKRQRLLGIAPDLPLHKLQLVVAPTAASLPALAVVALLLLLATARRPCSFLDAYRSGVVSLPSPSRTSPPHLGRSAAAARVPSGCDIFRPGQWVPDDDAPYYTNLTCPLIQEHQNCMKYGRPDRGFLRWRWRPDGCDLPRFDAAAFLDAVRDTSLAFVGDSLARNHMQSLMCLLSKTSRRRRTQSSGRCATRRTTSPWPSSGRRSWSGGTSRTRGATCGTSTWTSRTRRGATPSRASTAWSCRRRPGSPGRPCSTRPAGGASASWGATTAWSRASPTGRCATRCAWRSAPRSACSRGPGSTGR

SEQ ID NO: 57854 - protein, 487 aa, Zea Mays
MLAFEDNGSSKIGVRFDKQIPDGNDLGGLCEEDHGFFCSAESLRPDFSAGEEVERLAMTELIEVISEENKSGPLIVLLKDVEKSFTGVTESLSSLRSKFESLPSGVLIIGSHTQMDSRKEKAHPGGFLFTKFASSSQTLFDLFPDSFGSRWLHERSKESPKAMKHLNKLFPNKISIQLPQDEALLTDWKQQLDRDVETLKAKSNIGSIRTFLSRNGIECNDIEELFIKDQSLSNENVDKIVGYAVSYHLKHNKIETSNSKDNKLVLTSESLKHGLNMLQSMQSDNKSSKKSLKDVVTENEFEKRLLVDVIPPNDIGVTFDDIGALENVKDTLKELVMLPLQRPELFCKGQLTKPCKGILLFGPPGTGKTMLAKAVATEAGANFINISMSSITSKWFGEGEKYVKAVFSLASKIAPSVIFIDEVDSMLGRRENPGEHEAMRKMKNEFMVNWDGLRTKDKERVLVLGATNRPFDLDEAVIRRFPRRRTA

SEQ ID NO: 57855 - protein, 1030 aa, Zea Mays
MTTSPPPAEQEQQEEEEVLVPHGPHQELPNGAQPMEVVPAEPAATVENQQIEDPPISRFTWTIENLSRVSTKKLYSEIFVVGGYKWRILIFPRGNNVEFLSMYLDVADSGVLPYGWTRYAQFSLSVVNQIHNKFTIRKETQHQFSARESDWGFTSFMPLGELYNPSRGYLVNDTCIVEAEVAVCKVVEYWSYDSKKETGYVGLKNQGATCYMNSLLQTLYHIPYFRKAVYHMPTTENDMPSGSIPLALQSLFYKLQYNDSSVSTKELTKSFGWDMHDSFMQHDVQELNRVLSEKLEDKMKGTVVEGTIQQLFEGHHMNYIECINVDFKSTRKESFYDLQLDVKGCQDVYASFDKYVEVERLEGDNKYHADKHGLQDAKKGVLFIDFPPVLQLQLKRFEYDFMRDTMVKINDRYEFPLQLDLDRDNGKYLSPDADRNVRNLYTLHSVLVHSGGVHGGHYYAFIRPTLSDQWFKFDDERVTKEDAKRALEEQYGGEEELPQTNPGLNNTPFKFTKYSNAYMLVYIRESDKDKIICNVDEKDIAEHLRIRLENDREEKERRKKEKAEAHLYTIIKVARDDDLKAQIGKDIYFDLVDHDKVPSFRIQKQMTFAQFKEEVAKEFGIPTQFQRFWLWAKRQNHTYRPNRPLCPQDEAHTVGQLKELVNKAHNAELKLFLEVELGLDLKPLPLPDKTREDIFLFFKLYEPEKEQLRYVGRLFVKASGRPQDILLKLRMLAGFSQDDDIELYEEIKFEPNVMCEYIDNRLLFRSCQLEDGDIICFQKPSKPDSADRYRFPDVPSFLTYIRNRQVVHFRSLEKPKDDEFCLEMSKIFTYDQVVEKVAEKLGVDDPSKIRLTSHNCYSQQPKPQPIKYRGVERLLDMLIHYNQTSDILYYEVLDIPLPELQALKTLKVTYHHATKDEVSVHSIRLPKNSTVGDVLNDIKTKVELSHTNAELRLLEVFYHKIYKVFAPNEKIENINDQYWTLRAEEVPEEEKNLGPFDRLIHVYHFTKDTQNQTWCAFKYPFGDGLNTLIA

SEQ ID NO: 57856 - protein, 50 aa, Zea Mays
MMLSHANVSRAMACFEHSNFFKVTAPEARPGQLRPGAHRRQKGRAGRFSP

SEQ ID NO: 57857 - protein, 622 aa, Zea Mays
MGVVYYQYKSEKEICSMPVPHAFISVSELKQLIMTSGRHGRGRTRGRATEDIVISNAQTGEDERASIPQNTTVLVRRISIPGQLSEKIVLSPRPEVTEECSVPCKSVVTDSSSKSCSSTVVQDEDAVIAAVIDAAELKWEQLPSKRGQDSGRFTSRRNYGPLEGETPPPGYVCRSCGVPGHFIQHCSQENKMPPPGYICYRCRIPGHFIHHCPSIGDPKFDNNKMSRSLVPVVTPVDGILDSLVPSAPAGAVDDLPAELHCRLCKKVMRDAVLTSKCCFDSFCDRCIRDYIIKESKCICGVETLADDLIPNQTLRSTISNMLGTQTSSGGSGTTRHRSSSGSNPNPKIQSHTASVASAREVKQSIDHQLPAVSAPDYVLQVATEGDLVNQPLEKLAATAEILSKYEGNSAEVSVEKAVANAEALKVKDGSETTSNATTVSGSREHDVTRTDQAKKKRKKADLTKNVQPNNVGYGYNVSFDPAYYNPFINGHPWATEPYMYSSMGMPYAGYPMDPYCANPMDPYCEYPMDPYCVNPMQGYPASYQRPETEPMRRGSTAAARAPLKHRERSDRHRPKDTRLQPQSTEHKRRLVSSHGTRKRMPVFSRSSMMVDKSVEIETVPGV

SEQ ID NO: 57858 - protein, 254 aa, Zea Mays
MASRVASGLLRRRAVATLGLLRSHTHVRNYSSQLSALIPATSQCSNLTRRRYYLPNPSLYQVWSRSFASDSGDKFEAVVPFMGESVTDGTLANFLKKPGDRVEADEPIAQIETDKVTIDVASPEAGVIEKLIASEGDTVTPGTKVAIISKSAQPAETHVAPSEEATSKGSSPPKVEEKSRVEEKAPKVEPPKMQAPKPTAPLKTSPSEPQLPPKERERRVPMPRLRKRIANRLKDSQNTFAMLSTFNEVDMIHK

SEQ ID NO: 57859 - protein, 435 aa, Zea Mays
MATVTSLSFSGSCRHGPRYTARPAASSRSSQLLNDQLARASRRLQVAAGMAVAAFPSCGAFAPPCLVSTRRAFSSVVAMASAAPRKPFAPPREVHRPVAHSLPPQKREIFESLESWAADNILVLLKPVERSWQPQDYLPDAASESFDDEVRELRERAREIPDDYFVCFVGDMVTEEALPTYQTMLNTLDGGVRDETGASSTSWAVWTRAWAAEENRHGDLMNKYLFLTGRVDMRQIEKTVQYLIASGMDPKTETNPYMGFVYTSFQERATFISHGNTARHARRYGDTKLAQICGTIAADEKRHESAYERIVEKLFEVDPDYTVRAFADTMRKKVAMPAHLMYDGQDDGLFARFSAVAQRIGVYTARDYVDILEFLVRRWGVQELTGLSGEGRRAQEFVCELGPRFRRLEERAHDNKAKDPEFAPFSWIHGRQVQL

SEQ ID NO: 57860 - protein, 121 aa, Zea Mays
MPDMDGFKLLELVGLEMDLPGIRYFHHFWYGSVCNVPGIIILFLVWIWNGLGSTTMMRQSCSKDWMISIPLLPIRLGSPSPLCPTGTKQPMELEQPMDDFHSPAANSPNCFDPSTQSACTQ

SEQ ID NO: 57861 - protein, 133 aa, Zea Mays
MCWTSSLASSAEELCGRKSVQRYQRAVQSQMSLMSTPFIDNNDLFETGSTGGMSRALIDRIPKMRFSAASNCDKETDSSCCSVCLQDFGAQQFVRALPQCQHIFHVRCIDNWLLRHASCPLCRAGVHIDHIHM

SEQ ID NO: 57862 - protein, 156 aa, Zea Mays
MLTLSGVQVGADWTSILKKRHVYREAFSGFNVDAVAKYTEKQMASLSADYGLDLGTVRGTVNNACRIIEVRRDLGSLDRYVWAFVNNRPLSPSYKYSRKIPAKTSKSECISKDMVRRRFRFVGPTVVHSFMQAVGLTNDHLVSCPRHRACSAAAVN

SEQ ID NO: 57863 - protein, 58 aa, Zea Mays
MQMSWKTKDGSQFHARHFLKVGTTYQKWFSCKLWTVPSFFQASRFLYWRACQLLSKMY

SEQ ID NO: 57864 - protein, 288 aa, Zea Mays
MASSKIIFYCHFPDLLLAQHTTMLRRLYRKPIDMIEESTTGMADLILVNSKFTAATFARTFSGLHARGIEPGVLYPAVSVEQFHEPHAYKLNFLSINRFERKKNLDLAISAFALLRSAAWTLPGDALQEATLTVAGGYDKRLKENVEYLEELKRLALTEGVSGQVNFVTSCSTSERNELLSNCLCVLYTPKDEHFGIVPLEAMAAHKPVIACNSGGPVETVVNEVTGFLCDPSPAEFSKAMLKLVNDHDLAVRLGEQARDHVVQKFSTKTFGDLLNSYVLNIYHERME

SEQ ID NO: 57865 - protein, 644 aa, Zea Mays
MSPFQGYRGDGVLAGVRSRKRVFATAAAEPVTAAAKRQKRRDEPSLDAVPDECLFEVLRRVQGTRARCASACVSRRWLALLAGIRASEAVLAPAAPAVPDLNQEYLSEDDEADLMDHDGDARERTLEGMLATDARLTAAAVAGRLASVSVRGSHPARGVTDAGVCALARGCPELRSLTLWDVPQVTDAGLAEIAAECHSLERLDITGCPMITDKGLVAVAQGCPELKSLTIEACSGVANEGLKAIGRCCAKLQAVSVKNCAHVDDQGVSGLVCSATASLAKVRLQGLNITDASLAVIGYYGKSIKDLTLARLPAVGERGFWVMANALGLQKLRCMTVVSCPGLTDLALASVAKFSPSLKTVNLKKCSKVSDGCLKEFAESSRVLESLQIEECSKVTLVGILAFLLNCNPKFKALSLSKCIGIKDICSAPAQLPVCKSLRSLTIKDCPGFTDASLAVVGMICPQLESIDLSGLGAVTDNGFLPLMKKGSESGLVRVGLNGCESLTDAAVSALAKAHGASLAHLSLEGCSKITDASLFAISESCSQLAELDLSNCMVSDYGVAVLAAARQLKLRVLSLSGCMKVTQKSVPFLGSMSSSLEALNLQFNFIGNHNIASLEKQLWRLMVAPADPGSGETANSYLSREPG

SEQ ID NO: 57866 - protein, 60 aa, Zea Mays
MVQQSDIIGNQPNFVVYQGVDINSSSGKILGGHASWGNLPPSLQPPPEGGYPPLPFIDWG

SEQ ID NO: 57867 - protein, 171 aa, Zea Mays
MEGNHRMGMVAIDSATGTVADCGCEVEISECEPLPDGRFYLEVEGTRRFRIVRSWDQDGVAEVEWLKDIPLPEGSQGRRELMELANGASELARAYIRHARDTVRTARRTRHLDLEGMPGPQDPEKFSFWLANLISLRPSDRLDTLRLRDTRERISSSISLLRDSEQGCRVQ

SEQ ID NO: 57868 - protein, 58 aa, Zea Mays
MIASLFFSHFSFLLSRKQKYIVSDQIVIENIVCFIFSSLDKLYTLKLLLPLILAYVIN

SEQ ID NO: 57869 - protein, 69 aa, Zea Mays
MGWGCMDLAQTHEGGGARAGGRSAPMKAERDTRQAECLRRVQFRVDPRTGSTRTVGNAAHVLDNFRLLG

SEQ ID NO: 57870 - protein, 71 aa, Zea Mays
MLALASGSGSSSSSSRNIYHALLHLHCTTARELNVLVLVLPLPNTSDDSHCLFEICRVLSLVMDKATKLLI

SEQ ID NO: 57871 - protein, 462 aa, Zea Mays
MITRGIQQLIVAPLHYVQDKLSTMESTEIIKEDASERESDEIEVSSATHDKKAEAITDDSRQNYRTAIASHFLFRVHTDPVHEEAFSILKKLQIIEKDVSSSDFCTRREFARWFVKLSSKFERKRMCRIVPNKLTSDTVQCAFDDVNIDDPDFLYIQSLGESGIVSSKLSNSLEMLTSGSPCSKGNTLFLPDSYLSRFDLVNWKVLVEHPRALRIDEKIPSQNVCILDLRACPDVSPSMLIELMAGENNIISRVFGNTRRLQPGKPVTKAQAAAALTSGRMKEAVHEELNKLEAENQAHLSLIAEIMEELISRGDIQQQWEQKMKKEQERALEVDNNLQHVLHEHANERTDREEELADLLKERAALECQNQELINLRSEIDGMYDRLATENEEVMADQQTLENLMSDMTSKHQAVNEAKSYLEAEKEALTMLRTWVEDEAGRVHERAETLEKALRRWRIPED

SEQ ID NO: 57872 - protein, 229 aa, Zea Mays
MGGHQTRTGVLAWSSCILSSGSRDKNILQHDIRVPNDYISKFSGHRSEVCGLEWSHDDRELASGGNDNQLLVWNQRSQQPVLRLTEHTAAVKAIAWSPHQQGLLASGGGTADRCIRFWNTANGNVLNSIDTGSQVCNLAWCKNVNELVSTHGYSQNQIMVWKYPSMSKVATLTGHTMRVLYLASSPDGQTIVTGAGDETLRFWNIFPSVRTQTPVRDIGLSSFSRSHIR

SEQ ID NO: 57873 - protein, 104 aa, Zea Mays
MNPELSCMDATGKAAEFGQLKDGYMFDTSTGMSRMLLSSPTCPVLEVLGKKLSFEIAVGLNGRVWVNAPAASTVILVSNAIMRSESLSGIKQRAMVENLLERLS

SEQ ID NO: 57874 - protein, 355 aa, Zea Mays
MIDCVHISHQPAFDHPYLKNHTIQMRPNYHPEGLYEESKASSSGGERPMAQLWHQNGRCPEGTVPIRRTRKDDLLRASSMRRYGRKRRAAANPMSVSPTMLNEGGHQHAIAYVQGDKYYGAKATINVWAPKIEQPNEFSLSQLWILGGSFGEDLNSIEAGWQVSPDLYGDNNTRLFTYWTSDAYQATGCYNMLCSGFIQINNQIAMGASIFPTSSYSGSQYDISILIWKDPKEGNWWMQFGKDYVLGYWPSFLFSYLADSASMVEWGGEVVNSQADGVHTSTQMGSGHFPEEGFGRASYFKGVQVVDSSNNLGAPRGGLGTFTEQSSCYDVQSGSNADWGTYFYYGGPGRSSSCQ

SEQ ID NO: 57875 - protein, 132 aa, Zea Mays
MSPTLPPSSRCLGLSSPSPSYRIVLRMRCSVRVPSLSIRRDPQQREGGVPDRPHLQVRQGHRALPLQEEDQSPDVHGVVGEVPEDPEGGTAGVPAVPRAGDQVPGRTELQGHGDFTSVRLERWTQTSKFCKF

SEQ ID NO: 57876 - protein, 73 aa, Zea Mays
MDWIIHLDTDELIHQAGAREYSLRRLLLDVPDNVDMVIFPNYESSIDRMTLRILLLRNVSSWSILQHTMYSQP

SEQ ID NO: 57877 - protein, 275 aa, Zea Mays
MAYGLTCTLDLEGNTEGKIRATEELDKLKEQRAEEQAKMLLEAFNKDRASLINSLQNATQTTTPVPPAAPDARTQEMINEKLKKAEELGENGMVDEAQKLLDEAEALKKLATRPQAVPDSTKMSAHVQITDQKLRLCDICGAFLSVYDSDRRLADHFGGKLHMGYMLIRERLSELQEEKNKKRKLDRAEYDRRSRERSGERARDSSRDRYIDRSSSRDREYDRRRSHDRYHDRERERDSRQSRSYDSRSHRRSYSPRGSSRDYDRSGRHERRDRY

SEQ ID NO: 57878 - protein, 367 aa, Zea Mays
MWSLPEADEVAVLPNLRREEEAERKTGDCNVGKVQGKHDYNDMLRVSDAHHNSQTLDKAIANLETELSAARTLQDSFLNGSPVQEDYKASESTGRRKYLMVIGINTAFSSRKRRDSIRNTWMPTGEIRKKLEEERGIIVRFVIGHSAISGGIVDRAIQAEDKKHGDFMRLDHVEGYLELSGKTRTYFATAVALWDANFYVKVDDDVHVNIATLGNILSKHISKPRVYIGCMKSGPVLSDKDVRYYEPEHWKFGEVGNKYFRHATGQLYAISKDLAAYISLNKHVLHKYINEDVSLGAWLIGLDVEHIDDRRLCCGTPPDCEWKAQAGNTCAASFDWKCSGICNSVQNIWGVHKKCSEDEKALLTVSF

SEQ ID NO: 57879 - protein, 310 aa, Zea Mays
MYVHVFCTVIVGEIANFAAYAFAPAILVTPLGALSIIISAALAHAILQEKLHTFGILGCVLCVVGSITIVLHAPQERDIDSVKEVWDLATEPAFLCYAAIVVAAALVLIYFVVPHHGQTNIMVYIGVCSLLGSLTVMSVRALGIALKLTLSGTNQLFYPQTWAFALIVATCVSTQINYLNKALDTFNTAVVSPIYYVMFTSLTIIASVIMFKDWDHQNPTQIVTEMCGFMTILSGTFLLHKTKDMTDSPGQSLLTRRPKHASQNAFAIEVMPLKCQDYIDDETLTLSLPKVENGYLKEEYLLRYKDSSIV

SEQ ID NO: 57880 - protein, 1502 aa, Zea Mays
MASAGAGPSGPVRSISQTGRSRTMGRMPTRAFTIRPDGSSGEDGVDIVEEELVPSSLAPIVPILRAANEIEEENPRVAYLCRFTAFEKAHHMDQNSSGRGVRQFKTYLLHRLEKDEHETKRSLATTDAREIQKFYAQYCRKYLEQDHDKRKPEEMARYYQIASVLYDVMKTVTPGKNEYDDYAKDIENEKASFSQYNILPLNISAREQPIMKIPEIKAAVKLLEQINGLPMPRIELPQSSDRKTVSDKMDRPVVKDLLDWLRQTFGFQKDSVANQREHLILLLANIDMRQQGTADHSERHVHMIRSSTVIYLRNKIFHNYNSWCRYLHLESNIRIQRDAPTQQPELLYIGLYLLIWGEASNVRFMPECLCYIFHHMARDLHDIISDTSQGSFEPPFQGEGSDDAFLQLVIQPIYSVMQKEAARSKRGKVSHSLWRNYDDLNEYFWSKKCFKKLGWPMDPTADFFAEPTRAKNETEQHGHVIRRRRASKTNFVEVRTFLHMFRSFDRMWAFFILGFQAMVIIAWSPSGSLSSIFEPNVFKNVLTIFITAAFLNFLQATLELILNWKAWKSLECSQRIRYILKFAVAVAWLIILPTTYSSSIQNPTGLVKFLSNWIQNLQNESIYNYAVALYMLPNIFSALFFMFLPIRRALERSNSRIIRFLLWWTQPKLYVARGMYEDTCSLLKYTTFWILLLICKLAFSYYVEIAPLVEPTRIIMSLERPPYEWHEFFPNLRHNLGVVVTVWAPIVMVYFMDTQIWYAIFSTICGGVYGAFSRLGEIRTLGMLRSRFEAIPRAFGKKLVPDHGSHLKGDEEDKNPPFDKFADIWNAFINSLREEDLLNNREKDLLVVPSSGGQTSVFQWPPFLLASKIPIALDMAKSVKKKDDELMKRIKQDPYTEYAVIECYDTLLDILYSIIVVQSDKKVVDRIRESIKDSIHRKSLVKEFRLDELPQLSAKFDKLLNLLKEYDENDPVNRNTHIANLLQDIMEIITQDIMKNGKGILKDEGQKQQLFAKLNLDSLKHVAWREKCIRLQLLLTTKESAIYVPTNLEARRRITFFANSLFMRMPRAPPVRSMMSFSVLTPYFKEEVLFSPEDLHRKNEDGISILFYLRKIYPDEFRNFLQRIDFEVKDEEELKDKMDEICNWASYRGQTLTRTVRGMMYYRKALEIQCLQDMTDPAKVDRDRSIGSYQELQYDIEMAQAIADIKFTYVVSCQVYGMQKKSKDLNEKRRYQNILNLMIMNPSLRVAFIEEIEGLTRNGATEKTYCSVLVKGGEKYDEEIYRIKLPGNPTDIGEGKPENQNHAIIFTRGEALQAIDMNQDNYIEEAFKMRNVLEEFESRKYGKSKPTILGLREHIFTGSVSSLAWFMSNQETSFVTIGQRVLANPLKVRFHYGHPDIFDRLFHITRGGISKASKTINLSEDIFSGFNSTMRGGNVTHHEYMQVGKGRDVGMNQISSFEAKVANDLTSTECYLSILLQLGSILVAWLLYLLSMCFYMGGFIWL

SEQ ID NO: 57881 - protein, 1270 aa, Zea Mays
MTLLLGPPGAGKTSLLLALAGTLPSSLKVTGNITYNGHTMDEFEARRSAAYVSQHDLHMGELTVRETVNFSARCQGSGHRYDLLVELSRREKDAGIIPDKETDTYMKAAATGDQKADVVTNHILKVLGLDVCADTIVGNNMLRGISGGQKKRVTTAEMLVTPGRAVFMDEISTGLDSSTTFQIVNSIRETIHIVGGTAVIALLQPAPETYDLFDDIILLSDSQVVYSGPREYVLEFFESVGFKCPQRKGVADFLQEVTSKKDQRQYWKHGDDTYRYVPVKEFAEAFQSFHVGEAIRNELAVPFDKSTSHPAALKTSRYGASVKELLKANIDREILLIKRNSFVYIFKAVQLTLMALITMTVFLRTNMHRDSISDGRIYMGALFFGVLMVMFNGLAEVGLTIAKLPVFFKQRDLLFYPAWTYSLPSWIIKTPLSLLNVTIWVFITYYVIGFDPNVERLFRQFLLLLLMNEASSGLFRFIAGLARHQVVASTLGSFGILICMLLGGFLLARENVKKWWIWGYWISPLMYAQNAISVNEFLGSSWNKQVIPGSAEPLGKLVLESRGLFPEAKWYWIGVGALLGYVLLFNILYTICLTFLKPFDSNQPTISEEALKIKHANLTGEVLEASSRGRVASTTTTGTLDESNDEAASNHATVNSSPVNKGMVLPFVPLSITFDDIRYSVDMPEAIRAQGVTETRLELLKGISGSFRPGVLTALMGVSGAGKTTLMDVLAGRKTSGYIVGNITISGYPKKQETFARVSGYCEQNDIHSPNVTVYESLAFSAWLRLPADVDSSTRKMFIDEVMELVELLPLKDALVGLPGVSGLSTEQRKRLTIAVELVANPSIIFMDEPTSGLDARAAAIVMRAIRNTVDTGRTVVCTIHQPSIDIFESFDELFLMKRGGEEIYVGPLGMHSCELVKYFEGIEGVNKIKDGYNPSTWMLEVTSTMQEQITGINFSEVYKNSELHRRNKTLIKELSTPPEGSSDLSFPTEYSQAFLTQCLACLWKQSMSYWRNPPYTGVKYFYTTVIALLFGTMFWGVGRKRDSQQDLFNAIGSMYASVIFMGVQNSGSVQPVVSVERTVFYRERAAHMYSPLPYALGQVVIELPYIFVQSLIYGVLVYAMIGFEWTADKFFWYLFFMYFTLAYYTFYGMMVVGLTPNYNVSSVASTAFYAIWNLFSGFLIPRTRIPVWWRWFYWICPIAWTLNGLVTSQFGDVTETFSDGGVRISDFVEDYFGYHHDLLWVVAVVVVAFPVLFALLFGLSLKIFNFQKR

SEQ ID NO: 57882 - protein, 908 aa, Zea Mays
MAAAFSAAILFHLLLLLFSPSAAQPGFISLDCGGARDHTDAIGIQWTSDASFVSGGQAAQLLVQNGLQQTQQQLTTVRYFPADNRKHCYTMNVRNRTRYLVRATFLYGNFDNSNVYPKFDISLGASPWSTIVVDDATTPVVEEAIILAAAPTLSVCLSNASTGQPFISTLELRQFNGSLYYTTDETRFFLGLSARINFGAGSNDSVRYPDDPFDRIWESDSVRRANYLVDVAPGTERISTTKPIFVGTNEEPPEKVMQTAVVGQDGSLNYRLDLEGFPANAWGVSYFAEIEDLAPNETRKFKLEVPGMPALSKPTVDVEENAQGKYRLYEPGYTNLSLPFVFSFGFRKTNDSSKGPILNALEIYKYVQITMGSQDANIMASMVSRYPQEGWAQEGGDPCLPASWSWVQCSSETSPRIFSITLSGKNITGSIPVELTKLSGLVELRLDGNSFSGQIPDFRECGNLQYIHLENNQLTGELPSSLGDLPNLKELYVQNNKLSGQVPKALFKRSIILNFSGNSGLHIVSNGISHTIIVICLVIGAVVLLGVAIGCYFITCRRKKKSHEAAPAKKLGSYFSEVATESAHRFSLSEIENATGKFERRIGSGGFGIVYYGKLADGREIAVKLLTNDSYQGIREFLNEVTLLSRIHHRHLVTFLGYSQQDGKNILVYEFMHNGTLKEHLRGADNEKITSWLKRLEIAEDSAKGIEYLHTGCSPTIIHRDLKSSNILLDKNMRAKVADFGLSKPAVDGSHVSSIVRGTVGYLDPEYYISQQLTEKSDIYSFGVILLELISGHEPISNDNFGLNCRNIVAWARSHIESGNIHAIIDESLDRGCYDLQSVWKIAEVAIMCVKPKGAQRPPISEVLKEIQDAIAMERVLVSNCSNRMGSGSVEQNGGASFDELLMQPGLR

SEQ ID NO: 57883 - protein, 525 aa, Zea Mays
MCVILTRYCVPTTISERPRQRTSVPRAAATAIYPGSLLLSTQPRRPPSTGRHLSWTPALHATPGSPASAPHPPRQLSLRPVAPHDSPGPVVRTGTGCTVVGAEPEQPRRHIYSGLRTSLGLNPSGVWILPFHTISASPLPARWPWSGGKRGDYKELFVMALPKDGCLDGAKITEVGGVGYKELLVMALPKDDSIDGAKVAEAIGVKLPDVGGAIRTILNSREAREFASGALAGAMSKAILAPLETIRTRMIVGVGPRHIFGSLVDIIQQNGWQGLWAGNTINMLRIIPTQAVELGTFECVKRSMAEAQEKWKEDGCPKIQLGNMKIELPLHLLSPVAIAGAAAGIAATLACHPLEVIKDRLTINREVYPSIGLAFRRIYKTDGIGGFYAGLCPTLIGMIPYTTCYFFMYDTIKTSYCRLHKKSSLSRPELLLIGALSGLTASTISFPLEVARKRLMAGALQGKCPPNMIAALSEVIQEEGVMGLYRGWGASCLKVMPNSGITWVLYEAWKDVLLADRNKPRSLAN

SEQ ID NO: 57884 - protein, 770 aa, Zea Mays
MEPRVPCVDGGGDGLELRAARRHRREGGRIHVLDAQILEPQRQRSNPFRNIFHLLTQREVLPRTKHHAKRIWNNSPKYDPHLIELRFSDADAKLGILSWAESLSLHRWSAKYCPLLPPPRSTIAAAFSPDGKSLASTHGDHTVKIMDCHTGKCVKVLSGHRRTPWVVRYHPLHSDILASGSLDHEVRLWDANTSDCIGSQDFHRPIASIAFHGRGEILAVASGHKLYIWNYNKRDDASVPTIILRTRRSLRAVHFHPHGAPYLLTAEVNNIESADSPLTLARSSGYSNYPSALLVSNTNSRFCPLPESNVTSPCLLWPAYLRDDGILHVLGNASSSTIVQQRSSLVQPSTSDTANLQLEQFATPMDVCPGEPTSFNNISDAVTVPTSNAIEMHGAGGQSNPRLQGSSSISNLERFSARDALQVSSLSSIEPIPSTAGSSGSNSRRAMPLNMLLTGGLDVQMFQRNVGSGQQDHFLFGDSSNWEVPFVQGFLMTQNHTGLHPALVNNNVLEDLSGAGTAGINNSTRESSHMHNFGRPGASSSIPLTSGSSRRPNRHYASRSVPGVGSLLLVGPQIDEAEAHAASLGAGSEITASMLAPGTELPCTVKLRIWRHDINEPCVPLAPEACRLTISHAVLCRFGDILASRAIRAAHCLTSIQFSPTSEHILLAYGRRHSSLLRSIVVEGENGIPVYTILEVYRVSDMELVRVLPSAEDEVNVACFHPLPGGGLVYGTKEGKLRILQHNGANMINMGSGCFIEENMVEIQRYALEC

SEQ ID NO: 57885 - protein, 72 aa, Zea Mays
MDLPSSKLSWHKRSTSGRLGSGPSSEATGFGSTVPASSSNTVNKTIHQQWFTNCSVSFSNIIITCDFRNHFD

SEQ ID NO: 57886 - protein, 198 aa, Zea Mays
MLKKRKGQMKLEIMVQLARMILRRKKIPLVMQKKKNKHANVKSNHDTADAVVEFLSDSKYDAPLKLKKKSKKKKMESSGPAVVYESSVVTEDAGASKLKKKKRKVKGGKVSAGITDAEEILHENQIEETSADVNQLAALSEDVDNEEPQKLKRGKKMEVKKSGKAKKKDKHASRKDNNNLERHVDVSTANADENMRFH

SEQ ID NO: 57887 - protein, 56 aa, Zea Mays
MSCAPPSGWVVTEWTVDADPLVMGTRVRGFSRPGLLFRSLLNIIPGGRSFSPGRVF

SEQ ID NO: 57888 - protein, 332 aa, Zea Mays
MRSNGQPVYNFCVTVDDATMQISHVIRAEEHLPNTLRQALIYKALGFAMPSFAHVSLILAPDRSKLSKRHGATSVGQYKNMGYLPQAMVNYLALLGWGDGTENEFFTIDDLVQKFTINRVNKSGAVFDATKLKWMNGQHLRSFPHDELIKAFEDRWTDTGILQESESGFAKEAAELLKDGIDLITDADAALTNLLSYPLHTTLSSEEAKPVVQDKISEVAWSLISAYDSGELGQALAEGRDGWQKWVKGFGKSIKRKGKGLFMPLRVLLTGKLHGPDMGGSIALIHKAGVCCAVTPQSNFVTLDERFRMLKDVDWESLAKEQETPAVPAAAS

SEQ ID NO: 57889 - protein, 294 aa, Zea Mays
MAPVSPAAAAAAVSASHHGRHLLPSSPRRLPRPRPRSRPHLRLAACHADTLLPSSSSEARAAPGPAVEPSSESATDCFVDWLRARGLPPGKVDIRERPVPCLRDGKDQPLRYVSAVVDLQAGDVAFEVSMSLVVTLERVLGDESIAELLTNNKLSELACLALYLMYEKKQGKDSFWYPYIKELDRHRGRGQLAVESPLLWTESELDYLTGSPLKDEVVARDEAIRREYNELDTLWFMAGSLFQQYPFDIPTEAFPFEIFKQAFVAVQSCVVHLQEICASLGYLQQISYQSITSP

SEQ ID NO: 57890 - protein, 322 aa, Zea Mays
MEATPSLACANKCVFCWRHHTNPVGKSWKWKMDDPLDIVNAAIDQHTKMVKQMKGVPGVKPEKLDEGLSPRHCALSLVGEPIMYPEINALVDELHRRHISTFLVTNAQFPEKIKALKPITQLYVSVDAATKESLKAVDRPLFSDFWERFLDSLKSLHEKDQRTVYRLTLVKGWNAEEIDAYAKLLDLGQPDFIEIKGVTYCGSSATSKLTMENVPWHSDVKEFSEVLASKSGGVYEVACEHAHSCCVLLAKVDKFKINGKWHTWIDYDRFHELVTSGKPFNSRDYMAMTPSWAVYGAEEGGFDPDQSRFKKERRHGTAALRS

SEQ ID NO: 57891 - protein, 108 aa, Zea Mays
MINSQSGPGLLFPKGGWENDETVEEAAAREAIEEAGVRGDIVHFLGSYDFKSKTHQDACCPEGMCRAAVFALHVKEEALLTGFSDWHDKWSIGDGGGGGANCVTRPNC

SEQ ID NO: 57892 - protein, 635 aa, Zea Mays
MASNMQSSGLPQPPRPPMMGSSAQPQNLGPPMPMQFRPVMPSQHPPQFMPPAAQQFRPVGEPMAGANVGMPGQMPHFPQPGQHLPHSNQVPPVSQGVPMVYQPARPMSSAPMQQQQQTAYAGGHLPTMGAPMQPLTYTYQPTSIPPVAQPWSTGPGQSVHHVPPLVPSGHQPVSAPTTLPPVNLSEPSSSDWQEHTAAEGKKYYYNKKTRQSSWEKPVELMTPLERADASTEWKEFTTPEGRKYYFNKVTKQSKWTIPDELKVARELAENASNQQPDRESGIATSALVRSAAFEPSTAPANQSSSAVGIIASSAHDGSSNSVLSGPPLPHNVENTSSSIVGMQNGGSSTAVVPVAASTEVPLVATDAGSSRNNDENSSLTTGADAEDGTSAEDLVEAKKTMPVAGKINVTPVEEKTSEEEPVVYATKMEAKNAFKSLLESVNVESDWTWDQTMRVIINDKRYGALKTLGERKQAFNEYLNQRKKFEAEEKRIKQRKARDDFLAMLEESKELTSSTRWSKAILMFEDDERFKAVERPREREDLFENYLVELHKKEKAKAAEEHKRYVAEYRAFLESCDFIKASTQWRKVQERLEDDERYSRLEKFDRLDIFQVIIFLTFCQLMLFYGSGSIIRFVY

SEQ ID NO: 57893 - protein, 61 aa, Zea Mays
MSKSIMSPGYGPWNHFIDRTHDESAPSKIRSWNPSRPMGRLDAEKRKAIEGFGTTHPCNQI

SEQ ID NO: 57894 - protein, 144 aa, Zea Mays
MGEPILSGLDIPTKLLATKNKAVVQAELAVEGLTWHVTCVSMGNPHCVTFGANELKVLQVDDLKLSEIGPKFEHHEMFPARTNTEFVQVLSRSHLKMRVWERGAGATLACGTGACAVVVAAVLEGRAERVLGTKIEGLAATQSL

SEQ ID NO: 57895 - protein, 170 aa, Zea Mays
MRGQANGVEDRRQRGDDHEADNDGEEAEEEEGDDEGRHRGQGPPQQRRHQAQRPYSGPQQQQQPRPPPPLARNVGYVGKHRLSAAIARLDQELQSLQILLVFCLPMQEELDELETMESASAACQEVVTSTEGKPDPLLPVGPENSSWDRWFQRVRSRSNKWWASKGPDFS

SEQ ID NO: 57896 - protein, 679 aa, Zea Mays
MYCAVRFQAHEPKDGGEGGTTHDVGTKGSELEDTIKHEQLVSSVVLPADLATDQVKIDADLSSSKAVESTVKQRDETAELPGKGASVLYCVLPGRSSDSAASTSSRQDQDSVDVLPSEGTGELYCLLPPRNGHSVRSSGDSKRSNASQRDDRPANPSPEGDGDLDCRLPRSGRPSRSSSAVSMEAEDSPKDAARNAETPSSSPMSLRRMIEGRSDRSRLPRRIFRHHRSSSLEWAKISMVQWATRLPSRYTSVHTDSRSLKQDTSPRLNCGSEPTTTAVEPESSSMFSFAFYGVAWPPSELESLREKYSSVCRLFSYEELKLATGNYSPDMLIGKGGTSQVFKARLDDGTFCAVKILKPSVDAVHEFVTEIETVSSLQHENIVALRGFSFENYNLVLAYDYMPQGSLDRALHGKNGGTEFLVWERRIRIAIDVARAVEFLHLGGVTQSVIHGDVKSSNILLSEDFGARLCDFGLAKRVSASTPHLTCTDITGTFGYMAPEYFSHGTVNEKIDVYAFGVVLLEIISGRRPITPGSTKGQESLVGWAKPLLCGGGIRELVDPLLGRNEYDCDEMERMTLAASLCTRTSSRSRPEMSLVLRLLQGDDEAIGWARAQVTASFDGSDEEAAAAAPDLNMQSHLNLALLGVEVEDDDTLSQSQSQCSSTVDTSADGYWSRSSSFD

SEQ ID NO: 57897 - protein, 267 aa, Zea Mays
MQAPVVLGNVTDRTCCHFNYNSTWASACVDAYIGTMQETRQQKDVEKETNEIARLGFIKTSSSQKVGRGEQKTVLGQRSKITATMWQQSSGSMAGTNDLQRMEMIRLARGAASRMTTPRSKEASQLPEVSLLQLRSGERLLIPAWEEVLKEFGHSSDPDERGRLSWLYGRVGHIIKLGREGDDLQCTRHLGWPWRLRPPRTTSSLFVYDGTRAARSIMEAGGEWRVDGVPHGERMSSILIYAEGRTRTTARASFFLFLCFSLPNLLL

SEQ ID NO: 57898 - protein, 194 aa, Zea Mays
MGMRSRHPKALGFRWYPAATHRSLTLVLWSLAALVVVVNFHLLIIHKEEGENMSTHEIRRSIMRELEVVEEEKFRLAPPRSRRNPRAVRRKGEKKSPTIVDEFLDESSAVHDMFFPELNTAVDPINGGNDSMYFYYPGRIWLDTDGKPIQAHGGGVLYDKRTNTYFWYGENKDGKTYKAHSKGADRILLVRPNF

SEQ ID NO: 57899 - protein, 861 aa, Zea Mays
MGQSLRDLENDRADFQSTPHDPHSVAGEANLLQHNVPRDSDLSPLGLLWSELEGRPKQPLSSNVLSVNERRNPKPTTPKDIPPVNMRQGPLSRMNEVSSVRDEWPANFGRLDNMNDANISGRIHQVEAEHHLNFDGHLLLQQIRREQQQQRQEQLMAHNNLEFSGAFPGQVFDPLNQHRQPMNQQIPDVEHLLRIQFELEQQQQRQLQQEQHQRQLQQQRQAQLLQRQQQQQQQQQQQMILEQLLQQQLQGSNFGPTSMVDQVLLREHVLNELHQQPHHLQRQHDAAIEQLIQAKFGHGLHREHHNDMLDVLSRSNQRQMLPLEQQLLLGLQHEQQLKSQQLANALRQHSGQEEERHLSGVWPMDAAAQFIRSGTSPNQIHSRFDLLENLQRSSSFDHHEHLDRSLSLHEQLHMGGQGIRSLERTGSLPGGGPGPNPDVINALTRHHGLSQLETHGDVYPLVQMPMLPSGVHPQQLRHQDQLPGSHIGRLERHWSDANGQLQNSLMESSHINQLQIEAEKERRNVEMNLSVDNPHAWGALMNKDRNTEQDLTDMIHKKLVLQSQQSRGFPDVSVPASFRRKDHFVQPVVESPLRSVDMSFEESLSERSLYAKSGQLAQEGSSNLGTLPNSIENTGKFNLRSGSGSMLEQKHFLGIDDVQSDFLETTGGRTSANQLVGSVNELTRGKRQGSSASLAGDDPNLADEGVSKWSDSGMSKGSSHSLLKRSTNQHTTTSQSVPTDLSAIRLKKAGLASSDENKMEAGFASVAQGMEGCVPSNKETGAYGMPSATNNPDASGQSFSEALKSSRKPPLQYDASESADCGPGGKGAKKKTKKGKQIDPSLLGFKVHSNRIMMGEIVRDD

SEQ ID NO: 57900 - protein, 257 aa, Zea Mays
MATPTTEQVHKSHLWFSWHATLKELVKGPLLLENTVVEEEDLKGAHHLTALAEGSVRAQGNAEGSVRVQGIEGSGLAQGIEGSGLAQGNAEGSGLVQGTAGRGLAQGTAGGSAHAQGTAEGSAHAQGTGGAVHPMAEGIEIGPGHPPAMGTIRQTRKRFYGLVVDCVNKGTCNTTYKLVRLRRLAWIFSSVAVFCCFIQVLYSVSFRIEMSDDDGCYCSGNRRHVLQNTYETMAYSCVCLRLLWYVLILRLTRCTVD

SEQ ID NO: 57901 - protein, 161 aa, Zea Mays
MSSGGGGGQQFRYTQTPSKVLHLRNLPWECAEEELVELCKPFGRIINTKSGVGANRNQAFVEFTDVNQAISMVSYFASSSEPAQIRGKTVYIQYSNRQEIINNKSPGETAGNVLLVTIEGVQASDVTIDVIHMQAHVNWRKCRYQHLQWERYHVCFAASVF

SEQ ID NO: 57902 - protein, 62 aa, Zea Mays
MYYMSQPFHALTNNLAFGMGFSFLYHYVFMCTSREYNFLHVGDEMLQSKSLDRDSYVFGDQE

SEQ ID NO: 57903 - protein, 51 aa, Zea Mays
MYHQNNILIASISMDAKQTWLFAMEASDKIWWLVDLLKNQKSDKVDITIQP

SEQ ID NO: 57904 - protein, 297 aa, Zea Mays
MGKAFDELENRRKDKGTLSTSDYDDVFENVIRKDLNIRGYYDDTYWSNGTYSHVQSEENKMIRRDLELAISGFRNIRAFLEKKFPEEELLSTILATGSRSTTQVDTKDNENVSLQYDNVERSSYEKSPSPYNEQIYTRDYNIAKVGCSDHSVPNDNIAFRESQVTRSSDLNQELNNGSLSPDKEMSDKETQSKQQQQSKLQQNKQKTVLLYSTRKRKLGQVVAVGNLISRDTTHEIGGTVLGDGYYAVAVHYLNNVEDERLPRPHGDLKTLEDAVGMCVAWPRTHLKRVKPTTEKRT

SEQ ID NO: 57905 - protein, 173 aa, Zea Mays
MEHCYLRQPISRAEAVPERRSRLWQMDALPLPPRAEVLCPQPRRAARIPFAVSVNKAIPSALPPYRPASACDILDDLILSKNDFSDGADSSSGQAGFLCGSPPVRANNPVVHDPQFGKRALPSMSPLGSSSHVKLKVEAGSPSCGVSSSPKVRIEGFACGNSETHYAVTPLLV

SEQ ID NO: 57906 - protein, 579 aa, Zea Mays
MEEPGREGDSPGPPWAPSESSAFRAFVTAVGERAVASPSGSDNGDSVCSSNLRAVRKRPFVARLTTYIIQTFEKCNPEFKYSESLNPKRFLTNPAVPVHNHGLDNANSDLILYVNLELLNKKSSRRYVVQEMLGQGTFGQVAKCWDAETNSYVAVKVIKNQPAFYQQAIMEVSLLRLLNEKFDPDDEHHIVRMLDFFLYQNHLCIAFEMLGNNLYELLKRNSLRGLQMKYVRTFSRQILDALIIMKDAGIIHCDLKPENILIAPTVKTAVGVKVIDFGSVCMEGKTIYSYIQSRYYRSPEVLLGYPYTTAIDMWSFGCIVAELYIGLPLFPGASEYDVLCRMIEIIGGQPPDDLLREAKNTGKFFKHVGSIYPSSEARNGASSAYRILSEDEIEARDSKKPKVGRWYFPRGRLDRLIYTYPWKNLSEGNLPETEKADCLALVDFLRGLVEFDPNKRWSPLQASYHPFITGEAFTGPYEPVQETPRIPVGRAAVVDHNPGGGHLLGAGLSPQKWTPISCIISGREYTYSRSCHIGWIRTHNLFSAKFPNLSWATISAVQQHDFQLHPTDEGSSQWSACLV

SEQ ID NO: 57907 - protein, 346 aa, Zea Mays
MVFIKQNRLLRKFLHLVGLLLLYKRLDRKKIADVLAMMEKEDVKPSLFTYKILVDAKGSVGDIEAMEKVIESMEKDSIEPDLTFNATIARHYIFYGQREKAEALLKAMEGDDIQKNRAACKTLLPLHAFLGNSDAVERIWKACEDNTRVAESVSAIEAFGKLGDVEKAEKVFEDMLVHWKTLSSKFYNALLKVYADHNLLDKGKELAKRMDENRVRFGAPTLDALVKLYVEAGEVEKAESLVHKLSIQNHIKPIYNTYMTLLDSYSKKGDVRNSEKVFNKLRQSGYTGRIRMYQVLLHAYVRAKAPAYGFRERMKADNIFPNSVVSTLIAATDPFVKKKSISDLLD

SEQ ID NO: 57908 - protein, 193 aa, Zea Mays
MESRAASKNVDVAVMPPNSDNAMVPVDGVSPSSSTHPSLAHPNTSANILIPNSLRTLRVYLRTHALDQMVQAVGASAGLRVIKRVDQTLQELAVNLKPKVPTKAVCIEHIELRNELLTLLNLQKQLQNKEAEVSANRESSFTEAPSTPKRSNRDIDRPFIPDTSGFTGERAGKRDHKRKIYRCASITTPVEAA

SEQ ID NO: 57909 - protein, 225 aa, Zea Mays
MAAPIHARLLPLPLHPNPSPSLHASGTRRVPWPPRHRRRCFATPPSRNGSSSSPEIDWCPVPPDQLPVNEYEALAASLPFSWAAGGLRVYCSRLALTGAAVALFVGLPVAAFGGRGGAGGDALHLALGATGSGILAVTLAVVRMYLGWAYVGNRLLSATVEYEETGWYDGQIWVKTPEVLARDRLLGSFSEPYGNTGGRSIPGVYSDAAARSFEPDAFCGEPDLS

SEQ ID NO: 57910 - protein, 620 aa, Zea Mays
MRYKEALSSASCPSCGGPAALGEMSFDEHHLRVENARLREEVDRISSIAAKYVGRPMVPFPVLSSPLAGAGARAPALPPLDMAPPYGAAADMFGGGGVVAAAGAAGAGDLLLRGAAVQSDADKPMIVELAVAAMEELVRMAQLDEPLWNAPAGLDGSAEEETLNEEEYARLFPGGLGPKPYGLNSEASRDSAVVIMTHANLVEILMDVNQYAAVFSSIVSRAATLEVLSTGVAGNYNGALQVMSVEFQVPSPLVPTRESYFVRYCKQNADGTWAVVDVSLDGLRPGAVLKCRRRPSGCLIQEMPNGYSKVTWVEHVEVDDRSVHSIYKLLVSSGLAFGARRWVGTLDRQCERLASVMASNIPTSDIGVITSAEGRKSMLKLAERMVMSFCGGVTASAAHQWTTLSGSGAEDVRVMTRKSVDDPGRPPGIVLNAATSFWLPVPPKRVFDFLRDESSRSEWDILSNGGVVQEMAHIANGRDHGNCVSLLRVNSTNSNQSSMLILQESCTDMSGSYVIYAPVDVVAMNVVLNGGDPDYVALLPSGFAILPDGPSSGSSSMLQGDGGVGSGGSLLTVAFQILVDSVPTAKISLGSVATVNSLIACTVERIKAAVISGQSNPQQQ

SEQ ID NO: 57911 - protein, 617 aa, Zea Mays
MLNTDAHNPMVWPKMSKSDFVRMNTASDAEECVPNELLEEIYDSIVKEEIKMKDDSHDTSKSTKRPETEERGRLVNILNLALPRLKSASDTKAESEKIIKQTQALFKNQGQKKGVFHVAQQVELVRPMLEAVGWPLLATFSVTMEEGDSKPRVVSCMEGFRAGIHLTRVLGMDTMRYAFLTSLVRFTFLHAPKEMRSKNVEALRTLLGLADTDMDALQDTWNAVLECVSRLEYITSNPSISATVMLGSNQISRDSVVQSLKELAGKPAEQIFVNSVKLPSDSIVEFFTALCGVSAEELKQTPARVFSLQKLVEISYYNMARIRLVWARIWSVLAQHFIAAGSHNEEKVAMYAIDSLRQLGMKYLERAELNNFTFQSDILKPFVILMRNTHNSKIRGLIVDCIVQLIKSKVGSIKSGWRCVFMIFTAAADDEDESIVESAFENVEQVILEHFDQVVGDCFMDCVNCLIGFANNKCTPRISLKAIALLRICEDRLAEGFIPGGAIKPIDVVPEANFDVTEHYWFPMLAGLSDLTLDSRPEVRHCALEVLFDLLNERGHKFSSPFWESIFHRVLFPIFDHVRHAGRDGLSSSGDDWLRDTSIHSLQLICNLFNTFYKISH

SEQ ID NO: 57912 - protein, 240 aa, Zea Mays
MSFREGRRRLLLVLLFLGCRQAAARSHGRRRPRFPLFRGEHEHEHQRRPRPDAFPRDSPLQIDLSTAILTLSENGELQRIHDKWLKTGDCSTDNAEFVDSNQLRLESFMGLFLICGAACVLALLIYLGITIRQYLRHEQPEKEREGWKWDIPFLVPFQASTCAFFMDNDDDDYEAAVVGAPFRTLHSSSTLPWLPPPCLPEPCTAARSPRLRRATLRRRPSPPAPSPGGEQPCGSSPPGS

SEQ ID NO: 57913 - protein, 432 aa, Zea Mays
MIASHVLGALWYLLSVDRQIACWKNFCDETDCHTRYLYCDVKPDSMWNGTSVFSTCNAKNSTKFDFGMFQPLLANKTPNESFLKKYIYCLWWGLQNLSCYGQTLTVSTFIGETLYAILLAVVGLVLFAHLIGKVQTYLQSITARVEEWRLKQRDTEEWMGHRQLPHELRERVRRFVHYKWLATRGVDEESILSALPTDLRRDIKRHLCLYLVRRVPLFSQMDDQLLDAICERLVSSLSTEGTYIVREGDPVTEMLFIIRGKLESSTTDGGRTGFFNSITLKPGDFCGEELLGWALVPKPTVNLPLSTRTVKAVLEVEAFALQADDLRFVASQFRRLHSRKLQHTFRYYSHHWRTWAACFIQHAWRRLRRRKMAKDLSLRESFSSTGPYEGDGDDASSPEQSITLRRGAGSIIRELPKFRKPSEPDFSAEHDD

SEQ ID NO: 57914 - protein, 884 aa, Zea Mays
MPPWWGKSSSKEVKKSAKENLIDTFQRLISSNEQKGSRKSRSSRRHGKDTAGDKGCWSTAQSRSTSPSKEVSRCQSFAADRPHAQPLPLPKSRAKVTRTSSDITNSKSTLEKHGKGQLLPLPPIQPKKRPEATEPVTEVATASVSSNCSIDSDDPGDSQLQSPVGNEAENATRITATSSSSVVRKECSSAITRKNTKEVAKPNSAFLSNQILSTSPRGTFADGYQSNLQSPRQIALESAPNSLMSSPSRSPRNICPVQIPTSAFWAIKPHTDVTFLGSGQCSSPGSGQTSGHNSVGGDMLGPIFWQPSRGSPECSPIPSPRMTSPGPSSRVHSGSVSPLHPRAGGVTPESPTNRHAEGNKKQTHRLPLPPLSIANSSTFLPNSSNPTSPISRSPGRTENPPSPGSRWKKGKLIGRGTFGHVYAGFNSDRGEMCAMKEVTLFSDDPKSKESAKQLCQEISLLSRLQHPNIVRYYGSETVDDKLYIYLEYVSGGSIHKLLQEYGQFGEQAICSYTKQILLGLAYLHAKNTVHRDIKGANILVDPNGRVKLADFGMAKHINGQQCPFSFKGSPYWMAPEVIKNASGCNLAVDIWSLGCTVLEMATSKPPWSQYEGIAAMFKIGNSKELPPIPDHLSEEGKDFIRQCLQRDPSSRPTAVDLLQHPFVQNAPPLEKSSASHPLEQLTAISCRTNSKVVEHARNMSSLGLEGQSILQRRAAKFSLPNSPRTTSGASTPLTGGSGAVPLNHVRQPAYRNEGFTVTSRGFDDHMPSRPVDPVHGRFIRVQQFSVGRQERVVSEVDILSSQYGKMRHANVWDPHDRPLPSERSSQQCFGNHAKLKPSLDLRSDADSWQWIKILKCQSHIPITLKKMRHALSGRGCCILKDPKQ

SEQ ID NO: 57915 - protein, 355 aa, Zea Mays
MLSHSKRRLQLPEPIEKEKGVSLWSMIKDNVGKDLTRVCLPVYFNEPLSSLQKCFEELEYSYLLDRAYECGLRVSHHPMVMACHCEGKGWKFWGDSNLKSKFWGQSIQLDPNGVLTLEFDDGEIFQWSKVTTTINNLILGRVYCHHHGTMNISGNRRYSCKLTFKEQSFLDRNPRQVQGVVKDAGGSKVATLTGKWDESVHCVINNDASKVNSHGPHQSSGSTLLWEKNEPPVNPTRYNLSAFAITLNELTPELEEKLPPTDSRLRPDQRHLENGEYEKANAEKLRLETQQRMARKMQESGWKPRWFQRDSEDGTYRYVGGYWEAREQRTWVGCNDIFGNLSSSQKLPPSALYTS

SEQ ID NO: 57916 - protein, 1811 aa, Zea Mays
MSQRGDRGEGHARRPGRSSSFGGHRGGGVGGAGKGGAGSSGQPPLSTNRSFRKPGNGHGGQQRVVNQPDTTGFQPAPAPAPHQTPARPPPAPQNAAVHVPISAPWPQPQGPQVSSSSAASDRPANPPLPKATHAAPRAPPKSSNPPLPQGGSKGEPPKGFNFQFGSINMNGLPQFPARTSSAPPNLDEQKRNQVLVEELKVTPTPVQPTPKQQLLQQHPHPLQKQQHQLPQLSHQPQQPQQQSTRKETVGSSQPNSINPHTTSQLKRDVHPSPSVPNVTSVRPTVQQMPGVQMPIPFHHQPAQVSLQFGGHGAQLQPQVVPSSFQMSMGLTGSSTPQVPQQLYAPTLQHHQLQQQAMMHPGQGMGYVPSVAHQFPQLGSIPMNIASQYPQQQPNKPAAARKAIVKITHPDTHEELKLDKRMDSSGQRAAPSIAQQSQPGVNYAPHLGFFHQPPNSYNQSGMYYSTTASVNQVATGSSGPRYNYPVTQSAQAMTYISPSAAPPVSGQSQYTVKPHPMGLLSEKSGTHVTISAPPAKSDPPKLHAAGDAASSLKKDNEVVSGITVLNKPTLERESNDPLVTVKHSTVISPSLPIHGEKPQTLVTSSPVANSVSPVTGADGKSKEPIQRSGSFKDSKKNVTKKDVRNSYEPPNPTSFVEDKVQTVKVGDGDLQETKKLNNELDLTNSSSAPTVPLAVSTENADSTAVTTADVPGTDTSSRRPSSEGTGEPGVESFTVSAVECDESKRTHKVVKDPSKDNISSDATKHELPKECAVDSTEQASAVTSNTDDSYAAPLVTNQEQLLKGSASEKQAVMNNSSMNSDTSAHFFDGNDVGVTTSGTSEPTAQTSNDEGDSDISPETDLAVYNVPLGSSELQLKSESRANDQQPAAPTVSVRPVSREKPSTKSTAGKKKKKKEMLAKADAAGSSDLYNAYKGPEEKSEVVGTVEGADNSSTVDTTHVLSDELEKDPSTSADDCKKKVELDDWEDAADMSTPKQPSDSGNQASITQVLDSDVTEANSRKKYSRDFLLTLQHHYTGLPFGFQMNEAVNAIMNNLAGKSYVADREPHPSPGRGLDRPTSRDRRGAAMADDRWTRAGVPLSPGRDVHMDLPNGPSVINYRGGPGGNHGVLRNPRSQSSNQYGGGLLAGPMQSVGPQVPRSGSDADRWQQKGLMPSPGTPVQAMHKAERKYVIGKVSDEEEAKQRQLKAILNKLTPQNFEKLFEQVKEVNIDSVATLTGVISQIFDKALMEPTFCEMYANFCFHLAGALPDFSEDNEKITFKRLLLNKCQEEFERGEREEAEADKTEEEGEIKQTKEEREEKRIRARRRMLGNIRLIGELYKKRMLTERIMHECIKKLFGNHDDPDEENIEALCKLMSTIGDMIDHVKAKEHMDAYFSMMQIMSTNQKLSSRVRFMLRDSIDLRRNKWQQRRKVEGPKKIEEVHRDAAQERHAQSSRLGRGPAVSSVPRRAHPMDYGPRGPSASASSSSQQGSIRGMPPHSRGSQDIRHDERHQFDNRTVLPQRVVKDEAITLGPQGGLARGMSIRGQPPVSNTEIPSVIDHRRIVSSSNGYNSAADWTSSSGREDSNSRLPDRTSGRIPASSQSAVTSQRPASQEGRSRSKSYSEDELREKSVLTIREYYSAKDEKEVVLCIEELNAPNFYPFLVSLWVNDSFERKDMERELLAKLLVSLCSGRHNLLSKQQLSDGLSNVLASLEDNLSDAPRATEYLGRLLARFVEESILLLQEVGKLIQESGEEPGYLIQGGIAADILGAVLDSIKSDKGNSFLDEIKTTSSLKLVDFRPQHLKRSKLDAFM

SEQ ID NO: 57917 - protein, 193 aa, Zea Mays
MVSPDLYGDNNTRLFTYWTSDAYQATGCYNLLCSGFIQINNQIAMGASIFPISNYGGSQYDINILVWKDPKEGNWWLQFGNDYVLGYWPSFLFSYLADSASMIEWGGEVVNSEPDGSHTSTQMGSGHFPEEGFGKASYFRNVQVVDSTNNLKPPRGVGTFTEQSSCYDVQDGSNADWGTYFYYGGPGKNSNCP

SEQ ID NO: 57918 - protein, 793 aa, Zea Mays
MSSPLEDVSVGMEEEDQRPLNRALLHRSATTNASQVAMVGSNPCPIESLDYEMIENELFDQNWRTRRKADQVRYVVLKWTFCFAIGILTGIVGFFINLAVENVAGFKHQAVSALMDSASYWTAFWVFAGCNLALLLLASSITAFLSPAAGGSGIPEVKAYLNGVDAPNIFSLRTLAVQVVGNIAAVSSSLHVGKAGPMVHTGACIAAIFGQGGSRKYGLTCRWLRYFKNDRDRRDLVTIGAGAGVAAAFRAPVGGVLFALESLSSWWRSALIWRSFFTTAVVAVVLRLFIELCGTGRCGMFGRGGLIMYDVSTVFDDLMTYHLKDIPTVILIGVTGALLGGLYNFLMIKVLRLYNAINERGGAHKLLLAATVSIVTSCCVFGLPWLAPCRPCPTTGPLSSPDGTCHALNRFRRFHCPKGHYNDLASLFLNINDDAIRNLYSTGTNDVYHPVSMVIFFVASYALGVLSYGVVAPSGLFVPIILTGATYGRLVAMLLGGRSGLDHGLVAILGSASFLGGTLRMTVSVCVIILELTNNLLLLPLVMLVLLISKTVADSFNSSIYDLILRLKGLPHLDGHAEPYMRQLAVGDVVAGPLRSFGGVEKVGNVVHTLRTTGHHAFPVVDEPPFSPAPVLYGLVLRAHLLVLLKKREFLVAPERCPKEYVAERFQAEDFDKRGSGKQDTIADVVLSPEEMEMYVDLHPFTNTSPYTVVETMSLAKALVLFREVGLRHLLVVPKACDRSPVVGILTRHDFMPEHILELHPVLLRSRWKRLRWQRGAMAKYFRSLIVWVANSG

SEQ ID NO: 57919 - protein, 599 aa, Zea Mays
MEVDDDVEEDDIDFNPFLREGSPSETSSSLTSEAECEEHSSENQPSNHTYQQNTVVNENTSDSALPQNRLSSQDAVNEMFPEETSTQVNIENDGHLNGLEKDVLASEAACSPTVQDPHHLSLEISEEDAICKRTRARYSLANYSLEELETFLQESDDDSGLQNVDEEEEYRKFLAAVLSGVGNDTQTFQGDENQDEDDNDADFELEIEEALESDGDENVENYHNTNPRKEKDVRRPQTRQRRPLTGMSGAGSDHQESNKTHLRPIVPYIPSALVTPAHAFGWQYANQNAFFPSSLVSLTRPPLACGFTYQQLGQLHVLIYEHVQLLIQTFSLCVLDSSKQDVANNVKKMIVELVGARDQALARSSPQRHIFFETQHLSSSFVSSDNLERQWIPLIKSPIISVLDVAPLELVLDYLSDVATAVVKYRKSHVDGTADKTRRKEPLFPSAAINSCKQVNNVSQDRSNGVPTASPPSGQLQQKKSLAATLLENIKKDTIALVPADIARLAQRFFSLFNFALFPHKSPPSPMANRVLFTDAEDRLLALGILEYNNDWAAIQKRFLPCKSKHQIFVRQKNRSSSKAPDNPVKVNVLPFIYWKIRC

SEQ ID NO: 57920 - protein, 69 aa, Zea Mays
MPTCLVNPLSAATMEFKAVDLPLDYFAEVHLLCFLGDRMHCELFFCKVFSSLLWKFSACREVYCGLSKV

SEQ ID NO: 57921 - protein, 101 aa, Zea Mays
MWVCAERWKFFTAHFWRQVSRSVPQERPLLIMGISDTGSEFTFALTARIHLRLYHHCSISCYITVETDWKCRNSYVSGSLPLFITCTTSVLNNIYRWLVHF

SEQ ID NO: 57922 - protein, 82 aa, Zea Mays
MVCRRVRCSCIGTEWKDEGAEAPPWLQSSGHLKLERSWKRERIRRCTATKQTFFACMSRRKGHLGTAQLSEMCYNLPLHTEN

SEQ ID NO: 57923 - protein, 128 aa, Zea Mays
MLAASLLALRFLLVGATAAGMGTGTVGVSGGGQLWCVAKNNAEDGALQSAIDWACSVDGGRADCAAIQQGGACYDPPDLQQHASYAFNDYFLRSGGAGSPAACDFSGAAALTALNPSHGSCVFPSRAS

SEQ ID NO: 57924 - protein, 197 aa, Zea Mays
MARKLRELLQKSGNRVCADCGAPDPKWASANIGVFICLKCSGVHRSLGTHVSKVLSVTLDQWTDDEINSMIEVGGNSYANAIYEAFLPEGYQKPHPDSSQEERADFIRSKYELQEFLKPSLRLVSSNKGSLEATSSRKHMDNSVSLSASFSSEAGMVEFIGILKVKVIRGTKLAVRDLMSSDPYVVLTLGQQHCSLQ

SEQ ID NO: 57925 - protein, 186 aa, Zea Mays
MEAEKKPPAVSDVGAWAMNVVSSVSLIMANKQLMSSSGYAFAFATTLTGFHFTVTALVGWISNATGYSVSKHVPLWELVWFSLVANTSITGMNLSLMLNSVGFYQISKLSMIPVVCLMEWVLNSKHYTTKVISAVIVVAAGVGICTVTDVEVNAKGFICACVAVFCTSLQQIQGTVIGSPNFATRL

SEQ ID NO: 57926 - protein, 86 aa, Zea Mays
MLSYLWKIGQKFSKPPSEDTYYSRTRSMLHKLGLEKYEKNFKRGLLNDQTLPLLTDSALRDVKIPPGPRLLILDQIKRDPELVQAK

SEQ ID NO: 57927 - protein, 2202 aa, Zea Mays
MHRYSSNSAGFSGGRDGARLEASPFSSSSSGYPVSSRRQQQLVPYKLKCDKDPLNNKLGPPDFYPQTPNCPEETLTKEYAQAGYKETVEGIEEAREIVLSQIPYFCKPDAVIKCKEALKKRLRAINESRAQKRKAGQVYGVPLSGSLLIKPGVYPEQRPCNEDARRKWIEALAQPNKRLRSLSEHVPHGYRRKSLFEGLIRYNVPLLRATWFIKVTYLNQLQTRQTPNSISVAGSDNQRSNQWTKDVVEYLQHILDEFCSKEGAFVHPSFREQSSPGPTAGTNQIKMKTEASPAAGDIEEPLVHFKWRYMVRLIQWHLTEELLVPSVLIEWLSNQLQERDSVDVLELLLPIMLGLVDTITLSQTYVRMFVELLVRRLNDASVVDSPKGPSVSSVIAELLRYMVLAVPDTFISLDCFPLPSFVVPDVYGRGALLKITSSGGISSSKRCDAYRYLSCGYAVCSIQKRAYDLATVANPNLQARGAAKVVQALDIALVTGNLSVAYSSLFNDLSDTLMEERWIKEVSPSLQSSLMWIGTVELSLICSIFFLCEWATCDYRDCRASPSRNVKFTGRRDLSQIHMAVSILKNKMDEMNNLSRSKSSTRVTLNNITKGSSLTDACLTAAAVDDTSGLQSNAKNVDEKKDTNDIFESPGPLHDIIVCWLDQHEVSSVAGFTRVDVLIVELIRNGIFFPQAYVRQLIISGITDKNDTMLDVERKRRHHRTLKQLPGSSLFDILEETRTVEEQQLYEMMSTYSSERRLVLSELSCDHSFYASGRGEYTASSCIRKQSDLPLASGGDKHGRVPEQVEDVKALLSSLLGFTYPSPVESEPRQIKTSFQESATSTLSQVETGEAKSGCEVCMRSKGQKLDDTATPFQGFSLIQSDEEDIWWVRKGTKLQESFNIEPVQKSVKQTSRGRAKVVRKTQSLAQLAAARIEGSQGTSTSHVCESKMSCPHHKPNIDGDNVKDFDHTRVANLTEIGKSLKRLRLLERRSVSSWLLKTVRQLIEGNETTAAKATNSISILSLQSDDKTTSKWRLGDEELLSVLYLLDTCCDLVSCARFLVWLLAKIRGGMGSSGQPGRSSMHTRNRDHQVCQVSEALVFSSLLRYENILLAADILPDVLSALVNRNSVSAIVRHPGSTAFAYVRYFLKKYRDVAGVAKWEKSFRTTCDQRLLAELDNGRSIDGELISSSGVSAGEEIDEQVRQKLNGRSSRLVQNMKEIVQRQADEIQRSLKEKKVLATPRNPPTFEKEDSYQIAHDIVSGLVECIRQNGGANPDGDLSTVASAVSAIVANAGHVIAKHLDFAGGNYQGVNSVSNSLNFVRHTLRVHINSLCLLKETLGDRFSRAFEIALAVETSGAVTAAFASPKMHRNQFQPSPEAHDAYGNHTSDLSNSGKGFVGRTAKVSAAVSALVVGAVVHGAVSLERMVAALKIKDGLDILQLLRGLKSSSNGVSRPTGTFRIEHSTDVLVHWFRVLLGNCRTVYDGLIADILGDSYILALSRLQQMLPLSVIFPPAYSIFAMVLWRRYIFNREDPQLYQSLSNAISDITRHQPFREICFRNTHRLYNLLASDVGDSEFAAMLETHSPDRNSKILPFIPLRARLFLDALIDCNTPTIQGDGASEPCDPKDNELKLSERLMQLLDTLQPAKFHWQWVEMRLLLDEQALMEKVAAGKTALESLRSLSPKAEGFTLSDSEKGFTEVILSRLLARPDAAPLYSEAVRLLGKLQESLVMDVKWILQGQDAILGRRSTRQQLVHIAQRKGLSTKAQVWKPWGWSSLLSDVIPNKTAKRKLEVTSIEEGEVVDDTVDAKRPSKTPPHSVDRSFEAIRSINKYLTEKALAELVLPCIDRSSADIRGILSVDLIKQMGTISEHIKAIARNGAKQAGSVPSGNEVPSSKSSGRKGIRGGSPNIGRRAPVGNDPSPPSASALRAALWLRLQFIIRLLPVIMADRSMRQTLASAILGLLATRMIYEDADLPLPPTNATALRREVDSLLEPPLDVLLDRPGESLFERLLCVLHALLGSYKPSWLKSRSASRSTIRIQRDFSAFDNEAAEGLQSALDHMELPETIRRRIQAAMPLLPPSRHPSLQCQPPQLSLAALTPLQSSTSGVGPQQKSCSASWVPTNVSGRSKAALPSHDPEMEVDPWNLLEDGTSCPSTASGSHGASGVTGDHANLKACSWLKGAVRVRRTELTYIGSLDDDT

SEQ ID NO: 57928 - protein, 248 aa, Zea Mays
MGQMISGDKSDEQTARDDGIIKNGREILFQAFNWESNKHNWWSILEEKVTDLAESGFTSVWLPPPTQSLSREGYLPQNLYCLDSCYGSLHELKLLLHKMSEHNVRAMADVVINHRIGTTQGSNGMYNRYDGIPVSWDEHAVTSCSGGKGNKSTGDNFDGVPNIDHTQPFVRKDIIEWLIWLRKSVGFQDFRFDFTKGYAAKFVKEYIEESKPLFAVGEYWDSCEYSPPDYRLNYNQGNRFIVAFLLTT

SEQ ID NO: 57929 - protein, 84 aa, Zea Mays
MQLYEEEVGKPSTKSTEIICQADEGIGNGCSRPGKRVLSGLACWHTRHVCTNCFTATHMSVQANSFFILIYVTGNLEWPPNALA

SEQ ID NO: 57930 - protein, 209 aa, Zea Mays
MLEAAMFGGVPEGPTYPFSMPSHRTSTYYPPISHSPSPALTEQRLLREQQDDEYLASLQADQEKELKALQEAELRRLEETAAREAVLEKQKQEEEERRKKQLEEEELESSLTSKQASLPPEPSPDAEGAVTVVVRMPDGSRQGRRFLKTDKLQFLFDFLDIGRTCKPGTYRLVRTYPRRTFTNSEGDVSFSDLGLTSKQEALFLEQITG

SEQ ID NO: 57931 - protein, 775 aa, Zea Mays
MSSAPVAGAAFERYQQRGGGGPAAANGNTVFKSGPLFISSKGIGWKSWKKRWFILTRTSLVFFKSDPSTLPQRGGEVNVTLGGIDLNNSGSVVVREDKKLLTVLFPDGRDGRAFTLKAETSEDLFEWKTALEEALAQAPNAALVMGHNGIFRNDTADTYEGAIPNWREKRPIKSLVTGRPILLALEDIDGSPSFLEKALRFLEKHGIKVEGILRQSADVEEVDRRLQEYEQGRTEFSADEDAHVVGDCVKHVLRELPSSPVPASCCTALLEAFRLETKDARINAMRSAISETFPEPNRRLLQRILKMMHTVASHTSENRMTASAVAACMAPLLLRPLLAGECEMDEVFDMDGDDSAQLLAAANAANSAQGIVATLLEEYEGIFHDEHLRCSLSPESQIEDSGTEASTDDGNLEAKGNGFHDAENDVDQEMDDDNGVERILSGKLSESSGYAGSDLYDYKAVNAEESDAERPVKMLEGNLNLSKVQNSLSTENGSANVDSLLSENNPSNPTVGHETLSMGEILSSFDPGISVPTHSPEYSVERQTNKTNGSHPHVKRSNFWGRNNARKGQNSESVDSSGEEELAIQRLEIAKNDLQNRIAKEARGNAILQASLERRKQALHERRLALEQDVSRLQEQLQAERDLRAALEVGLSMSSGQFSSARSMDVKTKAELEEIALAEADVARLKQKVAELHLQLNQQRQHQYGSVVDANDRHHRLPGHFSQQNFVQQGFDMNLAFCNQEKQRNEFGGVITMEKHQAACATLWFFEATHTKAFI

SEQ ID NO: 57932 - protein, 867 aa, Zea Mays
MSQELQGRSADPMAADHALPLASSAPSWPVSTHPSAASAAAAAVYYFGLSFALAQGRASGGFDLGGARRRGCRWSRAMELALQEKVAALERQVAELRCRRAEDARANEKVAGIFASHEQRWFAERKSLRRQVHAVVAAARAREAKREEETAELRRQLEEQRDTVALKDRALEQEVQRRQGAEERLRAAEKAEEELRERAGKEAMEHAAEVRKHKAAFVELVSAQRQLEADLARAARLADTAEAELRAALERRDEAASTAADLSAEAARLRRDADHKDKILSAMLRKSKIDMEDREMLVREVKMCKARRKQAELEADRWRKMWESRGHRRGSSRSSARGVADLPAGSSDKLLATDAAVACATNETKILFVDHAEGDAKKDHRKTPAKELNAIECVDRYASHVVDDKPAVEEYQGLQEWFQMETEKYTALIQHRHTAEIEAFTEQLRLKDEKLEAFRWRAVSMDVEAARLRSRIHELEGRLARHEKHSAALEALLQDRESENRALEEQLETLQAQALGVEICTPARGSGQDDGLDDQCIACSPVDAVQRTMSSGSSRHQEGAEVSKYETKLDELVTLSPEDHKEDATEALVVSVGDLACAVAAAATSVEHERRHDAPASRQSFRSEIEEEEEVYTEPGNAHTTGSSQEATSELALVVVPPGHKSSAWKTDIHALAVSYKIKRLKQQLLVLERLANECKDEEAAATKPSGSEASCSGGGGSRQQPRSRYHTMMSFLSKHVRRYQSLDDKIDDLCARMEESKRSAGRGAGEESQSQSAALGQFLEETFQLQRFMVATGQKLLETQSRIAAGLARDRCCCGDGEDGVDMKRLMEVAGALLRDVQRGLEVRIARIIGDLEGTLTFHGILRSTR

SEQ ID NO: 57933 - protein, 164 aa, Zea Mays
MPPAFAAAPSSSICGVRIPTVRRFEAQSTVSTPRFMRNRVAAKTRSTSAWSLKAGLWDSLRSGLLKNNSSTETVEPPPAPLEVEEPLPVEIVLLERTLPDGSTEQILFSSAGDVDVYDLQALCNKVGWPRRPLSKIAASLRNSYLVATLYSIIRSSETEIHFSR

SEQ ID NO: 57934 - protein, 401 aa, Zea Mays
MGQSYVTAGKHEETPEAFPLPRGVAIVRADAGWAHCVAITDEGDVYTWGWKECVPTGRVIGDQSSVGTKEKDERQMAMATDQVSPRSQVSRTSSGAASGPSESRGTDDSTKRRRLSSAKHGPESSTSSDESLSAPPCVVTFNTGVKIVSVAAGGRHTLALSDLGQVWGWGYGGEGQLGLGSRIRTVSSPHPVPCIESALYSKDRPSAMKGNKAAEGHVSKVLGNCVRAIACGGRHSAAVTDSGALLTFGWGLYGQCGQGNTDDVLSPTCVSSILGSKMQDVAAGLWHTVCTSVDGDVYSFGGNQFGQLGTGSDQAETVPKLVDATSLENKNARSVSCGARHSAIITDEGEVFCWGWNKYGQLGLGDSMDRNVPCSVPVDAYHPLNVSCGWWHTLVLADSPT

SEQ ID NO: 57935 - protein, 271 aa, Zea Mays
MVSYHPSLLRPSVLIAQASGIGRCPTLNAFLSTPVVSAVPLRLRPLRAAAGGAASPVSGDGGKRAVPPPAALLVFARSNFLPLALVSGVIFGLLDPTLGCLAHKYSLSKFSTFGIFIMSGLTLRTKELGTALEAWPAGLYGLGSVLLFTPFLSQFIMQVQFSPREFITGLAIFCCMPTTLSSGVILTQLVGGNSALALAMTVASNLLGIIIVPLSLARYIGTGAGVSLPTEKLFRSLVTRLLIPLIIGKVLLILLMETNKDFQLETRCFLA

SEQ ID NO: 57936 - protein, 301 aa, Zea Mays
MDTAEKMRWPFSDGSVTDLLDARSLHGSPDIKKKAQFHSSLVQKLALEKEMEGHVGCVNAIAWNSSGSLLVSGSDDTRINLWNYNNRELVHDIDTGHSANIFCTKFVPETCDEVVVSGAGDAEVRVFNMSRLSGRRPREISMEPTMVYQCHSKRVKKLAVELGNPNVVWSASEDGTLRQHDFRECSSCPRAGSANQECHNVLLDLRCGAKKSLADLPKHPLALKSCDISSVCPHQIIVGGSDAFARLYDRRMLPPLSSCQTKTKPPPCVKMFCPLHLANSKNRNGSKWALLKRIHMENYAH

SEQ ID NO: 57937 - protein, 1168 aa, Zea Mays
MSQQQTRQPNASTSVQGSLPSVGQNLSSVSQTLTLQNLSGMPQNTMNNGLAQGTPQDMYAAQRQMAGRQQQQQQQQAHNQFMYQQQKLLMNQKLQQNSRMQPHIQQQQTLLQSTQMQSSQQPMVQMSSGLQPGQIAIPQTQSMAMQSATQSGIQQNALNSVQQPVQSLLQQPTPSVVRQQQHPQSMHQQSSLQQTQPTQQPNIPLQQQPQQLMGHQSNLQQNQLVNQQSGAVEMQQQQRLPVQSTNLLNMHQTQQMMNQQSMPLHQPQQLANQGNVSSLNQQQQQLLGTVPNVRMHMLQQQKPIQQPQQQQHAQQTSMGLMQPQSQQNQLQQPQQHMMSQFQSQPNQTQQQLGMQQRLQTSAGMLLQQNNIDQQKQYVQAQKVLQEAPSTSVDSTAQTGHPGTGDSQEELYQMIKSLKDQYFAELNDVYNKISMKIQNIDNHMPAQKSAEQYERLKGFKGMLERILHFLQANKSSIQPGFREKISIFERQILSIMSSQRRKPVQAPGQQTFQQSGGQAPSSNMSQQHQTSQGLQQHDSHTNQMPQASLPSMNTGVPTSGAPGIQHVPAPQASNFGVPTTQQNVTNAPQAASNPENAQGNNFNPVQHGSMGTALQQGSTGPMQGALNAQHQSNSNMISNNAMSTMQTNTNAMQANVNSLQQLKQHQEHQMMQNQQMKQRQQMLQQMQQKKILQQQLPIQQLQKQQQQGPIQVQQLHSGNDVNELKVRQGAAIKSGMYQPLNQRNYYQQIKRGDVFPISSPQNLQASSPQISHYSHVDQHSLLQSQVKTGTPLHSANSPFVPSPSPPVAPSPVPLDSDKPLSNLSSLTSAGQAGHQQTSLAPLTQSIAVNTPGISASPLLAEFTSADGGQVSVPTQVPTKSSAAERPLDRLLKALRTTQPESLSAAVSDIGSVVSMIDRIAGSAPGNGSRAAVGEDLVAMTKCRLQARNFITHDGSGASKRMKRDTGAMPLNVSSAGSLNDSLKQSYTVGTPELQSTATSRVKCQRAEVNHVLLEEIQEINKQLIDTELHVSEDDAESFTTSDMAEGTVIKCTFTAVAVSPSLKSMFASAQMSPILPLRLLVPGSYPKCSPVLLDKFPDEQCRNSDDLSTKAKSKFSVLLRGLAEPMSLREIARTWDACARKVIAEYAQQTGGGSFSSSYGCWESCVGAS

SEQ ID NO: 57938 - protein, 66 aa, Zea Mays
MSSEDAKVTDEDTTKMLSDLLIDNAQLRLRLNAVIRNAVNTSVKPEKEGSGEVLPKKTVLNWLLDR

SEQ ID NO: 57939 - protein, 425 aa, Zea Mays
MLLLQPSAVPAPALRGRPRPRRRLVPPPLASAPASIVVSSDEDAFTRCSGYLFEEGAATESELPTAYDLPGIAAVYRRRPLLVLRRSLQIGTSFGRWFALRYLDRVNERADDMFELRAAQLRRILLELGPAFVKIAQAVSSRPDVVPPAYLDELSLLQDRIAPFSNDVAFNIIEKELGLPLDMVFSEITPEPVAAASLGQVYQARLRSSGKIVAVKVQRPGVQAAISLDIYILRFLASLARKAAKLNTDLPAVLDEWASSLFREMDYREEARNGLKFRELFGKFRDVSVPEMYLEQTRRRVLIMEWIEGEKLSEVRDQYLVEVGVYCSLSQLLEYGFYHADPHPGNLLRTVDGKLAYLDFGMMGEFRQELRDGFIEACLHLVNRDFDALAKDFVTLGLLPPTAQKGEVTKALTDQESCHITCPIG

SEQ ID NO: 57940 - protein, 87 aa, Zea Mays
MRLVSRIQSDSARRIERRTSRTAWIGRGATVGGRAVKHDMPSAPGTMCSDGTCGDPVAACVGGREHGVRLPPGRHLPVAHTAPACLA

SEQ ID NO: 57941 - protein, 217 aa, Zea Mays
MATGDNDKPPSLDADVDMADLASLDATAATSAAAGGAPSTRFRPKAKGKPRPKAEPPRPVPVAVPKPEPEPEPEAVPMPEPDANPAPPPEDTMEVDGAVDAPGHGEGAVEEDFVLREIDVYFNPKPFEDDTQLYIMQYPLRPCWRPYELHEICEEVRVKPLSSEVEVDLSINTQSENYDQEAPLRLTKQTLSSSKAVDVTNYAVGVLNGNLYISGTI

SEQ ID NO: 57942 - protein, 78 aa, Zea Mays
MPIFALVDWNPAGLAILCTYKYGSISMGLESYRYACNVKWLGVRGGDLHLIPEDAFQELKPRDLQIAKSLMSSKFLQS

SEQ ID NO: 57943 - protein, 842 aa, Zea Mays
MRMVEMLSHQLRVDQAILTGESCSVAKEVESTPAMNAVYQDKTNILFSGTVVVAGRARAIVIGIGSNTAMGSIRDAMLRTEDEATPLKKKLDEFGTFLAKVIAGICILVWVVNIGHFRDPSHGGFVRGAIHYFKVAVALAVAAIPEGLPAVVTTCLALGTKRMARLNAIVRSLPSVETLGCTTVICSDKTGTLTTNMMSVSKVCVVRSVHQRPMTDEYSISGTTFAPDGFIYDADGLQLEFPPQSPCLLHLAMCSALCNESTLQYNPDKKSYEKIGESTEVALRVLVEKVGLPGFDSMPSSLNMLTKHERASYCNHYWENQFRKISVLEFSRDRKMMSVLCSRKHQEIMFSKGAPESIMARCTHILCNDDGSSVPLTMDIRNELEARFQSFAGKDTLRCLALALKRMPAGQQSICYGDEANLTFIGLVGMLDPPREEVWDAIHSCMSAGIRVIVVTGDNKSTAESLCRQIGAFEHLNDFSGYSYTASEFEGLPPLERTNALQRMVLFSRVEPSHKKMLVEALQAHNEVVAMTGDGVNDAPALKKADIGIAMGSGTAVAKSASDMVLADDNFATIVAAVAEGRAIYNNTKQFIRYMISSNIGEVVCIFVAAVLGMPDTLIPVQLLWVNLVTDGLPATAIGFNKPDGNIMSVKPRKVNEAVVSGWLFFRYLVIGAYVGLATIAGFVWWFVYSDNGPKLPYSELVNFDSCSTRQTSYSCSIFEDRHPSTVSMTVLVVVEMFNALNNLSENQSLLVIHPWSNLWLVGSIILTMLLHVAVLYIEPLSALFSVSPLSWVEWKIVLYLSFPVILIDEVLKFFSRRSPRGRRFPLRLWRREILPKESRDN

SEQ ID NO: 57944 - protein, 106 aa, Zea Mays
MMMASVLAVSRWSSLLLPLLLLLLLLLVATASQALNVGDLLGTAAPSGSQGCSRTCESSFCIDDYLNTRCNENLLSCLDGVSPAGPTFPGNECDVGQTASVIRGRS

SEQ ID NO: 57945 - protein, 311 aa, Zea Mays
MTGTAKTEEKEFSKMFKMPVIEVPTNLPNIRVDLPIQAFATARGKWQYVRAEVESMFQLGRPVLVGTTSVESSEYLSELLKVHKIPHNVLNARPKYAAREAEIIAQAGRKHAITISTNMAGRGTDIILGGNPKMLAKEIVEDNILPFLTHEPPNIDMEGESTSHKGLSNVELSPSSVGLLAKAAIMSKYIHKSERNEWSLSKAKSTIAESIEMGQMIGMEKLQERMTEESEMYPLCDAIGLAYLSVLRDCEVHCSFEGAAVKRLGGLHVVGTSLHESRRIDNQLRGRAGRQGDPGSTRFMVRNLIWTLNGP

SEQ ID NO: 57946 - protein, 120 aa, Zea Mays
MADWEGIPPRERRQMEEILQLDMEELNVEVVDDNEEDEEEEEGDGNEEDYDVDAFLRDNNGDGVASTSGPFTFNRSLASLHTYLGEVDDTRGRVTLLDGGTILNLPMFYLQVNIRHAKLN

SEQ ID NO: 57947 - protein, 459 aa, Zea Mays
MNDAYCSVCLGVLLPTFHRDEGLETPNGISHIDNMSSVISQAVHGESYQVDEFSLEISLPPVIAANERAVRLYMKQKYGNENWFKDKMFAQQTMSVKEALRLLIAPSLEKLMNAKHGNNSFRIRLTYTHGDASQKLHSLLPNEHSRKRKPDSRKGGDASNEAHKRNSADGNPIQTSESDSFIYKSLEGIQDQEFCNAFQLPPEKVFKPCHLLISCLRSPTYLGGRYLKLSRNVSQSCWIIDDERMGEASVEEIIGENVRAICRGDSCKFHAAGREDIDVRMLGSGRPFLVEVLNVRSIPSETEVQQIEERINNSEKKYVIVRNLKLVDNEIWTMMREGEAEKQKQYTALIWTSRDLTDDDLHNISIMKEMEIVQKTPIRVLHRRSPLERKRIIHWMEIEKITGSSNYYLLHLCTQAGTYIKEFVHGDLGRTHPSIGAIIGCRAEILQLDVTDVKMDFLP

SEQ ID NO: 57948 - protein, 280 aa, Zea Mays
MQPKMGKMDIDYQVLHDAFFKYQTKPKLSSHGDLYYEGKEFEVKLREMKPGMLSRELKDALGMPDGAPPPWLINMQRYGPPPSYPQLKIPGLNAPIPPGASFGYRPGEWGKPPVDEHGRPLYGDVFGVLQQDEPNYDDEPVDRSKHWGDLEEEEEEEEEEEEEEEPMEDEEMEDGIQSVDTISSTPTGVETPDVIDLRKLQRKETDKQAERPLYQVLEQKEERIAPGTLYGSSHTYVLGTQDKSSAPKRVDLLKNQKSDKVDVTIQPEELEAMDDVLAAK

SEQ ID NO: 57949 - protein, 442 aa, Zea Mays
MADKAASPEKKSWADVEEEEEAKAKATAAAEAAAAAAAASSSSSITEPAVEEQAKQIEALSLAPSVDDAAGEEGPPLLDDSDDSQIQAVISGGTVYESATTFEDLKLSPELLKGLHDEMGFSRPSKIQAITLPMILTPPYKDLVAQAHNGSGKTTCFVLGMLSRVDPQRKIPQAICICPTRELAQQNKAVLMRMGKFTGITCACAIPPAQKDYMPISKMAPITDQIVIGTSDHMLAEDGFRSDSERMMRDIQRSAGGCQVLLFSATFNDRVKDFVTKVIRDGNQIFVKKEELTLEKVKQYKVQVPDESAKIEVIRDKIFEFGQKVGQVIIFVRTKQSTKNVHNALTREDYVCSSIQGSLDQSEREKIIQEFKDGYTKVLISTDVLARGFDQAQVNLVINYDMPIKFGTRDEPDYEVYLHRIGRAGRFWPERCCVQLAVWSNR

SEQ ID NO: 57950 - protein, 594 aa, Zea Mays
MARFLLSNVSGEAKPGRLLALMGPSGSGKTTLLNVLAGQLAASSSLHLSGFLYINGRPISKGGYKIAFVRQEDLFFSQLTVRETLSLAAELQLPDLWAPERKESYVNDLLLRMGLVNCADSIVGDAKVRGISGGEKKRLSLACELIASPSVIFADEPTTGLDAFQAEKVMETLRQLAQDGHTVICSIHQPRGSVYGKFDDIVLLSDGETVYMGPAKEEPLTYFSSLGYQCPDHMNPAEFLADLISIDYGSTESVQSSQKRIENLIEAFSNKSVVTEGNNLIAIPEDPELSAKLVRKTTVKKRHGWWRQFRLLFKRAWMQAFRDGPTNKVRSRMSVASAVIFGSVFWRMGKSQTSIQDRMGLLQVAAINTAMAALTKTVGVFPKERSIVDRERAKGSYALGPYLSSKLLAEIPIGAAFPLIFGSILYPMAKLHPTFSRFAKFCGIVTVESFAASAMGLTVGAMAPTTEAAMALGPSLMTVFIVFGGYYVNPDNTPVIFRWIPRISLIRWAFQGLCINEFKGLQFEQQHSYDIQTGEQALERFSLGGIRIADTLVAQGRILMFWYWSTYLLLKKNRPKYQQLLPPLEQDKNKPQVE

SEQ ID NO: 57951 - protein, 200 aa, Zea Mays
MGYLPQAMVNYLALLGWGDGTENEFFTIDDLVQKFTINRVNKSGAVFDATKLKWMNGQHLRSFPHDELIKAFEDRWTDTGILQESESGFAKEAAELLKDGIDLITDADAALTNLLSYPLHTTLSSEEAKPVVQDKISEVAWSLISAYDSGELGQALAEGRDGWQKWVKGFGKSIKRKVFIRMIKLLGTRALPVMDIDCWA

SEQ ID NO: 57952 - protein, 773 aa, Zea Mays
MKGSQLSEPLIDALVATPASSVAELDKLYSVATNGSEEEKTAAAKILCGASLVRGWNIQEHVVSMVVKLLSASLPSDSSTSTPGSMSHYLAHMSTLNEILLGVSYGDVIHILSLYGMVPDVAVALMPLCEAFGSIAPPPNHKSTILGETSVYLVFSCAFLCLLRLWKFYRPPQEYCLTGRGGSVKLELTLDYLLLMHNNRIFSNSSAPNRDSYNSMGSVNEVSAQPIYIDSFPKLSAWYFQNQACIASTLSGLCNKNPVHQVANKILNMICRKMNKGGVSSSNLSSTSSSSVSGSSVSASDDSYQRPAVPAWEFLEAVPFVLEAVLTACAHGRLSSRDLTTSLRDLVDFLPASLAAIVSYFSAEITRGIWKPVPMNGTEWPSPGASLHSIEAEVKEILASAGVQINSCYPRGVPPMLPLPMAALVSLTITFKLDRSLEYIQGVIGHALENCAGGSSWPSMPIIGALWTQKVRRWHDFIVLSCMRSPFGRDKDAVAQLIRSCFSSFLQSSSSGSDIIANRGVGALLGDSITDQGLRLPMAPGFVYLRTCRTFHDTYFVSEVILKQVIEWAHKLANGWSFNGPPQLKSGRTPLSCAASMAHQVAMLGGGLLCIAGGPLVVQVLYEDTLPTLLLSAREQSLKDPGPVSSTLQGYAMANMLFYCGSLLWGADRSSPVMKLSFLSRRPRVVRNHMDFIAGVLDGHILLGCDPGTWKAYVSQFMFLVVKFVPSWLPDIKLDTLKKIAAGLRSWHEHDLALSLLERGGPQAISVVVETFL

SEQ ID NO: 57953 - protein, 201 aa, Zea Mays
MKNNSPPVEVKNTCGPVKIESLCSPVEGENTSDPALEQESFLEKSPSRQPVSPGNKQELKPKKRRKKKGSLFTKKQRKVDSRTPDAKEKTEGTPSDVAEETESPLSGATGPGTMRSCCAGKKRKSGNEPADANKTGKPSSAVKKQKTENPTAAANATKKRATEKKLESASASQKLQVEKAVLVAVNSRRSQRVRKPKVFAD

SEQ ID NO: 57954 - protein, 304 aa, Zea Mays
MSTVVMGVDLECHKCYKKIRKVLCKVQDKVSIRTISYDEKNNTVTVSGPFDAEEVADRLTADAGKVITDIHVVGGFGFGLGGGGGGGGGKQQKHGAVAPGKAPKPGKASGNGHGQGGHGGGGHGGGGGGNGHGHGGHGGGGKPGKNKHVKFDDMDMDDDFDDLDMDEPAGRHAHAHAHGHGHGDGKPKIVRTTNTPIAARLEAPRTGPAMSMAAAAPVRMPMPAMAPMPQQQGMGGAPSIWPPAPEWGYSAQPYGSYSGPPTGGYYGGGGGPAGHWPYGGGYGRNPYGQQYYEDEEPSAACSVM

SEQ ID NO: 57955 - protein, 202 aa, Zea Mays
MLLNAKCDLKIGDFGLARTTTETDFMMEYVVTRWYRAPELLLNCSEYTQAIDMWSVGCIFGEMVTREPLFPGKDYVHQLRLITELVGSPDDTSLGFLRSDHARRYVRSLPQHPKQQFRVRFPTMSSGAMDLLERMLVFDPSKRITVDEALCHPYLASLHEVNDEPICPAPFSFDFEQPSLTEEAIKELIWKESLKFNPDPIH

SEQ ID NO: 57956 - protein, 300 aa, Zea Mays
MCHSFGATELQVDSQEIENKSAQELPPGWIEVKDPTTGAPYFYNQSTGVSQWDRPDSVVNIMQHQVSPSLPENWEEAIDKSTGHKYYYNTKTQTTQWEPPTSVNTSVRPPASTNTAVEPVAQAADIWNSQMQRCLGCGGWGVGLVQPWGYCNHCTRVQNRPFQQYPSYTNNTMHASGNNAPKAQGNVSAKNRSSSKPPLGKPNRKDHRKRNRPEDDELDPMDPSSYSDAPRGGWVVGLKGVQPRAADTTAAGPLFQQRPYPSPGAVLRKNAEVATHGKKRGGMAPITKRGDGSDGLGEAD

SEQ ID NO: 57957 - protein, 163 aa, Zea Mays
MDVTQIQFNYSIFFLNALSAFALNISIFLVIGRTGAVTIRVAGVLKDWILIALSTIIFPESVITSLNIIGYAVALSGVVLYNYLKMKDVRANQLPADNNSDRATKDKKSSSMFRPDNSMDNSDGTVAGGLASEAAAVDEEAPLIPSARLSYVTRTQTGSSSNR

SEQ ID NO: 57958 - protein, 171 aa, Zea Mays
MPNCFSKTKQARMMIMYLLENKLSKTYLLLHFSKTIDHTQEVQIRKQAVATPVRFSDGSRQGLTMEKSTVVVSVPVVVMAETAETDYSSSFSIHGYEMYWGSIFLVLDFLSWIHICYLGHLCRMQSPRKMLGRVINQGIRELLRSLQYIRSIVLRWQTLFNSGGQLLQLPV

SEQ ID NO: 57959 - protein, 293 aa, Zea Mays
MFTGDGCWSHLRRVRELLSLSSLYVSLSTSLALHQESAQGKSAGPEKGPIQELDGLNFMEDSAGALTNLLASAPAEIKCVGSIVFSSFNPPPSYRRLHGDLIYIDVTTLEGNKYCITGSSKFFYVNSSKGSIFDSKPTKQGLEASTLIGLLQKISTKFKKGFRELLDRRASAHPFENVQSLLPVTSWLGAFPVPEHRRDEARAEDSVVLSYGTELIGMQRDWNEELQSCQEFPHGNPQERILRGRARYKVTCDFVDAAVKGAVGVINRCIPPINPTDPECFHIVNNVNRFYVA

SEQ ID NO: 57960 - protein, 482 aa, Zea Mays
MNYSQALSYTSQALSQNLAGLRKKSPIRKISTTLSYYLEDNWKRLWVLALWIGIMAGLFTWKFMQYRNRYVFNVMGYCVTTAKGAAETLKLNMAIILLPVCRNTITWLRNTRAARALPFDDNINFHKTIAAAIVVGIILHAGNHLVCDFPRLINSSNEKYAPLGQYFGETKPTYFTLVKGVEGITGVIMVICMIIAFTLATRWFRRSLVKLPKPFDKLTGFNAFWYSHHLFIIVYLALIVHGQFLYLIHVWYRKTTWMYLAVPVCLYVGERVLRFFRSGSYSVRLLKVAIYPGNVLTLQMSKPPAFRYKSGQYMFVQCPAVSPFEWHPFSITSAPGDDYLSIHVRQLGDWTRELKRVFAAACEPPVGGKSGLLRADETTKKALPKLLIDGPYGSPAQDYSKYDVLLLVGLGIGATPFISILKDLLNNIIRMEEEEDASTDLYPPVGPNKPHIDLSTLMTVTSRPKRVLRTTNAYFYWVTQYY

SEQ ID NO: 57961 - protein, 68 aa, Zea Mays
MMDVNTDEVTMVSTLEQDETPGKTVAPVPSATAETRNSSSDTVMKGAEASSVVEDDDEVQAVDKMKEG

SEQ ID NO: 57962 - protein, 95 aa, Zea Mays
MPSLSWILALTLSMVSEDSTSRVIVLPVRVFTKICMPPLRRSTKWRVLSFWILALTLSMVSEDSTSRVIVLPVRVFTKICMPPLRRNTKWRVLSF

SEQ ID NO: 57963 - protein, 395 aa, Zea Mays
MDKEKRRRSWIERIRRLFTTSSSDPKPAPKPAPDKKAKSKRWLPGKLRAQQSFALPAPAPAATEPDQIRRAEDEQSKHAVAVALATAAAAEAAVAAAHAAAHVVRLTGQAPVVPPLPRQVRGQEKEREQAAVAIQSAYRGYLEQQQASNKRWDSSIFSKEEMSAMTRSKEEAALKRVRALQYASLHNEKLGLRRPPSPSMSRDDEADALNNQRWSWLEEWVGSQPFDKDVPVAHQSPYTRSASRGEHDDVVDRLGCSARRSFARPTRTPPRGDCYGDAAQFPGYMASTASAKAKFRSMSTPKERSAAGYDAYSEHCFPFADRLLSPIPSMSPIPSVASDMGFARPPVAQRSPRVPAKSPMTPARARTRRSHGGHHSFGSEAALHQLQMEHYTPVR

SEQ ID NO: 57964 - protein, 93 aa, Zea Mays
MMGYCGIGLIGWSWKVTIPLRTSSWPPRAKLSTKAPPVSRRSWCSTVMPPCSADWLLHNTFAGYESSEDHPGIWNLKSQVSCALDHFLPNNVL

SEQ ID NO: 57965 - protein, 1519 aa, Zea Mays
MHTEVGYGESNATSQFDSRATAEGYGDRSADAQVEYTDPRYLESLYPGWKYDEATHQWYQVDTLNTQTYAARDTGGAVADLASGGSVQQHQQFSGSYIQNTSHPEPALELTEPTSESKPQLEPAAAPPQTDAYPAVASHKEEQKEHGSVPVHTKPEAQEIPANAGDTATVTEGGSPGSEKGIHTAVKQVQWNDFGASTGGADLFGDLLPDGAEDDFFEGTVPVSQDVSSLVGATNVSAPDHSFSAGVYNTAMISAGHSFSDGVDKNANSHFGPSGSSAGYGDQSTNAQLGSTDPKYLESLYPGWKYDEATQQWYQVDTHSAQSYVADNTGAVVAVGSDNTQQHQQQFSASYLQNNLHAALETIAEESSTNAMSWVQGGTNTGPPEYPPNMLFYAEYPGWYFDTNTQQWQTLESYQQSVAHVATTAAASDGFAGTCHNVAHYTEDSYASSYNQQSQWQPDSFGNTMQADVLGGKSLLGSSYGSNQQAGNQIGQQANVDSLNHEPHVNTFMPSTGNQSWYSGLEHSTSKELRYKGFEPSTGFQTSRKEFQPPKDHQAGHMADEPLTRYGYGSSNGVVNTQNFVPKEGMHKTQMHDDSTAHTYAASNYWGTQTSMGSAQQQLTGTNGPSQQFGFSPHEQRSSAGRPPHTVVSFGFGGKLVVLKETSSMAANFDSGNQGNSGRTVSVLNIPEIVADKIDHSSIANGGAFSYFHALCRHPIPGPLVGGSAASKDLNKWLDDMSGVYESSQTEFQGGDVQKVLISLLKILCQHYGKLRSSFGSDPSQEGIDGPEMAVTKLFSSCKSSANMKGYGAVVHCMRNLPSESQIQTTAQEVQSLLVSGRRKEALHQAQEGHLWGPALILALQLGDKFYADTVKKMAHCHFVSGSPLRTLCLLIAGQPADVFSFENPVNSGLSSPQQPVEAAPKGMLDDWQENLAIITANRTKGDDLVITRLGDCLWEEKNEVASAHSCYLVAELNIDSYSGSARMCLIGADHLRCPRTFTSPEAIQRTEVYEYAKVLGNSQYILLPFQPYKLIYAYMLAEVGKISDSLKYCQASLKVLKSSGRAPELEAWKQLFITLEDRIRTHQQGGYATNLAPGKIVGKLFTSLDKSLSRMMGTQSAPLPQLPQGAANERGVYSSPDTKVVNSQSVMSMAPLVSSASEQSMSEIGGNSVYGREVAHNRSISEPDFGKTPQQGAAVSSKAQSTSGSGSSRFGWLVQKTIGLVSKSHRQAKLGEQNKFYYDEKLKRWVEEGAEIPAEEPPLPPPPTKVPFQNSVPDPNSNAPPTGGGYSSNPPEPSSGMPPMPPTQNQFSARGRMGVRSRYVDTFNKGGGGGGANAFGVATSYSKPAAPSMSGAKFLVPTPVNVASEQMAELGAHSETARQDESSSSPAMETSFSSPPSLIQMQSSIPRYPSGDNIPRYPSGDNIPRYPSGDNIPRYPSMDNVSSPTGSINSSMSRSRASSWSGTYPEQLSSTAASRSPDGQMTQSPSMPGRRPPHSRSNSASSSAQLNGLGEDLHEVEL

SEQ ID NO: 57966 - protein, 141 aa, Zea Mays
MCLLLSSLDTLKSTQAMGDAMKGVTKAMAQMNRQLNLPGLQRIMQEFERQNERMEMVSEVMGDAIDDALEGDEEEEETEELVNQVLDEIGIDINQELVGAPSAAVAQPASAGRVAQAESAGNADTGIDADLQARLDNLRRM

SEQ ID NO: 57967 - protein, 75 aa, Zea Mays
MLGSQTQTVIGRPILPDAAVHAVVEEHALDAKVIIFKKKRRKNYRRTKGHRQELTKLRIINIEGIDKPETAAVAA

SEQ ID NO: 57968 - protein, 133 aa, Zea Mays
MAAVEVQVPTAAPVEEAAQLAAASAVETPNEETAAPAVETEVVVAKEPEPVEAEPKEAEPEAAAPAAETEAAAAPVEAAEPEIAAETKEVAAVEANEEEEEAAPAVAATPEVAATEEEAAAPAPEAAVEKSVE

SEQ ID NO: 57969 - protein, 756 aa, Zea Mays
MTSTRRGWRWATAGITSTAAATRGTARRRTTRWGTAAGAGKRWMRMRTGTLSSRRISLRTTPGPSYPPTSRRRASCASSSIPSTSSSRTPCRRLLMSPPTSRSAPSRSTTLAARPNLPRISFGQIYLSKPMMTEADGETATLFPKSARLRNLTYSAPLYVDVSYRVMKKGHDCEEVTETAEYPKVFIGKVPIMLRSSYCTLYQQSEKDLTELGECPYDQGGYFIINGSEKVLIAQEKMSTNHVYVFKKRQPNKFAYVAEVRSMAENQNRPASGMFVRMLSRAGAKGGSSGQYIRATLPYIRADIPIIIVFRALGFVADKDILEHICYDFSDTQMMELLRPSLEEAFVIQNQQVALDYIGKRGATVGVTREKRIKYAKEILQKEMLPHVGVGEFCETKKAYYFGYIIHRLLMCALSRRAEDDRDHYGNKRLDLAGPLLGGLFRMLFRKLTRDVRSYVQKCVDNGKEVNLQFAIKAKTVTSGLKYSLATGNWGQANQAGTRAGVSQVLNRLTYASTLSHLRRLNSPIGREGKLAKPRQLHNSHWGMMCPAETPEGQACGLVKNLALMVYITVGSAANPILEFLEEWGTENFEEISPAVIPQAAKIFVNGCWVGIHRNPDLLVKTLRRLRRQIDVNTEVGVVRDIRLKELRLYTDYGRCSRPLFIVEGQRLLIKKAHIRALQQRETPDEGWHELVSKGYIEYIDTEEEETTMISMTINDLQNARHNPEEAYSETYTHCEIHPSLILGVCASIIPFPDHN

SEQ ID NO: 57970 - protein, 162 aa, Zea Mays
MDHERLTERLRLYELVENKVKGDGNCQFRALSDQLYQSPDHHEFVRSQIINQLKTNRDAYDGYVPMAYDDYLEKVARNGEWGDHVTLQAAADKYGVKIFVMTSFKDTCYIEILPKVQKSNKVILLSFWAEVHYNSIHPQNDAPRSQTTKRRRWWPFSQHHHH

SEQ ID NO: 57971 - protein, 309 aa, Zea Mays
MTHIPSEINPQEPSSNEAISSVSTLITETNSSKKIKGDDPALILYTSGTTGKPKGVVHTHEGILSQVQILSEAWGYRSEDQFLHCLPLHHVHGLFNALFAPLYSGSVVEFIPKFSVSGIWQRWRESYPNDASKSTEAITVFTGVPTMYTRLLQGYDSMDPDQKSASSYAAKHLRLMMCGSSALPSPLMKRWEEVTGHRLLERYGMTEVKNIPHLVNTLINCMTPDRLNIGYSLSWHCLIHCMVSEKKVQLVNLFHALRPRSLWRTGLKLQLELASSALEVHLFSRSIGKDQRSPQNLSLMEDSSRQVIQ

SEQ ID NO: 57972 - protein, 650 aa, Zea Mays
MEARYEVLRRATEEVAAVDAHAHNLVEHGSAFPFLRCFSEAEGDALALAPHSLSFKRSLRDIAALYNCEASLEKVEKFRSAEGLKSIGSKCFQAANISVILIDDGIAFDKMLDLESHKAFAPVVGRVLRIERLAETIINAESFSGSSWTLDSFTESYISKLNSVSNQIVALKSIAAYRSGLEINPNVSKTDAEDGLRKELTGPRPFRITNKNLIDYLFTCSLGIAVSLSLPVQIHTGFGDKDLDLRKCNPLHLRAVLEDERFAKCQIVLLHASYPFSKEASYLASVYSQVYLDFGLAIPKLSVHGMTSSLKELLELAPIKKVMFSTDGYAFPETYYLGAKRARDVVYRVLSAACEDGDLSIQEAIEAIEDIFRRNALNLYKLNVVNGSINHETAIVGKRVSLSSVEEDVLFVRIIWCDASGQHRCRVVPAGRFYEITRNKGVGLTFAAMGMTSFCDGPADGSNLTGVGEIRLVPDMPTLVRLPCSYAIFMGNYYSLNSKLSRHEEMVMADMQIRPGEGWEYCPRNTLRKVTKVLLDEFNVTMKAGFENEFFLRRKLVSNGVEMWIPYDNTNYCSTSAFDGASSILQEVYSSLKDSGIVVEQLHAEAGKGQFEIALKYILCTVAADKLIYARETIKSIARKHGLVATFLPK

SEQ ID NO: 57973 - protein, 196 aa, Zea Mays
MVLEVGTAVGIRTTSTWAAGPAARRRSRGQVVSFALAPASSRRVRHRCRAMQQHEEEQERPPTVRAVTIPFADLRVPDRDLGDKIEEGLGPHGLGIVTIADVPEFPELRKRLLRLAPRIANLPEEVKKQLEDPDSRYNFGWSHGKEKLESGKLDTFKGSFYANPVLDVPTTDDVLVSIHHIADQIYGQTIIFLSLR

SEQ ID NO: 57974 - protein, 121 aa, Zea Mays
MICNMSCRISCVSDRYVLSCGKDSRVKLWEVGTGRLVKQYAGAIRRQFRCQAVFNETEEFVLSVDEQNNEVVVWDALTAEKVTRLPSGSTGAPRWLDHSPVEPVFVSCGNDRSIKFWKQTV

SEQ ID NO: 57975 - protein, 79 aa, Zea Mays
MYPPRVGEYDWPPTCKGPKSSRRLDSNPYGWLCCRKKYCQVWGRRGNLVLSNIGLAEKRVYHAALTGSSLPGARHEKDD

SEQ ID NO: 57976 - protein, 2149 aa, Zea Mays
MGDGGVACAVRSVESFRAGALVRRGGAGEAMPDKGERAHGHRHQHQHWKNQQSATAADLEEGELLNGEAGTNGLPERSMPPKKWRKVLAASAAAVEVEPGEIVSTKQAVPLKKERRNGDVEKVELLPERQRKEKSSGKSTRKSIKDDVEPGEIALPGKRRDAKSQLAHDNSRRPSSSAQKGSLRDSDEEPGEIKPESGISGSVRKNRPTEPHSSNHKHHTDTSDQSGSKHRRKGEGKSSSAARHLSGRIREVSPPTRDRRDKHERSPGILGRFPHDRFRHDRYDRSPSRLERSPHRTRHYDSRDRSPYISPRHRARPPQFRDNTPSRVDNSPRGRVQHEDIRDRSPFRHDRSPSERCRPTDTHEASKKSRSSNNSEKSHHKSKSAKQSSKIKSGSNGKNEEKISKEKHTESSQYTELPPPPPLPLPPPPPPPPPPPPLPPAVPPPLPPSPEPEPPGVLAEDMIEDMDICDTPPHTSAVPEPTEPICDIGRWFYLDHFGIEQGPSKLAELKKLVQDGYLLSDHLIKHADSNRWVTVENAASPLVPSDFPSLYSDTSTQLVNPPEAPGNLLDEALEEASNLASGAEDKQMEETSAEDSEEFCIDDRVEALMDGSILVHGQELEIIGELLGADFQPADWQRWSRREDFTRLNVHTEVNNEINGGTENRATDAYGLVSVEKNFHHNAESSEWFSGRWSCKGGDWRRNDELSQDTPFRKKLVLNEGYPLCQMPKGSCEDPRRPCKDELYYPVRAKKYELPLWAFSLTEEDIDSVNDTTKSGVVPGRPGQTRQPSRGVKGMMLSVVRINSRVVKDQSSVEPHTKPRGTDRPLSRSSRSHSIGAERSSVHEGSSHFRKHHDHDSQSSHKSKPVPNIPKDRVCTVDELSVYRGDWYYLDGTGHEHGPFSYSELQELVKNGTIIEQSSVFRKIDNTWFPVLKDLKPGSSVPSAARSSSFTAALMLPDQYNFGVNQGSGSFNQLHPQFVGYTRGKLHELVMKYFKSRELTLAINEVLDPWISAKQPKKEFEAYFSHNSASRNLLPEDGGSAKKAKLLPDQSDEDIHLSQDILASRKEDICFDELCDAEPSVDNDSLNPGAGNETWGLLNGHVLARIFHFMRADVKALISSAATCRSWNAAVKYYRNMCRFIDLSSVGPLCTDSVFCDIMAGYEKQNIRTLILAGCSNLSSHALGRVLEQLPQISYVDIHGCGHLGDLKNKFQHVKWIRSSLNPEESYRKIKTLKQIGDGNNYASKVARNFTNHLDGSDELDGYFADISNRENANLSFGQGFYKRSKLLDARKSSAVLSRDAEMRRLMQRQAETSYRKMEEFIINRLREIMRSNRFDFFIPKVSKIEGRLKNGYYARHGFRTIKHDIRTMCQDALRYKDGNDSGDIKQIVVSFIQLAKRLGNPRYISDRYGAGAQDSLDINQYSFDTKLKKKQNKIRGANSLAAGADNSSRAFDLEIKRSLSKLKKKDVYSGSETSDDDDGYSEVDETESETTVSDTESDLDVNSGAWDLKGNSLKLIEPGESVTDDRILGARMTKASLVPPVTRKYEVIEEYLIVADLEEVQRKMRVALPDDYSEKLLSQKNGTENLELPEVKDYQPRKVAGDEILEQEVYGIDPYTHNLLSDIMPADLELSPTDKHIFIEELLLNTLNKQVRHFTGSGNTPMTYNLRPVIEEIQRSAEDNGDRRTSKMCLGMLKTMRNRSEQNFVAYRKGLGVVCNKKGGFGVDDFVVEFFGEVYPSWRWYEKQDGIKHIQNNSEDQAPEFYNIMLERPKGDGDGYDLVFVDAMHKANYASRICHSCNPNCEAKVTAVNGKYQIGVYTLRPIAEGEEITFDYNSVTEKRQFLIEINMDSEKNDAEVQAEGVLNSRLQQIVHTLDKVRYVMRCIFGDPKNAPPPLVRLSGKSLVSAIWKGDSSIVAELIQSMEPHVEEEVLSDLKAKIRAHDPSESEDIEGGIRNSLLWLRDELRTLSCTYKCRHDAAADLIHLYAYTKCFFRVRDYKTVKSPPVHISPLDLGPKYADKLGPGFQEYCKTYPENYCLAQLIYWYSQNSEPESRLTRARKGCMSLPDVSSFYVKSAKPSQERAYGNRTVRFMLSRMEKQAQRPWPKDRIWVFKSDPRFFGSPMMDTVLNNSPLDKEMVHWLKTRPNVFLG

SEQ ID NO: 57977 - protein, 554 aa, Zea Mays
MRNSVSERSFLIESDDDDDAAVEDGKRRGLGGGGGGDDDDDGSDSSSPCDSPRVVAARCSQPSSYTQQWPQSYRQSIDMYSSVHSPNLSFLGTPSLSRLSNSFLTNSFRGKPPEIISSLIKPLLPTSIASASDDQQQQQHEDVRKSSHYLPPSRKASSLQRIPEDQRPMVGGHEVGPYRQCSYTQGVMNGVNVLCGVGILSTPYAVKQGGWLGLVILAVLGALAWYTGILLRRCLDSKDGLETYPDIGHAAFGTAGRIIISIILYMELYACCIEYLILESDNLSKLFPNAHLTMGNLTLDSHMLFAILTALVVMPTTWLRDLSCLSFISAGGVIASIVIVSCLFWVGLVDHVGTVESEGTALNLPGIPIAIGLYGYCYSGHGVFPNIYSSLKKSNQFPAVLFTCIALSTVLFAAAAIMGYIMFGESTESQFTLNLPPNLVASKIAVWTTVTNPITKYALTMTPLALSLEELLPPNKQTYPNIMMLRSALVVSSLIIALSVPFFGLVMSLVGSFLTMFVAYILPCACFLSILRSKVTWYQIFLAEKYSVPCVLDS

SEQ ID NO: 57978 - protein, 481 aa, Zea Mays
MAVDHPYHTIFQLLALANGDRVKDKQRSRSSFVVDMEKKLAAENLLKELSSCHGPLICQMKQMVEIYIKLAELETKKEDTNKKIPLPREARSIGQLELVPVVTATVPIDPSCRYEEGSFPHFTGLADSIMIMNGINAPKVIECFGSDGNKYRQLAKSGNDDLRQDAVMEQFFSLVNTFLQNHRDTSKRRLKIRTYKVVPFTPSAGVVEWVNGTVPLGDYLIGSTRSGGAHGRYGIGDWTYLQCREYLMSEKDKRRAFLKICSNFRPVMHHFFLERFLLPADWFQSRLAYTRSVAASSMVGYIVGLGDRHSMNILIDQDTAEVVHIDLGVAFEQGLMLKTPERVPFRLTRDIIDGMGVTGVEGVFRRCCEKTLCVMRANKEALLTIIEVFVHDPLYKWALSPLKALQRQKETVDTDSCLDDSQEPYDGNKDAARAILRVKQKLDGYEDGEMRSVQGQVQQLIQDAVDVDRLCQMFPGWGPWL

SEQ ID NO: 57979 - protein, 392 aa, Zea Mays
MRRADRKLKLSHNIIGEEDGTDGKGGDPGIEASDMRSIIFGLHLFDPADTATETIDEDITAETFSVEKLAKLKTMSEKVVMMRSHESSEKDERAFEINPNMTDDSGTVIRRASDSIRIDPGLNEAAYLSWVKKFKEASISSEDATVGFGRQRAAPEEKLLKHDVNKQKIEEKRLAKWESLGYQTLAVKEPDITASQNISDAGSIQFVYGDCTNPSKVCPAKPAIIFSCIDNSGTWGHGGMFDALTSLSTCIPDAYHRASEFDDLHMGDLHLIQLDEGNCTRSLDAPLWVALAIVQSYNPRRKVPRSEISMSDLELCISKAAFSAAQHSAAIHMPRIGYQGGSQRSEWYTIERLLRKHSSLHGIDIFVYYFQRRQTDCQIVTQVGHADDSTQA

SEQ ID NO: 57980 - protein, 871 aa, Zea Mays
MAQPLVVKKDDDLDEEEYYSPFLGIEKGAVLQEARVFHDPQLDARRCCQVEATEVFFATTKLFQSKDAGLRRMVYLMIKELSPSADEVIIVTSSLMKDMNSKTDMYRANAIRVLCRIIDSTLLTQIERYLKQAIVDKNPVVASAALVSGIYLLQTSPEVVKRWSNEVQEAVQSRAALVQFHALALLHQIRQNDRLAVSKLVTSLTRGSVRSPLAQCLLIRYTSQVIRESGVYQGGDRPFFDFLESCLRNKAEMVILEAARAITELNGVTSRELTPAITVLQLFLSSSKPVLRFAAVRTLNKVASTHPLAVTNCNIDMESLISDQNRSVATLAITTLLKTGNESSVDRLMKQMTNFMSDIADEFKIVVVEAIRSLCLKFPLKYRSLMNFLSNILREEGGFEYKKAIVDSIIILIRDIPDAKESGLFHLCEFIEDCEFTYLSTQILHFLGNEGPKTSDPSKYIRYIYNRVILENATVRASAVSTLAKFGALVDSLKPRIFVLLRRCLFDGDDEVRDRATLYLKLLGGEATVGETEKDVNEFLFGSLDVPLVNLETSLRNYEPSDVPFDISSVSKETKSQPLAEKKSTGKKSAGPASAVSGSVSTVDASYEKLLSSIPEFADFGKLFKSSAPVELTEAETEYSVNVVKHIFDRHVVLQYNCTNTIPEQLLEQVIVLVDASEADEFLEVASKPLESLPYDSPGQTFVAFENPEGVIATGKFSNILKFFVKEVDPSTGEAEDDGVEDEYQLEDLEIVSADYMLKVGVSNFRNAWENMDPETERVDEYGLGVRESLAEAVSAVISILGMQPCEGTDVVPSNSRSHTCLLSGVFIGNVKVLVRLSFGISAPKEVAMKLAVRSDDPEISDRIHEIVANG

SEQ ID NO: 57981 - protein, 390 aa, Zea Mays
MADGLDRWRGFFRGAGAGICDVIENAILVAAADAPRDFLHRRDRIAERLFTALRRDAAPPSFGSAAASTTPATPVEEDKGSVRRVAEKECKVDSSSNGTHGGGGHGHGHADEDDDSDSDDERLRRAAASNYGHNYDDDDEDGDQQEEDEQQHAADDTEEGEEDHDAEELEALTNEIDEESQIVGEVLRIKELLLHKEDHSDATLFDSLRRLQLMQLSVSTLKATEIGRAVNRLRKHNSREIRHLVCTLIEGWKVLVDEWVSTTNAALTENSPGSSNPSVVDEEEEGLPSPPLDEGAFFATQTTSIQLSEFFDEMDEDGNLRHSNDPSLGNKRGNNGGRLASHSTVARQDPPRSYPGVVERVQPRRLELARQEPPMSLIIPQVMNLDRGDQ

SEQ ID NO: 57982 - protein, 279 aa, Zea Mays
MASEWEMAMGVELGMGMGGTYHHNASSITTAPMMMSSHPHSHSGGAASYSTPHHHHYYGGMPPMGDAMRVDDLLDLSTPGAGAHEFFPTAAPATDKGHHSSGAMGEPSPTANSSDHRTSALSFADEFYIPTEEAAELEWLSKFVDDSYSDMPNYSSATHAAMAAAAAAAANAAGNGGGTTSAGQDSGVAAAPGRGARSRRSRATAAAAAVWHSLVPRPPSQSSPSSSSCSSSDFPSSNKAAACGGARTARRRRRRSGGRGRWAPRPSATRAACGSSPGG

SEQ ID NO: 57983 - protein, 159 aa, Zea Mays
MEAAAENKEAEQEQQQLPHARKDNAPAAAEEDEADSEETERRNRDLKSGLHPLRHKLVLWYTRRTPGARSQSYEDNIKKIIDFSTVESFWVCYCHLARPSSLPSPTDLHLFKDGIRPLWEDPANQNGGKWIIRFKKAVSGRFWEDLIRNEGHDYAIRIM

SEQ ID NO: 57984 - protein, 263 aa, Zea Mays
MWRSMNHFHEIQNEIVQQVRGLVDNSMAESTSDLHRLATRDLEAAVAAWHSNFNRLIKYQRDYIRSLYGWLKLTLCQVDSSVPQEVHASMISRELTSFCDEWKQALDRLPDAVASEAIKSFVNVVHVIYTKQAEEMKIKKRAETYSKELEKKANSLRSIEKKYYQSYSMVGLGLPGSGRDGIESHAAYDARDPLAEKKTEIAQCRRKVEDEMTRHAKAVEVTRSMTLNNIQTGLPGIFQAIAGFSGTVVEALDVVCRRAGSVR

SEQ ID NO: 57985 - protein, 1360 aa, Zea Mays
MSWGLAWKRSSEIFHLTLNYGDYDDNDDRQPSSPPPPASSSPPASASSTPVYSSSPIATRNGDLGFRIELDWSAGDDEDQVALRLQSQLMVALPPPHDAVSVDLTPRDHGEEEGVRIEMRVVRRREALRSVRVSRAPGSALGSGDGAGVLARLIRSNLAPAPAVDGPTAASGVPVLADHWRPITMVSLCNCGMSMLPVELTRLQFLEKLYLDNNKLSVLPPEVGALKNMKVLSFNNNMLVSVPAVELRQCVMLEELSLEHNKLVRPLLDFRSMPKLRILRLFGNPLEFLPEILPLHNLRHVTLANIRIEAVESLKSVTVQIETENSSYFIAARHKLSAFFSLVFRFSSCHHPLLASALVKIMEDRSNHIAISKEENAVRQLISMISSDNRHVVEQACLAISSLASDISSAMQLIKCDIMKPIEAVLKSSDEEELVSVLQVVVTLTFVSDHVAQKVLTKDVLKSLKALCAHKNSEVQRLSLFAIGNLAFCLETRRILMHSESMCDLLIRLTISQECRVSKAAARALAILGENENLRRAIRGRPVAKKGLRILSMDGGGMKGLATVQMLKQIEQGTGKRIHEMFDLICGTSTGGMLAMALGIKQMTLDQCEEIYTKLGDSLLPFEVSLPMPMLPTELLIFLGKLVFTEPIPKDEAATWKEKIDQLFKSSSQSFRVVVHGSKHSADQFERLLKEMCENEDGDLLIESAVKGIPKVFAVSTLVSVIPAQPYIFRNYQYPPGTLEVSPGMAESPSIGAIGTAVSGAPVGIKRGAFMGSCKHRVWEAIRASSAAPYYLDDFSVDANRWQDGAIVANNPTIFAIREAQLLWPDARIDCLVSIGCGSVPTKSRRGGWRYLDTGQVLIESACSVERVEETLDTLIPMLPEMQYFRFNPVDERCGMELDETDPTIWLKLEAATDEYIQKNFLSVKNLCELLVPRYQEEEKPSDIYKSLSFSRLTSLNQGFSESNPILGWRRVVLLVEASFSPDFGKKINHARSLESFCSQNGIRLALMNSTSGFGKPATALPTPITSPLFTGSFPSSPLLYSPEGTQRISRIDLVPPLSLDGHPTTKSSPPTSPLKSRQPSAHVRSLYDKLQNMPQVGVIHLALQNDSTGSVLSWQNDVFVVAEPGELADRFLQSVKTILSTLLRGCNRKGAYSLSKISCLSELVAEWPSFEIGGIHHRYIGRQTQVMEDNQEIGAYMFRRTVPAVHMAPEDVRWMVGAWRERIIICSGKYGLAHGLVKAFMDCGAKAVISSSIEPPDSKTIVYHGMDVNRSLENGKFVIRDEEADESEPEPVSPISDWEDSDVEKGGNHDVDDEEYLAQFMCLMYDKLFREGVTVDTALQQALRSHPKLKYSCHLPNVL

SEQ ID NO: 57986 - protein, 162 aa, Zea Mays
MEASAEAAAAAAAARTLRWAGRAGHLGGVPRAVVFAAVGAFAKACASLLNTTTVHNADALLRLVSARAPGTPLLTVSNHMSTLDDPLMWGFKGFPTSDAKLGRWVLTAEDICFKNVVMSYMFRLGKCIPITRGGGIYQEHMNEALDVLRNGGWPKKISRLED

SEQ ID NO: 57987 - protein, 880 aa, Zea Mays
MWNPLSWVMEAAAIMAIALANGGGKPPDWQDFVGIITLLLINSTISFIEENNAGNAAAALMARLAPKAKVLRDGRWAEEEAAVLVPGDVISIKLGDIIPADARLLDGDPLKIDQSSLTGESLPVTKGPGDGAYSGSTVKQGEIEAVVIATGVHTFFGKAAHLVDSTNQVLTAIGNFCICSIAVGMFVEIIVMYPIQHRAYRPGIDNLLVLLIGGIPIAMPTVLSVTMAIGSHRLAQQGAITKRMTAIEEMAGMDVLCSDKTGTLTLNKLTVDKNLIEVFEREVTQDQVILMAARASRIENQDAIDTAIVGMLADPKEARAGIQEVHFLPFNPTDKRTALTYIDSDGKMYRVSKGAPEQILNLVYNKLEIERRVHAVIDKFAERGLRSLAVAYQVVPDGRKESPGGPWHFVALMPLFDPPRHDSAETIRRALNLGVSVKMITGDQLAIGKETGRRLGMGTNMYPSSALLGQNKDESIAVLPVDDLIEKADGFAGVFPEHKYEIVKRLQARKHICGMTGDGVNDAPALKKADIGIAVADATDAARSASDIVLTEPGLSVIISAVLTSRAIFQRMKNYTIYAVSITIRIVLGFMLLALIWEFDFPPFMVLIIAILNDGTIMTISKDRVKPSPLPDSWKLAEIFTTGIVLGGYLAVMTVIFFWAAYKTNFFPRIFHVESLEKTAQDDYQKLASAVYLQVSTISQALIFVTRSRSWSFAERPGFLLVFAFLVAQLIATLVAVYADWGFTSIEGIGWGWAGVVWLYNLVFYFPLDLLKFLIRYALSGKAWDLVIEQRIAFTRKKDFGKEERALKWAHAQRTLHGLQPPDAKLFPDRVNELNQMAEEAKRRAEIARLRELHTLKGHVESVVKLKGLDIDTIQQSYTV

SEQ ID NO: 57988 - protein, 685 aa, Zea Mays
MSAATSLLKEKHHGVLISAVQLCMELCNASNEALEYLRKNCLEGLVRILRDVSNSSYAPEYDIGGITDPFLHIRVLKLMRILGQGDADCSEYINDILAQVSTKTESNKNAGNAILYECVETIMSIEATSGLRVLAINILGRFLSNRDNNIRYVALNMLMKAIAVDTQAVQRHRATILECVKDADVSIRKRALELVYLLVNDTNVKPLTKELVDYLEVSDQDFKEDLTAKICSIVEKFSLDRLWYLDQMFRVLSLAGNHVKDDVWHALIVLVSNASELQGYSVRSLYKALQASSEQESLVRVAVWCIGEYGEMLVNNLSMLDMEEPITVTEYDAVDAVEAALQRYSADVTTRAMCLVSLLKLSSRFPPTSERIKEIVAQNKGNTVLELQQRSIEFSSIIQRHQSMKSSLLERMPVLDEANYLVKRAASIQAAVPSVNSAPAVTSGGPFKLPNGVGKPAAPLADLLDLSSDDAPVTTSAPTTAPNDFLQDLLGIGLTDSSPIGGAPSTSTDILMDLLSIGSSSVQNGPPTANFSLPGIETKSVAVTPQVVDLLDGLSSGTSLPDENATYPTITAFQSATLRITFSFKKQPGKPQETTISASFTNLATTTFTDFVFQAAVPKFIQLRLDPASSSTLPASGNGSVTQSLSVTNNQHGQKPLAMRIRMSYKVNGEDRLEQGQISNFPAGL

SEQ ID NO: 57989 - protein, 720 aa, Zea Mays
MSQRPRKKNREKTHPEKQTKNPQSMKPTTSAAAAAVAAVTVTTDDPSPSPSDSTSATFTVDRRGDASASCRWTLPDFPRTRARTFYSRYFEVGGFDCRLLLYPRGDSQALPGYLSLYLQVLDPKAPVSSSSSTTTTTSSKWDCFLSYRLSVVHPTDPAKSLGRDSWHRFSSKKRSHGWCDFAPSSSAPFLFQPHDALVISADISVLSEAASFSDADGRFNWKVLNFGLFREMIRTQKIMSPAFFPASASAGGTDCGLRISVYQSNVSGAEHLSVCLESKEPVVQVASGSSALASGGTGSGVPDGDRGCWCLFRISILNQRSGGSHIHKDSYGRFGADSASLGWGEYIKMDEFLAADGGYLVDGAVVFSASVHVIKESNSFSRSLPMVPGICGAGGGRAGARKSDGHFGKFVWRIESFTRLKELLKKRKIAGLCIKSRRFQVGNRDCRLIVYPRGQSQPPCHLSVFLEVTDPRNTTTEWSCFVSHRLSVINQKVEEKSIMKESQNRYSKSAKDWGWREFVTLTSLFDQDAGFLVQDTVVFSAEVLILKETATMQELTDEDSETCSSTYGCQIEALPKRPSFTWKVENFVSFKEIMESRKIFSKFFQAGGCELRIGVYESFDTICIYLESDQSSGYDPDKNFWVHYKMAIVNQKNSAKTVCKESSICTKTWNNSVLQFMKTSDMVDTDAGFLVRDTVIFTCEIIDCCPWFDFSDLEHMQMKT

SEQ ID NO: 57990 - protein, 1499 aa, Zea Mays
MDAGGDEDGAGKAALESTAEAATLPPASTVAVPSPVPASAPGAATGTSGSGEKPVKRMMKTPYQLEVLEKTYAVEQYPSEAMRLELSAKIGLSDRQLQMWFCHRRLKDRKPPSKRQRREEESALVPVMPPPPVLPAPVMPLASSDLVVGAPGPYDEPLHPLHSRRGAGRGRSSAVPRISMPDIGRRYYEPPPIMIAPPIPSMQLTQYELRVINSVESQLGEPLREDGPALGVNFDPLPPGAFGAPIVPEQQKQPVRSYDAEIFSWHDQKLLKASAFLPNMESPFVPNSFTGKRKSPVGNSAIVQPHVGSRAVHEYQFLPEQPSDTYERATRSHYYDTPVEVSNARIPSITSGSQLLHGSEEAAPSYAFQGHTSGSSLLPPSSRPQVFPAAPTDYEMTQSNSNLSSVPVEGQFDISQVAAFENPPVSSEIIAYHDEDTSRVERKRKHSEEAKIAKEVEAHERRIRKELEKQDMLNKKREEQRRKEMERLDRERRKEEERLLRERQREEERFQREQRREHERMEKFLQKQSRRAEKQRQKEELRKEKEAARQKAANERATARRIAREYMELVEDERLESMELAAQNKGLPSMLYLDSDTLQQLDSFRGMLSQFPPTTVRMKLPFSIKPWTGSEDNVGNLLMVWKFLITFTDVLGLCPVTLDEFVQSLHDYDSRLLGELHIALLRSIIKDIEDVARTPSIALGVNPGGGHPQIVEGAYAWGFNIRSWQRHLNLLTWPEILRQFALSAGFGPQLKKRTVEDSYYRNDNEGHDGENVILTIRNGTAAVNAAAKMKERGYTNRRRSRHRLTPGTVKFAAFHVLSLEGSNGLTILEVAEKIQKSGLRDLTTSKTPEASIAAALSRDTKLFERTAPSTYCVKSPYRKDPADSEAVLSAARERIRAFQNVLSDSEAEKEVDEAERDDDSDCDDGDDDPDGDDVNTEVEDDKDPLLAVKSQDEVPSTTTVIGIKANLDGVGNALNSSSSFTKSAKGAPLPSLGRSNAADTSNDLPLGVSSANHEVVPDDSENTQIDESNQAEPWVRALAEGDYCDLSVEERLNALVALVGVATEGNSIRAVLEERLELANALKKQMWAEAQLDKRRFKEEFTSRVQYNSDMGLKPDIYQENNVTEITSTPACDAYRENDEHVGTINNCEMLDQHNQGNAGSLPYERNGVCQEILATPDTSYVQQYAYADKRRSQLKSYIGHRAEQLYVYRSLPLGQDRRRNRYWQFTTSASPNDPGSGRIFFESKDGYWRVIDSEEAFDSLLAALDTRGTREAQLHSMLQVIEPTFKEAIKRNVSIELSAGRYPKNGATDMIRANYHSEVGSSSSTPSATSDSITAYSDSFKVELGRNDFEKTAISKRADIFLKWMWREFYNQELTCAMKYGKKRCSELLHSCNCCYQIYLAEERHCSSCHKTFKSIYNFSDHTTQCEEKQRTEPFWNMQNTDYSVPIGMVLLKLQLVSIEAYIPSEALQPFWTDVYRKSWSVKLYTTKSIAEIFQMYV

SEQ ID NO: 57991 - protein, 397 aa, Zea Mays
MAETSTYQILVRLLDGRTRCLRFSTPTVSGAVLLDAVASISRVPAAALRLVTGGIDVSPSSVLASAADGQFPYASALLRLRGGKGGFGSLLRGAASKAGQKKTSNFDACRDINGRRLRHVNAERRLEEWKAEAADRQLEKLAENFIKKKAKEAGRGGGPSTAEVDKYLEKYRKDAEICVNVVEESVRASLGKRKTAPKLPSGADAKKLKFWLGKNKVEEDESDSDTDVDDEDIEDLKSADAKSVVVDEGNYSNGCRKNEEKLDLGSVSGSSHSEGESSGEKSQLTTSSGAEGGDFESGDSAELEVGMLDHPISVAAASEEVTADEDNTALATSNQNNPEVPQVEEVRKADKDNTASATSNQNNQEVPQVEQHVGISNSYSEPLDLAKYSSSAELEPL

SEQ ID NO: 57992 - protein, 203 aa, Zea Mays
MGHITIVGPSKISVKSRLDNLLQRNSSDPKEVSPRVAIIMGSQSDLPVMKDAERVLKEFDIPCELTIVSAHRTPERMYDYAKSAKDRGFEVIIAGAGGAAHLPGMVASLTPLPVIGVPIKTSTLSGFDSLLSIVQMPKGIPVATVAIGIAENAGLLAARILAARDPELQDRVTKYQDDLRDMVLETAERLEDQGPEEFLKGMD

SEQ ID NO: 57993 - protein, 57 aa, Zea Mays
MSRRRGGSRLPARRGSAPPKTRYGHATDRCLNRNRSSPVPTRIAMCLYLLDTSECCL

SEQ ID NO: 57994 - protein, 94 aa, Zea Mays
MLLEPYNQIDHPECKSRPDSGLSAITELDPGYITGSVRVNGPVTDSRYPAHQQIPQAYGYRQMPARLDSTNPSQAMGGYTLQSQKETLFEELPF

SEQ ID NO: 57995 - protein, 92 aa, Zea Mays
MDVYRIGTLMELVRELSLSFADDGKRVKVCVQGSMGQGAFAGIPLQLAGTRKILEFMDWGDYGAKGTFINIGAVGVYVLPTYSILQTISIIK

SEQ ID NO: 57996 - protein, 63 aa, Zea Mays
MREKFTARGNTPASHQAKELSGQESGEAADQTCNETPQCSGDVDDGTEDVKQQAKVFHCSLVV

SEQ ID NO: 57997 - protein, 176 aa, Zea Mays
MFFLARYCKLLEENSFRGRTADFFYMLLFGATVLTSIVLIGGMIPYISETFARILFLSNSLTFMMVYVWSKHNPFIHMSFLGLFTFTAAYLPWVLLGFSILVGSSTWVDLLGMIAGHVYYFLEDVYPRMTGRRPLKTPSFIKALFADDNVVVAQPPNAGIGAGARFGAMGLDPQAQ

SEQ ID NO: 57998 - protein, 641 aa, Zea Mays
MASAEDQAAAAALLGGDPAAFDALLSTLMSSSNADRSAAEAAFHRLRASHPEPLALRLATSLAAPTTPADLRAMAGVLLRKVLSPAPSSDASSNNATPPAPLWPQLSPAGQAALKAHLLSALQSDPPKPIAKKVCDAISELAASLLPENAWPELLPFLFRAASGPDAHNLQESALLIFARLADYIAESLLDHLMTIHNLLASALAHPTSPDVRIAALGAAVNLVQCLPTNSDRDKMQDLLPAMMRALTDCLNSGQEVSAQEALELLVELAGAEPRFLRRQIADVVGAMLQVAEATQLEDGTRHLAVEFVITLAEARERAPGMMRRLPQFVGRLFAVLMQMLLDVEDDPAWHSAETEDEDAGEGNNYGVAQECLDRLSIAIGGNAIVPIASELLPQYLSSAEWQKHHAALITLAQIAEGCAKVMLKNLEQVVSMILNGFQHPHPRVRWAAINAIGQLSTDLGPDLQVHYHQQVLPALANAMDDFQNPRVQAHAASAILNFSENCTPEILTPYLDGIVNKLLVLLQNGKQMVQEGALTALASVADSSQDHFKKYYDAVMPYLKSILMHATDKSNRMLRAKSMECISLVGMAVGKDKFRDDARLWKYLWLCKELQWKLMIQLPATCCRLGLGYANVLDRISFLT

SEQ ID NO: 57999 - protein, 777 aa, Zea Mays
MQVCAPDLPSRSHSGSDFSHFRPKEEAPDFYHVDTKVRCLCNSTLLNDNMIKCEDGKCQVWQHITCVLIPDKPTEGAGPDIPPHFYCELCRLKRADPFWVTTGNPLLPVKFMSSGVGNDGASVPQIVEKTFQLSRADRETVQRQEYDLQVWCILINDKVQFRMQWPQYAELQVNGIPVRVMTRPGSQLLGINGRDDGPLVTTCSREGINKISLSRVDARTFCFGVRIVRRRTVPQVLNLIPKEGEGESFEDALARVRRCLGGGGATDNADSDSDLEVVTESVTVNLRCPNSGSRMRIAGRFKPCVHMGCFDLETFVELNQRSRKWQCPICLKNYSLENLMIDPYFNRITSLLHNCSEDVNELDVKPDGSWRVKGDAATRDLSQWHMPDGTLCDSKEDTNPGVVSVNEFKREGTSDGHRTLKLGIKKTPNGLWQVSSKPDDKKPVVRNHIQNNTGYSIPNIVPMISSPTGSCRDGEDVSVNQEGGGIQFDISLNQEFDSFAHNFGQTYNTEDRQQEPQHNAADVIVLSDSDEENDPIVRLPAVYANTPTNGDSFPFVTDAAVSGYPEGYQEDAGVGTSGLGLLSNNTGDFEINNWQMHSYPQPEQGFQFFGTDTDVGNPFVGPHNSFSITPEDYSLDCNVGIEDPSAAHDVSICRNSNDVHGSLVDNPLALAGDDPSLQIFLPSQPSTVPLQEELSERANTPNGVHPDDWRISLTLAAGGGGNEEPTSVDGLKSQPKVPSKEAGVEPLLDAACQPFPGSSRLTFEGRHLSFCSPKHEQ

SEQ ID NO: 58000 - protein, 115 aa, Zea Mays
MCQLSLCDCVCQNCGISSRLTPAMRRGPAGPRSLCNACGLMWANKGTLRSPLNAPKMTQQLLANPCNMVDTDDKNSNVLPVEHNQATPKTDSMMPKEEQKLDIRLPTEEDTKAVS

SEQ ID NO: 58001 - protein, 66 aa, Zea Mays
MLLLVFVVVLEVEVLQTMLIVIAIWKWLLNLLQSTFVALMRIAGRFKPCVHMGCFDLETFVELNQR

SEQ ID NO: 58002 - protein, 71 aa, Zea Mays
MNKPPEMISGNMTAAMCVYSGLFMRFAWMVQPRNYLLLACHASNESVQLYQLSRWARAQGYLEKKEPETQQ

SEQ ID NO: 58003 - protein, 367 aa, Zea Mays
MELWDPTLAKGIKIFLATSTPLFGHVATNYTVNYQKAAIQLSCSGNGYGMHAGPSPPRRAEASKFDDDVSPRYTHGYQGGGRGGARFREGPPPYGRGRSYGRGYGAPHGKDLINIDGEYVHRNDPNLSPREGDWICQNPNCGNLNFARRTHCNNCNKFRYSAREAYEPRRSPPFRSYPSPPRGPPRMVGPPGDRAPAREMARYRSPPHGWGASDPRAYAGRSPPERAGRFTDPSTKGRMGFRGERDPRDRVKYEWSATDDYVQRERPYDGYLDRSRRRSGSPRGNWGNDLRDRSRSPARNRPMKSSFTGRGRPDDYAADPYGSRGRPNGMEAGRGRGHAYRAGSGPYPGETRGDQRAAPRARNEDGY

SEQ ID NO: 58004 - protein, 297 aa, Zea Mays
MAAPSFAPNGRGWVAPAAAATASRASAAHADPRGTPPLPHHLRSPRATRSPRPRSLPQEWRRRRKRPNAASGNGRCVRGRRRRRLGSGRRGAGSAARVLARRRIRELLRREGVGTNRESWSSGATTDEVGTQKGEGKKSRGAEHARTRMGGDGDKIWFHRSIAGTVQAAGSGDGDEAEEEKAFLVPSAAAFPHGMSAAAAGPSLAVAKKEEFSKSPSNSPASSGGTDGGSSAVPWPEQIHAQNSSPTLLEPSRQAIPLEFKSMAGCFFRLAEFYQDPEFGMLWQWKGLALASENQSA

SEQ ID NO: 58005 - protein, 1085 aa, Zea Mays
MPCTAARQHSSLCCCWGWAGPWLSFVGRQAGTRWIIFCLLLLLLPLPLPAFIFVAGPSPICQRQQQTQLRAGSPLDSRSSTSSPILLHPSTALEKKRKVKGAPLIAIVPHFARSLSLSLSLYRRHSPTNKCVCSEKETLLASSAELAGRQLHHPIQRGASSALRTRPPMALVLLLLLPIFLLSSSSCLVLAIPTLASQAATLLSLKDSFSPPLPPQLRSWTLANYASLCSSWPGVACSNRTVVSLDISGYNLSGTLPPAIADLAGLRFFSAAANSFSGDIPPAIAALRDLRHLNLSNNQFNGTLDALDFSAMHSLQVLDLYDNDLAGALPTLLPAAAGLRHLDLGGNFFSGTIPPSFGRFPAIQFLSLAGNSLSGDIPPDLANLSTLRHLFLGYFNRFDGGIPAELGRLTSLVHLDLANCGLQGPIPASLGDLTGLDTLYLQTNQLNGTIPPSLGNLTGLRFLDVSNNALTGEIPPELAALRELRLLNMFINRFRGGVPDFLGDLRSLQVLKLWQNNFTGAIPAALGRAAPLREVDLSTNRLTGEVPRWLCARGQLEILILLDNFLFGPVPEGLGACPTLTRVRLGQNYLTGPLPRGFLYLPALTTVELQGNYLTGRLEEDGSGGGGSSSSRLSLLNLSSNRFNGSLPASMGNFSWLQTLLLGGNQLGGQIPRQVGRLKRLLKLDLSGNKLTGAVPGEVGECTSLTYLDLSGNRLSGAIPVRLVQIKVLNYLNVSWNMLSGSIPRELGGMKSLTAADFSHNELSGRVPESGQFAYLNGSSFVGNPGLVVVNPKQQVMGGGPGILGGAGTQDERGSSSSSAVMGRLKLLLAAVGLLGFSVAFAAAAVATTRSAAMLRRRRRSSSWRWRMTAFQQVSFGCEDVVRCVKENCVVGRGGAGVVYRGTMPGGECVAVKRIVSAEGGGFQAEVETLGGIRHRHIVRLLAFCSGPEAKLLVYEYMVNGSLGEALHRAGADDGGGGVVLSWASRLRVATEAAKGLCYLHHDCSPPILHRDVKSNNILLDARMEAHVADFGLAKFLGGSGASECMSAVAGSYGYIAPGTRTRSRWTRRVTCTASAWSCWSSSRG

SEQ ID NO: 58006 - protein, 133 aa, Zea Mays
MNDQLACDQDVGGCGKPNHIHHILSTPPHVFTVVLGWQNNKENVDDISATLAGISTEIDISIFYRGLDQGSKHTLVSVVCYYGQHYHCFAFKDGRWVMYDDQTVKVVGSWGDVLVMCEKGHLQPQVLFFESAN

SEQ ID NO: 58007 - protein, 66 aa, Zea Mays
MFGRMAVCLVQSLKPCPWTYRRMAVACLSTAVQSPKPCPNPNLPPILISRRIGDVSCSRLPAARRR

SEQ ID NO: 58008 - protein, 231 aa, Zea Mays
MNSHGAGSHSRLLDLNYPPAEGAGEGASRFSSIPVSHREGSSSMPVQHIQASSSTPPATGEPRIGMRSCPIDVEAIDDDAVIYSSRPLPRARQQLTTTESITIIIDDDSETNLETAGDALDEHVNLLLSLGIERSHEPTSATNTFPGISMVDTPKVNTFKVPPEPVKEVPKEPKLSCPICMNEITEAASTVCGHIFCQPCIKAAIKAQKKCPTCRRKLTPRQQHRVYLPSP

SEQ ID NO: 58009 - protein, 624 aa, Zea Mays
MEKVEALEDMVSLAPSSLVKGVAPVSTTAVLSTKSSVATSPTQPTVSTASSQSTSQDQTEETASQESNPEPTPQTPPPKGGNPGPSVPAVPIVVSTGSAAVSVPAETISSPVRLTVPATAATVLSSAIPRSAPENTLAVTSIPANLSTTLKDDESMSVPPRRPSPATEIGIGRGITRGTTSQALGTAPITIGPVSGNGSVSALPAINDLSKINILNTDEKINSDGLSQQLVMPLGSKVQPQQVPRTNDAIGSDSANTNENPILGGRVFSPPVVSGVQWRPQAAAAFQNQIETNQYRGRPEISADHREKYIQRLQQVQQQGGSLLNVSHITGINQKQFPTPQPNPLLQQSSSISSQVNLGLGVQGSDAGHIKSEDQQILAEDVGVESSATTGANKQTSEDDTKIPYSNPSAPAAENTQLPRDTDLSPGQPLQPGMPSSGVGVIGRRSVSDLGTIGDNLTGTSGSSGHDQNYYLQMLEAAFHKLPQPKDSERAKTYIPRHPAVTPASYPQVQASIVSNPTFWERIGSDTLATDMLFFAFYYQQNTYQQYLAARELKKQSWRFHRRYNTWFQRHVEPQVTTDEYERGSYVYFDFHVTEDGSGWCQRIKNDFTFEYNYLEDELSVQTN

SEQ ID NO: 58010 - protein, 450 aa, Zea Mays
MVEARTFPLATSTSFYPPATSRHKFSLPTRTSHGDSKTFRRRMASAGAGEGKETAAGSSLHSKTLLKSQPLYQLQARPELGISDPKSPHQALPPIPRTPASDAATHPIRLLKPRPLWSIPVAGGMDSGANSIGESVGESPSLALAPEPQTRPAEPVTKGRGLRRWRRIPREQHQEGSPGSPGADTGVGASAGEDLAAQLHKRRYGPAADEPKGKQDPAAAEEVESSVASVESSFVPLEASPPPAPTRLDPNLGHLIATAGFSVGAGGADSDNSDDRTSKLSTAASAPRHDFSSVGFGRERDRARSRAPGAAHGKGIRAARVRGATMRVASSPAEAGNSRSSVESNLRSSNAAHARRSSAGVTSNGVHKILFPDGHQSDDEPPSGDMRYGTGRFYKENGSIEGRLGNCDSDSNHHTFDEASVGKLRMEGLIQVWICMVSRWALLQSAQESA

SEQ ID NO: 58011 - protein, 191 aa, Zea Mays
MEASRRGRFHRHDGPAAPVPVVDQADCTAQTCRSCVAVTLADAIALGCCPCAVVSLLGLALVKAPLALARRCLRRLRGELRHRKRVRDMHGPADKAKCRSSDAGAASRGAWALEAAARARASNSSSSGSGRLDAEKVWMEEMYRVGHWGFGRLSVSVSVSVTPPPPVWPGRSPDGDGGGGGRKDVDLRCES

SEQ ID NO: 58012 - protein, 333 aa, Zea Mays
MCLCCLLPGGTHKGSTWPTIACMCLGCCLRCRSVLLDSNMCSPESTWLLWESSSFCRTKSRSPQTTSGKTTGSKSAAKGVVDQSLPFQHNAAIGLLLGAFYLLSRYAIHCTWVTSEAYSSPSIVLAARGHNGGRVIFDDYREAYYWLRQNTPPDAKIMSWWDYGYQITAMGNRTVIVDNNTWNNTHIATVGRAMSSYEDEAYEIMQSLDVNYVLVVFGGVTGYSSDDINKFLWMVRIGGGVFPVIKEPDYLVNGEYRIDKGAAPKMLNCLMYKLCYYRFGELTTEYGKPPGYDRVRGVEIGNKDIKLEYLEEAFTTSNWIVRIYKVKPPKNRS

SEQ ID NO: 58013 - protein, 276 aa, Zea Mays
MRSLGQNPTEAELQDMINEVDADGNGTIDFPEFLNLMARKMKDTDSEEELKEAFRVFDKDQNGFISAAELRHVMTNLGEKLTDEEVDEMIREADVDGDGQINYEEFVKVMMAKVELMEQDKRAKVLCLHGFRTSGSFLKKQISKWHPSIFQQFEMVFPDGLFPAGGKSEIEGIFPPPYFEWFQFNKEFTEYTNLDECISYLCDYMVKNGPFDGLLGFSQGATLSALLIGYQAQVIFTPKFCNICCNTCVLNYRGSTKYNKQTTFYHAIKLLFRASC

SEQ ID NO: 58014 - protein, 660 aa, Zea Mays
MDPSDSNSAAGGKTQNVSVPPVEGVAGGGTSYGWVDGGLRGTNIGAGVIDPTKVHSDDLLHVWSMPSTANVSQQEAPRPLEKVNLLAARNERESFQIALRPKVSWATSGIAGSVQIQCTDLCSSSGDRLVVGQSITLRRVVPILGVPDALVPIDPLSPQISIQPGETAAVWVSVNVPCGQPPGLYEGEIFITAVKTELDSRTESLPKSEKCRLYRELRSCLDLTGPRDYSSPEEMVQRLTSASTVLRRVLDNPALQDCQENNGFGDMMDEDVINNISVRLKLSLTVWDFTLPVTPSLPAVFGVSWQYSFLLCSISISVLCNCYGTGCNGLRLMGLLGPAELAATEGSVGIAAALAKPAAGTPDHPKANEYYSDPRLAAYAVPYAPILSCTDAAKNSLRREVEILKSKPHWSKAYFYLWDEPLNVEQYDMICNISNELRSYAPDVRILTTYYCGPSGSELAPSTFEAFAKVPNVLRPHTQIFCTSEWVLGTREDLVKDIVAELRPDLGEEWWTYVCMGPSDPQPNWHLGMRGTQHRAVMWRVWKEGGTGFLYWGSNCYEKAMIPSAEICFRRGLPPGDGVLFYPGEVFSSSHEPVASTRLERILSGMQDIEYLKLYSSRYGREEGLALIEKTGMYLGPDRYTLDHGPVDVMRGEVYRTCRS

SEQ ID NO: 58015 - protein, 696 aa, Zea Mays
MGMAADATTAMTIDFLRARLLSERSVSRAAKERADHLAKRVVELEEQLRTVTAQRRKAERAAAEVLAILDSQGFGRLSDAADDSGSEYEADTGDPNAVERDGGGGNAAEDALSGSELGAPAAAAAASAAQAGGLSWRGRAASPECERRRPQHQQHKGRQLRQRHGHGHGHRRGYFYCRAADSSPKYHPGQSCRKIKRKELRSQTEEEEGNDNAVESTEDGQERSDCTVCTDQPADVDGEVNQDGHGSSSNGRGEDRDDLAMVYEKDGEMERVLEKQAELIGQFEAQENAQREWEEKFSLSRDSVMDNVNLLNNKLNQAENACGRRETARVVDKEVVCEQARSSDNNFHCINDPSECLPNGPVSELPQNVAKDSVTEHRKFDGFGHDCVVTAAAVISSHGELQVRKDVLTTKSYPEGSGNNLGKSALPPQGSCGSRLNAGHRNGQGDESSDSGSSYHVNARSSEQYINTSSVGSQLSDTPKSEVSEWSSSCFHNHTDNQLDTQLHQSSNKDVGGVLEALRRAKMSLRAKLSWPSLASKNILALEAPDDLPVNGMELSLCRTAHVSQEIFALPTPTDYLNKVLPHDDVKVPIGPAGLFRLPIDSFPRDEMTTRDGYGSWFSLTSVSPPYVSPSYHADHIMPALSLSQYGSGLSLNPYYDPHSSMLLSMPTAGGRSVPVSDFRIGDGSFLREVPRPDNY

SEQ ID NO: 58016 - protein, 123 aa, Zea Mays
MVANEIIRRLEKKLFPGLQDSIVLKEVGSPKTHRRFLARNDGTYGPMPRGKPKGLLAMPFNTTSIDGLYCVGDSCFPGQGVIAVAFSGIMCAHRVAADIGLEQKSPALDAGLLGLLRWLRTLA

SEQ ID NO: 58017 - protein, 640 aa, Zea Mays
MFGSTNRSQTAAPTFGQPQFANQAGGTRIKPYSQTPDVDSATSGTQPAAKLDSISAMPEYKEKSHEELRWEDYQRGDKGGPNTSGTQTLAPSFPSPIQHNTFASTSNPFSTNPFSTNNPFAPKPTTTTSSPFNTSFNNASVASSSLFTSSPGTTMFGQPGVSTLPAPASNSPSLFGNINPAPATSSIFATSVTNNPSPFGTGTSLANTQSAPLFSSAFAQPTSSTPAFSSGSLFGSTNPGSLFTSSGPSLFSTPTFQPSAPAQSSNMFSFQPPIQPAASTGGLPFFPNTNQALTGQPTSSLSSMVMQSALVSNPFGMLPAMPQMSIGNGGSSPSVQYGISSLPVAEKPLPSRSLSMAVPRHLSQRRIKLLPRKYNPISDGKVPFFADDEESPATPKADAFFIPRENPRNLVIRPIEQWSSRRETGRQYTAKNVTDSNKYEDASIESERGKSAMSPSSRPPAVENDKQHEARAMAQHANGNGTSVERLLPKLPRADYFTEPSIEELAAKERAEPGYCGRVRDFVVGRHDYGSIKFFGETDVRCLDLESIVEFNDREVIVYKDDSKKPPVGEGLNKAAEVTLLNIKCVNKKTGEPCQGARVERYREMLVKKAEEQGAEFVSFDAVKGEWKFRVKHFSAYGLW

SEQ ID NO: 58018 - protein, 73 aa, Zea Mays
MAGSKDHTEVSTSNIIKPTLEELFVNDQQRFEDIMKQNEKEVLQQLVNDVRRKRRSTYHNSRWIATRRSSAKG

SEQ ID NO: 58019 - protein, 462 aa, Zea Mays
MTTEELLPDRYRDKASEYRKGTDTMDVWFDSGSSWAAVLAKRDGLNFPADIYLEGSDQHRGWFQSSLLTSIATTGKAPYSSVITHGFVLDEKGFKMSKSIGNVVDPEKIIVGGKNHREEPGYGADVLRLWVSSVDYTTDVLIGPQILRQMSDMYRKLRGTMRFLLSNLHDWKPDNSVPYNDLPKIDKYALFHLETVMTSMKDSYESYQFYKVYQILQRFATVGLSNFYLDVAKDRLYVGGRVSFTRKSCQTVLMAHLLYLVRAISPIMPHLAEDVWQNLPFQYTLQDGSLANFVFDLKWPEKNEEWLSAPKDDVDFLGVILELRSEVNKILENARTGKLIGSSLDAKVYLHTESSDTVLKLKELSSASNDADALHRLFITSQVDILPILNEEITSSVPYTGKFSNPRTGVIWIGVTRADGAKCERCWNYTQDVGSFHDHPTLCVRCYGVIELQTQPAAAAVS

SEQ ID NO: 58020 - protein, 713 aa, Zea Mays
MDGIRLNDNDSLEAYGVDKQKLVEEITRAYAHQIYIDGFFNGDPHPGNFLVSKEPPHKPILLDFGLTKRISESMRQALAKMFLSCAEGDHVALLSAFSEMGLKLRVDMPQQAMDIATVFFRQSTTASEAKENIKTLNDQRERNVKALQEKMKLNKKEVQRFNPVDAFPGDAIIFMRVLNLLRGLSASLNVRIVYLDIMRPFAESTLLGSLTHGQIPNSQWIFDSPANSDVESKLRNYLLELGSDKILGIQVCAYKDGKVIIDTAAGMLGKYDPRPVQPDSLFPVFSVTKGITAGMVHWLVDKGKLKYEETVANIWPNFGTNGKELIKVHHLLNHTSGLHNALGDVVKNDPLLVCDWEETLNQITKSTPETEPGSAQIYHYLSFGWLCGGVIEHASGKKFQEILEEAIVRPLHIEGELYVGIPPGVESRLAALTVDTEELQKLSGIRAGADVPAALLNNIAQMASGVPAIFNTLNVRRAIIPAANGHCSARALARYYAALAAGGSVPPPHSSGAMPPLGSHVHTPKFPTAPLKKKKKGAGKKKGAGGGSMGDLKVQDISGGSSDRNGYCQLRTSDADSEAGSGSGGGGRMFGSDRILDAFMGVGEYEGMAHRDGKFGLGFRRYDDASSGSGRLRCFGHSGMGGSTGFCDVENGFAIAVTVNKLSLGSVTRGVVRLVLEELGLPVPDEYSATGEKGPDMMLNLTTTTTTTPPQLR

SEQ ID NO: 58021 - protein, 1326 aa, Zea Mays
MASRQHNAQFHKSKTLDNKYMLGDEIGKGAYGRVYKGLDLENGDFVAIKQVSLENIPQEDLNIIMNLNHKNIVKYLGSLKTKSHLHIILEYVENGSLANIIKPNKFGPIPESLVALYIAQVLEGLVYLHEQGVIHRDIKGANILSTKEGLVKLADFGVATKLTEADINTHSVVGTPYWMAPEVIEMSGVCAASDIWSVGCTVIELLTCAPPYYDLQPMPALFRIVQDVHPPIPEGLSPEVTDFLQQCFQKDAMQRPDAKALLMHTWLQNLRRALPGSLRQPTPLRNIDGDDEGSRGDNSLGFCDTPGDIQTTITSNVDQENGSKEPIMDSTVQSKSEELHDGNLKLTEGSSSNSVALMKDNVVLNKGPTLVLHEKLPVESSSGGADLNGKVMAHELLQGGPPGKVELENKESSSSDVFSFQAGRQNIGFQKVVEPSVVEGPKQLSRFSDKPEDASLEDLFPPNDKWGDNGAEPSTSTTVQELKYNGVQNAFLKGLNARVEKQKENDNESMNGGKLIEFAMQLENIDALGFGEHIPGESLFPVQSVEYNKIVAQLRPGESEDVILLACQKLLSIFSYRPEQKHIYMAQNGFLPLMELLEIPRNRILCSVLQLINNIVKDSTCFLENACLVGLIPVVMNFAEPNRPKDVRVQASLFLQQLCQASTLTLQMFVACQGIPVLVSFMEPDYAKYRDMVHLAIDGIWQVFKLQHSTPRNNFCRIAAKNGMLPRLVNTLYSLNEATRFASVSGSGASVTQNGSTPRRRSGQLDPSVLESCKARLDHHHSSGSLQSLQTDADKHHILMDSSSPRFSDKTGSNLERNDNDLVIRPQRLSVSAGRTSTDRSPKHVELVSNGHISGQNDQVRPLLSLLEKEPPSRHISGQLDYVCHITGLERHETILPLLHTSTERKTNGELDLMMDFAEVSRHGRENGHLDSSIKVSNRVHSMKYAPSTSASNEGASTSGAASQTASGVLSGSGVLNLRPGSTTSSGPLAQMFSSMSADVAREYLEKVADLLLEFAQADTVVRSLMASQSLLTRLFQMFNKIEPPILLKILRCINHLSGDPNCLETLQRTDAIKHLIPILELCDGPLVFQIHSEVLNALFNLCKINKRRQEQAAENGIIPHLMNFVMSDSPLRQYALPLLCDMAHASRNSREQLRAHGGLDAYLNLLEDDVWACTALDSIAVCLAHDNDHRKVEQALLKKEAIQKLVKFFQDCPEQYFVHILDSFLKIIMKSSRLNTAMATNGLTALLIARLNHRDAIARLTLLKLIKVVYEHHPRPKQVIVENDLPQKLQNLIEERRGGQRGGHQVLVKQMATSLLKALHINTVL

SEQ ID NO: 58022 - protein, 114 aa, Zea Mays
MRQLMAGPPGLAMAPLQLPSLSLSLLRGGSATEGRRSVYTHRQRALEWVECGEEGDDGAIATERGDRSQVLHIATTAQEKMKSWWRISRSSKSTMSSRRGLAVNPQSAACEGRV

SEQ ID NO: 58023 - protein, 184 aa, Zea Mays
MLAAGYCMYGSSCTLVLSTGTGVNGFTLDPSLGEFILTHPDIKIPKKGKIYSVNEGNAKNWDAPVAKFVEKCKYPKDGSPPRSLRYIGSMVADVHRTLLYGGVFLYPADEKNPNGKLRILYEVFPMSFLMEQAGGQSFTGKERALDLIPTKIHDRSPIFLGSYDDVEEIKALYAEQAKSSSASS

SEQ ID NO: 58024 - protein, 518 aa, Zea Mays
MQVMILDYKLLFPSGSAIAGLVNSFHTPAGAATAKLQIATLLRSLGGSFSWAVFQWFYTGGDGCGFQAFPLFGLEAYKKRFYFDFSPSLVGIGMICPPMVNFSLLLGAVVSSAILWPILQGKRGEWYDADASPSSLRGLNGYKVPMGISLVLGDCLFQLAAVSIRAARGFHHRRQHQQDEDDGGQQSLSYDDRRRIHNFQSEGMPTHVSLAGYAILAGIATVFLPGIFPQIRFYHVAVCYAMAPLLAFCSSYASGLTDWSLGTIYGKLAIFIFGAWVGEASGGAIAGLVAGGVVVVVIGNSSELMHDFKSAYLTLTSPLSMFASQVIGTTLGCILNPLLFLGFQEMAGGADHLGEAGSLYAAPMAMAYRGIADLSVEGIKTLPRHSVMLCVPCFLVALCVDALAAVAAANGWRIKGYVPNIMAMAIPFFVGPTFAIDMCLGSLLVILWRRRNKQAANLLSVVVASGLICGDGLWALPSSLLAIFKVEPPMCMKFLSNYQTEQMRKHLILAAAARRRTS

SEQ ID NO: 58025 - protein, 150 aa, Zea Mays
MAGAEAGAQAGPARRQGQAEGAQGGLHPPRYRLHLRGHEGLESDGGRPGGPRRRRGQAAQGRRRRNRLRRASQGGQEGGRQEGGGQEEEGRREEAAGPVVPAPVARRRRSAAVPPPPVPAPVRRPQRRGGPQLLRHLLIRIPGPVFFLYI

SEQ ID NO: 58026 - protein, 814 aa, Zea Mays
MPLLPTKPAPALNPFLLPLASLALPRALPPIRLHAKKRLRGLSSAAVSAAASTSSSADPSTELRALCSHGQLAQALWLLESSAEPPDEDAYVALFRLCEWRRAVEPGLRACAHADDRHAWFGLRLGNAMLSMLVRFGETWHAWRVFAKMPERDVFSWNVMVGGYGKSGLLDEALDLYHRMMWAGVRPDVYTFPCVLRSCGGVPDWRMGREVHAHVLRFGFGEEVDVLNALMTMYAKCGDVMAARKVFDSMTVMDCISWNAMIAGHFENGECNAGLELFLTMLHDEVQPNLMTITSVTVASGLLSDVTFAKEMHGLAVKRGFAGDVAFCNSLIQMYASLGMMRQARTVFSRMDTRDAMTWTAMISGYEKNGFPDKALEVYALMEVNNVSPDDITIASALAACACLGSLDVGVKLHELAESKGFISYIVVTNAILEMYAKSKRIDKAIEVFKCMHEKDVVSWSSMIAGFCFNHRNFEALYYFRHMLADVKPNSVTFIAALAACAATGALRSGKEIHAHVLRCGIEYEGYLPNALIDLYVKCGQTGYAWAQFCAHGAKDVVSWNIMIAGFVAHGHGDTALSFFNQMVKIGECPDEVTFVALLCACSRGGMVSEGWELFHSMTEKYSIVPNLKHYACMVDLLSRAGQLTEAYNFINEMPITPDAAVWGALLNGCRIHRHVELGELAAKYVLALEPNDAGYHVLLCDLYADACLWDKLARVRKTMREKGLDHDSGCSWVEVKGVVHAFLTDDESHPQIREINTVLEGIYERMKASGYAPVESHCPEDEVLKDDIFCGHSERLAVAFGLINTTPGTSISF

SEQ ID NO: 58027 - protein, 218 aa, Zea Mays
MVRLAKFYLVCYNSLQSLGWFVSLLRLLPCLVPPFPVHSAYVVAGDLICFLQTCAILETVHAAIGLVPTAPLLAFLQWGGRIHFILAVVRQIPEVQSSPSVFITFIAWSISEVIRYSHYALTTLKVCPAWLTYLRYTAFIPLYPIGVGPGEMWTMYQALPFVKKRDLYSGFFEKFSMSYRSFLVGVLVLYPFLWLKLYQHVFKQRKSKLGKGSRKKRA

SEQ ID NO: 58028 - protein, 115 aa, Zea Mays
MPIHLAPSTDPPSPARARMAMLLRKVWGSVLARAAAPGADPRARRAQAHRAEQYQYHGSLSLGALDAVPTDVLAQILRLLGPLDAARSSAVCRAWRVLASDNGLWAFFLRLGPEP

SEQ ID NO: 58029 - protein, 288 aa, Zea Mays
MVMRRSKSSEFRLGKIVAIRDIIPPPLREAFNDVYIAYELMDTDLHQIIRSNQALSEEHCQYFLYQILRGLKYIHSANVLHRDLKPSNLLLNANCDLKICDFGLARTTSETDFMTEYVVTRWYRAPELLLNSSEYTAAIDVWSVGCIFMELMDRKPLFPGRDHVHQLRLLMELIGTPNEADLDFVNENARRYIRQLPCHARQSFPEKFPHVQPLAIDLVEKMLTFDPRQRITVEGALAHPYLASLHDISDEPVCSMPFSFDFEQHALSEEQMKDLIYQEALAFNPDYQ

SEQ ID NO: 58030 - protein, 163 aa, Zea Mays
METRPAPCDLEAAVPAGSGAATAAAAQQEAPAAKKVAEEEDPRLRWAFVRKVFWNGPPIAVLFVQSCSPCSSTGRSTPGTSSCSPYSLSAAVSASPSPPPPPSAQWSCKLPSSQLLLSWGSPSSPSGASRGATTSPSRSPSCSPASSCCWCTSSSRSASRWEG

SEQ ID NO: 58031 - protein, 98 aa, Zea Mays
MLCSTFLGRSSGSSRRPAVSSSRELSTEAEQTRSRTTDASPGAFQRSGAPRWSPQMPDSSDGRRSSSSRRHSSNPKNYESTIRGMQGLNFDGDDRVHY

SEQ ID NO: 58032 - protein, 67 aa, Zea Mays
MACVVTVRYEAELTLMQNSCDQLAIGKETTRRLGMGTKCKDESLASLPIDELTEKADGFARVFPDLC

SEQ ID NO: 58033 - protein, 123 aa, Zea Mays
MPTAANPAAALPLTLDLEDFKGDFSFDALFGGLVDELLPEYRGEDDAAPAPPPPPPVLGAAPPVFPAVDELLGLFKHSCKELVDLRRQIDKRLQNLKKEVAVQDAKHRKTLGEAETIQYPTCS

SEQ ID NO: 58034 - protein, 371 aa, Zea Mays
MTNNNNGGNDTNAAASGWLGFSLSPHMDEHQLQLQQQQQHGLFFPSVTAGAAASYGLGGGLATSASPYYTPQLASMPLKSDGSLCIMEALRRSDQQDHHGPKLEDFLGAAAAQSQAMALSLDNPAAASSFYYYYYGGGGGGGPGHHHGSFLQPPCVDLYGGASAGSQLVADDEAAATATAMASWVAARAENGALLAAAGQPHQHALALSISSGSSPSSCVTAHPSSEYGAAAAASMDGGRKRGGAAGQKQPVHHRKSIDTFGQRTSQYRGVTRHRWTGRYEAHLWDNSCKKEGQSRKGRQVYLGGYDMEEKAARAYDLAALKYWGPSTHINFPLEDYQEELEEMKNMTRQEYVAHLRSGFSRGASMYRGVT

SEQ ID NO: 58035 - protein, 231 aa, Zea Mays
MPICAPSSDSSASASSGLGARVWVLHGLALGAAAAAAAVAYLYRRPTGFRSRAVGIIPARFASTRFEGKPLVPILGKPMIQRTWERVMLASSLDHVVVATDDERIAECCRGFGADVIMTSASCKNGSERCCEALKKLDKHYDIVVNIQGDEPLIEPEIIDGVVMSLQRAPDAVFSTAVTSLKPEDAFDTNRVKCVVDNLGYAIYFSRGLIPFNKERQSKISISSSSWNRGL

SEQ ID NO: 58036 - protein, 215 aa, Zea Mays
MPNGTRDSTLELLLGDNGWVTHYENGICYSLDATKCMFSSGNRSEKLRMGQLNCRDEVVVDLFAGIGYFVLPFLVKANAKLVYACEWNPHALEALRRNVSDNRVEDRCIILEGDNRVTAPKSVADRVCLGLLPSSECSWATAVEALRVGGGVLHIHGNVNDSDETRWLDSVVESISNVAKNHGLSWNVSVEHVERVKWYGPRIRHLVVDVTCRQI

SEQ ID NO: 58037 - protein, 394 aa, Zea Mays
MLSNFALEQQLHTARQELSHALYQHDAACRVIARLKKERDDARALLAQAERQIPASVAGAAPAAVVSNGKRVIEDEIGPDGKKIRPGINPVMIDELTECNAMLSAQRKKRQVPPTLAPIDALERYTQISSHPLHKTNKPGILSMDIHPSKDIVATGGIDTNAVIFDRSSGQILCTLAGHSKKITTLKFIPRDQLFVTGSADKTVRIWQENENGNYNCVHTLKDHTDEVEAVTVHVTQKYFVSASKDNSWCFYDISTGSCLTQVGDASGQEGYTSASFHPDGLILGTGTTDAVVKIWDVKAQSNVAKFEGHVGPVTAMSFSENGYFLATAAHDGVKLWDLRKLRNFRTFSPYDLDTPTNTVEFDFSGNYLAIGGSDIRVYQVANVKAEWNLIKTE

SEQ ID NO: 58038 - protein, 164 aa, Zea Mays
MQPPTRFVCHHKAHTAGLGSAPRVRSQGQLACRRGQTGRSGARRDQIRCCCARWQRRSLWFTLLRVKEELMTTTKLGLPIIEPVLCTRRNFRPHLVLISMLDSPPARELIVSREVETKGRVELQRISLYMEATCEQERRGGRLYRSEEPKEKQSEYLLEHIYLP

SEQ ID NO: 58039 - protein, 425 aa, Zea Mays
MNIRHHNIVLFVGYCAETQEVVVRQEGKHIFAEKRERLLCFEYLHNGSLHKHLTAEPCGLPWHICYQIIKGICLGLHYLHDKNIIHLDLKPDNILLDDDMVPKITDFGLSRLLGNGKSHTITQTRIGTWGYMAPEYLDDGVITMKTDIYSLGVIIRHMVKGRNSADTTDEEVLANWLIRLEKDPSQMMRQQTTRLLFETEYKEQIKACMDISWRCTLRKPMDRPTTQHILLTLEETEAKIKSVVGPTPPNAGQLQIAKFGPWGGDGGKTRDIRMTPCHLHSVTISSGTIIDSIGFSFTDHYGQHHTTGPWGGKEGTNKLGGLHPNTFQHSMHIQIRVASMMIELGPSEFLTGVSGTSGPFKNLTNVVTSLTFVTNTRSYGPFGKGRGTPFHIQTQNNGRIVGFFGRSGQYLYAIGVYTNQDVLQI

SEQ ID NO: 58040 - protein, 61 aa, Zea Mays
MLILLASMSKSSDMSSTEPRCSDHNTCVSSLSLFAYASEFDELGRGGWLWWGRRCQRIWRA

SEQ ID NO: 58041 - protein, 417 aa, Zea Mays
MSEFLDLELQDGIRMPWNVIPGTKQETVNCVIPVSAIYTPLKPISDIPVLPYSPLRCRMCRSILNPFSIVDYVAKIWVCSFCFQRNQFPQHYSSISENNLPAELFPQYTTVEYISSTETGPIVPPVFIFVVDTCMIEEEIGYLKSALAQAVELLPDNSLVGFITFGTYVQVHELGFGLLPKSYVFKGTKEVTKEQILEQMCFFAGKKMPTTGVIAGTRDGLSSESISRFLLPASECEFVLNSVIEEIQKDPWPVPADQRASRCTGAALSVAANLLGVCVPGSGARIMAFVGGPSTEGPGPIVSKSLSEPIRSHKDLDKDSAPLYDKAVKFYDQIAKQLVHQGHVLDLFACAVDQVGVAEMKVAIEKTGGIVVLAESFGHSVFKDSLLRIFQSTDDNLGLSFNILPNRRIELSNIPNK

SEQ ID NO: 58042 - protein, 194 aa, Zea Mays
MMELKNRFGGLLNQASRLFGLGDELNEDAMLGKLEGMKDVIEQVNRQFKDPDLTTFVCVCIPEFLSLYETERLVQELAKFEIDSHNIIINQVIFDEEAVESKLLKARMKMQQKYIDQFHMLYDDFNITKLPLLSEEVCGVQALQNFSQHFLTPYKSTLKRGTVEELEQRITILKSALQEAETELDRVRKGKQSV

SEQ ID NO: 58043 - protein, 496 aa, Zea Mays
MIAVRWAALLVALVVACGSAAAGAAAGEGPNWLGGLSRAAFPKDFVFGTATSAYQVEGAASTNGRGPSTWDAFVHTPGNIVYNQTADVAVDQYHRYREDVDLMKSLNFDAYRFSISWSRIFPDGEGRVNPEGVAYYNNLINYLLRKGITPYANLYHSDLPLALQNKKLFTDYADFCFKTFGDRVKHWFTFNEPRIVALLGYDAGSIPPQRCTKCSAGGNSATEPYIVAHNFLLSHAAAVSRYRNKYQAAQKGKVGIVLDFNWYEALTNSTEDQAAAQRARDFHVGWFADPLINGHYPQIMQDIVKERLPKFTPEQAKLVKGSADYIGINQYTASYVKGQKLLQQKPTSYSADWQVQYVLERNGKPIGPQANSKWLYIVPEGMYGCVNYLKHKYGNPTVFITENGMDQPGNLTRGQYLHDTTRVQFYKGYLAELRKAIDDGADVAGYFAWSLLDNFEWQSGYTSKFGIVYVDFSTPKLERHPKASAYWFRDMLQKHL

SEQ ID NO: 58044 - protein, 127 aa, Zea Mays
MEGEAEEKRKKDEELEKQKQVEEESAKEDADSKLSKVLDRLDTLEGVVKEIVDDKRKLSSPDLPTKEEVAKKNEASPAKASDSRSYGQPVVAANSKDTNYASNAPANTAKPNNKGIGDKAFPVESES

SEQ ID NO: 58045 - protein, 236 aa, Zea Mays
MIERLIVECDRKIQRALKRLADDDAKAAIAISVSEVTLTDDILQLSKQIKEKMVEVDAFDFEGRTDDKIKAQEVVEELRTKRADMQATLLLDAFNKDRASLTQPAQPPQVAAAPPPAPPDARTQEMINEKLKKAEELGEQGMVDEAQKALEEAEALKKLARRPEPPSDPSKYTAADVWITDQKLRLCDICGAFLSVYDNDRRLADHFGGKLHLGYMLIRDKQKELQVLSVMYRFLL

SEQ ID NO: 58046 - protein, 707 aa, Zea Mays
MKLEPALGDDSREVREAKYRRIRHEGKGEAKQPATARDRSPRPVVNSIPSNADPVEGPFECHMRPGFIYANGEKGHLSDRNFDDPSTRVSGLEKDRTELLRMLDELRDKVQRSCEIADKSSVNASTNRMVNPTSSCIPHERLSRLRYGSPQLQRNGSQHSPSLNGQTPGVPPAFPSLSVQQDLHGYGESVAHTGAPIYPAAPYPWRNFDNYFQGHYDPDPLISYHHDGFYHQPACSCLHCYHREFLPVRRAPYLMNNPSLYHAEGPVMFGAQNYNTRGMNGMMRRSHMRATLSKKPAQTCEPIVNGAPFTICYNCYEVLQLPKNSLLLGKDEYKLRCGSCSHAIVVRLDGSRLDVSAPTPVSHLSPGSKNYYNNGQANNGQNADERLLPSYSFSAGSHCSQEKDLPSNSSEPDKTQCISSASISEDDNSPARSNSQKNSSGSRDVPHDAEVVIRVPTLPLRDHFGYSPSDRVVDGPGKGSRSTRSEHEKGVLTESFKPNKVKCVPVASVLDPSDDEYDDPEHSQDPGGGAQYVDHLRATKSGDSFFSSLIKKSFKINGGMGNGRANVFINGYPISDRAVRKAEKIAGPVYPGEYWYDYRAGFWGVMGQPCLGIIPPYVAEFNYPMPKNCAGGNTGVFINGRELHQKDMDLLVGRGLPDSPDRSYRVEISGKVSDEVSGEELYCLGKLAPTVEKMKRGFGMRVPRIIQ

SEQ ID NO: 58047 - protein, 496 aa, Zea Mays
MNLKDPEDLLYPHIVSDHSQQFRLLDVPQRSNGQSAHQTEGTNGLSLYDSHNIEDANGSQKFICRLCGLKFDLQPDLGRHHKVAHMDSDVVGHSSLGRGKYQLNRGRHYYSAFKKSLRPTSTLKKRSSSGIEKNFKFQSSALTSQIIQSETSSFGKLQDFQCSDVAQTLFSKIQKTRPHPSNLDILSVARTVCCKTSLAAALEVKYGSLPENIFVKAAKLCSDNGIQIDWHQEVFICPKGCKSRYNSNALLPMQLTAVDFPEAPSVDPLNDDEMWAMEEYHYVLDSKHFGWKPKNESVVLYEDISFGREKVPIVCVIDMDAKDSLGMKPEELLSHGSSVPWQGFHYITKRLMDSSLINSENSMPGCACSHPECSPEKCGHVSLFDGVYASLVDINGTPIHGRFAYDENSKIILQEGYPIYECNSSCTCDSSCRNKVLQKGLLVKLELFRTENKGWAIRAAEPIPQGTFVCEYIGEVVKADKTMKNAERLIGKDFGL

SEQ ID NO: 58048 - protein, 410 aa, Zea Mays
MQKHQKYFAVISKSTGDLLPYFIAVANGAISKEVVRKGNEAVLRARYEDAKFFYKMDTQKKFSEFRGQLSGILFHEKLGTMLDKMTRVENTVAELALILGINERTVPIIKDAAALAMSDLATSIVTEFTSLAGIMARHYALRDSIPEEIAEALFEITLPRSSGDVFPRTDAGIVLAVADRLDSLVGLFGAGCQPSSTNDPFGLRRVSYGLVQILVENKKSFDLRRALTLLAGVQPIAIESDVIDEAVQFVTRRLEQLLVDEGINCEIVRSVLMERANCPYLAAQTATEMEAFSRTETFQKIVEAYSRPTRIIRGKEIESALEVDPHVFEKDEEKVLWSAYLEVADKIHPGVDIKTFVDASLILIQPLEDFFNSVFVMAEDERVRNNRLTLLRKIESLPKGIADLSVLPGF

SEQ ID NO: 58049 - protein, 366 aa, Zea Mays
MKWLVGALVLILFFMKRGEFSGQITSKLGSSFSVVAFVIVVVTCTLLAMVATIPLSQLLCFHILLIKKGISTYDYIVALREQEQQEHSEHQSPQISIISSITGLSTSSSFGPLHRGSWCTPPRLLVEDQDVFHPDMPQNSTGKKARKDEGSKRKPPGAVKISTWSLARLNAEDVTKAAVEAKKRSKVLQPITRRGNILKPDKRTDKSRVFLPVPEQSPDPMARTSASGTDGNLSDMMMETPASLAPLQHEARSDYQPSAVTSIMNLNLTSSPESSLESPDLHPFRISMSGADELRSFMSLAASESTAQKTIALSRSTSGGYEASGGDDSDQIPSRIVHRSSNWTNVILNSGRQATMSDLNLPRLHL

SEQ ID NO: 58050 - protein, 142 aa, Zea Mays
MQHAFLGNIGLTFPSYPGVPVGYMIPQVPYNNAVNYGPNNGYGGRYQNNKPSTPMRSPASNEAQESLTIGIADEHIGAVVGRAGRNITEIIQASGARIKISDRGDFISGTSDRKVTITGTSEAIRTAESMIMQRVSASSERL

SEQ ID NO: 58051 - protein, 76 aa, Zea Mays
MQGFSCDIMFTDKELDIIEMAVYGDVIRPGKQCRCRTVAEVLGQVKPTNRMAAFDSIQQRNLSSFSQVIILGNGCS

SEQ ID NO: 58052 - protein, 1115 aa, Zea Mays
MSIAWLPSTNPAAGPLAIAEAVPISISLVQFFSPECTMSALPPAEELDASHQKKRRRRKKHREQVEAIAASSEPPPPPASPESKPKSTIPVAPETLTSAAVRESPRPLGNPESKSESPLLVAPETLASAVMAAAAVRLVKERERKNQVVPPASPLMEEPVWKEEKQRKKRKHVGAALVVPSPPTPDAAQNLRMEAKMMAEGATVRKKQRRLKAGQEQSGEPPFSIDVHPQGGEEATDDGGVGVMVTQCVKRSKSKNSRVLKTQQTLPQGFFPPMANPNSIDQDPNYSSPFGAFFAQFAYKPANIADRPARLPPRGHPSSGSSLLTGKETSKAAWTATSNTKQPCPASESTSDSQEEARIEGKEKPEKKMTREMAVRESTRHLAILESMSASSVPVAPETPTSAAMTAATVMQDKECKRENQEALPAAPLIEDPVPKVEKRHKKRKVAQITQMENKVMTEGATVRKKHRRQKVKQEQSGQTPFLNDVYSKAGEEAAAGGVMGSQCVKRIDRSKNSKVLKKQQTLPQGFFPPIANPDFIDQDPNYCSPFGAFFAQFAYKPERRQDGNGSPLPSTTGRTARLPPRGHPLSGSSLLTAKEVSKAARTTTLNTKQPCPASESTSDSQEEARIEGKEKPEKKMTREMAARESPRHLAILESMSASSVPVAPETLTSAMTAATVMQDKERKRENQEALPAAPLIEDPVPKVEKRHKKRKDREAAMIIPSVPTAAVAQITQMEKKVMTEGATVRKKHRRRKVEQEQSGETPFLNDVYSRAGEEAAAGGVMGRQCVKRINRSKNSKVLKKQQTLPQGFFPPIANPDFIDQDPNYCSPFGAFFAQFAYKPERRQDGNGSPLPSTTGRTARLPPRGHPSSGSSLLTAKEVSKAARTTTLNTKQACPASASISSSQEGVRVKGKKKPEEKTTMEKKPRKPPILLSPAEKWSDKYRRLPLDQLVPPPRSPHKLLQEKYASDPWKVIVICMLLNLTQGKQVRKKVKGFFKRYPDAQTAYTADPEKMAEYLAPLGLQRVKTNRIQKFSKAYVGEEWTYITELCGVGKYAADAYAIFCAGRANEVVPKDHKLVDYWNYVCFELPSIQKSQEAGVTELGNLVAKVQEVAVSC

SEQ ID NO: 58053 - protein, 250 aa, Zea Mays
MYLSELLAERHKLTPFIPVIPHSVRLLNQEIFRVSTLLENASLLNQSGLEHGSPLTTGGLYSNGAATDMNGWPSAFQSESSPAYSWLGGSQGSSSGLIVKKTMKVDIPVDKYPTYNFVGRILGPRGNSLKRVEANTDCRVLIRGRGSIKDPAREEMMRGKPGYEHLNEPLHILVEAELPVDIIDARLMQAREILQDLLKPVDESQDFFKKQQLRELAMLNGTLREEGMQRFGSASPFHNSLGMKRAKTRG

SEQ ID NO: 58054 - protein, 475 aa, Zea Mays
MRGLDVGDQFYSRAEMVVLGIHSHWLNGIDYMGMKYQGKKEYANLTFPLATCIVMSGIYEDDLDKADEIIYTGQGGNDLLGNHRQIGSQQLKRGNLALKNSRKNGNPVRVIRGHLSKNSYTGKVYTYDGLYKVVDDWVQNGVQGHVVFKFKLKRLEGQPSLTTSEVRFTRAEAPTTISELPGLVCDDISGGQENIPIPATNLVDDPPVPPSGFTYLKSLKIPKDIKIPSSIIGCDCEGDCASNKNCSCAQRNGSDLPYVSYKNIGRLVEPKAVVFECGANCSCNHDCVNRTSQQGLQYHLEVFKTASKGWGVRTWDTILPGAPICEYTGVLRRTEDLDGSQNNYCFDIDCLQTMKGLDGREKRAGSEMHLPNLYPENDSDAPPAPEYCIDGSSIGNFARFINHSCQPNLFVQCVMSSHNDVKLAKVMLFAADTILPLQELSYDYGYRLDSVVGPDGKIVKLPCHCGAPDCRKRLY

SEQ ID NO: 58055 - protein, 722 aa, Zea Mays
MDDESKSAPKSDVNTDAGAEAAAAAAPLPPSSSETAETEARVEAADGESQVVERLVELVSEIAAISDFRNSYRRQFCNLSRRIRLLVPMLEEAKEAPTPLTVASEAALRRLREALHAARDLLQLGSSGSKIFLVLDREKIMKTFQDVTARLEQALAGISFDELNISDEVELVHTQFKRAKERSDSSDDDLFNELMSLCNSSSSDSVDPDTLRRLSEKLQLVTIYDLNHESLTLHEMASGGDPGAVVEKMSMLLKRIKDFVQTEDPEMGAQASTATISTKDNSACPVIPDDFRCPISLDLMKDPVIVATGQTYERGYIEMWLEAGHDTCPKTQQKLANKSLTPNYVLRSLITQWCEANGIEPPKRPAQLRDAPLSCSAAEHSNVLELLQKLSSQNLEDQRGSAGMLRQLAKRSAENRACIGDAGAIPILVSLLSTTDVSTQEHVVTALLNLSIYEENKARIISSGAVPGIVHVLKRGSMEARENSAATLFSLSIVDENKVTIGCSGAIPALVQLLSNGSQRGKKDAATALFNLCIYQGNKGKAVRAGLVPILLELLMETESGMVDEALAILAILSGHPEGKTAIGAASAIPVLVGVIRNGSPRNKENAAAVMVHLCSGEQQQQHLAEAQEQGIVSLLEELAESGTDRGKRKAVQLLERMNRFLKQQSQAEAEAEAMAQAHAQAQAQAQAQAQAQPQILVQAQAHADMQAERSLLPTSSDISDR

SEQ ID NO: 58056 - protein, 57 aa, Zea Mays
MRKLTTVREFLQRLTLVYSLDLEARAMRAHPGLLMTHSLSSLRFADDIQCALGVNFI

SEQ ID NO: 58057 - protein, 1350 aa, Zea Mays
MSSGTVAASDPGGGETKLVAGDDVTISEAAGDMPAFAADLKVEEKATLTMDVAHERGDMAVSDPLYATESAGMVGTEGHGDEPVEDVDAVNGEDGGEEGTQEAGAGGLLTETERKPVLVVDVPAAAGSAAPEHAEAAYCISESNKVEENHVNAEPGRKNNESDHGVVPSDKEIQNNVPGDMEESSEEHEGDGAPVVDQPNNTSEMLPQTGEQFPDSGNSPDSNLEAASLGNVDQGARYRLPPLDKGRFQVADLVWGKVKSHPWWPGEIFDPTDASELALKHRKKGSHLVAYFGDSTFAWCDESQLKPFVTNYSQMEKQSSSDGFVGSVNNALEELSRRVLSGLSCSCLAEELADNGMSYTVDNAGLKDGVTCSAVNRPEILNCFSPENLLNYIKELALFPGQGGDLLELVIACSQLTSFYRSKGCPELASFQTSDAWVEDDLDGIDTLSTQNVMVEEPVINEVQPTQDKPKRGRGRPRKQKAGHDQVVMEKRSTSNQVNDTSYNEKKRNLKSFEDSEKSSAPTGGGSFKIGECIRRAASQLTGSSSIMKAQNEPTVYNNAAEGENGEFDVSSDDAGDELTVEKRAKRRRLHINHAADPRELLSQLCLVATEPMNGYSFSAMIIGYFNDYRNYIVSTTTEANIVDKGTSRRGRKRKEVIPSPEVETTDHMQDSYWSGLSLYNHPVHDLKRESPTTRPRRKRRSSRHAYIPLSELGEPVPKKQIQVMERSIIHVDEKMVDELKPTALVLTFGRSASIPSELDLVKMFSLYGPLKERGTKVHRETNTVKVVFKKRVDAERAFSAAGKYSTFGPSLRSYRLVSMPLSPETQSANNPENHGLEIPGLNMSEAPKDSMEVDLVQKTDKVKVTGELSSEEVETVRQTCLVEAADSTFVSEVDRLEKAGNIDAELIVHVNQIGEGAEAASVSEESSQQVGDIEQAYTQKAASVSDLPTEIETLHSDAIIKELPQKAPDNMQTDIATAPKQSHNPGDNAVFEAVTEVPSTAQDHSEDDVGDEVPEEHTVFPVLQSQTPGEKLVGQSETEQKVGPEDPKSQAENLTVEPVVQGAVEQVEIELESKTTVEVSCEQGYSIEQTVNMEAVIEASGGQLEVGRRISEDESMADANIEHSMVMVDETVEAKVVPLEESTENNAATIGVVEETAEGETKEEAPDEKGKIENNEDADKLAGETRAGEITVEAPDEKTEIKADADTPAGETKECEITVEAPDEKIANKGIVEPIIREITEDQTAAGEPDEEATTTEETVEDVKVLDDKSTADGKPVENATVATNEDSTTVENTLKDAMVAPPGTNTTNAEETALGATVKALDEDALAVEKTIEDTSVEASDVQAGRCK

SEQ ID NO: 58058 - protein, 162 aa, Zea Mays
MSFKWHEEEACVLCVDLCSCFLFCFFFQKLTAGVYSYRPRKQRHNSTQKWFYVLIFVPVSCSVFFKNLQLVCILIGQGSSDITQKWFPRDDRFTQEPRTPHFDKVIQDPGTPHEQPSSSQPLPRWKSQCPGKRRREPRERKGQNWKSQCRSLVNAQRSQFQM

SEQ ID NO: 58059 - protein, 171 aa, Zea Mays
MSLVEAQAHMTREFEGSVGAYHVSYLATRKLLEVTDKQVETSPEANDLGEIIFLYKLVAGASDRSFGLNVALLAQLPSRCIKRASVMAAKLQEELSPREEIKLRRTTDAQTVDGPSESSAEVGLFCAHPYQRLAETCRRILLNITLAQSNNDVTNTLPSLKNAQEIAQKTI

SEQ ID NO: 58060 - protein, 75 aa, Zea Mays
MIEHEAESKHTTYDNTCRKLLLWAFLCGIWAVNATRFPTKTDWLRGFMHTLLLLLLLLVLLLLLLLLLLLLILLL

SEQ ID NO: 58061 - protein, 513 aa, Zea Mays
MSMYALLRSSKQPPTEDQIEDCLAGNLCRCTGYRPIIDAFRVFAKTDNLAYTNSCSEDAKDQAICPSTGKPCSCRNETDVNVNESSLSSSVERYSPYSYNEIDGSAYNERELIFPPELQLRKVMPLKLNGSNEIKWYRPLKLKQLLHLKSCYLDAKLIIGNSEVGVETKFKNAQYKVLIAVTHIPELNTLKAKEDGIHIGSAVRLAQLQNFLKKVVAEHDLPETSSCQAIVRQLKWFAGTQIRNVASIGGNICTASPISDLNPLWIAVGAKFHIIDVNGNVRTTLAKDFFLGYRKVDIKPEEILLSIILPWTRPFEYVKEFKQAHRREDDIALVNAGMRVYLQETERNWIISDVSIVFGGVAAVPLSASRTENFLTGKKWDSGLLDDTFNLLKEDISISENAPGGMIEFRRSLTLSFFFKFFLSVTHEMKIKGLLADGLHADHLSAVQPYSRPVTVGTQSYELVRQGASVGQPMVHMSAMLQVTGEAEYTDDTPTPPNTLHAALVLSKKAHAR

SEQ ID NO: 58062 - protein, 441 aa, Zea Mays
MRLKQMKILSDLLIAVSKAERQEARMRIRQESFRLGNVAVMRAGTIISETWEDGQAIKDLNAHLKSLLETKETIERHRKSLKKRQSDKGDGSDAETGMSEEDILLQDEICKSRLMSIKREEEQYMRERDRYELEKGRLIREMKRLRDEDGSRFNNFQILHHRYALLNLLGKGGFSEVYRAFDLVEYKYVACKLHGLNAQWSEEKKQSYIRHAIREYNIHKTLVHPNIVRLWDIFEIDHNTFCTVLEYCSGKDLDAVLKATPILPEKEGRIIIVQIFQGLVYLNKRGQKIIHYDLKPGNVLFDEVGVAKVTDFGLSKIVENDVGSQGMELTSQGAGTYWYLPPECFDLSKTPFISSKVDVWSAGVMFYQMLFGKRPFGHDQTQERILREDTIINARRVEFPSKPAVSNEAKDLIRRCLTYNQSERPDVLTIAQDPYLSYAKR

SEQ ID NO: 58063 - protein, 771 aa, Zea Mays
MRRHCFPVYWNGENRRVLRGHWFARKGGVDWIPVREDVSEQLELAYNCQVWHRRKFQPSGLFAARVDLQGSTPDLHALFTGEDDTWEAWLVFDTGPKFGSNTIKLRRGYFCSESASTKPSQDELRQKKEEEMDDYCSQVPVGHLVFMVHGIGQRLEKANLVDDVVDFRRVTANLAERYLTSYQRSTQRVLFIPCQWRKGLKLSGESTVEKLTLDGVKGLRVALGATVHDVLYYMSPIYCQHIIDSVSNQLNKLYMKFLKRNPGYSGKVSLYGHSLGSVLSYDILCHQESLWAPFPTEYLNMETSDRNQGAKSANEADLHDSGAKDHDTSSLGYSCADNENSVIDEDSTRTDVSCMDSILPSCVLEDSPNNHDTVVPRGAVVADQNGEEKKVENYQSVYAEEGTTSGVITKKAEGSSISRSAKEVHEEVLDKEKLMVLAKDKLILSLEEEVKCLKAKLDQLEQHNHLVTENTSGVEYHEGQNYNHALNSGKLFVAQESTNQSYSPQIKYTKLNFKVDTFFAVGSPLGVFLSLRNVRIGIGKGQDYWQDKNVIEEMPCCRQMFNIFHPFDPVAYRIEPLVCEDYLKKRPVIVPYHRGGKRIHVGVQEFREDISARSQAIARQLKSLKVKAVAAILALSRNDTEEDGESANEKEKSYGSIMMERLTSSPNGRIDHVLQEKTFQHPYLSALGAHTNYWRDHDTALFILKHLYRDIPEDPPSDVIERMPIKLFYERDPVEEETPVTFSDHAAIKEFCRKVKAYSRKMEDDANCQAS

SEQ ID NO: 58064 - protein, 106 aa, Zea Mays
MDLSKKMRLKLGATSEPVKPLEKPSAGSVKDELVKPSEKPSAGPVNDEPVKPSEKPSAGPVKNEPTEPAPAGENNQAPTVGQTTVSPNNAGVGAPVVKHDNSEAQK

SEQ ID NO: 58065 - protein, 321 aa, Zea Mays
MENQVASLKNKGVPAEFLSSTQASHTKQRIHEDLDTGNPSLKLLYVTPELVATSSFMAKLKKLYNRGLLGLVAIDEAHCISSWGHDFRPSYRKLSSLRKQFPDIPLLALTATAVPKVQKDVVSSLCLQNPVILRASFNRPNIFYEGQKLPQPWKRLWKSWAPPKCKFFLWLAIRNKCWTSDRLEMRGLDHPVSCLFCDQEQETIQHILCSCVFARQFWHSILFGLNVGNLSPSRDEISFADWWRKTSKKIHKSKRKGMNSIIILGAWCLWIHRNKAVFDGETPSLSSIRCVFLDEIGCWITAGAKHLQSFGLVLARNLHRV

SEQ ID NO: 58066 - protein, 733 aa, Zea Mays
MASSRGRLRLSPRAAAPQLDAGKYVRYTAEQVDALELAYGECPKPSSLRRQQLIRDCAVLTNVEPRQIKVWFQNRRCREKQRRESSRLQTVNRKLGAMNKLLMEENDRLQKQVSRLVFDNGYMKNRLHSPSVATTDTSCESVVTSGQHKQQQNPAVLHPPQRDANNPAGLLAIAEETLAEFMSKATGTAVNWVQMVGMKPGPDSVGIIAVSHNCSGVAARACGLVSLEPTKVAEILKDRASWYRDCRRVDILHVIPTGNGGTIELIYMQTYALTTLAEPRDFWTLRYTSGLDDGSLVICERSLTHSTGGPSGPKTPDFIRAEVLPSGYLIRPCDGGGSMIYIVDHVDLNACSVPEVLRPLYESPKILAQKMTAAALRHIRQIAHESSGETPYGAGRQPAVLRTFSQRLSRGFNDAVSGFPDDGWSSLLSSDGAEDISITINSSPNKLIGSDVSPSPFFSAMGGGIMCAKASMLLQNVPPALLVRFLREHRSEWADPGVDAYSAASLRANPYNVPGLRAGGFMGNQVILPLARTVEHEECLEVIRLQGHGFSHDEVLMSPDMFLLQLCSGIDEDAPGACAQLVFAPIDESFADDAPLLPSGFRVIPLDAKTDVPSATRTLDLASALEVGSGGGLCALSDSGSGTRSTRSVLTIAFQFSFENHLRESVAAMARQYVRAVMAIVQRVAMAISPSRLGPHVELKHPPGSPEALALASWIGRSYSITLELLMLSSNHE

SEQ ID NO: 58067 - protein, 186 aa, Zea Mays
MIPWYCCNFWRIHLQTNRASTCHSVRSFLNITLSKEMLDTTQESYALYKQRRRRSSLDFLHPVGIFSSTGYISSSLCYHLGVCLRVRVEKYVPPCGYYKRNPSSNYNRLDKHPTTGNGTSSRKQYCPRLTPVHVVHHPVLIKERRRAVLATLPLAPTAAATYPRHAAAPLAPAAELQPCLCTGGST

SEQ ID NO: 58068 - protein, 155 aa, Zea Mays
MKVGATSSRNDGRAGQLKYANNRETIASKYTSIREQNRQSGKVVRKEISPNSISLLEERNSEQGSNAGVPPTGVSATWASMKIGFQNFKANMGSKKFLPLRQDPGFVPNLNVSSPESLDDIFQRLKRRPANVPVDYLDDDDDDNIGDTDLHFQDQ

SEQ ID NO: 58069 - protein, 167 aa, Zea Mays
MGEPILSGLDIPTKLLATKNKAVVQAELAVEGLTWHVTCVSMGNPHCVTFGANELKVLQVDDLKLSEIGPKFEHHEMFPARTNTEFVQVLSRSHLKMRVWERGAGATLACGTGACAVVVAAVLEGRAERKCVVDLPGGPLEIEWREDDNHVYMTGPAEVVFYGSVVH

SEQ ID NO: 58070 - protein, 162 aa, Zea Mays
MAKDLIRTRHQITKFYQLKSQLQGVSLRVQTLKSTQAMGDAMKGVTKAMAQMNRQLNLPGLQRIMQEFERQNERMEMVSEVMGDAIDDALEGDEEEEETEELVNQVLDEIGIDINQELVGAPSAAVAQPASAGRVAQAESAGNADTGIDADLQARLDNLRRM

SEQ ID NO: 58071 - protein, 266 aa, Zea Mays
MQSLINALHNEVGDDNVKLGTEVLSLACTFDGVPALGRWSISVDSKDSGDKDLASNQTFDAVIMTAPLSNVRRMKFTKGGAPVVLDFLPKMDYLPLSLMVTAFKKDDVKKPLEGFGVLIPYKEQQKHGLKTLGTLFSSMMFPDRAPDDQYLYTTFVGGSHNRDLAGAPTSILKQLVTSDLKKLLGVEGQPTFVKHVYWGNAFPLYGHDYSSVLEAIEKMEKNLPGFFYAGNNKDGLAVGSVIASGSKAADLAISYLESHTKHNNSH

SEQ ID NO: 58072 - protein, 59 aa, Zea Mays
MKLWDSDPDRITYTTLIKGLESLGKMELSAGIRLEAENDYGSLDFLDEVEIDEACRSRP

SEQ ID NO: 58073 - protein, 2594 aa, Zea Mays
MDHRGGGGGGGNKNRTDLLAAGRKKEAERSQAEQCNGEGPGTAESSSVESSNAVQEQETVQEQETDDVSDAHHVGPSEQGISEHPESQTAGGRDLSLQATSGDSIGDDNVGRAQLGDVDSMELNASSEGNGADGDCNQLGEHQQVEMDAVERPTSSSFEEFTELPIHSQGIEADNIHGEGAQEMVMDVSGRPLDGDIQHDIEPTASAEIDAETALEESTVAASIVIPESTARGTEYERDTGYETDGVDKEALLEDPSMVHVSDEAVTIDDLSVQAKPTASADMPLCEQKGDPALSRSAVLQGIMPLHFEDIQNHMFSATLSRDFLQLQLDEAAGLYSDFTQQSSDNTTQLRVLLKETEESKLAVDRELHQCRHELSKVNIEKGQLELTMASLKEEINTSNTRCTYLESELHSSKESTEQIHSELANSRLLLEALQKENMELTASLAFEKEAKKEVEEQRDHLSSDNRKLLSELSGLELSLASVKEEMDASSSRCNVFECELRSSNENMNHTLTELANCQALLETLQKDNLELSANSASEREAKMKLQEDNLYLCNEKGKLSSNLRELNDKLEVSYAKHKQLESHVKDTETYFGQLTEQLIEENLYTSISIDIYQSTTKDLDTKYNIVLGQFQNIMRQELHLDSSEVTTENAERAIMTPRHDSHGNNQCLLNLVNANDSCNSTALLSLKGHLEVAKSDLHNLEKLLERISSRSDGRVLVSKLIKSFESKGSDDDTGLSEGEHDNLQKSTREMLSCLGEKFIAMSSDITKTEEYLAELCNKIELYVKSTVQHDRDRQCTVVLEAKMDELAGKLSNYKETIDNLHNQVAIVQQDANSNAGKLIDQAELLQKDAVERISILENERMSLSDLLSEVTNKLTSLGDAVFPSGSSEIEGLNFCTLSCVDLVARSFQSLQEKLEAAQIDNAQLNSSLVELRKAIGVAQERSEHADGIVKKLYDSLQELLCDSLGSSNEFGARYSVEEPIESQYGRLIAHLKNLLHDHHSALSTNAELELSLLSKCEEVEELNMRCSSLLKKLDEVCILNEELKSASSSKNVTLDKLHSRCLTVAEMLASCSANHSSTVQLISDIGEGSSKEDHILTTLLPCIEADVASCIEKFENAAEEIRLSKICLQEISIFDQISFEKWSYPLPTLIKEEVLPKICDLQDRFDQLNALNIQLETEVAVLKDGMKELDEDLGTSRSELQKKVSELEQLDQKFSSVKEKLSIAVAKGKGLIVQRDSLKQSLLEKSGEIEKLTQELQLKETLLKELEAKLKSYTEADRIEALESELSYIRNSATALRDSFLLKDSVLQRIEEVLEELDLPEQFHSRDIVEKIELLSKMAIGTPFTLPDGDKGSSVDGHSESGVAMNVIDDEQNSNSNSVSDEVKSKYEELNRRFCELAEQNNMLEQSLVERNSLIQKWEEVLGQISIPPQFRMLEAEDKLAWLGNRFLEVEQERDSLQLKIEHLEDSSEMLIADLEESHKRISELSAEVVAIKAEKDFFSQSLEKLRFEFLGLSEKVVQDEFVRDKLRMDLSELRDKFAEKTEESRHYHEMDTEVHKLLNLVQNTLQDSTNSEISSGGISAVLCLGKMLKKLLDDYGTLLYKSTEGNFAERDIQLEDIKPSKDASKSDTGAYEKEMELNSLNNELDHAHNNLALAQQECDEAVEKAQSLMMEIETLHAQISKLQESDAEQMQKKEMELNSLNNELDHARNNLALVEQERDEAVEKAQSLMMEIETLHAQISKLQESDAEQMQKYQSLVLELESVGKQRDNLQERLNQEEQKCASLREKLNVAVRKGKGLVQHRDSLKQTMEEMNVVIEKLKSERKQHIESLETEKSSLMDRLAENEKSLHETNQYLSGLLNALNRVDVAREFDMDPITKVEKMAKFFLDLQSTVASSQNEVMKSKRATELLLAELNEAHERADNLQEELVKAEAALSESSKQYIVTESARADAVRQLELIMHAQSQTRRRQADHLLELNSTSSQLREVCFELSHCLVNTFSKDVDLICYVVNFMRSSGKLMDDTNTMDIPIASKHVLSNRTNNKKAHIPNAPLEIKTDDTDDSQFLHHLAIACHALSDCVKDCNDLKRNIDEHDFSVEQKATELFDVMSTLKNRFTSQHNELESLRAKFVELQSEMEERDKEIIFAQRNMSLLYEACASSVAEIEGISDIYPGKHSYAVEHSADECIKSIVEQLVMAVKTSQNSNEGSTKELKAIVLELQQELQAKDVQISTISSDLSYQLRVAESSAKQFSVDLEDARMELQNLEKQVDVLQNQKKDLETQLNELKNMESMASEQHGRIEKLTDELSRKDQEIEGLVQALDEEEKELEILENKSLQLEQMLQEKEFALKTSEVSRTKALAKLATTVDKFDELHSLSENLLAEVENLQLQLQERDSEISFLRKEVTKSTNELLTTEESNKNYSSQLNGFMKWLERELLQFGFHSESANDYDYTQFPVYMDMLDKKIGSLIAESDDLRVTVQSKDSLLQVERAKIEELMRKSDGLEASLSQKDSQIGLLRRDRASNQQSRSINLPGTSEIEQMNDKVSPAAVVTQIRGARKVINDQVAIDVEMEKDKPFDDEDDDKGSQAIDCS

SEQ ID NO: 58074 - protein, 1560 aa, Zea Mays
MTSLAASRSNSLSTAGKEPMAAGVSRRASLSSDAGGLPLDLLTSMADSNGQISAAVMERLTAATAAEPYDSVKHAFVSYGSCITDLGESWKYRSRLWYGVGIPPKSDIFGGGGSGWESWRSILEKDSNGIWIEFPLVKKSVAVLQALLLDESGLGGGLGIGGGSGPGMGVMTALYQLLDSDQPFLCMLRMVLVSMREDDNGEGDAFTKDVSIKDVVSEGMGHQAGSVMPFDGNSYSSPRKPRSALLWSVLGPILNMPITESKRQRVLVASSILYSEVWHAIGRDRKPLRKQYIELILPPFVAILRRWRPLLAGIHELTSSDGQNPLIADDRALAADALPVEASLLMISPGWAAAFASPPVAMALAMMAAGASGTETRTPPRNTLNRRDKALPERKAAAKLQTFSSFQMPMETASNKPGSTLKDKAAAKAAALAAARDLERTAKIGSRRGLSAVAMATSGQRRSSGDIERAKRWNTSEAMSAAWVECLQSDDSKSVVGRDFSALSYKYVAVLVSCLALARNLQRAEMERQTLVDVLIRHRASTGLRAWRHLLHCLTEMGRLYGPFEHLCTPDRVFWKLDFTESSSRMRRFVKRNYKGCDHLGAAADYEDRKLLNTSAQSNEHNSEDANSSLTSTLPSSASVIMADAMSMNDRNVENEQLETDTTRSSVDDDQLQHSSAADQQSVKGSIGSRTSDICADRNLVRSTVLAPSYVPSEADERIIVELPSLMVRPLKVVRGTFQVTSKRINFIIDERSNDSNIDDAASTSGQCDQQDKDRSWLVSSLYQIYSRRYLLRRSALELFMVDRSNFFFDFADIDARKNAYRAIVHTKPPNLNDIFLATQRAEQILKRTQLMERWANWEINNFEYLMELNTLAGRSYNDITQYPVFPWVVADYKSRVLNLDDPLSYRDLSKPIGALNPERLKKFQERYSTFEDPIIPKFHYGSHYSSAGTVLYYLFRVEPFTTLSIQLQDGKFDHADRMFSDLSGTWDSVLEDMSDVKELVPEMFYLPEVFTNINGIDFGTTQLGGKLDSVELPPWAENHVDFVHKHRKALESEHVSAHLHEWIDLIFGYKQRGKEAIMANNVFFYITYEGTVDIDKITNPVDRRATQDQIAYFGQTPSQLLTVPHMKRKPLAEVLQLQTIFRNPSELKSYVLPHSDRCNVPASAMLVSNDSIVVVDVNAPAAHVALHQWQANTPDGQGTPFLFHHGRNSTNSTSGALMRIFKGSAGSAEDYGFPRAIAFAASAIRSSAVVAVTCDKEIITGGHVDGSLKLISLDGAKTIETASGHIAPVTCLALSPDSNYLVTGSRDTTVILWRIHQTGSSHKKNAQEPPPTTPTTPRSPLSGSTSTMSSLSETKRRRVEGPMHVMRGHLGEVTCCSVSPDLGLVASSSNATGILLHSLRTGRLIRRLDVDEAHAICLSSQGIILVWNGTKKTLSTFTVNGLPIANSVLLPFSGQVSCIEISTDGHFALFGTSLFNNYKCDNSTETGDHELGPNGTDDVSKNSEQSVHAPSICFVDLHTLKVFHTLKLAKGQDITAIALNKENTNLLVSTADNFFYSLY

SEQ ID NO: 58075 - protein, 82 aa, Zea Mays
MLLDFSTTDLQPERVLERRLVKKGSKAVPQVLVKWTHLPVDSATWEDWYVLQARFPSFVACGQATAAGGKLSRPVCRTRLND

SEQ ID NO: 58076 - protein, 208 aa, Zea Mays
MKTHSADNYHVCQYPECGRRFTQESKLRAHIRAQHEKAVGLQNPGASSMNHSAIGGPHQPPRPAKVSAAPPAPSAERPYVCPYDGCDKAYIHEYKLNLHLKKEHPNHYQDGGPNGAAAPSKRSISKSSHRSKLDITSRMPPANIPKHRGYATPLPAVVSLPEEQQLLRKVVYEDDSEETEEEGDNNGEDRWNYKRAASSDDEETEDEE

SEQ ID NO: 58077 - protein, 782 aa, Zea Mays
MRCVAWWAVLLAAASLVGAWGNHTVSALTLVSETWYDDRLALVPVEFGGGDGEDAAGLRSELPCQTYSANSRSCEELNGSGSFNTTCVISSSSSLDGDLCVYGDGSVEIRPHVKIICPFRGCYITVNVSGSVRIGEHVEVIAGSVSLYAANVSLDHHSTINTTALAGEPPPQTSGTPHSLEGAGGGHGGRGASCKVSNDTNWGGDVYAWSTLDWPWSYGSMGGSMSAGQFGGYGGGRVMLRTSGFLNVDGQVLAEGGVGSLKGGGGSGGSIIIHAFKLSGNGTISAAGGNGWGGGGGGRISLDCYSIQQDLEITVHGGQSFGCAQNAGAAGTIYDSSLQTLKVSNGNFTTRTETPLLGFPMTRLWSNVLVERYAKVLVPLLWSRVQVTGQIRLLTKGSICFGLSENPISEFELVAEELLMSDSVIKVYGAFRMYVKVLLMWDSNIQIDGGAKDVVLASMLEARNLVVLRHGSVISSNTDLMVYGQGLLNLSGPGDGIKAKRLFLSLFYNIEVGPGSLVQAPLDEAVPSNLDALSRCESKTCPSELITPPDDCHVNRSLSFTLQICRVEDITVSGIVRGSIIHIHRARTVTIAKDGTISASELGCKEGIGKGKFLKYGAGGGAGHGGRGGTGIYNGMRSEGGLEYGNADLPCELGSGSGGSALSADNTAGGGLIVIGSMKWPLSRLLVYGSLNSDGESHRGTSGNSNGTFKGGVGGGSGGSILLFLQWFLLEKNSSLSASGGNGGVYGGGGGGGGRIHFHWSYIATGDEYVHIASVNGTIVSR

SEQ ID NO: 58078 - protein, 108 aa, Zea Mays
MPSCFIYAGEKSIKPELIVQVEPIEDPYGPSITDEKLDAIIVSKETLNGGLAVNRKREEKGFPLLKVEVVDLLSGGVEGEKLSSSALRKLEAEQAQQSETKSGSLEAS

SEQ ID NO: 58079 - protein, 281 aa, Zea Mays
MALRRMQRVGMRLNVSAYTVAIKACVENKDLKLALHLFEEMKTHQLKPNLVTYKTLLAARINYGSLQEVQQCLAIYQEMRKAGFQANDYYLKELIVEWCEGVLSSRSDNQDFYNLDLQPETERKESFNLFLEKVVTVLQKDTDQNQIVDVRGLSKVEARIVVLSVLRKIKEQYLLGRVVQDDVVIITGHEKTSTTEAETTTSAVDVVQAIVTVLTDDLGLEVLIGPGSCPPVSSKPKAPTKSRSNLEQISKEFTRRPQGMIKIPINSLNHWLRKKAVRIAE

SEQ ID NO: 58080 - protein, 265 aa, Zea Mays
MLNSYCKHVDRYKNSLITRFYGVHCVKRHNGQKVRFIVMGNLFCSEYQIHRRFDLKGSSYGRTADKFEDEIDETTTLKDLDLNFVFRLQKSWYTDLHEQLRRDCDFLESEGIMDYSFLIGIHFCDDISASKMGSSTFTASPKRLIKSESFQGGGTTELCFSDDAFDMVPDCSRKSLIRLGAHMPGRAEQASRRSGFVFPNQTGEVHDVILFFGIIDILQDYSVKKRLEHSYKSLQTDPNSISAVEPKLYSRRFQEFIGRIFVEDG

SEQ ID NO: 58081 - protein, 1055 aa, Zea Mays
MLLSPHGRLGSHRDASVAVPAPKPVRKEIKWKTSSSPSPVVSPPIHFSSRFSPLALPMAIPEDLEGTSGDGGVTNRGSRGRRKGAAKGRGRGRPRSADRSFPPPAMAGVAVGDRVLRERRHTTNVFCERDTDVDDEDDVETVRSKDSRSGDVLQTAKKRKKGGAGKVSVTKRSKREGEEQKKASPSKDKDCAETNGKRKMLTGDNALMCHQCQRNDKGRVVWCNSCRNKRFCVPCIERWYPNLSEDEFAAKCPYCRKNCNCKGCLRMRGVEEPPKKEISEENQISYACNVVRLLLPWLRKLRQEQMEEKKLEAKIKGVLVNEMKLEQAEYNLDERVYCNNCKTSIVDFHRSCKYCFYDLCLDCCVEIRRGEIPGGEEIMRVKPEDRGRAYLFGTTNSKDGSKRFSMRRHSSSLENEPSNVVGSSEGANNSLELWKAESDGSIPCPPKELGGCGGSILDLKCFFPEKMLSNLEERADRIMRSEVFAKAVAKRSDQCPCYDHSGNIRTQDVRETANTKGSSDNHLYCPVATAIKEDDLAHFQMHWTKGEPVIVSDVLHLTSGLSWEPLVMWRALREKKTNGDVEDEHFAVRALDCLDWCEVEINIHMFFVGYMKGRTHHMTHWPEMLKLKDWPPSSSFDQRLPRHGAEFISALPFPEYTDPRYGPLNLTVKLPDGALKPDLGPKTYIAYGFYQELGRGDSVTKLHCDMSDAVNILTHTAQVPYARYQLEKIEETRKKMKEQDLQELYGVSELNLSSPFTDSRNISADEMSKTSCNYGLDVNDVPPVNNESEVQSGAGQCSDYIDKDRSYAGMHNGERTGGALWDIFRREDSDKIQDYLRKHATEFRHIFCNPVKQVIHPIHDQTFYLTEEHKRKLKEEYGVEPWTFEQKLGEAVFIPAGCPHQVRNLKSCIKVAMDFVSPESVNECMKLTGEFRRLPPDHRAKEDKLEIKKIALHALNQVVNFLDPSSEWSKSWFAQLKNKKKAGAEEQEKPKRKRGRPCRKSNDEAAGDRHRKKGGRQRGRKRGYGKSKDGAGAVDVKPPKRQRNLLKGSGNRVGG

SEQ ID NO: 58082 - protein, 105 aa, Zea Mays
MPWFRASSDNMAAKDDNSETCLSVAMAKGALALSGMPDAQSKPVLLCSLNDNTVRLYDLPSFSDRGRLFSKKEIRAIQMGPGGLFFTGDGTGELKVWQWVDLAQT

SEQ ID NO: 58083 - protein, 160 aa, Zea Mays
MPVNPPPPPPGSSSLAPAGASYFPLPFHLQQHQPPPPQVPPPMAASSYQQYQQQLHQAHQLFQRDAQTITPEALQSVKAALATSDVLDPVAAANARLSDPSTSKKPIPRRAAGQSWEDPTLTEWPENDYRLFCGDLGNEVNDDVLSKAFSRFPSFNMARR

SEQ ID NO: 58084 - protein, 79 aa, Zea Mays
MPAQKRLMRMESLLSKIMIGTGVPDFPSGEGNYRFGGDVTQTIRLPINTTRTPQSQHHFSSSYQPCTARLTSPRGLIPA

SEQ ID NO: 58085 - protein, 875 aa, Zea Mays
MLDFCAPHGPAKLPVASVAGVRVAGRWLWRSAAVGAVRHGVSARASSFGSRIGLDSQNFHTRDLSQLLWIGPVPGDIAEIEAYCRIFRAAEQLHTAVMSALCDPETGECPVRYDVESEDLPVLEDKVAAVLGCMLALLNRGRNEVLSGRSGVASAFQGSEDSTADRIPPLALFRGDMKRCCESMQVALASYLVPSEPRGLDIWRKLQRLKNTCYDAGFPRADGYPCPTLFANWFPVYLSIVSDDSGMDELEVAFWRGGQVSEEGLAWLLGKGFKTIVDLREEDVKDDLYLSAVQEAVSSGKIEVVNMPVEIGTAPSAEQVQQFAALVSDGAKKPIYLYSKEGVSRTSAMVSRWKQYVTRSERLAVQNHSLNGNGNILTNHKTMQHTGIPSSSPNGAENGMITESDRTMNNGESSEIDIDTARHNLEVTNALCNDQSTQQGEMPDTVAELLSNFKLESNPLKAQFPTCDVFSRKEMTKFFRSKTVYPKSVLNSRRRSSSLVIRRKQNLCTERSGTNDYEAAEFAVLRSSNGKSFDSDYILSVASGITDGKPSNNEASLIEEKEREVSVATIDTRASANSSNRKVQVGSQESAEKNSTPYLERNKSDNVDRNMCASATGVVRLQSRRKAEMFLVRTDGFSCTREKVTESSLAFTHPSTQQQMLMWKSPPKTVLLLKKLGDELMEEAKEVASFLHHQEKMNVLVEPDVHDTFARIPGYGFVQTFYTQDTSDLHERIDFVTCLGGDGLILHASNLFRTSVPPVVSFNLGSLGFLTSHNFEGFRQDLRDLIHGNNTLGIYITLRMRLRCEIFRKGKSMPGKVFDVLNEVVVDRGSNPYLSKIECYEHNHLITKVQADGVIVATPTGSTAYSTAAGGSMWT

SEQ ID NO: 58086 - protein, 77 aa, Zea Mays
MASPQLTPISFYILPPTETARHSHPLRLFVTCSCCWWCDKIDRLCTLSLSVTTSRCPRGRRGRESHDITQNLLLQTM

SEQ ID NO: 58087 - protein, 974 aa, Zea Mays
MKTRIVYSREFLLSLGELEHCKKLPPDFDAALLSELQELSAGVLERNKGYYNTSQGRPDGSVGYTYSSRGGNTGGRWDTRSSGSSDRDGEPDRESQTQGRGANQYRRNWQNTEHDGLLGRGGFPRPSGYTGQLSSKDHGNAPQLNRTSERYQPPRPYKAAPFSRKDIDSINDETFGSSELSNEDRAEEERKRRASFELMRKEQHKAVLGKKSGPDILKENPSDDIFSKLQTSTAKANAKTKNEKLDGSVVSSYQEDTTKPSSVLLAPAARPLVPPGFANAFADKKLQSQSSNITHEPKLEDDQSATGFTSESKEKGVSGNDATMGPKHTLPPGSVTSSAELASSVLKGSEDWDADVMDKYSIGKEGKSKNIDPVRKDDSVAILEQFFGNVLSKSGSNLPTYVENQPLKTDDDMITSVPESSKFAHWFLDEDLKPAEDLSSKSLLSMIVKNENPGLENLNHTPLSDAAAQNLSPRAPIDKLDSASELISFTSSTPANGVLEQCIHSDVPEAVPIMTCEDLEQTMLAQVSNSSSTQINATKEQLTVMDEPVAMQKVTVDNHASQHLLSLLQKGTDNKGAPSLGFQRESTDEPLSVDTNLMANGGISGSDPVNSVENVPTSGKDLTLEALFGAAFMNELHSKDAPVSIRGATTGGPTEFAEMGKTLLSSSHEGYYPVEQTVHFNNTKDAAVRREPGIEHSAVPGLSQGSASFDKKGMEIHLPEEDNLFTMSDSLLGQNSDILASVGSSRVEGLLPEKALDNLSYRFQSLVPGDAEHIQVYGPDALGSHPRDSQNMYHLLQGRPPMIAPHPMMDHIVNRKQPAPFDMAQSIHHDSHRSFPSNVNHMQHNLHGPGVPHLDPAGHIMRQHMSMPGRFPPEGLPRGVPPSQPVHHMAGYRPEMGNVNNFHMHPRQPNYGEFGLMMPGPEVRGNHPEAFERLIQMEMSARSKQQQVHHPAMAAGRVPSGMYGHELDAKLRYR

SEQ ID NO: 58088 - protein, 100 aa, Zea Mays
MSIACPHPARPSCHRPQMHPAPCPFAHWRPGTHLLHYPAHQLHAYTSPALLLLWCLRIMRCLGFRLWRQSLRLQSYLWFCHDRFAEPRHRRRRPSAPSRP

SEQ ID NO: 58089 - protein, 135 aa, Zea Mays
MPWNRFMPFLSKCCTSTVQTSSSYSSFSSSFSPIQPWLFVGLGNPGEKYQSTRHNVGFDMIDAFAQSQGIPLTTHYFKALFGEGMVDGVPVLLAKPQTYMNLSGESVGPLAAYYKLPLNRVLVVAPRISTTSFQG

SEQ ID NO: 58090 - protein, 259 aa, Zea Mays
MLPIWSAGIMLATASSHNYTFTIMQARTMDRHMGPHFQLPPATLSIFSNAAMLVTLALYDRVFVPLARRVTGLPSGITYFQRMGIGLAISVLSVATAALVETKRRDAAARHGLLDSPAAVVPLSVFWLVPQFAVHGVGDAFSSVGHMEFLYDQAPESMRSSAAALFWLAASIGNYMGTVLVTAVQRATRGRGEWLQDNINRGRIDNYYWLVTCITLLNLGYYLVCFYFYTMKPLEVADDCDKDCELSSLQKNGSGAALV

SEQ ID NO: 58091 - protein, 923 aa, Zea Mays
MEAALKGYFGYSTFRPYQREIIQKVLDGRDCLVVMATGSGKSICYQIPPLVTKKTAVVVSPLLSLMQDQVMSLKQKGVKSEYLGSTQTNSSVSNEAEKGTFDVLYMTPEKAISLPSRFWSNLQASGICLLAVDEAHCISEWGHDFRTEYKQLHSLRNLLVGVPFVALTATATERVRQDISTSLVLCSPHVVVGSFDRHNLFYGVKTCNRSMSFISELVKDVSKRSDVGESTIIYCTTIRDTEQVHEALVTSGIKTGIYHGQMGSRAREESHRSFIRDEVLVMVATIAFGMGIDKPDVRCVIHYGCPKSLESYYQESGRCGRDGLPSICWLYYQRSDITKADFYCSEAKNETQRKAIMDSFMAAQKYCLLATCRRRFLLQYFGEEWNIDCGNCDNCTAVKNERDLSKEVFLLLSCIKSCGGRWGLNLPIDVLRGSRAKKIVDNNYDKLQMHGRGKDYSSNWWKALGGLLIAHDNSIAVFSLAKEESITERFHLNASKDYLKETVRDTFRFVSVSPKGVKFLSTADKIDGAPLVFQLTAEMIELEEHGSSHHKEGGLNLVPTLESEKFSEDESKLYQRLLNVRMKIAQDIGTAPYAVCGDQTIRNFAKMRPSTGARLANIDGVNQHFISRFSNIFIQNIAELSKELNLPLDNSPFPPPPPTNPAAENIAGIPKPVQNNLPGILGDAKLTAWELWHKQEYSFLKIAYFRRAVPIKEQTVIAYILDAAREGCEMDWSRFCREVGLTPDIATAIRLAISKVGSREKMKPIKEELPENVTYDMIKTFLTIEGCGLSEQVFGNGTADGVSSRIAESPISSCHASEAGGNGVPAAAEASDANPSAKRGQTVCAEEPATKLQRTYEHGAELTGTATATVDSVLDLVASCNGVSLEDVAKHFKGSKRESVLEILEGLESEFTIYKKNGNYMVL

SEQ ID NO: 58092 - protein, 898 aa, Zea Mays
MSQTNWEADKMLDVYIYDYFMKRNLQATAKAFQAEGKVSSDPVAIDAPGGFLFEWWSVFWDIFIARTNEKHSDVAASYIETQLMKAREQQHQQQQQIPQQRQQQPQHIQMQQMLLQRAVQQQQQQQQQQQQQQQQQQQQQQQQQPQQQQQQQLQQQQLQQQRRDGSHLLNGSANGISGNNPLMRQNQSTANVMATKMYEERLKVPSERDSLEEASLKQRYGENAGQLLDSNEASLLKAASSAQSSGQILHGTVGGLSGTLQQVQARSPQLPGPAQGIKTEINPILTPRAAGPEGSFIGAQGSNQAGNNLTLKGWPLTGLEQLRSGILQQKSFIHNQQQLQQQIQMLTPQQQQQLMLHAQQNMSSPTSSDVDNRRLRMMLNRNAVLGRDGQTNSGSDIIPNIGSPSQSGGDIDMLIKKKLAQQQQLLQQQSNSQQLPQQHQLQQPAVSSQQSQSSNQHLQQEKPGIGSMPADGGIPNSFGGAEQTAKKRKKPGSSSGRANSSGTANTAGPSPSSAPSTPSTHTPGDVMSVPQLQQNGGSAKPMVMFGSDGTGSLTSPANPLDDVDRLLEDGSLDDNVESFLSQDDMDPRDNLGRCMDASKGFGFSEVAKARASTAKVVCCHFSADGKLLATGGHDKKVTLWCTDSLNPKSYLEEHSFLITDVRFSPSMSRLATSSFDKTVRVWDADNTDYSLRTFTGHSATVMSLDFHPNKEDMICSCDSDGEVRSWSINNGSCLTCVKVFKGGATQMRFQPRKGKYLAAASDKAIYILDGETQHACRSPLQGHNKNIQSLCWDSAGEYLASVSEDSVRIWSFSSGREGEFVHELNRSGNQFHSCVFHPTYQSLLVIGCYESLELWDIREKNTMTFNNAHDGLVAALASSSATGKVASVSHDRTLKLWK

SEQ ID NO: 58093 - protein, 1438 aa, Zea Mays
MSAGRGDPNTPANRPLFLSAGVPNLGCHNVAAPAAAGNSGSIASQVLFSPCSTSVLNTIQEVPAPQSALLSPINRATEQGDVPCIQPSWNMPGGCTQVPINIIVFHRELTRRGSRPQLSPSATALPDVSEGASIRLAGSNFLSHGRTPSIVAGDMTTNSSQLATADKYNSEHRMNCLHDEASKTENGKGSTQLPQLATAIFRDSYNDLESVVPAATWETRVQHSQESTTCLAESTTDDNIHMYQSMQKRLKTQINKSEHTPLSAPTVPKEKTLTQIETQLASAEKTEMFRNEETPALKMKARKKKHRPKVIRENKPAKVQKPDSTPDGKSPNQKVKRSYVRKKRNLSSLENCSGPVSDQSISGATGVAARSRTSSVRRSLQFESKEQGLQGGHSSMANIHHHNYEKPGHAQSSFYSESEVQTGRVMQEGMENSPGELAFDMSRRLNKFLDEYIHLPDMLKPTQEVSAATSASFSTELAREEDNVGRTCKPDGKSKCSLFADERVVNPTIEGNKKDLELNYSDADGLVSSARSLPQMDPTRSQMGKVSEVENPTHHSNGSLPGTRDSVVLRAAAEMFAFFQAGAIKKKRSARLRRNSPFYTMDLKNNTLQASTRLPQPCMDALHRSSCIKFLTKKRSEKARPHCSSVIQPNDELKDRLSAGSTFYGATNGCKISEESSPNFSSQTLDNKRINVDTHCEVAEGRSTNTSTGPYMDYVQGVASKLKHLDLNTEQVQRTEMHLSLTTPAVISFEGTSGPSNALVPYGGVVMVPNERPLQLVKKQRPRAKVDLDFETTRVWNLLMGKSAESYGTDVEKERWWQQEREVFQSRANSFIARMRLVQGDRRFSPWKGSVVDSVVGVFLTQNVADHLSSSAYMALAASFPSRPVNNNCKDDGTTEDNKQTTRMSELVGEKSVFDLFYNGVRPDLEVGCEEVSMTCKKTHMEPTDNTRDSEFIEGETYSFDYKSTDESVCNHKGIGIEHKEQQLPDFSSAELTVSTELVQQIQIQKISSSQILTSETIQSRLSLSSEIPRNFVCGGSAAAYQQLGSNFDQGSSLTENDATASEIECHRLQMAAINDYGFGKPEIPSSSSMPFFLAVDPQQLKLRNETNVSSTSSNIPSDSASPNLKNGTDPLLMPFNSYMADWSSDKITYTTLNTPKISTELPVKLHHDKSSSFEAPNLKEHESVFATHEMTVEATRKEDEHTSKSSFTSYNGVPDTAAQASKPKKTRTTTAKNTENFDWEKLRRQACSEGQMKQRSFERRDSIDWEAVRCADVRRISHAIRERGMNNVLAERIQNFLNRLVRDHGSIDLEWLRYIPPDSAKDYLLSIRGLGLKSVECVRLLTLHHLAFPVDTNVGRICVRLGWVPIQPLPESLQLHLLELYPILETIQKYLWPRLCKLDQQTLYELHYQMITFGKVFCTKRQPNCNACYEFDSPTSP

SEQ ID NO: 58094 - protein, 542 aa, Zea Mays
MDDPSSASNKHKRKRGRKPKASPPFPDRSSPSPSAAPAPAGRRGRKPRRHEAPADADATRPPSPPRRGEPKPVANGGDVVAVAESGPASWDEVVRVVPCMDAVVKVFCVHTEPNFSLPWQRKRQYSSSSSGFIIGGRRVLTNAHSVEHYTQVKLKKRGSDTKYLATVLAIGTECDIALLTVNDDEFWEGVSPVEFGTLPALQDAVTVVGYPIGGDTISVTSGVVSRIEILSYVHGSTELLGLQIDAAINSGNSGGPAFNDRGKCVGIAFQSLKHEDAENIGYVIPTPVITHFIEDYKKSGEYTGFPILGVEWQKMENPDLRKAMGMKPDQKGVRVRRVEPTAPESGCLRPSDIILSFDGVDIANDGTVPFRHGERIGFSYLVSQKYTGEKALVKVLRDSKVHEFKIRLATHKRLVAAHVKGRPPSYYIVAGFVFAAISVPYLRSEYGKDYEYDAPVKLLVKHLHAMAESPDEQLVVVSQVLVSDINIGYEEIVNTQLIKAFLMDTNIWSLIVVLETKTAKAATQDILTTHCIPSATSDDLKA

SEQ ID NO: 58095 - protein, 238 aa, Zea Mays
MLAAVMDYFSTCWGPRSRAGHRGKGSDAAGRQDGLLWYKDAGQLVTGGFSMAVVQANQLLEDQSQVESGSLSLADYGPQGTFVGVYDGHGGPETSRFINDHLFNHLRRFATEHKSMSADVIRKAFQETEEGFLSLVIKEWSFKPQIASVGSCCLVGVICAGTLYVANLGDSRAVLGRLVKATGEVLATQLSAEHNACYEEVRQELQSSHPDDPRIVVLKHNVWRVKGLIQSYQDTSGD

SEQ ID NO: 58096 - protein, 107 aa, Zea Mays
MLALMTTSSAFSAPLLSFRPPPRLPINRLRLHPRRHALFRCDAVSEIAPAASAAYGVLLLGGGAFAYARSGSKGSIYGGLAGAALMGAIRYGMPCHRVMVTATTVIL

SEQ ID NO: 58097 - protein, 100 aa, Zea Mays
MIIVGFTLFISLSIPAYFQQYEPSSNLILPSYLLPYAAASSGPVHTASSGCQAANKSAVCTFGQIPNPSRWILLHWNPTDCRRRFRAGSGGQSVSASESS

SEQ ID NO: 58098 - protein, 1037 aa, Zea Mays
MVSRGLFGWSPPHVQPLTPVSETSEPPESPSPYAADLGLGGDGAPPPDDDAQPPLDDADDDPDPPPAAVPFKRLFACADRLDWALMVAGSLAAAAHGVALVVYLHLFGKAINSLHAHGRHTHDLFHDINQHALYFLYIAIGVFFAAWIEVSCWILTGERQTAVIRSKYVQVLLNQDMSFFDTYGNNGDIVSQVLSDVLLIQSALSEKVGNYIHNMATFFGGLVIGLVNCWQIALLTLATGPFIVAAGGISNIFLHRLAENIQDAYGDAASIAEQAILYIRTLYSFTNETLAKYSYATSLQATLRYGILISLVQGLGLGFTYGLAICSCALQLWVGRFLISHGRANGGEVVVALFAIILSGLGLNQAATNFYSFEQGRIAAYRLYEMISRSTSTVNQDGSTLSSVQGNIEFRNVYFSYLSRPEIPILSGFYLTVPARKTVALVGRNGSGKSSIIPLMERFYDPTLGEVLLDGENIKNLKLEWLRSQIGLVTQEPALLSLSIMENIAYGRCATTDQIEEAAKTAHVHAFISSLEKGYETQVGRAGLSLTEEQKIKLSIARAVLSNPSILLLDEVTGALDFEAEKAVQEALDILMLGRSTIIIARRLSLIRNADYIAVMEEGQLVEMGTHEELLNLDGLYAELLRCEEAAKLPKRTPMRNYKEPSSFQIERDSSAGHNFQESSSPKMSKSPSLQKTHGFLTFRTSDANHNSHESPNIQSPPSEQMAEARLPMVASERAPSIKRQDSFEMKLPDLPKIDVPLHRQSSNTSDPESPISPLLTSDPKNERSHSKTFSRPLVIFDSFHAEDSKQQHTKAPSFWRLAELSFAEYFYALLGSAGAACFGSFNPLLAYTISLIVVAYYKIGVRDVHAEVNKYCSFIVGMGIITVLANFLQHFYFGIMGEKMTERVRRMMFSAILRNEVGWFDDEENSADILSMRLANDATFVRAAFSNRLSIFIQDTSAILVALLLGMLLQWRVALVALATLPILIISAVAQKMRYSCMEKAPFPGSTIVVGEVYEGAKFVALLTFSQEWCSFFLSV

SEQ ID NO: 58099 - protein, 78 aa, Zea Mays
MVSPTVFARRSLCYLMCDQPDAALRDAMQAQIVYPDWPTAFYMQAVALSKLNMQSDAVDMLNEASQLEEKRQKSTRVP

SEQ ID NO: 58100 - protein, 1042 aa, Zea Mays
MERIHVAVRSRPLSPEDSRSSPWKISGNAIAHSAQSSSRFEFDRIFGEECRTAEVYQARIKHIVDNVVRGFNGTVFAYGQTNSGKTFTMRGSANEPGIIPLAVHDLFQRIQEHMDREFLVRMSYMEIYNEDINDLLVPEHRKLQIHESIEKGIFVAGLREEIVTCAEQVMDFMSFGESHRHIGETNMNLYSSRSHTIFRMVIESREKGDDNEVEDFCDAVRVSVLNLVDLAGSERAAKTGAEGVRLKEGSHINKSLMTLGTVIKKLSEGIESQGGHVPYRDSKLTRILQPALGGNSNTAIICNITLAQIHTDETKSSLQFASRALRVTNCACVNEILTDAALLKRQRKEIEELRAKLRKSESDHWEEEILNLRNTLLQSELEKERISLELEEEKKAKEQRDRCLIEQAKKIENLSSLVLNSDRDDRSTAFSKNKRRVTWCPGPNAKQFDIEDLRPVQEGSTSSTVRNERDMGMPPLFEELMQESNDEPCANVYSSGPGNVSKDSEDVPLPDSHALLHVTNRRKPKAMKKSDQEQFRGRAGELLIPQDPCDGNDALRHKNTVPCVVSSLSSRESEAILVIKQLQDQIKLLEAEKSSVQTNLDAVLVLATQQKVSFNEEYEELQQITLAAEEQAKVANENLSTLSATVKSKQELAYEFLGNLLMETQGINVEMDQWRNSVDSALSFIDELFQNLCIMAQGIREVNHSAHEDSARSCSVIRDYEKLSTCLMDKVYKLELEKKLLEEQSQDQQNEIYKLKANLESCEKAIDDCTLQHELEKDAILLELLNLQKEVSILSSSSLMKEKESIRKELDRTKSKLRETEDKLKNSIQEKTKLQSEKAEAHKEIKKLQSQRTLLERDLRKRDSATVDKRHELNSMPQESSGAFGHMQENYQNLEMHAFDMDAEIYSLQEALVTSIDEKDEALSKVGLITSELEDLANKLNLAESERNSFSNEITLLTEKLIASESSLKSLETSLNSVSREKEDLGMQLTDALLDMESERSIWTAKEKEYVEANHRLNICLDENHKLSEDLMKCINGLPTFS

SEQ ID NO: 58101 - protein, 390 aa, Zea Mays
MAGYMSRGPQNGSVYVCNLPPGTDENMLAEYFGTIGLLKKDKRTGRPKIWIYRDKVTNEPKGDATVTYEDPHAASAAVEWFDNKDFHGSTIQVHIAESKSKDAFDNPTSLNIIGGVGEQDELDNGAGRGRGRGDGPGKAWQQDGDWMCPNTSCGNVNFAFRGVCNRCGAARPAGAGGTAAGGGGRGRGRGSSDARGSSHAGAAVGGPPGLFGPNDWPCPMCGNINWAKRTKCNICNTSKPGTNEGGVRGGRGGGYKELDEEELEEVKKRRKEAEEDDGEIYDEFGNLKKKFRSKALHTEGAQALPGSGRAGWEVEHRGPSEREGRERSRDRVRDDYYEKETRGRDRGDLGRDQRRSRSRSRDRERERRERRREHDYERRERDRDRDRRHR

SEQ ID NO: 58102 - protein, 314 aa, Zea Mays
MDLGQLILHLYIIMVNSWPCQKQISHMLLRSLKMETCRLLACWIMTKENYSIFMDLPLLFRPKEMVKNGEFIYKFDPTKKGRFGILPRYAKDDKLIRWFQLPNCFIFHNANAWEEGDEVVLITCRLENPDLDKVNGYQSDKLENFGNELYEMRFNMKTGAASQKQLSVSAVDFPRVNESYTGRKQRYVYCTILDSIAKVTGIIKFDLHAEPESGVKELEVGGNVQGIYDLGPGRFGSEAIFVPKHPGVSGEEDDGYLIFFVHDENTGKSEVNVIDAKTMSADPVAVVELPNRVPYGFHAFFVTEDQLARQAEGQ

SEQ ID NO: 58103 - protein, 877 aa, Zea Mays
MSTIPSLMDLQALPFSHGGKTDAVLVDRALDSELVALEQKAVIMAVEFRSKKSEFVDRSLVQTLANLVSNYMGGPVIDPESMLLKYRNMSSALKADIRSAVVPLGQLTVGLARHRALLFKVLADSLAVPCRLVKGRQYTGSDDGALNIVKFNDGRECIVDLMIDPGTLISSDGADLGRELEDSLVVDNQHVNKDDTSTQLLSSFSEASSSMHSSFENGSLEKGFICNAGHFGPYEATTAHSDNDVLGSGVSSSFDELSVSTYACENIPIIHESNTDHTMTEKSKDKSITSNNSSSCSPPSSEIGSTPAVRRKKVKDVSEYMISAAKENPQIAERIHAVLLESGVVPPPDLFSEESKEQPKDLIVYDTSLFQTTDEMIRTMNELESTAHDGCAGLGPSLPPDPGHELQTKIVPYRMPPDLKPVQGLGVYHKFDFRDNINPSIPLYEPSPAPQENPLQLIKQMPVTAAAVATAAVVASSMVVAAAKSNSDIKLDVPVAAAATAAAVVATTAAVNQQYEYLDPGCQLLCLPSSSNKLIQKGRHDLLDDDQLETNHGQDNALEREKDLVQAPQEAERISDRSTGTESARSEISLDKIAEFEIQWEELTLGERVGLGSFGEVYRGEWHETEVAVKKFLQQDISSDALEEFRTEVGIMRRLRHPNVVLFMGAVTRVPHLSIVTEFLPRGSLFRLIHRPNNQLDQKRRLRMALDVARGMNYLHNCTPVIVHRDLKSPNLLVDKNWVVKVCDFGLSRLKHSTFLSSRSAAGTAEWMAPEILRNEPSDEKCDVFSYGVILWELCTLLQPWEGMNPMQVVGAVGFQQRRLDIPGGVDPAVAEIIRRCWQTDPRMRPSFSEIMATLRPLLKNMPANQPTRKRAQQTDD

SEQ ID NO: 58104 - protein, 815 aa, Zea Mays
MASLFLFHLTTALKNGGLRHDIHYWIGKDTSQDEVGTAAILTVELDAALGGRAVQYREIHGNETERFLSYFRPCIMPQPGGVASGFNHVEVNEQDYKTRLYVCHGKHVVHVKEASYLRDCLFIQIWVPFARSSLNHDDIFILDTKSKIFQFSGSNSSIQERAKALEVVQYIKDTFHEGKCEIASVEDGRMMSDAEAGEFWGFFGGFAPLPRRAPAEGNEKQEETAFKLLCFDQGKLEPVNCKSLAHELLETNKCYFLDYGAELYVWMGRITSLQERKGASEAAEKLLSDSSRTRTPMIKVIEGFETVAFKSKFKEWPQTPGLKMSSEDGRGQVAALLKRQGLNVKGLMKAAPAKEEPQSYIDCTGNLQVWRVNDKDKVPLSSSDQSKFYTGDCYIFQYTYPGDDKEECLVGTWFGKKSIEDDKVIAVSLASKMVESAKFQAVQARFYEGKEPIQFFVIFQSLQVFKGGISSGYKRFIAEIGIDDESYSEDGLALFRIQGSGPENMQTIQVEPVASSLNSSYCYILHDGNTVFTWAGNLTTALDQELMERLLDVIKPNTQSRSQKEGSETDQFWSLLGGKSEYSGQKMVQELESDPHLFSCILSKGNLKVKEMHHFTQDDLMTEDVFVLDCHTSIFVWVGQQVDVKLRLQALDVGEKFIVLDFLMENLARETPIFTIMEGSEPLFFTRFFTWDLAKSLMHGNSYQRKLAIVKGGGAPALDEGDGKGVHTVATSVESLTINEDVKENEPEDEDGLPIYLYERLKTTAVDPVTEIDVTRRETYLSSTEFREKFGMTKEAFSKLPKWKRNKLKIALQLF

SEQ ID NO: 58105 - protein, 76 aa, Zea Mays
MSLRKSNEDLREKCKKQPPVPMASAPPRAPAVDNVEDGHREPKDDGMDVETELYIGLPGRDYRSSKDKAAVAVRSG

SEQ ID NO: 58106 - protein, 92 aa, Zea Mays
MEDEELVDQKKYLEERCKPQCVKSLYEYEKCVKRVENDDTGHKHCTGQYFDYWSCIDKCSTGNLTSLQDVFGSSVWMCLVQVCEKKTESCLI

SEQ ID NO: 58107 - protein, 1001 aa, Zea Mays
MPAPDRATAGGGAGGHFRGHAHLTNCIHLRHHHAHAHAGAGGASSSGRRRSPASASLMRDLLALQRSRSLRDPSTRRSVESSRVAADPDDGTDDDDDDDADLPAKSRRSAGALKTLLDQLAENPHPKPGRRPPRRFKRRAGRRAAAASKPPDRAAALSVNSSSQEAVCGNKYLFHGGGGGDDDGDGVVELQQHLPQDSRNVCGIPWNWSRLHHRGKSILDMAGRSLSCGLSDSKSAAGRKSEAPAASGVRPLFPVKSERLASSTSSDSDALPLLVEEAATSGARKRIGVISSGSYSGELGIFSNQTSEMDSDLLSESQSGHKSLASRSQHGRGRHRSLTQKFAPKTFKDVVGQSLVVQALSNAILRRKIGLVYVFYGPHGTGKTSCARVFAKALNCLSSEHPRPCDSCTSCIAHNLGKSRSLMEIGPVGNIDMEGIVDVLDNVMLSPAPSHYRVFIFDDCDTLPADTWSAISKVVDRAPRRVVFILVSPNLELPHIILSRCQKFFFPKLRESDIVNTLQWICTSESLDVDKDAMKLIASRSDGSLRDAEMTLDQLSLLGQRISLSLVQELVGLVSDDKLVDLLDLALSADMVNTVKTLRDITETGVEPLALMSQLATIITDILAGSYAFTRERPRRKFFKRPTLSKEDMEKLRQALKTLSEAEKQLRVSSDKTTWLTAALLQLAPDKQYLLPSSSTSTSLNHGVLVGPFPDRGVGRAPAVENKGNLAGTSYGEKRTVEHTENGHVLSTSSVRANEGTKLRKAENEMVWQAVLESIQSDTLRKMMAKEARLNSISLGTEPTVQLIISSHISKSKAENYRAQILQAFESVLRSAIILEIRYESKNDAKPGHTPSMFPYPENDSTLRRSFTKHSPLSSGEGEIIEVGPSRMHWHAQTNNDVLDVNERRKENTWEEETSSSPNQESVTNPKGRNGNRQNRQNSIVRGKVSLAHVIGRAEACSQRGGWSRRKAISIAEKLEQENLRMEPKSSLLCWRTSRTRRKMY

SEQ ID NO: 58108 - protein, 802 aa, Zea Mays
MIDGRRHSVDIPVSRALLAIMRSRSLRDPDTNSLAKFSAKKTIWEGSSLDEDEMEGANNKNAYGRHSFSYNAYDHLQRRREEFGDGLRSGRLADSPINIIKANAMAKAALHNQSCCSAISGMSRSTKDRAFGLVGDGEEIGRREASTFQESSRSLLQKYRPRSFSELVGHGVIAQSLSGAVLKGKLAPIYLFHGPHGVGKTSTARTFAAALNCRSPGENQPCGRCDECMPIFSGSSSSVVEIDASKLDCKSRVAALLRNACEVLASSHFKVLIVDDCQHMDKEGWYSIYNSLEGIPESTIFVMITSDIEKLPSNSIGWCQSYRFCKIDDAEIARRLIKICTKEGMEFEAEALDLLARKANGSIRDAIQMLDQLTLLGKRISKSVTHELIGDVSDDELLDLLNLAMSSDAATIVRRARELLSSKVDPLQLLAQLANHIMDILAGKHPSDSSEVRRVTGKHTSADVDVHKLRNALEILSETEKQLKTTKNQSTWLTAALLQFNMREPYCLDDTAVSSMFTESHTDDGTAALKDESLDTSSHLCSQNKISSLDMNLGDPDVLETIWMKALENCSSPPLQNLLLKDGKLSSLYTTQGVAVAELQFCHPEVVPTSKNFWKPLCASLQNLLRCSVDIRINLSPISGNGAGSKDSSVSLVMESREEDREAQDPATSNCRTVVSSGRDCPSPPLGQAKERSSHILGCLHGGAGGDAVDTEPRILSYQKISVVPAASTPGNTPLKAAAAAAGDESKVDDGGVRPGCCSHILPCGACAPRQKPRTREKRRAKLFSCCFCKIGPDCKAKGEAG

SEQ ID NO: 58109 - protein, 561 aa, Zea Mays
MATLSTIGGLAYAMGPSVEKSSKGILADVLKCLGDNKKHMRECTLTALDSWIAAAQLDKMVPYIIVSLGDQKTGSEGRKDLFDWLSKHVSKMSDPSEALPLLKPSASSLMDKSSEVRKAAESFMNEILRICGQEVVGRNLKDLPSPTLAIVSERLKLSTVHEGFSESVKMVTTSMSLPSKAGLKNNKHGLNDRGSNVGKLVSQRGLPARASVTMVSTQDPAQSQALFNIKDSNKVSNHQALQHLCIMNRSHTSLLIDQEERERRVLVRKFKFEEPRREQIDELKIDLFKHFREDVSLRLWNSDFKRQIDGIELLQKALPSSWKEVIELLDILLRWFVLRFCESNTTCLLKVLDFLPELFDILKDQSYMLTEAEAAIFLPCLIEKSGHNIEKVREKMGELIKQMINIYSLPKLIPYILEGLRSKNNRTRIECVDIVGYFIDHHGTEVGGLMKNLPSVAALTAERDGEIRKAALNTLATAYKNLGDDVWRYVGKLSDAQRSMLDDRFKWKAREMDKRREGRPGDARAALRRSVRENGSDIAEQSGEVVSRPVAGSMISRCSYG

SEQ ID NO: 58110 - protein, 109 aa, Zea Mays
MEGYNGTVMAYGQTGTGKTFTLERLGEEDTAARGIMVRAMEDILADITPGTDSVSVSYLQLYMEMIQDLLDPVNDNIAIVEDPRTGDVSLPGATVVEVRDQKSFVDLLR

SEQ ID NO: 58111 - protein, 245 aa, Zea Mays
MFTDREHREPFEYSEDLTSLTVGAEDPENVISAQRYQENDNDLLLSTSDKEDNGTRASNGSSTSAYNAPSDLISPSLISSQTPAETSLVNTGGPTHSSQSNFSLDDLLGIGVTEAPAPTPPALTLNSKPVLDPGTFQRKWGQLALALSQECSLSPQGAASLMNPQSLIRHMQSNYIQCIASGGQPPNYKFFFYAQKDGATAFFLVECIVNTASAKAQLKIKADDGTAAEAFSTLFQSALSKFGLS

SEQ ID NO: 58112 - protein, 194 aa, Zea Mays
MEDVDVSRQLKQMTNFIRQEAVEKAAEIEAAAAEEFQIEKLQLVEAEKKKIRQEYDRKEKQVGIKKKIDYSMQLNASRIKVLQAQDDLVTDMLESARKELLCISRDHPTYKKLLKTLIVQSLLRLKEPAVLLRCRKEDLQLVDLVLESARNEYADKAKVYPPEIVVDRQIYLPSAPSHYQAPGPSWLCIRMLTV

SEQ ID NO: 58113 - protein, 574 aa, Zea Mays
MEAAADLLEYELQREISGILIQNYVCGLRQEYEMKLWEHRNCISALNRNWAEKVSEITALRDELRDVLCTSEPATHHHHHRSHGSLEDETIIAKTEGDSEPPVTEKSSESTLEIPDFSLLKHMHGEEITSFLRTEWLKLRRQHESELHEKTEELFRVKREHAKEKASLPLKKERELELHRSKLLQTIARLGEIASRKEESCSDCNEDEEMCRLKDRIGVLLQENNRLRGLLADKKQEVKHLSLQVSDSRSKIAQYSLPESKLSNNCEKLRAELEDFKIERHLNDLLDSSVFREVCHNYEDQICDLNQEGSFLRDLLDEKEDQLSIMYEDRQKLKHENDQLVSIAGSIIQHHDQANLVHDELMIYKEKLCEQELLILESKGEYNSMKRCLYEAMQQIQVCKQEILGLTENLTSMSIALEKAKEQNASLDATIREMKKTPGQSIGSHWGQTGEFDLTSMEKLSKTCSDFESRLVETMKRNETRLTSIVCQFSPLVQQVALLRKKEFWYKQILEIKCSNLWKAEAEVDVLGDEVDTLLSVLGKIYIALDHYSPVLKHYPGVTEILMLVQKVLKGESV

SEQ ID NO: 58114 - protein, 177 aa, Zea Mays
MARFMSALALAYMFDGRMDEVALVGASSASSSKSVNIEGARRIAFKHIETFVLTFSDPQMFSTAAASSAPAALSHVAEAVFIQEAGHLRCSRSEIGRFVVMLRNPSPILRACAAFALLQFTIPGGRHAVHHAGLLQEAGAGRVLRPAAAATTASIEAKIFARIVLRNLEHHQSGTST

SEQ ID NO: 58115 - protein, 586 aa, Zea Mays
MSPLSELVWSPDEGLSIKIAASSLSTRKASLRWNADTLSILISSPQRSGSGPGEKNGDTINDNLEVSEKMPSQLRIRSDSSVRVTVDSPNSTNVDALQFTSMRSQEQDSKCCEGINVMNEGKEESENCCVDKLEDMEVGNCPTRCCKDASHSSASRKKVVPSISENQACCATTFCNERSWETNAWRARLVKAVCQKESILPTNTENPILPSSIGISCDAVEFSGKLVGSQGKFQSLGVSSNALEIHSHDNCQDPVLHESHKDEPVIARGESASGVNIVARCESVPGVDSSNFVRGKEKVMYNDSNCGNNTREGDDSNESIESCTSTKAPKRKHAQCCAATMPSSGNKRFRREDNESSCSGLLQKCGTSFFNWMSSLTNGLPMLDGATAAVPLEQKFSASTGDGSAAPSQPLQNNRSVPMQFFGFNSLFQSLYTRNVMITSGDNCRQPESNCAGHVFNRLTLELNDSNSMLNKEIGMGRETLDLATQTSAAEGFQMISGGCRGNVQSQIDIFQMRPERNMKLPSSSKFSSRSLEEKQNQCTAACSNDATQNKGGLRESLWVTRLLPKASVELMEGTPCNVENAVSPQ

SEQ ID NO: 58116 - protein, 950 aa, Zea Mays
MSSWGKGCDAGWACATDPVPDRPSNRGSNDIPLRTSSCQACCEGFFCPRGLTCMLPCPLGSYCPRATANHTTGLCDPYKYQIAPNSTDSCGGADMWADIQSTEEIFCPAGYYCPSTTRKDNCSSGHYCRLGSTAEEKCIIKASCEENAENEHIAILGACIVGALCLLLLVIYNCSDKFLSIRERRKARSRENAIRLARQQLKAQEGWKAAKQFARRHVSGMQGHLSRTFSRRRSFRQQVDADKSSHRVQEAPLMGQVQMQEMSDSAVFASESANEITEAMPSVIVDVSDGEVVATNENPAPKGKHRSTHTQVFKYAYGEIEKEKFQQRQDNKNLTFTGVIAMVKDQQKEITRPLLKVEFRDLTLMLGKKKLLRSINGELRPGRVTAVMGPSGAGKTTFLNAVTGKVNGYKMTGSVLVNGKNLNIRSYKKVIGFVPQDDIVHGNLTVEENLWFSAKCRLSASMKHRDKVLLVERVIDSLDLQGIRNSLVGTVEKRGISGGQRKRVNVGIEMVMEPSLLILDEPTSGLDSSSSQLLLRALRHEALQGVNVCAVVHQPSYTLYNMFDDLILLAKGGLMVYNGPVKTVEEYFTALGIHVPDRVNPPDHYIDILEGIVKPDSSAIKAKHLPVHWMLHNGYEVPSDMQDDVKEIGEQAPQFRSSSSTSGSPSPHCLPIRNAFAEERDRLEQRLSKPKDLSSRKTPGIFMQYKYYLGRVTKQRLREARLLMVDFLILGLAGICLGTIAKLSDKTFGMPGYIYTIIAVSLLCKIAALRSFSLERLQYFRERESGMSSLAYFLARDTIDHFSTVVKPIIYLSMFYYFNNPRSTIADNYIVLLALVYCVTGIGYTFAICFSPGSAQLCSALIPVVLTLLSTQKSTPTLIRRLCYSKWALEGFIIVNAKKYPGVWLITRCGLLFQSQFDIHNYKLCILILFMYGLFFRMVAFAAMILLKKR

SEQ ID NO: 58117 - protein, 237 aa, Zea Mays
MISMDHQMFDDPFGSSGISSLEADIFSAAAGSQLPSPPWPDFDDDYDIPDLSALPANAATSSGGGYGSGGSGGHRKLSHNAYERDRRKQLNDLYSSLRSLLPDADHTKKLSIPTTVSRVLKYIPELQKQVDNLERRKRELTNANCKPGVLNTSEIVTTPIVSATCLNDTEIMVQVSLHSNVAATALPLSKCIKVLEDAGLHLISSSTYSTFGNKTFYSLHLQRSQRTMNEECPAFCD

SEQ ID NO: 58118 - protein, 378 aa, Zea Mays
MNSTWYDLVKDAKDRECFFKARDDDFFARTMDQFRLMQNSQVTDNVSRWNIECQCAPDAQLTCDNHATIPDKAPDAQLTGDNRATIPDKAQVVEPAHAEQVPMQSERAAEKTWQLCLNQLSHIPSFAPGEQLTDEKVVEPAHAKQVHLAQLSPSPSRERARLSQFAQGAQLTDEEAAALEEEDHPQIDLLDGLRRGGRLRGSGAARLAEVRRRRRSGVLTSMASLSSKHHVLIQVLLARGPLSERDFHAFIDGAFGKNTALGTKRLASEDLANDWDNKRLNPGNDNYPLSTGAANNLFLGIEQGAGSSNGQSAFPKFDNGSSVALPSGQGMSGLMGKGAKWRDGDWLCNNCNNHNYASRAFCNRCKTQKESAVHPGVL

SEQ ID NO: 58119 - protein, 312 aa, Zea Mays
MMAPLSPRLVVPVDVKKLPREQKVPLHNRWHPDIPPVADVTEGELFRVEMVDWSGGRVRDDNSADDLKFMDFTIAHYLSGPLRIVDSEGVPASPGDLLAVEICNLGPLPGDEWGYTAILERENGGGFLTDHFPSARKAIWYFEGIYACSPQIPGVRFPGLTHPGVVGTAPSLELLNIWNEREKSLSETSLETIKLCEVLHQRPLAHLPTPENCLLGKVQEGTAEWHIIANEAARTIAGRENGGNCDIKNLSRGSRIYLPVFVEGANLSTGDMHFSQGDGEISLCGAIEMSGFLELKCIFYYHAAHARVGYLE

SEQ ID NO: 58120 - protein, 386 aa, Zea Mays
MYKTVGEERFLLWAVCSIQLQVHFSSGGVKLLALAEALLKKHINSHSLHEPEALSLYVSILEQEKKYDTALEVLSGDLGSLLGREEDKLRLQGCLLAQASSYLSASEIYQKVLESCPDDWESFLHYIGCLLEHDVNLPKPSTGEHTCPSCSVDSALSNKTSLDKELVESRLTSALSFVQSLQENNSSDCVRGPHLAKIEIERQRCLNGNPDNIKLMEALVQYLHRFGHLSCSASDVEIYLHMLSNNEISELLDEITRSFDASSISVNTLGSTITLFKVQELLGTSFTKPTSELEGIAKRMVDTFYKNLPLSNYLDPQESMYGEELLSMASSILVQLYWRTRDLGYLLEAILILEFGLTVRKYVWQYKVTLVHLYSYLGALPLAHKW

SEQ ID NO: 58121 - protein, 1060 aa, Zea Mays
MDGKGLFAEIGMKEEDIATMLSGKKVSELAEDAFDGSKEERQIFEGVFCLTNVDGGLNDHYHGGIGHTVHAGKVVTSSRKPSSSADNYKAAHCRIVESFTAGNLSSYRVSCLGADEQAHGAMHSPDAVRFKLAVQWTPPRPDRVYTRRVVTRRSERARICSAMDLESIDICNFSRQRDGRGHGQLWNHLRMHAHLLMVDAGWKIEAKERDNRSKVDHVYVAPDNVTRLYSLPRAWKCFGQWLLMTTPCVNGNESIDYGKEWSNMHEFLYDLKNTLLCLQYEVQRTKPALSFLYQWQLLDPFMAVVCIDKKVAALKDGVALKAVNSTVTCLNRSECKMLDAKNSNRSLGVNSTSKYMNPYLSSCKKSLLPLLSESDYQPDKEGNTMPNEEASLFCTNKTSEDEADRRSLCMSEMNEIGIRSTAHHIVMGLHDATAFHGSSQTCSGRKRKFPCIKSKEDNQTEDKSDPLFFPPSYSSTLSHLVENVQINDVSPHGYETTEIPNMGNRTDILDKMYLGENLLFAPETGNMLLETTDDINNEQHDDAAVSEPQSADNDGSGPSGASSLPPEKDAYMGSKEDSINDYHDPSVVSEFQIANNDAKCEPSIAFLPEKDKDLEANKTSLEGPAKTGQLSSEASGSTLMISEPQVLFVSPQDGTLSFMNNNTNNQEMWRFLNVSPDTMDTEMQMDSNSLVYEASLIQGFLYLDNEGSPICWTVMNPEPPRRLICATALEPNSKLSKQYVEMRLENDASTSEHKKGGKLSDKAADIQDNVSRKKQKANIASLNNCVSMDNLTVNPIDPVVLNEGEQTGTAITEQVPVPLNLVLENKNDKDQGEQSSETSEQLMSKEPQKRDIKRQKRTWSHTCKFDDDDLLMTAVIYKLTARYRNSFHRKLRNKFGFRRLPTYHWENEDKGDRKKFPGEARTVLNKLLEMGIVARVDILQCHGPGGKNVLKDGNITASGIQCQCCGTTFTMSKFKCHAGLRQEVPSLNLFLDTGKSYSLCQLQAWSIEQKVRKEHAKDTMSLQADQNDDTCGSCGDGGELICCDNCPASYHQACLSCQTM

SEQ ID NO: 58122 - protein, 289 aa, Zea Mays
MAWLGPFLLLFSSLLMELAALSSKGICLDGNHASAELHQTGAGQAPNTMADDEISSLVTSPRQPVQSQESKPELFIMFEGFWLILRSPYLIYISLFLWLSAVVSSVFYFQKVTIVATTISSPTARRRTFALINSFIAVFILAGQLTLTGHILTVAGVTVAICASPFVAASNLVALAVWPTWVAVAVTETIRKVTTYVLTRPGRELLFTVVSQDEKYKAKVCIDVIVQRLGDATAAGIYRWLFSSLEKKTSKVTLFALPLCFLWLVIAFHLGRLQTNLARLQAASAPSYS

SEQ ID NO: 58123 - protein, 1919 aa, Zea Mays
MASGRAATSSSILVNAAGTSKTLSASLWWDSFVVLSDDLDRATAGPSVPDALAKRIKSHHAWLRGSVSMFGKPNDASRSALEVGEVAVGERRLTVKPELKEAALRASKCLNLDEVQSYILVKRSSEVSPTIRDADAEEFLHLVSVRYYLERQCLLKCIRRIFVHASDVSDSTDPIRDEASLLISEEIDRKLISIIEDSFSTASSVKAEAEFTISSLEETLIEVNLILDILFLTFYDNFSRCNGRQWITLCSIFKDILCGSYGVGKFVASVEAKNSFHYAKAQLLLILIETLDFENLLRMIHDEVPLSGGCSAFSVGDILEMDVEISKLPEFSLVESGPLILAWAVFLCLVLSLPESNTNLEIDHTSYARRAFEFAPFNYLLGVLCSSIFRESDGPVSGYRGILRTFISAFIASYEVSYQKEHSSFDMISSILCEVYDGEESLCMQFWDKDSFVDGPIRSVLHMLEEEYPFQISELIRFLSAVCHGTWPANCVYNYLERMNGVTTIYTIPCVADGVGYGHQIESHHPVSIPSIEGITIPQGTHGYILKVLQEDTTLVRWEFPHSGVSFLLITLAQELHSCNYKKACDIIGLLYRMVSSNKDLCFALMHVDKSLAVQTSNNLGQIEKHVRIDIAKVFCNSIFKYVRDVNNADILSKTFGLLAEMMKCAPYHVFDAAFECNIFTSQLSSPSSDWLLSGALARMLFAAYEGNGDCSSLTSSVLDFTTQVLRKGADADDIISPLIVFSIKYIMINHVNWKHKECSRWKTTLRVFELVKSCLQVKPFSSKLGGIIWEILLYDSSVHGVLWSILSVLTRLLHDSYRSNYHGLKDIEDIQLVLCNGLDIIYHILSNLPEGMQVAAARAFSALCFIAYKAQPQLMENASFTSDVSEIRRLESNISCILDEDDKNNDCLVVAVFNLLTSAARYQPAFLISLIEQSTKSTDHNASTNDRDNRVLVTSKSNARLVDQILDYIDRSIELMNRSPLVLLSILDLLKALWESGIRFLFILEKLRSSVTFWDNLSRCIRATLDISPIDNIDAIDEKFSLRYHCQGKIFEIMSHELFLQGKLLTETSNTVQDDPKGQKEHKSGPCRISVVLKWFDNAILADLVSNLSSNAYKKELHHAKVAACLCIIHLITKLSTGDTGSLSFSFMKKIQIISTKLLQHHAFLALLSQYSLHGYSGEQELNNLVLNDLYYLIRGELEGRQISSGPFQELLSFLLGFRIFEHNPLEQLQNTYLMANDKFLFDVEHIHDELGVDLWTDSDKRSKEVAKKMLDIMSKANLMKYYADAKLSALMSFLKFLSVYKGAISNKNLDLPDGGISVAATQSAIKCACKSFESTVDSLLPQAHTDEVLFPLLSGQVELLLTLARILFHQAKNKKSSHLCPDIVLLMKTSGASTCLFVDLMPSAHALKQPVKTLLVLLLSSYEFMYSKVDIKDLPNDINIFGELALLSVSLLPILCKLAENRECSDLAVASMDLILKGSVPSNLWMPILQKHFHLQTILHKCQNGDLLSTQVILNFLLTLGRTKDGAKVLQSANIFAFLKLLLSQLSLDDSCLRNSLSAQVKDVNLWGLGLGIVASLNHCLDDDISHNNVVSNTISFLSGHVPLVSSYLSTQSATTHQSKKRALSQKSQTSLSALSLTENILILLCILAKYHFPRDTGKKEVDSELREIIIHLLAFISKGSVKTGNASKWNSSFFCPAVIKEEVALNEKPPLICSKYGWFRFAASCTLSTAGVSVSPSAALSVVRRDKTSGDSDSIRQTRFTEILAVQIYRIAFLIMKFLCSQAKEAVKRAEELEFLDLAHFPELPMPDILHGLQDQVVCIVTEIFEANGSSTLNPETEKVCQLLLVTLETSLYMELCVSQSCGIRPVLGRLEDFCKGIKAMLQAIEKHSSFEPFVRSLTEITSLLYPGLLHNNLLM

SEQ ID NO: 58124 - protein, 299 aa, Zea Mays
MIETRRPSAYIFLSFLRLPRLSLPPALHHHMTTKDSTLILEVDLQCEKCYKKIQKVLCKLQSKEKINKIDYENTKNKVTVVGAFDPKKLSKTLRCKACDVIRDITIVKPPEVKKPAAEEKKKPEEEEKKKKPEEEEKKKPAEEKNKGGEEKAAKPAAAAPPSTTVNLQFTNICGICYPWPCSDPAHRGGFHHPQQLPQPWLPCGGMAPAPAPAPAPPVHTHPQPPCGGAPQKWAPCGGPPLCGGCAWCLGGGIGCWSPPPQQPMCCPGPSLCRGCNGCKIVRETKFSYEEYPSSACAIM

SEQ ID NO: 58125 - protein, 75 aa, Zea Mays
MGLQSYNAKAEWWFEMSKSESEGGQSQASEASEILKERSRTLSEAAAVLSRASVLKNGQMSRNRHPDYEFFLSRS

SEQ ID NO: 58126 - protein, 296 aa, Zea Mays
MLALTASASSASSHPYRHASAHTRRPRLRAVLAMAGSDDPRAAPARSVAVVGAGVSGLAAAYRLRQSGVNVTVFEAADRAGGKIRTNSEGGFVWDEGANTMTEGEWEASRLIDDLGLQDKQQYPNSQHKRYIVKDGAPALIPSDPISLMKSSVLSTKSKIALFFEPFLYKKANTRNSGKVSEEHLSESVGSFCERHFGREVVDYFVDPFVAGTSAGDPESLSIRHAFPALWNLERKYGSVIVGAILSKLAAKGDPVKTRHDSSGKRRNRRVSFSFHGGMQIVCMEAVMSPEYTHLS

SEQ ID NO: 58127 - protein, 59 aa, Zea Mays
MPIGCSAFMLQVHREAAGTASLSDERFDDPVSAAEEAAFCKACARFGFGLYLYHEDETP

SEQ ID NO: 58128 - protein, 773 aa, Zea Mays
MATESAFRLIGGTGARDWSKGFGAFGSSAGALSGEDLGFVDNDTGVYGGWNKSVPNRSGSAPPSMEGSLAALGHLIDQQSGSFEASLTTLDNITDSSKSEEQLRADPAYFEYYGSKVNLNPRLPPPLISRESRRLMNRVGKAKEWRMVSQDNSSKGSIYVPRSMLSTHKEEPEDDKSPRLDSSSVEDAQIVSSASNFQSQDFMLERFQQSVASSPDSSSSNPSNSNTGDSMPVYSDINLLKSLSFDALKQSDLNSWTPKGPLKSNVNNDLSSPPLSSSSYPGSKTGTQTFEQEKAAADTKHGNVVLGSGAAVTEVDNVDSIMKNLKLSLDVHTSSPAKQRWQDNVLQQYGSFLPAQGDPIQLTTQGPHPPHVPFVDNLSHAQLKLPDIHQNLPQPSMTTPFYTPNSFGNPYYQNLHPANAFPTSIGTGGYAVSGSILPPFMAGYAPQGPLATPLDSSMTPSFSGRPSGFLPAGNLTGGTDFMQSCKVYGQFEPGMQPSIPDPNFIHFFQHPSLFQYTGGNQYNTMGPRFTVVGNLAESFDSQNTIPQAASAYPSDQRLPLPITGFPNSPTARRGGTVPNYQGISSYIGVPMTYPTSPVFQGQTLPGVLPPVRRNDSAGFLPPSRNITGSPGIQGQRARQKFDESKTCSFLEELKSNRARMVELSDITGRVVEYSADQHGSRFIQQKLENCTAEEKTSVFAEILPHASALMTDVFGNYVIQKFFEHGTREQRRDLATKLVGHVLPLSLQMYGCRVIQKPKHVLEAATEMSCWQV

SEQ ID NO: 58129 - protein, 234 aa, Zea Mays
MEMIDAELRLGPPGSNNSDVVVTVVPPAAARKPAAPAPASAAKRPSSSVVKSDDASGTGDHDDDAAPASNRAARDTPRTQLLYRARSDQLMIGLVLVNERRRVRAVGWPPVRAYRKNAFHAAAEAARRTNNKGEELQGGGGRLYVKVSMDGAPYLRKVDLRTYGGYRELRDALDALFGCFSSSSASSSSADGGCQFAVAYEDKDGDLMLAGDVPWEMFICSCKKLRIMRGSEAR

SEQ ID NO: 58130 - protein, 182 aa, Zea Mays
MHGALLSGLREASKIYRASDSLVNYDQKKNSLPKSLKPPDGALLDLFLEPDLAFGRFSFVFSSLTPDDPAAPGLLRVSLDKRFLLQPNYNSELKGDQKDHSHSHASGAFHLYAAVSREQADRLRRSSEDDRTRLGVLCKDRTVKLMGYDSTCDVGSDLISSILGARKARKLLQHPKNSKIPR

SEQ ID NO: 58131 - protein, 306 aa, Zea Mays
MERSKRVAVVTGGNKGIGLEVCRQLASRGVAVILTARDEKKGTEAVATLRGSGLPDVQFHRLDVSNPTGTARLAEFIKEKFGRLDILVRSLFSRKNRIDLMRGKLGLTRCIKQLVGKNAMERLQWLVQHSTESYEEARECLKINYFGTKYVTEALLPILISSSDGRLINVSSNYGLLQHFSGEDLKQELNDIDNLTVERLDEMPELFLKDYRSGQLKSHGWPADSEYLAYKVSKALTNGYTRILAKAHPELRINCVHPGFCKTDINFDTGEYTAEDGASCIVAVALLPEGGPTGVFFFRREEVPFT

SEQ ID NO: 58132 - protein, 122 aa, Zea Mays
MDRDSWPASKEERGRAKGRSWRRSARLRASSRRAVERHGSGQGELGKLRAGDRKTGRATQEEPSRKLRPGGRSASWAEGGNLGTMQWSSGWAFLPAREKTRRSCRAGTEREQNAGRAARLYF

SEQ ID NO: 58133 - protein, 88 aa, Zea Mays
MGPTAVTRLRGGEINYGVQFPALRPPRCKAMHRTGPTPLEDLPQLLHAVGVMTLPDTDRGGSQPSLSFSVHGDGRGMEERAAPEMPGG

SEQ ID NO: 58134 - protein, 51 aa, Zea Mays
MRIGVQGSPDHGRDQREQGRKRRAGQGPSAEAVKARRKARYASLNSSGSKE

SEQ ID NO: 58135 - protein, 98 aa, Zea Mays
MRGEAAGLCRLNAAGICEASPSCVRRRIRQPARQCRFRLLRTQLLRRHSRRPMGPRASSSAPGAGTSSCTQLVRRRSAAPSAAPSPPCRLQVRRTRMA

SEQ ID NO: 58136 - protein, 185 aa, Zea Mays
MVAAAAEVSTAATASSSPPAEEGERRDESESDGEMAGLAAVLDFDMLCASVALSAERRKAGAALAGAAGDCGGGGGGVQRMWEGDVVLDCLDDRRIALETSCCPCYRFGKNMRRANLGSCFLQGMVYCILLAAVLISLIAFSVTRHHIYLYMGIGSVLLIAIYTGYFRRRIRKQFNIRASISWDS

SEQ ID NO: 58137 - protein, 112 aa, Zea Mays
MRNRPLDPQSTAHIRSDGPRVSTQTFPHDQIPIVQTRMDDSGYRLLPPARGHGGKQSMRDGHSPEPCLDPTPHRFPPQKRLGTNSLEIRWRLSLSTSCSDLQPRQATARICR

SEQ ID NO: 58138 - protein, 75 aa, Zea Mays
MDEIAKEDKEKEKRHKRRTVVKEERRKSGPPRLGRHKFEPAPVQVLLTEEISGSLRKLKVTSASRFVDFLFFSLG

SEQ ID NO: 58139 - protein, 1072 aa, Zea Mays
MKYFEEKVHAGEWDEVERYLSGFTKVDDNRYSMKIFFEIRKQKYLEALDRHDRAKAVDILVKDLKVFSTFNEELYKEITQLLTLENFRENEQLSKYGDTKSARSIMLVELKKLIEANPLFREKLVFPTLKASRLRTLINQSLNWQHQLCKNPRPNPDIKTLFTDHTCSPPNGARASPVSVPLAAVPKAGAAYPPLTAHTPFQPPPGPSLAGWMANAAASSSVQSAVVAAASIPVPPNQESEQLMKRLRPGGHGIDEATYPAPTPQPAWSVDDLPRTVACSLSHGSNVTSMDFHPTRHTLLLVGSANGEFTLYEIGLRETLLSKPFKIRDINACSPQFQNAVVKDSSISINQVTWSPDGEMIGVAFTKHLIHLHGYQPPNETRHLLEIEAHSGGVNDIAFSRPNKQLCVVTCGDDKLIKVWDMHGHKLFTFEGHEAPVYSICPHHKESIQFIFSTSLDGKIKAWLYDNMGSRVDYDAPGKWCTTMLYSADGTRLFSCGTSKEGDSYLVEWNESEGSIKRTYSGFRKRSAGVAGVVQFDTAQNHILAAGEDNHIKFWDVDNNNMLICTDAEGGLPALPRLRFNKEGNLLAVTTADNGFKILANADGLRTLRALGSRPPFEAFRPQYEASSMKVSGAPVVASISPNIGRMDHLDRNSPAKPSPILNGGDTASRSIDIKPRISEEKPDKAKPWELMEVLNPQQCHVATMPETPDQARKVVRLLYTNSGVGLLALGSNAIQRLWKWSRNEQNPSGKATASVVPHHWQPNSGLVMTNDTADTNPEEAVPCIALSKNDSYVMSACGGKVSLFNMMTFKVMTTFMPPPPASTFLAFHPQDNNIIAIGMEDSTIHIYNVRVDEVKTRLKGHQRRITGLAFSTNLGILVSSGADAQLCVWTNDTWEKKRTVSIQMPAGKTPSGDTRVQFSSDQSHLLVVHETQLAIYDASKMERIYQWIPQDTLSASISHASYSCNSQLVFAAFTDGNLGVFDAENLRLRCRIAPSVINSNPPVHPLVVAAHPHEPNQFAVGLSDGSVKVLEPLESEGKWGAPAPADNGIIPNGKTPASSATSNPAADQIQR

SEQ ID NO: 58140 - protein, 438 aa, Zea Mays
MEESGGSCGKREDAAPPWRPSDSTAFGRFAAAASPPEASPSASANGAAARVSSLHGVRRKPSVARLTAGIIQTYLQCDPEFKYSEVLNPKRFLTNPSTPAHNDGLDNANWDLILYVNLELVNKMSNRRFIVKEMLGQGTFGQVVKCWDTETNDYVAVKVIKNQPAFYHQAIMEVSLLRTLNQKFDPDDQHNIVRMLDYLSFQNHLCIAFEMLGQNLYELLKRNHLRGLKLKYVQAFSKQILDAMVVMREAGIIHCDLKPENILLAPSVTTAAEVKVIDFGSACLEGKTVYSYIQSRYYRSPEVLLGYPYTTAIDMWSFGCIVAELFLGLPLFPGASEYDVLQRMMKILGGQPPDELLREAKNTARFFKHVGSIYPGNEAPTGLCSAYKSLSEEDVEVRDSKKPQMGKWYFPHLKLDKLICTYPWNNSELTDETSYNKA

SEQ ID NO: 58141 - protein, 587 aa, Zea Mays
MCPAAATTSSAKPSKKRKQPVIAPPESDSEEESVYDTASDDDEEEEETQELESEDVDEEVEEGSEGGEENEIGDDSEVEEEEVKEKKEKEETVKEKKEKKDMKQEGKKAKKQEEKKAKKDKKEEEKKVMEDKKEEEKKAKKKSEGSGILSNKLFSELPLSELTAKAIREMNYTHLTQIQARSIPHLLEGNDVMGAAKTGSGKTLAFLIPAIEMLYHTHFSPRNGTGAIVVCPTRELAIQCLVIDEADRILEQNFEEDMKQIFKRLPQNRQTVLFSATQTPEVEKFAKLSFEKNEESKKKPVYVGVDDDKSKATVEGLQQGYCVISSDKRFLVLYAFLRKKRNKKIMVFFSSCNSVKFHAELLNFLGIECSDIHGKQKQQKRTTTFFSFCKAEKGILLCTNVAARGLDIPDVDYILQYDPPDEPKDYIHRVGRTARGEKGKGSALLFLLPEELKFLIYLKAAKVTLTEYEFNQKNVPNLQSQLENIVGENYFLNQSAKEAYRSYVLAYDSHSMKDIFNVHQLDLQKVAASFGFKNPPKVNLDLDSSAAKHRKKMRRVDGGKRHGISASNPYGRKDKGGAGDKRQLARF

SEQ ID NO: 58142 - protein, 451 aa, Zea Mays
MGGGAEDSGPAIPGLSSSAAAGAAGSDQWDSDSEDDIQIVLNETDGRRGLGDDEGDDEDGEDLVIVADGPHITGIDEQDWGEDPVAAGAEGERKDGGDPGKTAAAPGGRIGYSGGGQGFHQQHHSMFKYVRPGAPVASAGGVPGGPGQFRPAGPSGPFSGRGRGDWRPAAGRGMNKSFHSGYGTAPWGGSGRGFGGGLDFTLPPHKTIFDIDVETTFEDKPWKYPGADISDFFNFGLDEEKWKDFCKQLDQLRLESTMQSRIRVYESGRSEQDYDPDLPPELAAVTGHPDISADNRNKMDNGHTDFSAQGRGPANVRTPVMTGRPIQVETNYTDRFPSIDSRSHRMRESYSVIEIVCQGRDSMDDETVDQTEKDSQRGYKGVHDVEEGKPYPTDKINNSGHNSNLVIKTEHKRQPPVSPECDMLSTDVNAPSPPSYKTRGSPREARLKQKK

SEQ ID NO: 58143 - protein, 984 aa, Zea Mays
MESYLKENFGGVQAKHSSDEALRRWRKVVGLVKNPKRRFRFTANLDKRNEATAMKRNNHEKLRVAVLVSKAALQFIHSVAPSSEYKGLASKLSTSESDGLTTSADKLATRRDVFGVNKFAEAESRGFLVFVWEALQDMTLMILAACAFFSLIVGIATEGWPKGAHDGLGIVASILLVVFVTASSDYRQSLQFKDLDKEKKKITVQVTRSGYRQKLSIYELLVGDIVHLSIGDQVPADGLFMSGFSLLINESSLTGESEPVAVNVEYPFLLSGTKVQDGSCKMLVTTVGMRTQWGKLMATLSEGGDDETPLQVKLNGVATIIGKIGLIFAVVTFAVLTQSLFRRKIIDGTYLSWTGDDALELLEFFAIAVTIVVVAVPEGLPLAVTLSLAFAMKKMMNDKALVRHLAACETMGSATSICSDKTGTLTTNHMTVVKACICGKIKEVDGVSDIKNLFSELPDSVMAILSQSIFNNTGGDVVLNQDGKREILGTPTETAILEFGLSLGGDFLAVRKASTLVKVEPFNSAKKRMGVVIQLPEGALRAHCKGASEIILASCSKYLNEDGNVIPLDAGTIDHLKATIDSFANEALRTLCLAYIEVEDGFSVNDQIPTDGYTCIGIVGIKDPVRPGVKESVAICRSAGITVRMVTGDNINTAKAIARECGILTEGGIAIEGPDFRTKSEEELTQLIPKIQVMARSSPLDKHTLVKHLRTKLYEVVAVTGDGTNDAPALHEADIGLAMGIAGTEVAKESADVIILDDNFSTIVTVAKWGRSVYINIQKFVQFQLTVNVVALVVNFSSACLTGSAPLTAVQLLWVNMIMDTLGALALATEPPNNELMKRTPVGRKGNFISNIMWRNILGQALYQFLVIWYLQTEGKWLFGIKGDNSDLVLNTLIFNCFVFCQVFNEVSSREMERINVFEGILNNNVFIAVLGSTVIFQFIIIQFLGDFANTTPLTLNQWIACVFIGFIGMPIAAIVKMIPVGST

SEQ ID NO: 58144 - protein, 185 aa, Zea Mays
MRGLQVEHDCTMKERMGMQKKLIELGATDLLVPGVLPIGCFPLYLTLYNTSSKADYNARTGCLRRYNRLAFHHNRELKQQLDELQKKYPKTKIMYGDYFKAALQFVVNPGKFGFSTALQACCGAGGQGNYNFNLKKKCGEQGASVCSNPSSYVSWDGIHMTEAAYRKVANGWLNGPYAQPPILKS

SEQ ID NO: 58145 - protein, 322 aa, Zea Mays
MKSRTLAPFRTTNLVVVRSTNGAGGSTCSDFFASGEALLIDPGCSSQVHAELADLIDSLPKRLLVLVTHHHQDHIEGLSVVQRCNPNAVLLTHQSTMDRIGKGTWQIDYTSVTGGEKICIGDQELQVVFAPGHTDGHMGLLHVNTNTLVVGDHCVGHGSATLDSRNGGNMKDYFETTYKFLELSPHVLIPMHGRINLWPKYMLCGYLRNRRAREASILHSIENGAQTLFDIVSKTYSDVDRKLWIPASFNVRLHVDHLNSLHKLPKDFSLENFKESCGVHFMLRWAVAYVHSRSSPAILAASALAGGLAIACALRRNYCKQS

SEQ ID NO: 58146 - protein, 249 aa, Zea Mays
MAHPSAAAAAVSSTAPAANPSSGAREEGGARSPPSPSPSQRGRAKVVIVMGATGAGKSRLAVDLAAHFAGVEVVSADSMQLYRGLDVLTNKAPLHEQNGVPHHLLSVIDPSVEFTCRDFRDRAVPIIQEIVDRGGLPVVVGGTNFYIQALVSPFLLDDMAEEMQGCTLRDHIDDGLTDEDEGNGFERLKEIDPVAAQRIHPNDHRKIKRYLELYATTGALPSDLFQGEAAKNRNGVGLVTPDSTAVSCG

SEQ ID NO: 58147 - protein, 615 aa, Zea Mays
MNPNENASIAQQQLAQAKPPVKISMPPDSDSNAYAGGYENLSSGIFPDEQIEFESLCSSFDGHQNVGRRILNDFSRASADLAATAADLKVRLQIYKVRLLLLTRNLKVAKRELKVLMNMARGRDSSTELLLKSQLEYARGNYRKAVKLLSTPNNRTEPAMLAIFHNNMGCILHQQRSYHASIWCFSKALKYSLSFRSEKPMKLSTLSQDKSCLISYNCGIQHLMCGKPLLAASCFREAMPLFYKRPLFWLRFSECSLLALEKGLLCANGASSFNDEIEINVVGSGQWRQLIVNPVNSRSNLDSAGVTLGEHKNLVSLGFARQCLQNALLLLDATEKENWVIASDTEDWDQGTVHGYKSSGQKNTTSTDSKTPSGPTLANVNGEQKGTSLNATLQSSLAFYDEIRRKEYIKIRQAVLANLAFVELCLDNPLKTLTYAKSVLQVTDCSRMYAFLSHVYAAEALCTLNRTEDAAENLSVYIRDGNHVELPYSVENSEKALVEKDSDGEDLVAPAVTKLATEEPEQLRPEEARGVLYINLGMIAARQGEVEKANYMVSRGLAMLPNNPRAVLASVYVDLLQGKSQEAVVKLRRCRNVRFRPASIAASSQQSSLEKPPLS

SEQ ID NO: 58148 - protein, 231 aa, Zea Mays
MLTDVSLMKKLRHPNILLFMGAVTSPQRLCIVTEFLPRGSLFRLLQRSATKLGVRRHVHMALDIARGMNYLHHSSPPIIHRDLKSSNLLVDKNWTVKVADFGLSRLKRETFLTTKTGKGTPQWMAPEVLRNEPSDEKSDVYSYGVILWELVTQKIPWENLNSMQVIGAVGFMNQRLDIPSEVDPQWRSIILNCWESDPQQRPSFQELLERLRELQRRYAIQQRNAKNSVEE

SEQ ID NO: 58149 - protein, 1386 aa, Zea Mays
MAAVEQLKELGEKLQAVAPAPADELAKLLEKAVECLHGIEQSPVSSVMEAIQPSLKAVTREELLKHEDDNVKVLLATCFCEITRITAPDAPYNDDILRDIFYLIVGTFGGLNDVNSQSFGRKVAILETVARYRACVVMLDLECDDLITNMFQTFLVVVSESHEEYIVKSMQTIMTLIIDESEDVHESLLRVLLSALGQKKTGAAMSARKLACSVIEHSATKLEPYLKKFLMSSWAGNVSSSNDQIDHQGVVFDLYQCAPKVLKVIVPYITGELLADEVDNRSKSVELLGEIFSLPGSPIVECFETLFTEFLKRLTDRVVEIRISVVEYLKRCLISNPSRAEAPEIIKALCDRLLDYEENVRKGVVAALCDVATHSPDAIPIDTIKVVAERVRDKSLAVKCYTMERLADIYKLYCQRGFDSSTNSDDFEWIPGKILRCLYDKDFRPESINSILCGSLFPPEFPMKGRVKHWVTAATYFDKVEMKALEQILLQKQRLQQEMMKYISLRQLSQEDAPDLQKRIIGCFRNISRLFSDSAKCEENLNMLHQLKDADIWKIFTSLLNCSTTFEKAWSLRADLLKIFGEKHVLYNFVGALAMGCSYLLVNKEYAKEILSEASEQKTSGNTKLISSCMNLLTAISSFFPSLLSGLEEDIVELLKEDNEVLKEGIAHVLSKAGGTIREQLASTSSLDLLLERLCLEGTRRQAKYSVHALAAITKDDGLMSLSVLYKDMVRNSSNKSEWGDSTENCLLKIYGIKTLVKSYLPCKDAHAQPGIEKLIDILKNILTYGDVSPNMVSSAADKAHLRLAAAKAVLRLSKQWDHKVPVDVFYLTLRISQDDFPQVRKLFLCKVLQYIKERALDAKYACTFMFGVNDYHAPPYEEFKYNLTEVVQICQQVKMRQLSVQADMDLLTAYPEYIISFLVHALAHDPSSPEIEEHENVNAFGPIYWRLYLILSILLGEEGLQHSVPGMKKDSFTTIISIFKSIKSSQDVVDGSKTKTVCAICDLGTLIAKRLCQDQTSLSEAQTVPLPAQLYTPLHDNQNENSVENNEQIWLGCEKVLAHFEAVRTANMDKVESPKHKMLIDVTDEFGNEVPLGKIVKLLKSRGERKIGEKQKAPSSSSVNAENDDVLGLVREINLNNQEDLEESHKDKSEKRHTNAKDSNQKPLDFSSPKRKRSISKSRPHSAKGSKSSDERLLHTPNSERTNISLETKMKEKDRDDSTDTELLVSPSTRTPVSKQNKGAKKSNINILSSVPKKSADADSTKRTVEPRSLNGSLKRQKSKPISGLLKCSTQDSSSTDLVGHRIKVWWPLDKRFYEGAVQSYDSSKKKHRVLYDDGDVEVLNLAKEKWILIESNDSSVKRQKKDHLGTNPGRALEITSSSKSPPSL

SEQ ID NO: 58150 - protein, 748 aa, Zea Mays
MEIHRRRDMVCMHMQMLDQHLHCPTFGTHRFLSQSYPSIAGESVTNLRYSPITYPSVLGEPLHGEIIRIEIVMNTLSSDPRKVDTTRKIISFHKEDKSLDANNIGPQSILLDFISSSQTLRIWSFNTSIREHLNSDQLQKGKQIDEWWKQMMKASGERMIDFTNLDERATGMFWVLSFTMAQPACEAVMNWFTSAGMADLIQGPNMQPSERIMMMRETYPLSMSLLSGLSINLCLKLAYQLEETIFLGQAVPSIAMVETYVRLLLIAPHSLFRPHFTALTQRSPSILSKSGVSLLLLEILNYRLLPLYRYHGKSKALMYDVTKIISMIKGKRGEHRLFRLAENLCMNLILSLKDFFFVKKELKGPTEFTETLNRITIISLAITIKTRGIAEVEHMIYLQPLLEQIMATSQHTWSEKTLRYFPPLIRDFLMGRVDKRGLAIQAWQQAETTVINQCNQLLSPSAEPNYVMTYLSHSFPQHRQYLCAGAWMLMNGHLEINSANLARVLREFSPEEVTANIYTVVDVLLHHIQCEVQRGHLAQDLLSKAITNLSFFIWTHELLPLDILLLALIDRDDDPYALRLVISLLEKPELQQRVKNFCNTRSPEHWLKNQHPKRAELQKALGSHLSWKDRYPPFFDDIAARLLPVIPLIIYRLIENDATDIADRVLAFYSSLLAFHPLRFTFVRDILAYFYGHLPIKLIGRILNLLGVSTKVTLLPFCIPFLAIFHKSGWNLLILSSNTFGQSIQLPC

SEQ ID NO: 58151 - protein, 523 aa, Zea Mays
MLVKQLKKRLVNVRNGRKEAYSMLRTAMQKAAQLRLMEKEKNKSPSFAMRISVRIKKIVWSMLADGKSFSEAEINDMIFEFDRDYKDIGIAQLTTKLFVLKNGLANAKSDTVVSPWNPPAEWGKNAMLRVNAWQGAPTGGNPVIESFLVDIYPLKIYLTEAMYRMMWGYFFPGDEQQPQKRQELFKVSTTAGTRRKKNTSVAETNSPNNQSSKETTFAQKPELRRTSSFDRTWEETVAESVANELVSQMEGQTNTQYEPQDAAKDSKLLRPVRSTREDKKIVEPNELKQSRPQKMMDFRNIKISQVELQLTYEGLPFAVSDVRLLMDTFHREDFTGTWARLFSRVKKHIVWGVLKSVTGMQGKKFKAKSSSQKEPSTALISAADFNLSDSDGDEAGSSDQLPAFLKKPSDGAGDGFATSVKGLFSTQKKKAMAFVLKTMKGDADHDFHGERSENEIEFSPFARQLTITKTKKLIRRHTKKLNKSKVHKVTATELEVAELPPRAPGYNTDSSSDSSSAETSPKD

SEQ ID NO: 58152 - protein, 69 aa, Zea Mays
MAGPHALSRSRLAVHGATLYALPASLAGSPQLERRHIPLLEPPFCIRRGREPRGERVWSSSHMEGSLVA

SEQ ID NO: 58153 - protein, 950 aa, Zea Mays
MTAGAGEPRRIVLLLDLDTFLPTSSSSTPAAASYLAEVLPAATSLLAACRSPASLSAGRLFFSSLSPILSSSLLPRPLPAAPTPLSFDLHPATLASLAPLRCLALRATPAHPRAPASSSVAKSLLQLEHDYSWDHDPPRRRRCRGFDPPPNLVALFTPVTEFDLFGDDASFVEKFRKVFGPVRDRLSAIGLQVCWVVVPSASVSASAAASEGIRRAVTELGWWFTTADAVALGSAVAPPALVWGGVGLGGGEGGRRGEVVLEIADVEGKPLVCKGCEVEVVGSSRLQQASGNAVSRIHVRSVCEAGNWERLMDGDVAVVRGFQREGSKADGEEAVDKEYFPHRILELVLGDEKDRLGVAKPIWQLILVFLSRRNYCAVVSVSDGDGNSVDGVLMPFSMNCALLHLEKNVMSAKASETPSCGASDETKVQSDKKRRSRLVGKLLEVTTWSTFCDMLRKRADGSMPVVDLEDLYFSRYGTTSKKLRFLKCWMKQVKQSRLSTLSSIHTEGEQRLPSKDDSEARVLVSEEDASASLVNFSLDEADCQKVDALVDVAGCSEVGIPVDEADCSKVDISVGEESSMFSSMEELEAFLGAVPHKIEQSLCSEDADLGSLAERLVDLSVHAMLVKHGKIAVRYFEHNEAEDGSSAKIACELSNILLRKPKELVSKYRESNSASAASEQTAKHSTCYKIREHELQILLRMEMIKSELGSAIEEGSKQKMIKDICSLLQFIDINLQGDSFQSDGILEYAEKTIKSRYINSMEDVIKKIYREMEFDLFDDDDGVDYSDSLPSSSNQDDGRCRSQRGSDSASASALHLLQRDARSSRQREDDDRHDKLTARARERRDRQRRLSSFTSWVPDLRRVWALKHPGKEPCAWVPRSRSRSCAKRRRAACTDVVLETPVTSGKRHMSGSESDDARQVAARRSAALGAVSKTLFDDEVVETDVSSSST

SEQ ID NO: 58154 - protein, 143 aa, Zea Mays
MISRVNMVIVGAHAIMANGGVIAPVGMNMVALAAQRHAVPFVVVAGSHKLCPLYPHNPEVLLNELKSPSDLLDFGEFSDCMNFSTQDGSPLLNVVNPTFDYVPPKLVSLFITDTGGHSPSYMYRLIAEYYSADDLVVRRKATS

SEQ ID NO: 58155 - protein, 106 aa, Zea Mays
MDYQGKNKLVFSLTDPKSCTAQGRDCTIVDCTRKIVAQMGKKELMGGKDFYHVEVQSGYDQAFIIGVMAILDSIHGERHGTNRRHLKLSKADASRGYLLSGHMIDA

SEQ ID NO: 58156 - protein, 98 aa, Zea Mays
MPRRSTWARSSPTCSSIWCACRTCAASTSARLPCARWRSTPANTQLDSARVHPRSTLTTAPLTMLATATKLMPRTRSSIAVVSKMTRSSLNGNLDGRA

SEQ ID NO: 58157 - protein, 1253 aa, Zea Mays
MASSTKSDLVSGSPDGHGYFNAQRGSYAAASLERSGSFREGGDGYAMFSASNSSRSAAVNSINLVQSLALDLRPATVDHKTSRLDLKKSISSIFGTSAEDSTSLPSLGRNLPNAIEEIRRMRSNLNDNSNKARERSRAFGGAMAKIDKLCPNIVRKRSRGDSSSNERSSVLSSGGVTPKNVPQSHLNADDMEAGLQREERTKNAGQNRRIRTSMVEMDARTAGPSRGPGPTDRISDPGKATNGSSAVPEEKIRGLATTIDGWEKPKMKKKRSTIKADMSLAGVLRTVDVDRESKQGMQHKFTNDGRARMTSSSFRSGTVASGTTKADLLSTQNGLVMRPLNRSDQDNGFHPTNKRERQAALDKETPNPRTINKPNEDDSGCNIASLPKANGSARGPRSNSGSILKSYPNIHRSQASSDDWEHPSGTNKLISAGGSGIHKRTKSTHSLSPPIQWGGQRPQKISRSARKSNLVPIITTDSALVPGSLDSPVNEDCAGLPRRASVNSLQQTKRGDHGLSTGPEGNEPVVAEKKLRDKGKRAGELDDGHGSGFQKIAMLGHPSKRNKLPADEDIGDALRRQARVVPGFTLTRPGTPVSIDKLENAPITKQRSVRTVSERTESKSGRPLMKKISERKSNARPRHTSSSVQSDSPVQSEDDHEELLASANAALRSACASTFWRQVEPFFAFLTAEDITYLSQQIHLPDDSSSSRSMEGGECQKYKGGLEYISHPSTPAASNKDDHAALPNGFGLNQLDNDIGVGWEASCIEPILDQLVHGIGVPGWSSVGQRLIQALIDEDRIDSITNNTYISEGYAFDTHEIHFDGGGWKPHSNNYKLEPLANFEASRRGPNGLTMDSDWKYNDVSNRSGNVMDKTKVWPEFQYSEMCFNDRIIIELSEVGVSIEPVPDLAQSEDEDINAEICKLEGQLRKEVVEKKNLLLKLDGIVATAKESQHREFSRLAMDRLLLRAYEKYMAFCGPNVSSSKNVNRTGKHAALSFVKRVLVRCQNYEEAGTSCFDEPIFKDMFLSATSHRRSLDTASQDNNTTARPVHRAGAPDASRGSSHPTDLSFAKEDPWTNNVKQRELLLDEVVGSITGGALRTSSSVLGISLVSNTKGKRSEREGKGHNRDSLRSGRPSPSNAKGERKNKTKLRQKAANISAPSGGLQLPAKTTPPSSGNGKEESAAAAAAAAARHGGDPAANASNDAEMPDLANLELPGLDADFGGWLNLDDDDALQDLDLMGLEIPMDDINEINLMI

SEQ ID NO: 58158 - protein, 307 aa, Zea Mays
MRVPEEGPCDPIAPLDLPHSLHAFHRVSSSDSLNMEGYHTFRGGFWNYFSMGMDAEVSYAFHSERKKNPEKFKNQLTNQGTYAKLGLKQGWFCASLSQPSSRNLAQIAKVKIMKRAGSLWEELHIHHSIRSIVCLNLPSFSGGLNPWGTPGTRRAEDREFTAPFVDDGLLEVVGFRDAWHGLVLLAPNGHGTRIAQAHRIRFEFHKGAAEHTFMRVDGEPWKQPLPKDDDTVVVEISHLGQVTMLANEPCRSKSVNDQSSLSPAHDSHGDYNDIAEEDEDEWEDGRRKFGAADTFKIPDEIDIAHFS

SEQ ID NO: 58159 - protein, 626 aa, Zea Mays
MKVGQVQKDLSLMLDALGKLAIANPIFTHGQLPSLVNYVEPLLSSPIVSDAAFCTMLRLARCTAPPLCNWALDIAAAIRVISVGDFEMVLDLTPVIMEDDSKKPSSGIFEQIVNGLTIACKAGPLPADSFTFVFPIMERILLSSKKTCLHDDVLHILSMHMDPILPLPRPRMLSVLYHVLSTVPAYQPSVGPMLNELCLGLRGHELAQALVGVYAKELHVRLACLTAIKCVPVHSVQRDLQVSTSLWIAAHDPEKVVAELAEELWDRFGFDAITDYSGIFNALSHKNYNVRAASAEALAAALDENQDKMQDALSTLFSLYIRDIGTSVEFGDAHWLGRQGIALALHSIADVLASKDLPVVMTFLISRALADPNVDVRGRMINAGILIIDRHGKENVPLLFPIFESYLNKRASTTFLLIIVLASDEKTYDLVREGVVIFTGALAKHLSKDDPKVHSVIEKLLDVLNTPSEAVQRAVSDCLSPLMVSKQEEGQALVSRLLDRMMKCEKYGERRGAAFGLAGVVKGFGISSLKKYGIAVTLQKNLEDRMSAKSREGALLGFECLCEKLGKLFEPYVIQMLPFLLVCFSDQVLAVREAAECAARAMMSQLTGPGVKLVLPSLLKVSIYLI

SEQ ID NO: 58160 - protein, 357 aa, Zea Mays
MWSEVSAKLSKALQAHVQDALLDSREDGLMSDRKNYPLSMLAIHAGPRLRLLLITFQLLEMEVRNISGSSELDGIRWLQVSTTLIDSLIQPVFMKWIEEEQALENGQINEKLMKTISSKLKEGNKILRRFNRFGKSELYLDMLFFLRFGSARCDSYFNVKFLAEHGERILEDLVISLADVIASIYLELMSVDGDMSAEVVGSSLVLCSLSTRELQKLRNEVAINWWLHQYFKSVVSMYEDRFELYVLCSKKCEKTADNQAERANWWRIASGKPNVLTLDYVNISPFSLPARRTKELRALIGWRYYFSLFLELSDIAMPFIRVAISKVSSAVSYFWVSMIGRSLGLIFSGIRQSLGWK

SEQ ID NO: 58161 - protein, 1292 aa, Zea Mays
MDGAANWRPTQGADPATVAAVGGVDPNAAAPTGSDWRTQLQPEARQRIVNKIMETLKKHLPVSVPEGLTELHKIAVRFEEKIYTAATSQSDYLRKISLKMLSMESQKKTQQNPGNAQVIPNQNPPGPGSNPAQSSAIPLMSQQQTRQPNASTSVQGSLPSVGQNLSSVSQTLTLQNLSGMPQNTMNNGLAQGRQQQQQQQQAHNQFMYQQQKLLMNQKLQQNSRMQPHIQQQQTLLQSTQMQSSQQPMVQMSSGLQPGQIAIPQTQSMAMQSATQSGIQQNALNSVQQPVQSLLQQPTPSVVRQQQHPQSMHQQSSLQQTQPTQQPNIPLQQQPQQLMGHQSNLQQNQLVNQQSGAVEMQQQQRLPVQSTNLLNMHQTQQMMNQQSMPLHQPQQLANQGNVSSLNQQQQQLLGTVPNVRMHMLQQQKPIQQPQQQQHAQQTSMGLMQPQSQQNQLQQPQQHMMSQFQSQPNQTQQQLGMQQRLQTSAGMLLQQNNIDQQKQYVQAQKVLQEAPSTSVDSTAQTGHPGTGDSQEELYQMIKSLKDQYFAELNDVYNKISMKIQNIDNHMPAQKSAEQYERLKGFKGMLERILHFLQANKSSIQPGFREKISIFERQILSIMSSQRRKPVQAPGQQTFQQSGGQAPSSNMSQQHQTSQGLQQHDSHTNQMPQASLPSMNTGVPTSGAPGIQHVPAPQASNFGVPTTQQNVTNAPQAASNPENAQGNNFNPVQHGSMGTALQQGSTGPMQGALNAQHQSNSNMISNNAMSTMQTNTNAMQANVNSLQQLKQHQEHQMMQNQQMKQRQQMLQQMQQKKILQQQLPIQQLQKQQQQGPIQVQQLHSGNDVNELKVRQGAAIKSGMYQPLNQRNYYQQIKRGDVFPISSPQNLQASSPQISHYSHVDQHSLLQSQVKTGTPLHSANSPFVPSPSPPVAPSPVPLDSDKPLSNLSSLTSAGQAGHQQTSLAPLTQSIAVNTPGISASPLLAEFTSADGGQVSVPTQVPTKSSAAERPLDRLLKALRTTQPESLSAAVSDIGSVVSMIDRIAGSAPGNGSRAAVGEDLVAMTKCRLQARNFITHDGSGASKRMKRDTGAMPLNVSSAGSLNDSLKQSYTVGTPELQSTATSRVKCQRAEVNHVLLEEIQEINKQLIDTELHVSEDDAESFTTSDMAEGTVIKCTFTAVAVSPSLKSMFASAQMSPILPLRLLVPGSYPKCSPVLLDKFPDEQWNSDDLSTKAKSKFSVLLRGLAEPMSLREIARTWDACARKVIAEYAQQTGGGSFSSSYGCWESCVGAS

SEQ ID NO: 58162 - protein, 671 aa, Zea Mays
MAWWSGKVSLSGLQDIAGAVNKISESVKNIEKNFDSALGLEEKRDDEEASGSRTSNSDGIGFFNPVMAFMGHNGEEDGTEVSEKPQFPKDLSVEEENHSTPTKKQTSEVDHSEVSVTTFPEQPSKSEEAHSISNESPVSKADVSEQSITPQTPAHPSVAEEKLDGCTEALASKVGDDEASETSQSPGHPSTVEENQDHQYSKHSCPSDEAEPNQLRESAGDLPDGSAFSSPIKIDKSGDTETGESIDTGKEDTSDGNASQSQPAESMLASSDNITEVEDKIAQEYNVPKELSSPQENCDTVDKVTRLEVKLHDGNIDTKKSEEESNKMEAGEVSVVVQEDNVMEQPEDLMSKSITAAHDSHSQNESVVSLTDVPAGLGGVGPADNFTEEEKIARITDFQIVDSVVSVGELEKLRREMKMMEAALQGAARQSQSKADEIARLMNENEQLKSTIDDLKSKSSEAEMDALKDEYHQRVATLERKVYALTKERDTLRREQNKKSDAAALLKEKDEIINQVMAEGEELSKKQAAQEATIRKLRAQIREFEEEKQRLNSKIQVEEAKVESIKRDKMATEKLLQETIERNQTELAAQKEFYTNALNAAKEAEALAEARVNSEAKVELENLLREAGEKENMLIKTIEELRLSLTRQEQEERPIWPSILYSCPMSVPLRH

SEQ ID NO: 58163 - protein, 173 aa, Zea Mays
MERLIKMHKKGYYNTIQLLEAIALHLDSVNGKSCIWEELVSCFLRLFSDNTADYEDCISCTNTHGGESLEASSKFSSVFFEQFTRESWKARCRWWARHHFSQNAYTSEAQSGDCKLLAAKAACAAHLFGPEFPYVKAVGVYIAKQEALDEISVLVRNKQNSVRLLQTLEKLTR

SEQ ID NO: 58164 - protein, 85 aa, Zea Mays
MKRRGKDCRFGVVTMCIGSRMGTAAVFELCSARLEVSTITRHCNPMVIGDRELPCYCILILETFIMTMYEILSLISTGMMRCVLL

SEQ ID NO: 58165 - protein, 901 aa, Zea Mays
MSSLAIVEKKPPPFPGGGCTGGVLFHLLDWHRRLACKRRLFSPRRLLPSSLRSSSPRRLPCPPPAASPPPPTLPHPADGAAPGVVARLMGLESWPATATAAPPRPQKQRKVEASRADGADSAVVLVLPTTRSRRPPASAPVPTARSHHGADLPARSPRRTRLVHAAAAKLLHPGARAGSRASARLALAYACSSPQHRKDDHAGTLFQGSGMTDDFLSRSESLPLERSALLQVQPPGLPAETDCDTAVVSRRHDHCSTNNVDAAISASTVVLPRMGFGDGNRSKRSSDVDAKHKGSGIRNDVTRTCARARSSGAAVQTGDERLLRKRATPTRPEVSGMPESGDLAGSTRLAGGARDLVSATRKFAHGGSGPRREFAGSISGQGSTTHRDLNSQNGLASTSRISSNGSGHKRGSGRKVGHDRAISNRDDRNAIAFTSRSSTKPVARASSQSNLLKSGSPNRLAPDTTRTRVLAPEKRYIEASPSFMSTSEKGEFSRLLKAKINELGMSDRIECTPDDSPSGKLTVPVLQELISALTNDMSTPISQCSNYSAASAPLSCNGNVDCINEPHCIFSNDQSPDFQKCFKGEQDVDSSAASLNNEPNQPSPTSVLEASFSNDTSLGSPVEKNEGKDLIMSIENKMEDLFNLESDIVDLAMSIDTRKTDAEETHRDNDKLSCLQNFLAHDFNILESRLCSIREAISNAELLVGSSLSRSTASGLPLHPFIVEMLENTMDMFSGGEYSGFTEDKKYQRTNFLFDCIIESLDSKFCNFGKCGYKAWLSLPLSLSEDLLKRQVLEDIGNWRESSGTALRQVSDKEVDQVTDRWDASQVEAFDISIAIENDILEALAACQLVDCPVKWRILGRKQAGIREQIRASSRSSTLSKRHSSIRLIYPGYETADRQLL

SEQ ID NO: 58166 - protein, 596 aa, Zea Mays
MLLVDSGDHNVVNDIFRRISMGESWTGKFPVKSKQGDRFSAVATNTPFYDEDGSLVGIICVSSDSRHLEQIFCKPPTSARPQSESSRTSCDGSCSNTSRRINLLNRSPFDPQIPLQSTFASRITNLATKVTNKVRSRVSTDDYGIEREGGSGESHCSDRGAKEEPTSSGTNTPRGNAPHGPFSTDENSPGKSTNPSSDELEGKVGLHKFLSSKAEALLNKKGISWPWKVRENDGPDERNHVILLHGDQENVMNHQKVSDSSIAPDSQGAEHNLPSKNEASGSWSSYNNNSTSSASSTGSTNSSALYKVDHEADCLDYEILWEDLVIGEQIGQGSCGTVYHALWYGSDVAVKVFSRQEYSEDVILSFRQEVSLMKKLRHPNILLFMGAVTSPQRLCIVTEFLPRGSLFRLLQRSATKLGVRRHVHMALDIARGMNYLHHSSPPIIHRDLKSSNLLVDKNWTVKVADFGLSRLKRETFLTTKTGKGTPQWMAPEVLRNEPSDEKSDVYSYGVILWELVTQKIPWENLNSMQVIGAVGFMNQRLDIPSEVDPQWRSIILNCWESDPQQRPSFQELLERLRELQRRYAIQQRNAKNSVEE

SEQ ID NO: 58167 - protein, 413 aa, Zea Mays
MMREGDACVTLLRSKLHGLVERNRALEEENKQLRHQVSRLKGQISSLEGQDTDKRMLWKKLLESSATSISYSKEKQFVQSNDDAKETTDLSSSLCHRRQQQFSRVALVRSRAPRVPNPPPNPTCTQPKTTVRKEGCMAPPPPPPPPLPSKLQRSAKAIQRVPEVVELYRSLVRPEGKNDAKSGSVGIPAATSSREMIGEIENRSAYVLAIKSDVENQGNFVNFLASEVQNAAYREIADVEEFVKWLDGELSYLVDERAVLKHFPNWPEKKADAMREAAFNYRDLKNLESEASSFHDDRRVATPMALKRMQALQDKIEQGIHNTERVRDSAGGRYKDLKIPWEWMLDSGVISQLAKEYMNRIASTLKSDPFANDEELLLQGVRFAFRVHQLAGGFDEGCRKAFQELKTYASKSE

SEQ ID NO: 58168 - protein, 247 aa, Zea Mays
MLSGERVLIASHDGTVKMWDVRTDTCVVTVGRCQSAVLCMEYDDSTGILAAAGRDITAHVWDIRSSKQMFKLQGHTKWIRSMRMTGETIITGSDDWTARVWSLNRGTCDAVLACHAGPVLCVEYSPSDKGIITGSADGLIRFWENEGGIKCVKNLTLHTASVLSISASDHWLAIGAADNSMSLFHRPQERFGGFSNAGSKVAGWQLYRTPQKTAAVVRCIASDLDRKRICSGGRNGLLRLWDATTSI

SEQ ID NO: 58169 - protein, 231 aa, Zea Mays
MVPIPDYLRMTLPYSHWAPMRKLEILPKLIMALRKLQQQNHSVDAPYLLHQLKIELMVLLSLWTLQRIMRMHPKNTKLHLKLSLIKLQRVMMCLPQDGKALTSEPHIGETHVNSASESIPNDAAPPTQSKMNGSTKKSLVNGVLDQPNANSGLESSGNDYPSYTNSSSAMPPASTELIGSAAAVIDVDSAENGPGTKPEQPAKGASRASKSKVVPRGQKRVLRSATRGRAT

SEQ ID NO: 58170 - protein, 372 aa, Zea Mays
MFHGPIRTLLHKQPSAELARGHLRTFLTDYLSDFNVGKKLQFPTYRDSLKERGTVQMLTVSREVALDVQSLATVLGSCLGNVTCQSLVLFEDLLVSTTLPPDDTLNLYTYAVLRLTPRALYSNASSWSYLRKGTSVSAGQTSSSSNGTTAGERPLLREKLSKGKDGFVAADFTATEARCAVPSTPILWFQQADECMHLCIYQHKSLTILLLVPASSVINGEEGITHVKKAMLENASQKIVTVEQKLTRGWGGENAYHVSGYRYLLVDPERRVSRASPPGKVTTLAKDSLLALNMLRQEVDLEKSRYKRGDPCHDKDFEVCIRTKNNAWVIAKISQGRELYMALEKGGETLLYASTAVEKFSNRYCEGAFSTD

SEQ ID NO: 58171 - protein, 109 aa, Zea Mays
MRGKKFTGSWEIPPIFSWLQQARTNDLQTSPLIFSSNYSEKHQALHWRTGHKNDCLQIISSAASNSVLPAVGIEMELRVSMEMHVAELSQVYIHCVCARLFGIVFFLFM

SEQ ID NO: 58172 - protein, 329 aa, Zea Mays
MKSQSTPLPQTPTPTAAPGGGGGGHEQPVAPGGRLAALLPRGTMARRRAALAALLVLLLLAACTAAAAAVTVSRKQRQRHHPGGASASAARSCDPFAAAGAWVEDGSYPLYDSARCPFIRDEFACARFGRPDTAYLRYRWRLDAPCAQPAFDGAALLRMWRGKTAMFVGDSLALNQYESLLCMLHAAAGPAARTTLSPPSGKIDPSSTVRFEDYNVTVVYYLTHYLVDLVTEPHTGRRVLKLDAIDQARDWLAADVLVFDSWHWWPRTGATQPWDYIQVGDTVVKDMDRTQAFAKALHTWARWVDANLVQTDTKVFFQGISPSHYSPSV

SEQ ID NO: 58173 - protein, 894 aa, Zea Mays
MSRTVEDMEFYNNADKHPRVFGMTASPIIGKGGSNKLTYTKCINSLEELLNAKVCSVDNVELESVIASPKVEVYFYGPVGHSNLTTAYIKELGGYKFQSECMLRESVCNFNESLKKLKSLWRLHENLIFCLQEVGLFGALQAARTFLSSSSVSLDGKGADINDYANKAMSLLSRDILEGPDADSFDLETIEEPFFSKKFAVLINVLSRYRLEENMKCIVFVKRIIVARVVVQILQNLKCLDFWRCEFLVGCHSGLRNMSRDKMSSIIEKFSSGEVNLLVATSVGEEGLDIQTCCLVVRFDLPETVNSFIQSRGRARMSKSKYVFLLERGNHSQEKLLDDYITGEIIMDKEINLRTSNDMFNCLEENIYRVNDTGASISTACSVSLLHRYCDNLPRDIFFVPSPSFFFVDDVDGIVCKLILPPNAAFRQVNGQPCPSKDEAKRDACLKACIKLHELGALTDFLLPGQGSRKIKVSTTNNSESNKDDDESFREELYEMLIPAVLRPSRCKLDSSFKLHFYYIEFIPIPADRRYQMFGLFVINRLPEESEKLDVELHLARARIVKAGIKYLGKIEFNKEEMILAHNFQEMFLKVLLDRSEFTPSYILLGNDGALDMDSTFYLLLPIKQKFYGDNMIDWPAVKRCLSSPAFQDPMGLSLHDSYLPNESLKLLGGTYNKADVIGSLVYTPHTDLFFFVDAILDGTNAKSELNGATYAEHFKQRLHIKLSHPEQPLLKAKQLFCLRNLLHNRQLESTESEARELMEHFVELPPELCSLKIIGFSKDMGSSLSLLPSLMYRLENLLVAIELKDVMSSYFPEASQISASGILESLTTERCLERISLERLEVLGDAFLKYVVGRHNFISYEGLDEGQLTRRRSDIVSNSNLYELSIRRNLQVS

SEQ ID NO: 58174 - protein, 59 aa, Zea Mays
MVVGFRRTISFPAPRSPAPPAGPSAANNKSVAYRARSASLPCRFHPLVLQLDDDVADLR

SEQ ID NO: 58175 - protein, 132 aa, Zea Mays
MNAIDLILKKLSLDVHYPANLSSPFPYAGLTFPSYPGVPVGYMIPQVPYNNAVNYGPNNGYGGRYQNNKPSTPMRSPASNEAQESLTIGIADEHIGAVVGRAGRNITEIIQASGARIKISDRGDFISGTSDR

SEQ ID NO: 58176 - protein, 535 aa, Zea Mays
MDDGDSVVRSVEKAGAGPGDDGSTTPLPETVQIGNSPSYRIDRKLGKGGFGQVYVGRRISSPSVSDRTPGANALEVAIKFEHRTSKGCNYGAPYEWQVYNTLSGIHGVPRVHYKGKLGEYYIMIMDMLGPSLWDVWNNNSHSMPVEMVACIAIEAISILEKMHSKGYVHGDVKPENFLLGPPGTLQEKKLFLVDLGLATRWKDTGTGEHVEYDQRPDVFRGTVRYASVHAHLGRTGSRRDDLESLAYTLVFLLRGRLPWQGYQGENKGFLVCKKKMATSPESLCCFCPQPFRQFIEYVVNLKFDEEPNYAKYISLFDGIVGPNPDIRPINTDGAQKLVFQVGQKRGRLTMEEDDDEQPKKKIRMGMPATQWISVYNARRPMKQRYHYNVADCRLAQHISKGNEDGLFISSVASCSNLWALIMDAGTGFTSQVYELSPYFLHKEWIMEQWEKNFYITALAGANNGSSLVVMSRGTQYAQQSYKAVVGQWSCPGILAFRRRLWSLTSCIQVRVSIDDGIMDFASRLLQLHGIRQRLS

SEQ ID NO: 58177 - protein, 1049 aa, Zea Mays
MECNRDEAARAKVLAERKMLDKDFVGAKKLIIKVQQLLKEVEDIDIPKMLTVCDVHCAAGAKVNTEIDWYGILQVPVNADDALIKKQYRKLALLLHPDKNKFGGAEAAFKLVGEANITLTDPSKRYVHDMKRNTFRSVTARPNRQPPKRPAPARSSSTPVNLYNMHQQHQRQASNPTGTQTTFWTICPACGMRYQYYLSILKKALRCQNCLKPFIAHDLKDQAIPSGANQRSAGVWKNAGTPQNSAGPQSNVTGQKGWSATSGVHVNTGSHHANVNTKRKTDGNAGGLKNKMKSAQATRKPSKASSTAGLKRGRRAVFESSESSISETDSDGEVEIPKHGPAENSAGPGQQTRRSSRQKQEVKYNEDSDDDNDDVEDDDNTVEDDFVDSPALKRLRKGGMFHGDHSTKTAKLNEDTAGHNSVNSWGNIKDKKNGGMPCEEKTSNGVEQMKRETMHVGENSDGKEELFHSVSNNGLGLNDDDASDDNKFTFPDPEFFDFDKLRDASQFRANQVWAVYDDQGCMPRFYARITRVKMVPKFMLQFVWLEFNPANKAEEAWSYRGLPVACGHFTHGLSETTSETGMFSRIISLERSKTKNFYEIYPRKGEVWALFKGWDIGWSSDAGIHKKMNHRYEVVQVLSDLTTSTSIIVMPLVKLKGYVSLFVQSGEAAPYVIPQVDTLRFSHCVPHYLTSGTEKEGIPEGSLELDPAALPSNLEEAFPSANPECSSARSQESDSKNAGLSSGNRKGSMNVGQGQHKIAANGRVCTKTTKVENIKHNIDLSEVTDVVDDSICQTEYVCADSEFYDFSVRRSLQRFSPGQIWALYSDIDKFPNYYAFIQKVDLKNDKVQVRWLDVCPQGEVEKRLSQDRTIGIGTFRVGYIHDMMTYTGTDAFSHLVEARPTGRKGEYEILPRLGEIWAVYKNWSAGWTAQDFEKCEYEILPRHGEIWAVYKNWEAVWTAQDFEKCEYELVEILGHTDSSIQVQLLRKVDGYKMVFMSYRAEGSVMTIRNDEYPKFSHQIPCFRLTHEKGGKLRGYLELDPLSVPEEFLD

SEQ ID NO: 58178 - protein, 272 aa, Zea Mays
MGERLANEVLSVVEQRRGVKKISFVAHSLGGLVARYAIGRLYEPNSRRKSSGGESRDDVVHLNGHIAGLEPMNFITFASPHLGSSGNKQLPFLCGLPFLERRASEAAHLIVGRTGKHLFLTDNDDGRRPLLLRMVDDSDDLQFRSALRSFKRRVAYANANFDHMVGWRTSSIRRQHELPKHRLLVRDEKYPHIVYVEKEVTDNNETKAHADHYDPEEEMIRGLTQVPWERVDVSFQKSTQRLVAHNTIQVKSYWLNSDGADVINHMMDNFIV

SEQ ID NO: 58179 - protein, 338 aa, Zea Mays
MQYARWKEECKEMDSHVGSGKIITAPIITEDGFPIKDPLVLLEATSDTQGTSIATGNSGNGIENRVLDKQIIDWKLTLHQIGLDVLRTDRTMVFYENKDNISKLWDILAVYAWIDKEVGYCQGMSDLCSPMIVLLHNEADAFWCFERLMRRLRGNFRCTQQSVGVENQLQHLASIIQVLDPKLHGHLERLGGGDYLFAFRMFMVLFRRELSFGDSLYLWEMMWALEYDPGICSTYEEDNTGAVVHKIEGKVKSIRQFGKYERENMKKRANDGDGPVPISVFLVASVLKENSTKLLQEARGIDDIIRILNNVNGNLDAKRACVVALKLHRKYHKKEKKS

SEQ ID NO: 58180 - protein, 118 aa, Zea Mays
MHDLTGSIAEKLGVQAPPVRIDSQAKYGALARGDGAIYLRFPHKGYREKIWDHAAGSIVVTEAGGIVTDAAGNDLDFSKGRFLDLDTGIIATNKELMPSLLKAVQEAIKETNQAASLL

SEQ ID NO: 58181 - protein, 206 aa, Zea Mays
MIVRTYRRRSRSISEGGGGVSSSQEAFDFDADVDVLGSSASQPLPPSQESSSMWDFDEDPPPSPPRPGKEGRRSGRGGARRGGGLELAEAPAMAPTVTLMEAEEYGEMMESVDDVTFALDGLRPAAQKRTRRASLLALLGICDSAERRRVLRSQGLVQQIIDAILVLDIDDPPCAIAAGALLFVLASDEAAYEGAIWCREGASALQ

SEQ ID NO: 58182 - protein, 143 aa, Zea Mays
MEGPTPGELVAAAGVDGSAGGVLAVVPVHAPGRARQHGAVRRRGGELAAVGVAHAHADGEWALPPRGLQPRRLLPQRAGGGRRQQPRPRRRAPPRRRPPGLLRHPGRLQPRLGKLLLLRRAWQERALPVIHDPAGDHACMAMA

SEQ ID NO: 58183 - protein, 280 aa, Zea Mays
MLSKSNHVAIVTVDGRPGPGAYGITAVIIGAIGYLFIRWKGWKLSDMMFVTKRGLSDACNVVGKQVDQVSESVNVARRHLAGRIDRVDCSLDECHEITEATREQVTIIHGDLSAFQKEMETVHLVVRSLEAKLGRLAYTQDRTTRGIYDLCEFTKRLDQSPKAETHQVTSSTPRPAIESSERIARAGSLPPALEPESPRIEAPKVVRSSTIMSASGLSLLAGTTTPPKRDQPGAFSRTSSMKEGSSELPSGVRSSAEPSPRRSGGSTLFGGLGFLRSYTS

SEQ ID NO: 58184 - protein, 332 aa, Zea Mays
MELKRVLVAPTAARRAPTVPPTTSGATALPPAGLGLLPPLPEAIPWPSSGVQTHVAAVEQAVVKDATKLEAPVVVVTGASRGIGKATALALGKAGCKVLVNYARSSKEAEEVSKEIEASGGEAITFGGDVSKEADVESMMKAALDKWGTIDVLVNNAGITRDTLLMRMKKSQWQDVIDLNLTGVCLCTQAATKVMMKKKKGKIINIASVVGLTGNVGQANYSAAKAGVIGFTKTVAREYASRNINVNAIAPGFIASDMTAELGEELEKKILSTIPLGRYGQPEEVAGLVEFLALSPAASYMTGQATLVHFLVHGRFWATELGFSFSFNTHRG

SEQ ID NO: 58185 - protein, 234 aa, Zea Mays
MGISARWLKSLVGLRKVEQQPRKESADVGRMKSDVADQFHFQNQRSQDDSSIAAQEEIPEVPYGNDPPEDDSNAPSCLEPTYSSADVPLFQTEEELKEIWAATIIQTTFRAFLARRAHRALKGLVRLQALVRGHIVRKQADTTLRCMQALVRVQARVRARRVRMALENQTDQQNTSPEHTTVARVREIEDGWCDSIGSVEDIQAKLLKRQEAAAKRERAMAYALAHQVQKLVDT

SEQ ID NO: 58186 - protein, 72 aa, Zea Mays
MISTPGSTTRSSHSSHRRVKAPPVHAIPSSTEMNEYFAAEQRRQQQAFIDKYNFDPVNDCPLPGRFEWVKLD

SEQ ID NO: 58187 - protein, 551 aa, Zea Mays
MRRRWDSCFSGSDVRVGGRVPPEEPEPEVFSFAEPLPSWPTGGGFARGRIRIGGGELELAAATAFQKICTLSSRRRGGGGSATFYRPVGVPEGFSLLGYYCQPNCRPLHGHVLVARAGERPSGASPQPPPPPLCKPLDYTLIWEFQASGDTGYGYGRSDAYFWIPVPPERYRALGCLVTTEPRRPPLEEVVCVREDLTDECEPHGSLLCLEQPRPSSFFTVRGVRPVRRGIREKGVCVGTFCCAADGLPPREHGMACLGNVELDLSAMPTLEQAHAVIRHYGPTLFFHPKEIDGEGSNLPGGGCNDGEFWIDVPSGERGRAVCRGSIDSAELYAHVKPAMGGTCTDVAMWVFCPFNGPARLKLGPISLPLGKTGRHVGDWEHFTFRVSNLTGELMGVYYSQHSGGHWVDASALEYIDGNRPVVYSSRNGHASYAYPGVYLQGSAALGVGIRNDAARSSLFVDSSARYRIVAAGYLGEGAVVEPQWLQFMREWGPTVVYKWRKRMEWVIGRLPPWLRCRAESMLNKMPNELSREEGPTGPKEKNNWEGDERW

SEQ ID NO: 58188 - protein, 751 aa, Zea Mays
MIPSPFFPVKPPHQKGSSADAPRCLVLHNQRPQPVYTLEPPNTAHNTRSRRSASLVATARLSPRPTEEPHAPTAAGGGGARRSMRAGCHRGQRKRRRTCAARTATSRSPLAPTPKGEDSRPSPRPFHHPPLNKRRFLRAVAMGCGQSKTEEEYAVQHCRARSELLALAIRQRYMLADAHHAYAESLRAVGALLHDFLRGVQSLPPPPPEPALRLPLQRKGDGLPAASPPPPAIASSSSAAKQVRIAPNDGHIQFSDDDSDSDDGHIKFHSDEEPDPARRRPDVVHSAGAPGPPPPQMGPPYSSGYAPPPYGPGYGYGYANGPGPGPGPDYGGIGMSSGGGGGYGQSYGGMGGGGSGGGAGYNDQSYGGMGSGGGAGGYDQGYGGMGGYGQSFFNINYARSQPPPPSISHEQRLQATNARVHYYSGNDELQPPPRGYGGGYSYPPQSSSSYNQYAYGGYYGGGSAPAPPADIPSSSREPAAAPPPPSPPRVSTWDFLNPFETYDSYYEQPTATAAPYSPSRSSKDVREEEGIPDLEDEDMEVVKEAYGDEKHPMKGYMGNGKATKEDGRSSTRDELPRKSKSSEASSSGSSLEHDVHVVEKSVVGEQVQHSEPQQHVAGLPPTGSDKIYIDDTEVVVEIRTQFERASQSASEVSKMLEVGKMPYYQKSSGFKVSAMMVCGIPTMEEEFLRFEEDKAMGSGNLSSTLQKLYMWEKKLLEEVKTEERMRVLYDRKREELKMLDEKGCKHYFRKD

SEQ ID NO: 58189 - protein, 832 aa, Zea Mays
MGTGEGSPPARRGISGRRRRWPDEDDDEYVLEEEEEEDYVEELSASSAGEEGVDSDAEYQEAEEEDEIEKPRPKRPAKGITSSAGERGLDSDAEYQEAEEDEMETPRPKRPAKDSTSSAGEDGLDSDAEYQEAEEEDDDEIETPRPKRRAKGSNRVRKGKVDLAAARSRRRKYEEDEDYEEEVDEDDEVEEEYHDDLEEVEEEEEVAPQRPKSIVKCGARGRNVKLSLAAKRSHQRKQEDDEDMDFDPELDDEEVEIDEDIDFDPDVDGDEEDEYQDEEEEELVPARARKVTVKNPVKRKSISKRRTPKKKKKNRGSKVSRRKGASAKVKKSAPVRRRRKRSVIDDYEDEDVDDDDDDDFIVDDEVIVNRHPKKKARIGSGRETVVDPQVSIEEETWPDLESDSSDFEFATSDEEPNNVETPVAEQTTVRKGRKKRISESESSSDSEFVVSGKELEELREPEPPKAAPNLHVSLRRICITRHGEGKGKEKQEQEEAGKPICGICLSEELRATVQGVLNCCSHYFCFACIMEWSRVESRCPLCKQRFTTITKSSKVDLGLGVRKAVVKVEERDQVYQPTEEEIRRWLDPYENVVCIECNQGGDDNLMLLCDICDSSAHTYCVGLGREVPEGNWYCGGCRLGDEGPSYTGIQRTVAYERQNYRSHVGSSVSFGMAVPGGTFERPSSINPRHSFQGIDLNLSPREFPGESHPAESQVSTDSVSTPTGRAGRTISGRRELQRYIQSLFRPSLPSRPDTYHNIAQNSGGVSRNEPNRWNFPSSSEANTSQNLPDGIQNHHSDLPFVQAHSNFAPFMSPDGDDFQQIEGVKSNLRNMQ

SEQ ID NO: 58190 - protein, 1079 aa, Zea Mays
MAGNEWINGYLEAILDSRTSSGGGGGGGGGDPRSPVAGASPTKGASPRGPHMNFNPSHYFVEEVVKGVDESDLHRTWIKVVATRNARERSTRLENMCWRIWHLARKKKQLELEGIQRISARRKEQEQVRREATEDLADDLSEGEKGDTLAELVPVEAAKKKFQRNFSDLTVWSDDNNEKKLYIVLISVHGLVRGENMELGRDSDTGGQVKYVVELARAMSMMPGVYRVDLFTRQVSSPDVDWSYGEPTEMLCSGSNDGEGMGESAGAYIVRIPCGPRDKYLKKEALWPYLQEFVDGALAHILNMSKALGEQVGNGRPVLPYVIHGHYADAGDVAALLSGALNVPMVLTGHSLGRNKLEQLLKQGRMSKEEIDSTYKIMRRIEGEELALDASELVITSTRQEIDEQWGLYDGFDVKLEKVLRARARRGVSCHGRFMPRMVVIPPGMDFSNVVVHEDIDGDGDSKDDIVGLEGASPKSMPPIWAEVMRFLTNPHKPMILALSRPDPKKNITTLVKAFGECPPLRELANLTLIMGNRDDIDDMSAGNASVLTTVLKLIDKYDLYGSVAFPKHHNQADVPEIYRLAAKMKGVFINPALVEPFGLTLIEAAAHGLPIVATKNGGPVDITTALSNGLLVDPHDQNAIAQALLKLVADKNLWQECRRNGLRNIHLYSWPEHCRTYLTRVAGCRLRNPRWLKDTPADAGADEEEFLEDSMDAQDLSLRLSIDGEKSSLNTNDPLSSDPQDQVQKIMNKINQSSALPPSMSSVADGAKNATEATGSTLNKYPLLRRRRRLFVIAVDCYQDDGRASKKMLQVIQEVFRAVRSDSQMSKISGFALSTAMPLSETLQLLQLGKIPATDFDTLICGSGSEVYYPGTVNCVDAEGKLRPDQDYLMHISHRWSHDGAKQTIAKLMATQDGSGDTVELDPASSNAHCFTFLIKDPKKVKTVDEMRERLRMRGLRCHIMYCRNSTRLQVVPLLASRSQALRYLFVRWGLYVGNMYLITGEHGDTDHEEMLSGLHKTVIVRGVTEKGSEGLLRSPGSYKKDDVVPSETPLAAYTTGEMKADEIMRALKQVSKTSSGM

SEQ ID NO: 58191 - protein, 391 aa, Zea Mays
MAAPPRATAVLAWGSGEDGQLGMGGNEEKDWAHCVEALGSYAVTAVVAGSRNSLAICEDGRLFTWGWNQRGTLGHPPKTKTESSPGPVHALAGLKIVQAAIGGWHCLAVDDNGHAYAWGGNEYGQCGEEPERKEDGTRALRRDIPTPQRCAPKLKVRQVAAGGTHSVVLTQEGHVWTWGQPWPPGDIKQISTPVRVQGLEKVRVIAVGAFHNLALTEDGILWAWGNNEYGQLGTGDTQPRSHPIRVEGLSDLSLVDIAAGGWHSTALTIQGEVYAWGRGEHGRLGFGDDKSSRMVPLKVELLAGEDIVQVSCGGTHSVALTRDGRMFSYGRGDHGRLGYGRKLTTGQPMGVDIDLPPPKTRSSRDGQWQAKYVACGGRHTLAIVVWAETTD

SEQ ID NO: 58192 - protein, 402 aa, Zea Mays
MSSWRAPHENARKPIRIYLNYDAVGHSPDRDCKNVGDIVKLGEPPVSSAPGTPICDPHGDPPLVGDCWYNCTLEDIAGKDKRQRLRKALGQTVEWFRKALAVEPVKGNLRLSGYSACGQDGGVQLPHAYVEDGVANADLVLLVTTRPTTGNTLAWAVACERDQWGRAIAGHVNVAPRHLTAEAETLLSATLIHEVMHVLGFDPHAFTHFRDERKRRRGQVTAQSLDKKLGRMVTRVVLPRVVMHARHHYGAFSQNFTGLELEDGGGRGTSGSHWEKRLLMNEIMTGSVDTRSVVSRMTLALLEDSGWYQANYSMAEHLDWGQNQGTEFVISPCNSWKGAYHCNTTQLSGCTYNREAEGYCPIVNYSGDLPKWAQYFPQANKGMPKCSINYYVYDIKQDAELY

SEQ ID NO: 58193 - protein, 175 aa, Zea Mays
MLLLRFYSDGSGRSLPRSCTSHMDKTSCFFPQNVLPTIRTPTFVLNTAYDVWQLQQSVAPRTADPQGLWSKCRTNHAFCNSNQLQFLQGFRNQMLDAVRGFSASRQNGLFINSCFAHCQSERQDTWYANNSPRLGNKKIADAVGDWFFERGNAKYTDCPYPCDGTCHHLVFRGDH

SEQ ID NO: 58194 - protein, 58 aa, Zea Mays
MENNRQQQQAPPPPGLEQEQGGRKGRRREKTTSRGDKGFIEGCIAALCCCWICEMCCD

SEQ ID NO: 58195 - protein, 59 aa, Zea Mays
MALASATSRPLLGRPRRHRAAPPRRFLILPRLLDPLPPRRRRRRQQSGRLSPRPHASSL

SEQ ID NO: 58196 - protein, 212 aa, Zea Mays
MKAHAATSSIGSATVIIAMLEKTGTLKIASVGDCGLKVIRKGQVMFSISPQEHYFDCPYQISSEAEGQTYKDALVCSVNLMEGDIIVSGSDGLFDNIFDQEIVSIISESPSVDEAAKALAELARKHSVDVRFDSPYSMEARSRGFDVPWWKKLLGGKLIGGKMDDITVVVAQVKTVVVPEDEVQGGDTEEQKGNEQGAAAVVAYKMNDEEVA

SEQ ID NO: 58197 - protein, 272 aa, Zea Mays
MAAIRWDDEPDRIESILTSTLLEGSVVSKIASAASADPLASTTWEEIAPKHTMITPSQCKSLWKQFKAETEFTITQAVSTQQAHRRGNSKLPPPWAIVAIAILGFNEIMVLIRNPIYLFLLFVGYLMVKALAMQLDVSREFQNGVVPGIISVSVKLLPAIQNLVNKVAAEQQAEHQQQHPHPHPHTQAPGPPQPQMQPPPLLLSPRSPMSELRRLHMPRSPRSPRKVASPAPSSSSSSSAVSSPRHVGEDQKPRPGAVGAPENEATVADSIV

SEQ ID NO: 58198 - protein, 192 aa, Zea Mays
MRRDAVAAAPTAAGASPPIPATVLPTDAVVIDVEGEPLPAEAPGLGCRICHLGPEDDESAVPGSEVMLLGCGCKDELGAAHQQCAEAWFRIKGDRRCEICGSDAKNITGLEVKKFMEQWHGRRVAHAQTTEERESHCWRQQPFCNFLNSNWKVQGRWLLGRRTIPEVWGTQFDGLASQPFGIQKSLLLIILL

SEQ ID NO: 58199 - protein, 606 aa, Zea Mays
MEVDDDVEEDDIDFNPFLREGSPSETSSSLTSEAECEEHSSENQPSNHTYQQNTVVNENTSDSALPQNRLSSQDAVNEMFPEETSTQVNIENDGHLNGLEKDVLASEAACSPTVQDPHHLSLEISEEDAICKRTRARYSLANYSLEELETFLQESDDDSGLQNVDEEEEYRKFLAAVLSGVGNDTQTFQGDENQDEDDNDADFELEIEEALESDGDENVENYHNTNPRKEKDVRRPQTRQRRPLTGMSGAGSDHQESNKTHLRPIVPYIPSALVTPAHAFGWQYANQNAFFPSSLVSLTRPPLACGFTYQQLGQLHVLIYEHVQLLIQTFSLCVLDSSKQDVANNVKKMIVELVGARDQALARSSPQRHIFFETQHLSSSFVSSDNLERQWIPLIKSPIISVLDVAPLELVLDYLSDVATAVVKYRKSHVDGTADKTRRKEPLFPSAAINSCKQVNNVSQDRSNGVPTASPPSGQLQQKKSLAATLLENIKKDTIALVPADIARLAQRFFSLFNFALFPHKSPPSPMANRVLFTDAEDRLLALGILEYNNDWAAIQKRFLPCKSKHQIFVRQKNRSSSKAPDNPVKGSKFNIMVKVSIELHSTVTG

SEQ ID NO: 58200 - protein, 431 aa, Zea Mays
MNISDYLKETVRDTFRFVSVSPKGVKFLSTADKIDGAPLVFQLTAEMIELEEHGSSHHKEGGLNLVPTLESEKFSEDESKLYQRLLNVRMKIAQDIGTAPYAVCGDQTIRNFAKMRPSTGARLANIDGVNQHFISRFSNIFIQNIAELSKELNLPLDNSPFPPPPPTNPAAENIAGIPKPVQNNLPGILGDAKLTAWELWHKQEYSFLKIAYFRRAVPIKEQTVIAYILDAAREGCEMDWSRFCREVGLTPDIATAIRLAISKVGSREKMKPIKEELPENVTYDMIKTFLTIEGCGLSEQVFGNGTADGVSSRIAESPISSCHASEAGGNGVPAAAEASDANPSAKRGQTVCAEEPATKLQRTYEHGAELTGTATATVDSVLDLVASCNGVSLEDVAKHFKGSKRESVLEILEGLESEFTIYKKNGNYMVL

SEQ ID NO: 58201 - protein, 114 aa, Zea Mays
MVWFQCEDCGENLKKPKLAGHFRSCSAYKLSCIDCGELFSHDTVQGHTQCISEAEKYGPKGQTKPSNGAQGKADKPKPNADVDINVGLSTRPPWFCRSLFRYLGTVYLSWFLKR

SEQ ID NO: 58202 - protein, 923 aa, Zea Mays
MLQMLGFRGGSPSTGDASPAISGDGGAAARPLRLVYCDDKGKFVMDPEAVAALQLVKGPVGVVSVCGRARQGKSFILNQLLGRSGGFQVASTHRPCTKGLWMWSAPLKRTGLDGTEYSLVLLDTEGIDAYDQTGTYSIQIFSLAVLLSSMFIYNQDFYLDLAEDNRKITPRDYLELALRPVQGGGRDISAKNAIRDSIRALFPDRECFTLVRPVNNEKDLQRLDQLPIALETYLHFKQFDGIYKLCLSLHDLSNFRPEFRSGLDAFTKFVLDRTRPKQLGATTMTGPILAGLTQSFLDAINNGAVPTISSSWQSVEEAECQRAFDSAVGTYNSSFDHKKHIEEDSLREAHEDAMRKAISAFNVSAVGAGRQLEHIDAERNALRLKCNSSDDKLALLRKQLEASESHRAEYVRRYEEVLNDKQKISKDYSIRITELQAKSSKLEQRCLSLSSSLETAKRESNDWKSKYDHGILQQKADESKLKSQIASLESRVSISEGRLSATREQADSAQEEASEWKRKYEVAVSEAKTALQRAAVAQERTNKKVQEREDALRVELANQLSEKEEEIARLHAKRSQMEIHATSLISRLEATEAKSKSHESDSLALREEIRLLTDNLESIRSEALSREKEVGILEQEKNHLEEKYLSQCKKFDETDIRCKEAEREAKRATELADVARVEASAAQKDKGEAQRLAMERFALIERMERQVEALERDKAKLVEEIERLHQSEKDAVSKVALLERNVGEREKEIDEMLKQNNQQRSSTVQVLESLLATEREARAEANKRAEELSLMLQATQGKLDMLQQETTLDSKLKTSARRLRGDATESVHDMDIDGDNGRRRKRSKSTTSPFKNNHTEDGGSVFIGEDTYNGSQQGTESEDYTKFTVLKLKQELTKHGFGAQLLQLKNPNKKDIVALYEKHVIGK

SEQ ID NO: 58203 - protein, 596 aa, Zea Mays
MYPPRPAARLPPSSSMSATVFFLPANPSSTASPANTLRQLTPASTSGKLHFAAFPLRLPRHACARTYRSAAFGRGSPVAGRREKDYYATLNIRRDSTLQEIKSAYRILARKYHPDMNKSPEAEEKFKEISAAYEVLSDQDKRSLYDRFGEEGLSGDYRNGDIGTHGIDPYELFNAFFGSSDKLFGDSMGSGGFHYSAEAKDNRALNISYNLLLSFEESILGGKREINVFRHETCGTCHGTGAKCSNDITECTRCRGQGRLMKTQRTPFGIVSQISSCLNCEGSGKVITEHCTECYGSGRVQIERIIKVDIPGGIDDGSTIRISGGGNVDKQRGASGDLYIFVRVNKKQGIHRDGLNLYSDASVDYTDVILGTTVKVETIEGLKDLHIPPGTQPGENLKFSQLGVPDIKKPNVRGDHYFMIKVKIPKSISGQERLLVEELAALKKAQNISVPEPTKIENFRERNHHPSAKRRSFWGRVWNFFRDDKGDKRFASISVQPIIPGWNSCRGTDTAVPLLLKGFLMTAIFLFVIRSKLSFVLGKESGFACSVWYPDAAVQKTPAAIPSFDESHMKDMKKHGRRLMYTVCILSAQSFVTIPA

SEQ ID NO: 58204 - protein, 354 aa, Zea Mays
MPLLFLSVTTTVSELSSKRDDEPDNNTEHSETNELASTSGTSDAADGTKEIVQENWLVLLFRELEKQGITLPERFTEDELRRFYVAANGDFSSLLSSVKKTIRWRETFHILTLQELDKWSHLVFWHGFDTMLRPCLVIRLGLACSSIPPCDRPRFGQAVVSQIDHGVVNLTNKEDSRITVLLDCHGISPFRFPMQMMRSFVTVAQENYPNRLGVLFVVRLPPVVRVIAQTFLQVLKPSTKQKLRFEGDSYKKTLAEFLQAVPAFLGGKCSCPRCEKPRNSSVVQAGEGSKNQARLVSVDGGSPVVDFDFDEEEIPSPYSCENAIRAAIICLLMVCIFIAFLAGMNDPASVPPSA

SEQ ID NO: 58205 - protein, 54 aa, Zea Mays
MLTNRSRHIRGPRATPSYEASMAAISCFSLRSRISLSDLSSLPWRWMPVLVTRA

SEQ ID NO: 58206 - protein, 383 aa, Zea Mays
MVTRGGGSQSYGFPIYCAAWLPLAHIIKPDPPAAEADADDPSSSTPSLPMAVLGGGGGEGRSGVPNKLVVAALATGEEAAPALSPDTVVEVNSEEEVPYRMAVHPRGDGVFCAFPNGCRLYRWESQEGEGPQRLALEPDQDALAELKDVGLQLAVSFSGEGSILAIGGEDGYLRVFNWPTMGSVLTEIDTKTSIKDLTIRSSGPCRVWDLQSSEVVASLPRETGEIFGFCRFSNKADNSHVLFITVMEGDYGKIVSWNTTSWTRTGSKKITREAISAFAVSPNGALLAIGTIEGSIIVVGSKDMRTLVTVKKAHLGIVTTLTFSQDSRTLLSTSFDSSARVTSVGSPKSNGTSIWPMLLVVILAILVYYCTQHKEDILAMLQR

SEQ ID NO: 58207 - protein, 307 aa, Zea Mays
MIVVFAGGVDTSATETKGTVLIHSAEQLENYAKTEEAKVEELIKAVADSGAKVIVSGAAVGDMALHFCERYKLMVLKISSKFELRRFCRTTGAVAILKLSQPNADELGYADSVSVEEIGGTRVTVVKNEDGGNSVATVVLRGSTDSILDDLERAVDDGVNTYRSMCRDSRIIPGAAATEVELAKRLKEFSLKETGLDQYAIAKFAESFEMVPRTLAENAGLSAMEIISSLYAEHASGNAKVGIDLEEGACKDISTLKIWDLYVTKFFALKYSADAACTVLRVDQIIMAKPAGGPRRDAQPGGGMDED

SEQ ID NO: 58208 - protein, 458 aa, Zea Mays
MTTAPSVLLWHHRKMLMESNSTNGSQQSMSCALDEDHQQLFRDQNEPCIGADRPCSSNLSVICSSQKFAEDRISINIPQDKAIDATNDKPLDKDEKEKHPISNLVQELNEHPIGRVTPTAPRTTSHRNRFTSISRAFGDGSKLLPEDHMLTGFASGSKKPRSQVSYSGSPRSEELGLKNKDHFRKIQSHVSVKTSDAKKLPDSSRSGHSSPELLTCIANVLVTVGDRGWREYDTQITMDSDVHSEQRICVKLAEGTKYAHKVCQVLQPGATNRYTHAMMWKGGAEWCLEFPDRSQWLIFKQMHDECYSHNIRAASVRNIPTPGVHLVGIHDDNDMVSFVRSEDYLVHIGTDVEIALDEARVLYNMDSDDEEWISSRQKFLVRDNNATLELAEDLFERVMDKLEKFAYSHDSNELSIVQMKELETDDLPLDIIEVIHAYWQAKRQKKGMPLIRHFQLGL

SEQ ID NO: 58209 - protein, 57 aa, Zea Mays
MGSPKRVNWKQETSGRVEFVDRSSPFARAALAGVLHHYHNQTTGMNSTNCFVFISIA

SEQ ID NO: 58210 - protein, 148 aa, Zea Mays
MKPVSVAEHNNHQPRLHSPTPASATKISIPISSSEAALFGKGRYKVWALAAIALLALWSMFAASVTLRLSSVDLATTFGDASDPLIDELDPLEMEQREKLVRRMWDVYTRTDNHLYLRLLACQSIGLRLSNRRIRIRYSSGGGFHFSV

SEQ ID NO: 58211 - protein, 1275 aa, Zea Mays
MPPKKRAAAAASSKKPQPSQPSQPAKFGILHFFERQTQASQNAKRQKPDPPAPPPPPPPPPEKEPSEVSPEVTKTLAPKRVRFSPGMLIKQSQDDGVAEVVTWKISPVNHRLGTTKSKQFLGMAPHPYSSEKNSSLDAMKKWHSSPLGLSRCTTLGSNSGVLGSAIVGCDGVGDTQSPFRTPPSLSYGCNEQVSSGVTSEGGAEPSGAGQHKKALLDLLDQVEDAIMEEELPADPGNKGGQTTNEDITNNSRSPVADTDLTIPSKKTIHVPPFNSFLVLEVSEKHKADDSSCDRYPVKVLRLLNEHSGTECAVHLCDEWFDSIVGPGDTVNVIGEFSNHGKCIVDHDNNLVIVHPEQLISGTRAASSFQCLRRSVLDERLKSNEYSTSALTGTLLHQVFQAGLLNDAPSWQFLEQQAKEVLLKNIETLYACGVNESNMYSTLIEAIPKMLNWFKCFLKGSKCSDVDFGHNEVRKTVGVTEVMDIEEMAWAPRYGMKGVIDASVRSRVESHNGGSYDRIMPLEFKTGKATSGQAAMEHSAQVMLYTLLMTERYLNEDIDLGLLYYLHTDQTLGIKVKRTDLIGLIMRRNELATEILKASMSQSFPPMLQSPSTCNRCRHLISCTIYHKAHGGSGTTSGLGDLFDNLVNHLTVTHHNFLKHWDRLIDLEARASQVKKNILQPHNSNYGSGSSAVPYFVLDIKNGHSIDSSGKSKRYIYNFVQQKMQPETADQLDAQFDSIDFSLKVGDFVVLSTQSGRIAVANGCIREIISHSHITVSLPRRLRIPDSNSLSEQEDLTREIWRIDKDEFSSSFGIMRLNIVQLFAQNPQNSHLRKLIVDLEAPRFDSGGLFSQDPALSYIRSLPNLNNDQQRSLHKILGAKDYALILGMPGTGKTYTMVHAVKSLLIRGESILLTSYTNSAIDTLLMKLKTEGVDFIRIGRPEAVHPDVRAHCLSTTEAQSVDAIKARMEQVQVVGVTCLGMYHPLLAHKKFDTCIMDEAGQITLPVSLGPLMLATKFVLVGDHYQLPPLVQSSEARENGMGISLFWRLSEAHSQAISALRCQYRMSSGIMELSNSLIYGNRLCCGSLEIANAKLKFSGREPMQLKLKEILNPDRAVIFANTDQIPALEAKEHRTVNNPTEAHIISWIIKELLRRGVAQDAIGIITPYNAQVNIIQQYTDCLVEVHTIDKYQGRDKECIIVSFVRSTANSRASGSSLLGDWHRINVLLTRAKKKLIMVGSRGTLSTIPLLRLLVDKVAEIGGLLDLTNKDAHSFSRT

SEQ ID NO: 58212 - protein, 374 aa, Zea Mays
MQDWRVREFEGKFTDEFAHSSSNEHKGGVEASGVISSKKLKHAVANEKIQGVIPGTNSSGSLKRNSENIQHANGVLSQNISCAGDYKNGSIAFPLREENTITETRCPDDNWNSCQFALNNGSSILNNHSAPQDSLTYGDNDLNYIEWPGIDNFEDVDTLFRSSDSTYGQQQLENADGLSWIPSSDAVYSTDVALQQGLDSSYSDYGILDDLSAFQCAEDKSLPLVDPSSALCDNQFNDTYLFSEQKNVNAYGEQIYQEDLMELLPTDQICSGHENIDMVGNQYPSENAIQDSSSPSNITSESYPGKFGPSSCSSAQRNSKVQKKTVNIQPRQPANDNVMNTSRASYPCENYETERRGLGKELWGILKLQWVVQW

SEQ ID NO: 58213 - protein, 73 aa, Zea Mays
MPGPDQPRPNRAAPRASLRREPRPRLPGRARGRQGNAAGPPCALMPRHRTLRQTAAPGRPRRDPAKPALAARR

SEQ ID NO: 58214 - protein, 349 aa, Zea Mays
MMVALKGKASIRSITKENAASGSHIEPSATWDVCGGANVQFCSVDHGENYVMFGGKGIEVSLWDITSCSKTWSAKSPRTNSLGIFTRPWFTAGTFLCKDDHRKIVACTNSHQVRLYDTALQRRPAISVEFKESPIKAVAADPNGHDVYIGTGTGDLASFDMRTGKLLGCYFGKCSGSIRSIVRHPDLPLIASCGLDSYLRIWDTNTRQLLSAVFLKQHLTTVVLDSHFSVEEPGEMKSKQLESSVETETEVRKEKKKKSKAITEDETEAQIRKEKKSRTIEEEEQAGLVDHSDINDEVYARKEKKKKKSRGIEGGKERDSDGEICSPKRRKSGERSKCLKKRSKKQLVA

SEQ ID NO: 58215 - protein, 602 aa, Zea Mays
MEKQVKQMLGLIGEGEFSAEKAEVFYEKRPLLITHVENFYCMYRALAARYDDVTGQLRKNIPSSLQSYGSVGVSESDSETQCFTSPEFDMPQQKQKPGPDFLDFSIGSGVSSDVSKKGSERSSSSSDSDSELDEAKEENGSMFYALSQKNIELEDELQEVRGKLDALEEKHAHCQRDLSTNSKDTEHEENLHTSDVESNTLQKDAEETDFALESSTEVNSEKEALEAVLFERKNEIEMLKGAMASAAKQFEVELAHRDLEIGKCKHELGVLSEKYLHDKSTLEDELRRLHGIIKNMEGDLEKISQERLQLRSRIKELEQAAHSLDYSASEIVELQEVIRNTQAELEKVTKEKEVLKEHANEFEQLLKGLEVSGTEVAKLPETIKNLEAQLERSFEEKSVLQDQIKQLEQVMSESSEKHSHEQFSLTADLLKLSEVNASLEDKLSDVAAELIQVYADKEEESLDNEKQISVLSKDIADLRRKLELLSSEKTTVDDELAKLLADIMIRDEKMKQMDDHLNQLQLEHAKLMAEFDSAHRSLSELHAQVSELEDEVEKQKLVISESAEGKREAIRQLCFSIEHYRSGYQQLRQLLQGHRRPLVMAT

SEQ ID NO: 58216 - protein, 235 aa, Zea Mays
MKVLHKVRVEAGVLLKEAVQIQKVICSMQIECVRGAIWNTLQLVLSVYMGSRVKDNSEQGQGNDARSKCTQSSVVEPTQPSSGSVVLNPMMPFWPVPPPMAGPATTLNMGVDYWGTPASVPMHGKVIAAPTSAPSSNSRDIVLSDPTIQDGRELKRQKRKQSNRESARRSRLRKQAEWEEVANRADLLKQENSSLKEELKQLQEKCDGLTSENTSLHEKLKALEDEKSNGNWYKD

SEQ ID NO: 58217 - protein, 230 aa, Zea Mays
MDEEEHEVYGQEIPEDGDMDGADVDMAASGDDAAKLQELDEMKRRLKEMEEEAAALRDMQAKVAKEMQGGDPSASTAEAKEQVDARSVYVGNVDYACTPEEVQQHFQACGTVNRVTILTDKFGQPKGFAYVEFLEQEGVQEALNLNESELHGRQIKVAPKRTNVPGMKQRPPRGLLDSAALCATDLTSEVRGRVMKFNAKPAHGHWSVPGIINCIVCTVAAQCSCISCLF

SEQ ID NO: 58218 - protein, 90 aa, Zea Mays
MHYNNWRKNSREGVRSSQLAQAEGDAIPQRRWGERFLVRRVSYSRRTCPRKLRRGRGEDDDLVKGTMLVAITSTSSRRLLVRWCIIIHWQ

SEQ ID NO: 58219 - protein, 447 aa, Zea Mays
MARQKKLVQVIEGSSEMDFFSEYGDANRYKIQEVIGKGSYGVVCSAVDQHTGDKVAIKKIHNIFEHLSDAARILREIKLLRLLRHPDIVEIKHIMLPPSRRDFKDIYVVFELMDTDLHQVIKANDDLTREHHQFFLYQMLRALKYIHTANVYHRDLKPKNILANANCKLKICDFGLARVAFNDTPTTVFWTDYVATRWYRAPELCGSFFSKYSPAIDIWSIGCIFAEVLTGKPLFPGKNVVHQLDLMTDLLGTPSLDTVSRIRNEKARRYLNSMRKKQPVSFPGRFPKADPAALKLLQRLLAFDPKDRPTPEEALADPYFKGLAKVEREPSCQPITKMEFEFERRKVTKEDVKELIFREILEYHPQLLKDYMNGTEKTNFIYPSAVDNFRRQFANLEENGGKSVAHTASSDRKHVSLPRTTTVHSNPIPPNGTSQVPRKIPTGGNFS

SEQ ID NO: 58220 - protein, 58 aa, Zea Mays
MVFLKLGTANIHQSSSTAPQEVLHLLLLNIEVVASSLLQQTYRSPLQSVQPICISMSI

SEQ ID NO: 58221 - protein, 235 aa, Zea Mays
MGFPSTPNLKLEPRPRTRRLLRCALSSEPVQPPMTVSITGATGFIGRRLVHKLLSDDHKVCILTRSASKAASVFPASTYPGLTIAQQGDWEACVRGSTAVVNLAGMPISTRWSPEIKQEIKQSRVNVTSKVCREWEATACQVNQEDVRLVLLRIGVVLGKDGGALGCCVSFNSFSPLLSFYFPSSREGPFQSTLLIHLVHLSICSKDDTPFYDVCWWSSGDGTPMVASLSCATDL

SEQ ID NO: 58222 - protein, 162 aa, Zea Mays
MFSSYQAGSVPVGLYAVQTENVFPERPDQPECQFYMKTGDCKFGSVCKFHHPRERIIPTPNCALSPLGLPLRPGEPICSFYNRYGMCKFGPNCKFHHPMGNPMYGHASSPTSEAQTSRRMLAHVPSHPEVSPDSGSGRSRRIVHSDSQQIPSVERITEREAS

SEQ ID NO: 58223 - protein, 400 aa, Zea Mays
MNSELMDEFSELKSLAKRYLQDYEKEKKARELMEEVCDELAKEIADDKAEVEALKKESMKVRDEVEEERKMLQMAEVWREERVQMKLVDAKLTLDSKYSQLCELQTNLEAFLSFHRSSSVDKETTRDGERLREAISSMKLHGKEFSYKPPPPSEDIFAVFEELRQREEVSEKEIGQCNGDTPMSRATKIHTVSPETDIFLGKTAKRYPTRPCARDEDDGDSGWETVSHAEEQGSSNSPDGSEPSVNGFCGGNGASASGTDWEEDNCEKCRSSSGITGICSTAGERHPKKASSFARLWRSSNGDGGRRTGSELLNGRLSSSRMPDAALSPDLKNGEACQVSPGVGEWSPDLLNPHVVRAMKGRVEWPQPQGTQKRSLKSKLVNARTNGRKVQLHQALGQMI

SEQ ID NO: 58224 - protein, 254 aa, Zea Mays
MLERHTYRHRGFGFVTFEDRRAVDSAIKEMRGQELDGRTISVNKAEPKMNTDDTRFDSGGGRGEYRGGRGDGPPPGNCYECGRPGHWVRDCPSAAGGRSGRFPSKFSGGGRGDRFSGSDRFNDRYMDDRYDGDRYANDRYPAGGDHFDGDRYGGGLDRYAPNGYGRERERSYERDGVRGGGGYDRSGSRGGGSYDRDGPRGGKGGGYVRDGPRGGVADRYGGGGPARYDGGSYRERPGPYDRPSRGGGRFDERH

SEQ ID NO: 58225 - protein, 302 aa, Zea Mays
MHTKSLAVLKRQLLSKKMVDTAKESIGGSATSLEIYGKMEEVFIKMDSEQNTDSVDRELKNFKDAVLQEGDEEGRLAREFDPRKHIEAHLPVRVNEQRLSNLLQSILVGGCVGAMPVIRMIPTSVLWGYFAYMAIDSLPGNQFWERIQLLFITESRRYKVLEGPHASFVESVVPKTVTIFTIFQLVYLLICFGITWIPIAGILFPVPFFLMIVIRQYLLPKFFDPVVLRELDAAEYEELDGVPLEHKLEDEASEVGSCPSRPDAEILDELTTNRGELKHRSSSLREERPIQVTVSTHMEPTG

SEQ ID NO: 58226 - protein, 95 aa, Zea Mays
MFLLVLNSSPVSRVICSRAIHTVFLGLVTAPHRFSYLTMAKSSGAVVHLGPCHRGLALRTASTPAERLTLSPAVFTRAPKSCKKRREAIIPIFSS

SEQ ID NO: 58227 - protein, 127 aa, Zea Mays
MIGRADIEGSKSNVAMNAWLPQASYPCGNFSDTSSFKLRRSKGSIGHAFTVRIRTGNPNQTSFYPFVPHEISVLVELILGHLRYLLTDVPPQPNSPPDNVFRPDRPGEAGPWSQKEGRCPASDPRNK

SEQ ID NO: 58228 - protein, 899 aa, Zea Mays
MRCVSSVASWCNPYNSDDSVSSAFSVLWDFYLNVTHHSTIANEIGAELHLAAYEALAYVLAVLSTASSTQFLDFVEAKQTDQAHKFSLDILVTTFLDNINHLLTEGTLTRSRRAVLMTWKWLCMDSLLSISSCYSDNESQMKRLEPLFSDSTLRCIFLDIIESLENTGENSVLSILRCVRSVLRLLHLNEGNTIFSSLGISYEMMMQLAKSSWILHLNCNKRRVAPIAALLSAVLHPAIFCNLEMHQTNEKGPGPLKWFVENLLNEGSKSPRTIRLAALHLSGLWLMYPKTLRFYMEELKLLSLYGSVAFDEDFEAELSENHEARFEVSMLAQSPDREFTEVFINTELYARVSVAVLFHQLWKQIKEHSILETEEALECGKLFLLELLDSAVNSKDLSKELYKKYSSVHRRKVRVWQMICVLSHYVEDDIVGEVTSSIHICLYRNNLPAVRQYLETFAILLYLKFPTLAEEQLIPIFHDKGMRQQALSSYVFIAANVILHSRQSVQIYHLNQLLPPILPFLTSHHHSLRGFTQLLVHSVLSRLWPTLHPETSEDAVFERRCFQELKDYLAENSDCVRLRVSIEGFLDVFDPNASGTPPGIFSARPEVSDFECVPVSVMERVIEFLNDVREDLRQAIANDTVTIKNEDLAVGEHHKSDESVSEMVKTGQEVLDFQKKITPHRGDSEQALNLNTRGHSGVGDEYISRIISEMEEDDQVFDLALEARLHAAETIKQSRQELIVVASLVERIPNLAGLTRTCEVFRAAGLVVADKSVLQDKQFRLISVTAEKWLPVTEVPVDSVKAYLERKRGDGYSVIGLEQTANSMPLDRFGFPDRTVLVLGREKEGIPVDIIHILDACVEIPQLGRGEVAQCPCQRRHSRLGVHASTTQSALACCLFLLH

SEQ ID NO: 58229 - protein, 107 aa, Zea Mays
MQELFINSSADGSLAMEATTCMNETHPGDDSDFNDDVCSDFSNYPQPVHDLGDDSDTLQSPNHHPSQSVDHSSSSSGLKRPQGEGVPAKRNVEPKSRTTKQDDPCRR

SEQ ID NO: 58230 - protein, 56 aa, Zea Mays
MIIFTQEKMIQRLNNFVRNLQQQLVQCRGNNRTVNRSGTSLTSYISEIQMPQMMDD

SEQ ID NO: 58231 - protein, 695 aa, Zea Mays
MTPEQRRENYSYDITYVTNSELGFDYLRDNLAMTVDELVLRNFNYCVIDEVDSILIDEARTPLIISGLAEKPSDRYYKAAKIAEAFERDIHYTVDEKQRNVLLTEEGYADAEEILDIDDLYDPREQWASYILNAIKAKELFLKDVNYIVRSKEVLIVDEFTGRVMAGRRWSDGLHQAIEAKEGVPIQNETITLASISYQNFFLQFPKLCGMTGTAATETQEFESIYKLKVTVVPTNKPMIRKDDSDVVFRATNGKWRAVLVEISRMNKVGRPVLVGTTSVEQSESLSKQLREAGIPHEVLNAKPENVEREAEIVAQSGRLGAVTIATNMAGRGTDIILGGNAEFMARLKLREILMPRVVNPIDGVIVSKKQMPPRKTWKTNESLFPCELSKETLSSVKDTVEMAVKEWGDKSLTELEAEERLSYSCEKGPTRDEVIANLRNAFVKIADEYKVYTEEEKQKVITVGGLHVVGTERHESRRIDNQLRGRSGRQGDPGSSRFFLSLEDNIFRIFGGDRIQGLMQAFRVEDLPIESKMLTRALDEAQRKVENYFFDIRKQLFEYDEVLNSQRDRVYAERRRALASDSLQSLIVEYAELTMDDILGANIGPDTPKENWDLNKLIAKLQQYCHLLDDLTPELLEGKSSSYDDLREYLRKRGREAYFQKTVSYFSFSFHGYCFFAWFKGFKKFNNNNINIAF

SEQ ID NO: 58232 - protein, 108 aa, Zea Mays
MLLASSSPSLCSSSPLLPRSPLPRLLSPSRGLRCLFRSRRRASQCASVSNSCPMPSVATSFALASSASASSATCSRPTSSSIVVVLRSVSISIATATCLRRLGTTRRI

SEQ ID NO: 58233 - protein, 325 aa, Zea Mays
MCSIHGDCLLSSCSHDFFRTLTWWIVPCLAVKVTREVSRFAHILQQGSSSAWTWRACAVLFASVASWTYLTTIILSSCMLFNLVCSLQVIHFDDYGKLLEQDADPLVYLKEHLQLRHNLSKISHRFRVFLLLLFLSVTAGQFAILFKTTAYSGPINFTNGGDIAVSSVVQVVGLVLCLHAAAKISHRAQNIAALASRWHALATCSTDSTYVTTPNSSGNLAPFPAHLFLRDYSGSDLESLDSASVQGSSHGTAQLASYMSSYHKRESLVLYLLANPGGITIFGWIVDRAFLNTILMLELTLVLFVLSKTVVIPAKTLVHSYIGYP

SEQ ID NO: 58234 - protein, 438 aa, Zea Mays
MVRFHPQRSDILASGSLDCEVRLWDAKTSRCTAELVFYRPVASIAFHATGELLAVASGHKLFLWDCNKRWETLELPIILETRRSLRAVQFHPHGAPYLLTGEVHNLDSEDSTMTPALLSNYSFRDTPLLGGSGVDNLISELQYMQNFEQVGASSSVPVTTGSFDGSRLHDTSGHHLMTSLPSVGRPLLGTHAAEAPAISLSVGSEQTTSLLGGGTELPCTVKLRIWRHEMKNPFITLGPEACLLTIPHAVLCSEMGTHVSPCGRFLVACVACVLPHSYGGHGSQLHEHYDSTGAGTSPTRQAFPSRQIIYELRVYSLEDATFGTVLATRAIKAAHCLTSIQFSPTSEHILLAYGRQHSSLLRTILINGETRVPVYTVLEVYRVSDMELVRVLPSVGEEVNVACFHPSPGSGLVYGTKQGKVRFLRHHGASFTCWGERS

SEQ ID NO: 58235 - protein, 578 aa, Zea Mays
MGQNPIFSTDVAAEPAEAPAEQSEDSSVIGRPAEFALVDADGSPSFLEKALKFIEDHGVKVEGILRQSADVEEVKRRIQDYEKGKNEFSPEEDAHVIGDCIKDLEEGSCSSDAYTESEDDDVDKEYSTDNDINDDDDGSYDSGEDDIEEDLDYSDDSEHDSKINTNVKDGKVKNNISETAEVAQAKGASHMETNSQSNQKQESCGPNGSKDRILRSTSRSSSSREKSMEKSCSSAHRGKRTLWGRTSARKDLSTEEIECCSDDESLIEKLESNKVDLQSKIAKEAKENAILQSSLEKRKEELHERRLALEKEVENLREQLQKERSLRTSLESGVMNLRRGQVSLPSTTDSKTKADLEEVATAESDIINLKQEVSDLRGQVSGQQLCCESCNKRLLNTDRLGGPESSSVAASPTIGSDSASGMVKKEQKTFQGDIEQSRKQTAQDSPSSTDKPGHEAVGGSSQRAPQRRQSIAREGQDGWSSSSSNSKWNLAQKQYSNSPLIRGLHGSSRLEDFGGSIPPAASSALVKLTNRLNFLKERRALLASEMQSLDLGRPPAAAAAPSAKSPTPKGHERKKSRD

SEQ ID NO: 58236 - protein, 332 aa, Zea Mays
MDFSAGGSGSGGGGGGAGDGRAQAERWLEIAEKLLAASDLVGCKRFAERALEADPLLPGADEILAVADVLLASQSMGPSGHQDPLAILQLPPGVNPDQASVSRAFRRLALLLGPRNPHHGAEMALRLVNDAYAFLSDPSRRPPPPANPATGTDMYHCAWGFFPLGFPNAADLGANWKPFYKAFPWNTAPSGQGADGRSHGNRGGRQAQNDSARGGSSRGRIKKTTARKKVGAGLRRRSLGGGVESGIDSSMLGQEGWAGDEDGGDGRTEEVRGININEAAQATDGTGRVNVSGAGGVEDMGNFHIDVDATEDILGNLHNLPFLRVDNLGRMI

SEQ ID NO: 58237 - protein, 184 aa, Zea Mays
MHWVVDKVPDQSLLNTANWKFIIPRLYWNYPNDDILLNISMASSPVIRVTSEKIEATINGDMIIDVVDNKEIVPVACISVIVSASGVVDASGNKVYGRVGLDNFSLALKWSKIGNFHMSLIQGVIRVLLNTVCMPYLNSRLGNGLILPVVHGFTLQDVYVLTSAEQLTLCSDVTFNASSMASLL

SEQ ID NO: 58238 - protein, 346 aa, Zea Mays
MTAVPAILDRIRDGVRKKVDTKGGIAKQLFDIAYNRRLAAINGSWLGAWGLEKLLWDTLVFGKVRAILGGKIRFVLSGGAPLSGDTQRFINICLGAPIGQGYGLTETCAGGTFSEYDDTSVGRVGAPLPCSYIKLIDWPEGGYLTADLPMPRGEIVIGGPNITKGYFKNEAKTNEVYKDDEKGMRWFYSGDIGRFHPDGCLEIIDRKKDIVKLQHGEYVSLGKVEAALIVSPYVENIMIHADPFHNYCVALVVAAHIELESWASQQGIKYNDFSDLCQKQEAVKEVLGSLAKAAKQARLEKFEIPVKIKLIPEPWTPESGLVTAALKLKREVIRKTYENDLAELYA

SEQ ID NO: 58239 - protein, 264 aa, Zea Mays
MAGDGNGRAELPRIAVIGAGIFARTQYIPRLREIAHLVVLKSIWSRTQESAKAAAELARDFAPDIECKWGDAGLEEIMGDSSIMGVAIVLAGQVQVELSLKMLKAGKHVIQEKPASGSTTEAETALSIYHSFQNLFPHKPIWAVGENYRFEPAFIESSKLINDIGDMMHIQVIIEGSMNSSNPYFNSTWRRNFVGGFILDMGVHFIAGLRMVTSSCYISKSPFFSQKTQEIWASLRRIEGVRTQQHLHHTPKHNALTQHTLQQP

SEQ ID NO: 58240 - protein, 984 aa, Zea Mays
MLRAAAAAAAIFPARVAAAPAAAAAEELRYPLLRVIGTLRGSRGSVLLGRRVRFCSNSSASDSEVAAADAEANAEDATVAEEEAGSKASSAIVPTSTNIDDCLSVIALPLPHRPLFPGFYMPIYVKDQKLLQALIENRKRSAPYAGAFLVKDEEGTDPNIVTGSDSEKSIGDLKGKDLLKRLHEVGTLAQITSIQGDQVVLLGHRRLQITEMVEEDPLTVKVDHLKEKPYNKDDDVIKATSFEVISTLREVLRTSSLWKDHVQTYTQHIGDFNYQRLADFGAAISGANKLLCQEVLEELDVYKRLKFTLELVKKEMEISKLQQSIAKAIEEKISGDQRRYLLNEQLKAIKKELGLETDDKTALSAKFRERIESKKDRCPSHVLQVIEEELTKLQLLEASSSEFSVTRNYLDWLTVLPWGNYSDENFDVHRAQKILDEDHYGLSDVKERILEFIAVGKLRGTSQGKIICLSGPPGVGKTSIGRSIARALNRQFYRFSVGGLADVAEIKGHRRTYVGAMPGKMVQCLKSVGTANPLVLIDEIDKLGKGHSGDPASALLELLDPEQNVNFLDHYLDVPIDLSKVLFVCTANVIETIPNPLLDRMEIIAIAGYITDEKMHIARDYLEKNTRQACGIKPEQVEVTDAALLALIENYCREAGVRNLQKHIEKIYRKIALQLVRQGVSNEPDQESLGVTVNEESNSGDSITAKDEIVKDPAVEDASVANNVTNPASEEANEVNLTTEAPKEDSTSKGNKKTDGVAEDAADKATEKVVVDSSNLGDFVGKPVFQAERIYEQTPVGVVMGLAWTAMGGSTLYIETTKVEEREGKGDLVLTGQLGDVMKESAQIAHTVGRTVLLEKEPDNHFFANSKVHLHVPAGSTPKDGPSAGCTMITSMLSLAMGKPVKKDLAMTGEVTLTGRILPIGGVKEKTIAARRSAIKTLIFPAANKRDFDELASNVKEGLEVHFVDTYSEIYDLAFQSDAGTEMI

SEQ ID NO: 58241 - protein, 253 aa, Zea Mays
MSSGCWTARARSCVWRCWNQRTNQLFENTIALNPEKFESDKGAKLMQLAGLSADDMIAVNNMRCLCGPDTKKSSVGGFTLKFDVHKKKHTNRKERTGEESTWALSRFYPILEQLIENLSKGELPKDEYNCMNDPSPTVHGLPTSSSARTSPAHSMRSRRTGGTWARPRGSDDGYSSDSVLKHASSDFRKLGQRIFVFVIGGATRSELRAAHKLSSKLKRDIILGSSSLDDPPQFITKLKLMSVEELTLDDLQL

SEQ ID NO: 58242 - protein, 588 aa, Zea Mays
MIMERKFQPVIIFSFSRRECEHHAMSMSKLDFSTEEEKECIEQVFCNAIGCLVEEDRSLPAIELMLPLLKRGIAVHHSGLLPIIKELVELLFQEGLVKALFATETMEMSVIKDMVLGKPAPLVSTFRLSYYTILNLMSRVEGQFTAEHVIRHSFHEFQYEKALPEIAQKITRLENEATLLDSSGETDLAEYHKLGLDISELEKKIMSEMIRPERALLYLVPGRLVRVRDGSTDWGWGVVVNVVKKPPASGTLPPALSASRSNNYTVDTLLHCSSNSSENGSRSKPCPPRPGEKGEMHVVPVPLPLVSGLSSVRINIPPDLRPPEARQNILSAVQELGKRYPQGLPKLHPINDMGIQEPELVDLVHKLEDLEQKQCSHRLHKSGQSEQELSWYQKKADLNTEIQQLKSKMRDSQLQKFRDELRNRSRVLKMLGHIDADGVLQLKGRAACLIDTGDELLITELMFNGTFNDLDHHQVASLASCFVPCDKSSEQIRLRNELSRPMMQLQEAARKIAEVQRECKLEVNVEEYVESTCRPYLMDVIYCWSRGATFAEVMEMTDIFEGSVIRLARRLDEFLNQLRAAAEAVGGG

SEQ ID NO: 58243 - protein, 555 aa, Zea Mays
MSISTLRRCRPPRRHRPHYSTSEQVGTKRAALKRRAMRANSSVPTWRFANAAVARGPRAPVAASSVSLDPLTTRVSRYVAISTMYYYMHCQVTTRAARSPLGSPVQWAMVPMDPSISSSSSPLRLPGTPTSPGASPRPTLVAAGRQPAAAPSTTRLRAISPSQSPPTPASPVEPFGFDALKGTFSVDVAAADARSLDVPLAAPFTIASSRLVAVSNVAVRVELRTGAVGWGEAPVLPSVTAEDQPAALDAAGRACAALVGAPAAPLGAVLQDLASVLPGHAFASARAGVEMALIDAVANSIGIPLWRLFGGASDSLTTDITIPIVTPNEAAQLAAKYHGQGFQTLKLKVGKNLNSDIEVLKAIRLVHPDCSFILDANEGYTAKQAIEVLDRLNEMGVTPVLFEQPVHRDDWDGLRDVTSVAMEKYKVAVAADESCRSLLDAQKIIDGNLAHVINIKLAKLGVLGALEIIDAARKANIALMIGGMVETRIAMGFAGHLAAGLGCFSFIDLDTPLLLSEDPVYGGYEAFGPLYKFTNARGHGGFLHLDNEASDNYLQ

SEQ ID NO: 58244 - protein, 1161 aa, Zea Mays
MGKANKSPSPAVAKEGDYSALRELFRPHVESFDYFLDKGLDEMIESIRPMGHVLSPMRGARPGVLPIYPQECRQARISYHGEFKVEVCFQYNEGAQIRHTFNFGHLPIMLMSKLCHLRGADPHKLVFHGEEATEMGGYFICGGMERLVRILVLQKRNYPMGLVRNSFLKRGAGYTDKAVVIRCVQRDQSSVTIKLYYILNGSARLGFWLGGREFLLPVGIVLKALIDASDREIFTSLTCCYSDKHGRGKGVVSTQLIGERAQIVLDEVRNLSILTRTQCLVHIGQYFRSVMEGFENDDYITVAEAVLKDYIFVHLENNHDKFNLLIFMLQKLYALVDQTASPDNPDALQYQEALLPGHLFTVFLKDRLQEWLRKSKRLILEEAAKNKGFDLGNALEIRKFLTKYTTSVGRAVESMIKVGNVNSRSGLDLPQREGMTIHAERLNFHRYISHFRSVHRGSAFAKMRTTSVRKLLPESWGFLCPVHTPDGEPCGLLNHMTSTCRVSSFYNSEGVIKNFGEMKKLLSAELVRVGMNPVLPKIEQTGPPEVLHVHLDGCILGTIASAMIEKAVNYLRTLKLLAHSGIPEDLEVGYVPPSFNGAFPGLYLFTNPARFVRPVRNLFILSDGKQSIELIGPFEQAFMEIRCPDGGDGGRQEPFPATHEEIHPTAILSVVANLTPWSDHNQSPRNMYQCQMAKQTMGFCGQALKFRTDVKAFHLQTPQTPIVRTGTYTKYCMDEFPSGTNAIVAVLSYTGYDMEDAMILNKSAVERGMFRGHIYQTECIDLSTKSRDNVPETFAKSILTRDTSNVIDSDGLPRLGQAVHPNEQYYSVHNSLTNVIRPVKLKGTEPAFIDYVAVNGTGSKCGLQKANIRLRRVRNPIIGDKFSSRHGQKGVCSQLWPDIDMPFSANTGMRPDLIINPHAFPSRMTIAMLLESMAAKAGSLHGKFIDATPFANSLKKDKDSDKPNSIVDELGPMLASYGFNYHGNEVLYSGVFGTEMDCEIFIGPVYYQRLRHMVSDKFQVRTTGRIDQITRQPIGGRKHGGGIRFGEMERDALLAHGSSYLLHDRLHSCSDYHIADVCSFCGSLLTATMIKSDTQKKVKHEMLGLPTVRPAKNFACQACKTSKGMETVAMPYVFRYLAAELAAMNIKLELRLSNKSGLPLS

SEQ ID NO: 58245 - protein, 633 aa, Zea Mays
MTGTTWIIDSQRFATKIKNASGSSDPSKQKWIGNPSKECPKCSHVIDNSDVVHQWPGLPKGVKFDPSDQELIWHLMAKHGKSGIKPHPFIDEFIPTVEEDEGICYTHPQKLPGVKQNGSVSHFFHRTFKAYNTGTRKRRRINTDDADVRWHKTGNTKPVLVDGKHLGCKKIMVLYISPLKGGKAEKTNWVIHQYHLGTGEDERDGEYVVSKIFFQQQFKPRDKNAQELTTSDDLESMAAESNLPDFTTLPTDKHVGTVQEVVHNPEHNLYQVVHQWPGLPKGVKFDPSDQELIWHLMAKHGKSGIKPHPFIDEFIPTVEEDEGICYTHPQKLPGVKQNGSVSHFFHRTFKAYNTGTRKRRRINTDDADVRWHKTGKTKPVLVDGKHLGCKKIMVLYISPLKGGKAEKTNWVIHQYHLGTGEDERDGEYVVSKLFFQQQFKPGDKNAQELTTSDDLESMAAESNLPDFTTLPTDKHVGTVQEVVHNPEHNLYQLNRNCEISIEETVVLPPSVKTTKDGDNLQSQDQKLWEGDSQFELLDSQQLAEGLALCDEFLLSQSQTSCGGGDEPRETKPCLAAYAHLSAEDFKKDLECQRLEPTDNTNLELDNTDEFRLSQIEFSQDSFMTWAAEKITDD

SEQ ID NO: 58246 - protein, 713 aa, Zea Mays
MGLFDRLLLGGGDRSRGTEDQERGGAEAAAMGSDVPPPSAIPPLSAAAASVVRQCARIAGVPVDQLLRRVDAEEQARGPLEYARSVVEYCSHVALRVEARRPDHLGDREFHTLTYDMMLAWEAPDEETDAVFQKTAFSVLRGDDADDDDSGSIFYSSPTQMAIQVDGRRTVGPEAFAKIAPACPAMAHPITVRNLFDAITNSTGGRLHFLIYHKYLRILNEAFCSAKRVLGGHRAPALQLSDDEVILDIHGAATTKPVLQHIGTSTWPGRLTLTNHALYFEAIGVDFSYGEAVVYDLARDLKQSVKRESTGPWGAHLFDKAVMYKSSLTEPVFFEFPQFKGHTRRDYWFAAIKEVLHAHKFIRKYKLAGFQKAEALSVATLGILRYRTVKEGFHILPAHFKTILAFNLAEKLPKGDKILEALYGQLKQHCPRFRGGQDLGQSSSEELMLADPFPLSAYTMVTMGLLKLKEEDNAEERDFAVRDVQIGGTSSVQMALERSVGYSGRVEAARATLDQELLFPLIEIGKRLLALSGWEEPFKSYVFLLCFLYMAYSGWIWLMFPGFLLGSTIFMLWNKHYRHGRSVGAFEIITPPRRRTVEQLLALQQAISQLEAHVQAGNIFLLKLRSLMLAAFPQSTNRVAAALVAVAAIFTFVPLRTIVLLILLEEYTRQMPVRKKSSEKLVRRLREWWLRIPAAPVQLVKPRETRRWRSRLR

SEQ ID NO: 58247 - protein, 150 aa, Zea Mays
MIGPVDFDRSVDYWQQDKWSGQFPVKWHIIKDVPNNLLRHIILENNDNKPVTNSRDTQEVSLERPQCYNNQQVQLGWHDAGTYDKNIIEWPKCSGANGSLRFKVELKHGANADLVNAMKLIPPSTTSEPHPRSMSAAPSSPFHLSAPIRA

SEQ ID NO: 58248 - protein, 199 aa, Zea Mays
MNQRMPLIYVKLYMYQICRALAYLHNCVGVCHRDIKPQNILVNPHTHQLKLCDFGSAKVLVQGEPNISYICSRYYRAPELIFGATEYTTAIDVWSAGCVLAELLLGQPVFPGDSGVDQLVEIIKVLGTPTRDEIKRMNPNYTEFKFPQIKAHPWHKIFHKRMPSEAVDFVSRLLQYSPNLRCTAFLLSLTVGGVNPSIL

SEQ ID NO: 58249 - protein, 1087 aa, Zea Mays
MLRVFIVRVALEKIECAVVLLRPIFMWLDDKVDKTSLSERDTFKVHQLLQFTVKLSEHPTGKALLWRMGFTRILSKLLQNCSRASFPYDNQTFGRAHSKNDLMLKWRIPLFKSIAYIFSIDPCNNEKADVEESLNEKSVHECSSVMHDLMMFCQVLPVGREMLACSLAFKELVYSYTCRSAVTLILSQIHTSNKDVLEKDESDPNHNSPSLDGWNCFSSLFKCWKKLVKYVGSNERTDYLVETIYSLTLGAITLSQYGENLEGLLILRYLFGLPSDPSGSLESSGESPSEIELFMKTYEEKICQGIENSATAVGKTLLRKLLNSIKLLRSILENSGQSADTVQMVLEEGTDSLSEIARSVVMTAHLMPSLANVSVNDESPFLFSNMWKVIVDSEEPLDCQEGEFAKRLVWELPDSSLDRQLAPGQSARRKLALGESASRRVRDNQLPEPTGQFSRGLNTSNASSGHTRRDTFRQRKPNTSRPPSMHVDDYVARERNIDGASSASNIVNSTPRGTLSGRPPSIHVDEFMARQRERQNHAPAPTGDAPQAKSQTTSLDDSLRTKPENLRQPKTDLDDDQEIEIVFDEESGSDDKLPFPQPDDSLQSPPVIIGENSPGPVIDETENQENERVPFFQRATSIPKDDENLGIGISSQTAMLSEANSSLELKHSVSSPGKNSFRDHAEESNYDSIGVSGRPSLQADHQQLSRRHEKRSPRKFSETSLSNGFHGREHRHSNNHPPLPPMPPPISSVSMQNTDSVNRQSSSFSARDRPTPNPSGYPTQSFDSSMPSAFTGLQGQTQYMLAGAGSSSANELPNVEAKLLWNTFPANRIPLETFSSGLPARPMPPLTPYSAVATQHATMNSGSPANLYSQGSVVQPSPTASIISDSNLAMNSASGSMLASNLLPSFASQFLMSRPSMPTPFFGTPLQQVQFSSGLPQNISNPQPPVSIQPRPPPPPPPPQQPHPSQTLQQLGAIQLPHQDQQHSYPHSAILPQVTLQFPNQLPIPQVQLYHQSQQESGQTLRQVGEQSQLQNQGMQADSFSQQQQDSGINLNQFFSSPEAIQSLLSDREKLCQLLEQNPKLMQMLQL

SEQ ID NO: 58250 - protein, 52 aa, Zea Mays
MRTNTFDPKSFHCCGSVYFCFFVEICGPEPPILTCFLDEVIDTYFNMSSSPS

SEQ ID NO: 58251 - protein, 1034 aa, Zea Mays
MLDTTDDIAEGISFQAFEDDCRLLASLLHDVLLRELGPRFIKILERNRILAQSAVSMRAAGMEDTAAVVERQLETDLAAMPLEDALCLARAFSHYLNLMGIAETHHRVRKARNMEQLSKSCDDIFNKLIQSGVPSEQLYDTVCKQEVEIVLTAHPTQINRRTLQYKHLRVAHLLEFNGRPDLSHEDKEMLIEDLVREITAIWQTDELRRHKPTPVDEARAGLHIVEQSLWKAVPHYLRRVSSALKKHTGSPLPLTCTPIKFGSWMGGDRDGNPNVTAKVTRDVSLLSRWMAIDLYIQELDNLSFELSVNGCSDKVASLANDILLKAAEDLKANTWNKTVPQNNAKLHNLALPAQLPSGADLPSCTECSDGESQFRMINLPRNSNRPGALNLTEKFEDSPLSSPTGRQSHIARTPSGRQPRKLFKESNIGRSSSFQKLLEPSLSDRPGITPYRVVLGNLKEKLVKTRRRLELLLEDLPCDYDTEEYCETSDQLLEPLLLCHQSLQSCGSSVLADGRLADLIRRVATFGMVLMKLDVRQESGRHTEALDSVTSYLDLGVYSEWDEEKKLDFLTRELKGKRPLVPQNIEVAADVKEVLDTFKVAAELGSDSLGAYVISMASNASDVLAVELLQKDARLAVSGDLGRPCPGGTLRVVPLFETVKDLQAAGSAIRKLLSIDWYREHIIKNHNGHQEVMVGYSDSGKDAGRFTAAWELYKAQEDVVAACNEFGIKVTLFHGRGGSIGRGGGPTYLAIQSQPPGSVMGTLRSTEQGEMVQAKFGLPQTAVRQLEIYTTAVLLATLRPPHPPRDANWRNVMEEISRVSCAHYRSTVYEDPEFITYFHEATPQAELGHLNIGSRPAKRKPAGGISSLRAIPWVFAWTQTRLVLPAWLGVGTGLQDALDRGHGEELRAMYAEWPFFQSTLDLIEMVTAKADAPMAAHYEEMLVARERRGVGAGLRRELARTERCVLAVSGHSKLTAHNRSLRRLIESRLAYLNPINMLQVEVLRRLRRDDDNRRLRDALLITINGIAAGMRNTG

SEQ ID NO: 58252 - protein, 476 aa, Zea Mays
MGSDLFGSYAESSCAALVVASISSFGINHEFTPMLYPLLISSVGIIACLITTLFATDFFEIKAVDEIEPALKKQLIISTAVMTVGIALVSWLGLPYTFTIFNFGVQKTVYNWQLFLCVAVGLWAGLVIGFVTEYYTSNAYSPVQDVADSCRTGAATNVIFGLALGYKSVIIPIFAIAFSIFLSFSLAAMYGVAVAALGMLSTIATGLAIDAYGPISDNAGGIAEMAGMSHRIRERTDALDAAGNTTAAIGKGFAIGSAALVSLALFGAFVSRAEISTVDVLTPKVFIGLIVGAMLPYWFSAMTMKSVGSAALKMVEEVRRQFNTIPGLMEGITKPDYATCVKISTDASIKEMIPPGALVMLTPLIVGIFFGVETLSGVLAGALVSGVQIAISASNTGGAWDNAKKYIEAGASEHARTLGPKGSDPHKAAVIGDTIGDPLKDTSGPSLNILIKLMAVESLVFAPFFATHGGILFKWL

SEQ ID NO: 58253 - protein, 160 aa, Zea Mays
MVLFGGRGSEFEVLNDVWLFDISDQYPKWKELKYGLSSALGELPFPRVGHSAILVLGGKVLVYGGEDSQRRRKDDFWILDTPALLQYESGSKKMTRKMWKKLRIDGQCPNYRSFHGACVDASGCCVYIFGGMVDGLVHPSEALGMRFDGHLYQVELVLHL

SEQ ID NO: 58254 - protein, 136 aa, Zea Mays
MEQYTGSSLTSYYTSSHFWEQYTGSSFTSYHTSSHFWEQKTGGVVAVVCSSSFAATTSSRLGASSSFPATSIATTSHLLWRGLGLWSQRRRHLLWRGAASSKGEDAEFGEKEVQRRRHLLWRGTTGSRSPGSRGGD

SEQ ID NO: 58255 - protein, 613 aa, Zea Mays
MNRMQVMLLGFVLLGRSLEESARLKASSDMNELISLLSPQSRLIVTSSSDNPSADSSLNSDAITVEVPVDDVRVGDSILVLPGETIPVDGNVIEGSSFVDESMLTGESLPVAKETGLPVFSGTVNWDGPLKIRATCTGPSSTIAKIVRMVEDAQAREAPVQRLADSIAGPFVYTVMTLAATTFSFWYYIGTHLFPEVLLNDIAGPDGDSLLLSIKLAVDVLVVSCPCALGLATPTAILIGTSLGAKRGLLVRGGDVLERLAGIDTLVLDKTGTLTEGKPVVTSIASLAYEETEVLRLAAAVEKTALHPIANAIMNKAELLKLDIPITSGQLTSPGFGCLAEVDGSLVAVGTLDWVHDRFETKASPTELRDLRNRLEFMLSSEASSSNQSKSIAYVGREGEGIIGAIAISDILREDANLTVERLQQESITTFLLSGDRGEAVTSIGRTIGIRNENIKSSLTPQDKASIISTLQAKGHRVAMVGDGINDAPSLAAADVGIAMRTHSKENAASDAASVVLLGNRLSQVVDALSLSKATMAKVHQNLAWAVAYNIVAIPIAAGVLLPQYDFAMTPSLSGGLMALSSIFVVSNSLLLQLHGSFQNTEKRQGDLSSRLN

SEQ ID NO: 58256 - protein, 431 aa, Zea Mays
MPMDTYMGHGFRKDLASMLANLEPQFLKFPGGNYAMGNYLRNAFRWSETVGPWEERPGHFNDAWGYWTDDGLGFFEFLQLAEDLGASPVWVVNDGASLNEEVSTKTIASLVKDVVNGIEFASGGPKTTWGSVRAAMGHPEPFKLDYVSIGNQECWMLYYRGNYQKFYSAIKSAYPDINIISSCDRPTISPSNPADLYDVHVYTSSTNMFSKASMFDNTPRGAPKAIVSEYAVTGNDAGKGTLVAALAEAAFLIGLERNSDVVEMASCAPLFVNDNDRRWSPDAIVFNSGQHYGCPNYWMLHFFKESSGATLHPTAIQVSSYDQLVASAITWQNAKDKSTYLRIKVVNFGNQAVDLNISVVELATGVKKSGSKQTVLTSSSPLDENSFQQPEKVAPVSSPMANAGQQMGASVGPYSLTSFDLLLEPSKHDSV

SEQ ID NO: 58257 - protein, 718 aa, Zea Mays
MDAAAAASLLPRAAASSLLPRRVLSPLHVSRSGLLPRQSSFLAARCAHSRAPPPHPPLPRADCDDAAAKAHPRLRLRLLAEEFRALPSDADRARRLLSLAAALPRLPEPDRAQGNRVMGCVARVWLVARCNASTGWRMWFSADSDSDLSRGYCACLVAALDGAKPEDVLAVDPADPDLAPLGAGTTAAWSRASTWHNVLVGMQKRARTAIAAREGRHPGKPFPSLVIARDGAVSAQGSYAEAQAMFLSPDESKVSGLVNTLKEKKIGIVAHFYMDPEVQGILTAAKKQWPHIQISDSLIMADSAVKMAEAGCDYITVLGVDFMSENVRAVLDQAGFNKVVVYRMSSEPIGCSLADAASSCEYTHFLREASRCYPSLHVIYINTSLETKAHAHELVPTITCTSSNVVPTILQAFSQIPNVNVWYGPDSYMGANIADLFQRMATMSDEEIAKIHPDHNRKSLSSLLPRLHYYQSGNCMVHDMFGHEVVEKIKEQYCDAFLTAHFEVPGEMFSLAMEAKQRGMGVVGSTQNILDFIKDHVMGALDKNVDEHLQFVLGTESGMITSIVAAVQELLHFYSSQERANIKVEIVFPVSSDAISKTSNGSHHVGSSMATDLDNLTIVPGVSSGEGCSIHGGCASCPYMKMNTLGSLIKICHQLPDKNNKLSVYQANRINVRTPLGKSVAEVGCEPILHMRHFQKTRRLPNKLVHQVVHGNGDKPLQ

SEQ ID NO: 58258 - protein, 453 aa, Zea Mays
MGYLLFPAIEILGTVILMSHVAWQVFIVFVPIITASLWYQQYYIDAARELQRLVGVCRSPVLQHFSESMAGSNIIRCFQKERQFIRYIGYLVDNLSRPSLYNAAAMEWLCFRLDMLSSFVFSFTLILLVSSPSALIDPKTAGLAVTYGLSLNMLQGWAIAVLCSLENRMISVERMLQYTTIPSEPPLTISERQPNRQWPTKGEIEFLNLHVRYAPQLPFVLKGLTCTLLGGKKTGIVGRTGGGKSTLIQALFRIVDPCIGQVFIDGTDICTIGLHDLRTRLSIIPQDPVMFEGTLRTNIDPLGEYSDEKIWEALDSCHLGDEVRKNELKLDSTVTEKGKNWSTGQRQLVCLGRVILKRRKILVLDEATSSVDPITDSLIQKTLKQQFLKCTMITIAHRITSVLDSDKVLLLDNGEIAEHDAPAKLLEDSSSLFSKLVSEYTMGSDKWRMQESS

SEQ ID NO: 58259 - protein, 56 aa, Zea Mays
MSQPPCLPCRLRRLTSAALNYAFAFSRWPRVCRAGGRSASFIRWTIGASIEKLRKG

SEQ ID NO: 58260 - protein, 330 aa, Zea Mays
MQRDTSSSDVSASHVGRVRRRKHPTEATTDGNRANGQPLLVNDQNKYKSMLTRTYSTVWMIGGFAFIIYMGHLYIWAMVVVIQIYMARELFNLLRKSSEEKQLPGFRVLNWHFFFTAMLYTYGRFLSRQLVNTVTSDHLLYKVVSGLIKYQMFICYFLYIAGFVWFILTLKKKTYKYQFKQYAWTHMILLTVFAQSAFTVANIFEGIFWFLLPASLIVINDIFAYLFGFFLGRTPLIKLSPKKTWEGFIGASVTTIISAFLLANVMGHSQWLTCPRKDLLTGWLYCDPGPMFKPEHYSLGEWVPHWHNKVLIYTLLFWTFVRNPEASPKS

SEQ ID NO: 58261 - protein, 306 aa, Zea Mays
MRPPTSTFDPAPLHWLVGMRHEAWHVGFGYDPVGAPANLVHAPVWGRTMHGVSPMPSPGRGRSMPIIPGPRHRTWIHCLPAPRAQAPVLSDPWHRQSAPPRIEIHTLPYPTIPHHEWSMTVLAGSSWTRWRSGCTRTTRPNRRAEEAAATASSRSPSPCTSFPASGTRTTGRRAAGWRRRTGPRRPSCRPTATSPPTPAPGRRRPRGSPRPRRRPRAPRPRGTAGGTSPPRGRWTPASAWTTPGWQGTSSSTTTATTASASRRRPRSASSGPPRPHRDHTILLDWFVHDDEMVFFLGFVSWCVKPG

SEQ ID NO: 58262 - protein, 396 aa, Zea Mays
MLREKLGMDSINISSSSVGSKHEEFDGSVNMDDKDSDDSNIDAGPGSKDLSSDPTAVPRIKILKVVPMQNVDKDYIINIFDQISEENDDPEVENESSEDAGDEDNSGVAETVSAEENGDESGDESDIEPLVSIDFVIENNDDYASHPSAEAFERMPARLEKRDRFSFSFYTEEYSKKLDAGKAQQTSKKTVRLHTDQQDYDGFVELDRVKLSGSNKKLSILQLGIKRNNKVQKKLHGVTHFSRIQMPISSDPLTGLYLTASGFDSEILSLQRKFGQWREDGPSEEHSDLLFYEYVEAVKLTGDNLMPAGQVVFRAKVGEHYRLPHKGIIPRELGVIARYKGQRKIADPGFQNPQWVDGELLILDGKFIRDGPVIAFFYWTSNVHLFEFFRQLKLPD

SEQ ID NO: 58263 - protein, 356 aa, Zea Mays
MKTDGVSSGRTLDLASSLDVGSAAPQASGDAPPDDCNLRSVLTIAFQFPYEMHLQDSVATMARQYVRSVVSAVQRVSMAISPSQSGLNAGQRMLSGFPEAATLARWVCQSYHYHLGVELLNQSDEAGEALLKMLWHHPDAVLCCSFKVPEELYSSPQYSNLLKQRQIPLTRETYVYVCKQGRARHVRNISYCAARPDARQDLRRVRKESNILRYLKTNGTGLRVPAVGRVHVRNGSACLIRPSCSVEGARRGQQRPLPGVLLRQLVLRLTRHPMACVMSRPIFLYGDPNMGKPSAVTEGFMLHALVVRLESSVFMKKLDTAQSLVPLTFDCLPGNRLFVYLTGQPKRCLFHSDVTC

SEQ ID NO: 58264 - protein, 212 aa, Zea Mays
MEYVDLYLIHWPMAVKPSKPHFPMKREDIVPMDLSGVWQAMEECHRLGLAKMIGVSNFTTKKLQELLAIAKISPFVNQVELNPTWQQKKLIEFCNDKGIHVTAYSPLGGQRISKLNPVRQSDILEEIGKARGKSVAQISLRWIYEQGASMVAKSLKRERLKENIEIFDWELSDEDRFKIGQIAQRKLVTVQNLLCPEGISSVDILDVDVIEI

SEQ ID NO: 58265 - protein, 209 aa, Zea Mays
MVIMAGMLPGVEFARRRRRASSLCLYAPSSKEWSSACMETTATATARAWTTLGLGSGAREAKERLDQKLRAQRQPVVLKRHEMSTSPTITKAHDDATCRCSGGLHRHHSSACSSDTGVLLRREVVSSPKPNKKGGGGGGGRFGWCRLLAGGRRGPPAAAEAGCAVCLEELRAGDVVARLPCAHRFHWSCAVPWVQAASRCPVCRAHARV

SEQ ID NO: 58266 - protein, 333 aa, Zea Mays
MSIAKAIAIVMARNPHLRQEGIAHEVLQWYLCRMEGWFATDADSISLQGWDQEVLLPGGHGLMVRGYRPVINTLAKGLDIRLNHKVVEIVRHRNRVEVTVSSGQTFVADAAVVTVPLGVLKAKTIKFEPRLPEWKEEAIRELTVGVENKIVLHFGQVFWPNVEFLGVVSSSTYGCSYFLNLHKATGHPVLVYMPAGRLARDIEKTSDEAAAQFAFSQLKKILPNAAEPINYLVSRWGSDENTLGSYTFDGVNKPRDLYEKLRIPVDNLFFAGEATSVKYTGTVHGAFSTGVMAAEECKMRVLERFRELDMLEMCHPAMGEDSPVSVPLLISRL

SEQ ID NO: 58267 - protein, 1532 aa, Zea Mays
MAVKGKGKQVAAESPGPGAGAGGASGSGGKRRMASSDAGAGPSSSSAAKRRRRAGVLQFVDDVAGVDDDYEEDELESEDDTDDGFFTGGEHAQNLSHKRTERSHPLPFLVKEEELSGDELEEFIKNRYSNRVKYAADRSYSREDDDIFSMDCALKEPTIWRVKCMVGRERQMAFCFMQKFVDLRKIGTKVPIITAFALDHIRGFVFVEAEKACDVTEACKGFCSVYTSRITSVPAAEVPSLLSSRTKPFEISRGTWIRMKNGNYKGDLAQVVSVDDGRKKVMIKIVPRVDLHAISKKFGGAVSLKGAAVPAPRLISSQELEFFRPHIEIKRDRQTGEVFEVLDGLMFKDGFLYKKVALSSLIYWGIQPTETELLKFSSSPSNRASADDLDWLSGMYGSKKRNLPEKRDMESSSSKIRSSKASDLKASTSTENYDENDEFNLHDLVLYGRKDFGVIVAVEKDGFRILKGGPEGSAVKVRKQDIKKGCVDKMFTAVDHQKKTISINDTVNVVEGPFQGKQGVVKHLYLGILFIYNESESENCGFFCAQSGSCEKIRKGLGSSTTESSDFTTPMFPEPAYEQNGHRDTERPYRSTREQLFSIGQMLRIRKGPLKGYLCRVVRIFRNDVTVKLDSLLKIVTVQADLLSVPANRGDNLSGAPASKFGSQDTSFFGSEAGKTSWDNGLPSFGSDSWQPFSSSTLSVQNAGGESEADPWSKKTSAKDDSDPWGKKTDGDSDRWGKKTDGDSDPWGKEAVSAADGDSNPWGKETVPSAAGDSDPWGKKVVSSADGDSDSWGKKATSSAVDTEKEGSGGTAWDKQAGVGGSDAAGSSWDRAVVNESEKSDNWGEACRVMDMGTGAEADTDPWGSKVKAVDMEGPNNWEKATVPPNNKLEDVSQGWGQPKGNSTEDQAIDNVSKDVDNNRACDSSLPVTEDGTWGKSKDNSCGGAGGAGGWDVSVGNWNKSSVVADAQDEGWGKGNWSSAESEETNNQSGNWNKTGASDQAGYNNWDKPKSFGGNGWNKGDDQNSSWNRPENFGGGRGFGRGQGRGRGQQSGYFNGRNDQGSWKKSWGSDNAERPSWRSDNQVDNEAGESGGYRGRGRGGRGQYGGRGKDNGWRNDDRSNSGFGRENNSGDGPKWGGGGNWNATNPPSSSVGTKSYGQNQPFTWNNSEDNKPSVGEQGDPWASKVSSTEDTEQQNDSWSSKMISGGAEDTSGGWDTKVKDSSCNDGGEGLQNDPWANKIGSNEGKEQETDPWASKMSSTVCADDKKGSWNTTAKGIPSKEKADDPWNSKGGNDDSKKTDTWGAGSSGGDQELSWSKPNFSLGDQESTWNNPRFSDDDNANNRGDRNQGNNFGSGDGGSWGSGRGNGGRGGYRNWNDNNERSFGEGGGWSQSQSSDWNANKGNGEGNQAFSKSKPSWEAQNTSGRDGQAGKGDANNSWSKNRSSPSSAWGAPSGGAGGRGSWGKSNEDGWNSAGGSAKEKPAWGGGSEASTKKEDKGGEGNGSQGGGGVSSWDKGADDAWNGNTGSDIGSGGW

SEQ ID NO: 58268 - protein, 176 aa, Zea Mays
MCRAWQTLIRTNREQADAVDGKENFPMALYVVSGDEDGERGGAPVFCIDVAAQLCSNFNKGQCTWSPILLLIPLVLGLDKINPRYIPLLKETFKFPQSLGILGGKPGTSTYIAGVQEDRALYLDPHDVQMAVDIAPDNLEADTSSYHCSVVRDLALEQIDPSLAIGFYCRDKGEPL

SEQ ID NO: 58269 - protein, 255 aa, Zea Mays
MAVASAATLVAAQCVEAAEAMGAEREHLEAAVGSAVSVRTPGDIVTVTAAAATALRGAATLKARALKEVWNIAAVIPVEKGPGPVGGGGGGHHHQHHQKHGAPKQQLHRKMDSDGSSVSDLSLEEENSFLGICSQELLARGTELLKRTRKGALHWKVVSVYINRMGLVMLKTKSRHVAGTITKKKKSVVVEVCRDVPAWPGRHLLEDGGHRRYFGLRTAERRVVEFECRSQREYEMWTKGVARLLSVAAERKRLA

SEQ ID NO: 58270 - protein, 88 aa, Zea Mays
MTYTVWDSKMVHYNQKMGRTLCLWEILCFQTSWLSMTWKIKSSGGLTITVRRALKLRTTRQAQPILSNHMTYPPDGNSTGTSPWFCCW

SEQ ID NO: 58271 - protein, 116 aa, Zea Mays
MVAGFYHEGYEDPLLMLMRRRTVHAGLVVKGEEGALSLTTKERSAHASKGLPVNHCSGFRTPSGINFSETDGIPRESFRVIVNAQELGFESTETPRTDRSVSLFCPGSLAVYIDVC

SEQ ID NO: 58272 - protein, 970 aa, Zea Mays
MLQPREADLPALFLVFIVLPVVAYFLLGRWHDAASKKARVSVLAQRAAEEAYREETMACPDIILPGSSLRTMPYFRPMPALRQEYHECATCHAPAKTRCSRCKAVRYCSGKCQIVHWRQGHKETCQKWLGSGSSSFGGSSTEATEQMPFLTNLNSPLPGGDIHLRDLNFDTLSEPSFPTTDGYNLDTDPFLADRSNMNKSNQGIHMSENGAVGVSFEKNNYNADDEIHSPENLSRNKVSNNYFGSDAISGNGDAIYPAKSNAQQPSSCAPDMRKQPKASITVYQPDIGVYLTSDMVSSCEGSYASASEPLQRSLSSGRTIGKANAVNKRPPYPSSKVVSAQKPQDRVSTSYQNDGHEKNPCNKNDQRSTPKCESSQSTSSNLQKFGASKVEVLKKPSKFLKTSLVGLINDNKRNKVLFPYEDLVKFFQYEARGISPRGLFNCGNSCYANAVLQCLMCTKPLMIYLLLRLHSKDCSSKKWCLMCELEQYASTLRESGGPLSPSRILSNLRNIGCRLGGGTQEDAHEFLRHLVMSMQAACLDGLGGEKHVEPSLQETTLIQQMFGGRLKSKVKCLRCYHESERYENIMDLTLEIHGWVESLQDALTQFTAPEDLDGDNMYKCGSCAAYVKARKQLSVHEVPNILTVVLKRFQSGKYGKINKCVTFPDMLDMVPFVTGSGDNPPLYFLYAVVVHVDTENASFSGHYISYVKDMQGTWLRIDDSEVQVVSVNQVMSEGAYMLFYMRSFPRPPRIYIEKGPTVPSAKRHTSKYSKGSKHEREQTELLLSANDPAYGVYDFRPDGEGYTQDQQAELRSRDFHRADDAFADSVSADFSEATSSEWSLFTSSDESSFTTESTRDSFSVVDYGDNAGLDPISSIFGPSYAPEHHPGPPGSFAACTRLSPSNPQTRYFSESTGFVSDYSSSGIVHRGRDPGRAYTCSAEPLASAAAAHQHQRYALSGRDGLVQTSGFCQM

SEQ ID NO: 58273 - protein, 1144 aa, Zea Mays
MSRSTEGQSLRRVLLFPILLSHGGLSEPLPQFESLKERVKVQKFSLQVTEDPFAIPEGAAGRIRRSIISETGNLQVHYVKVLEKGDTYEIIERSLPKKQIVKKEPFVIVKEESEKTYKLWQYLATKSIPKHHRNFTSLMKKRQVDAKRFSDSCQREVKFKVRRSLKLMRCAAIRTRQLARDMLIFWKRVDKEQYELRKKEEREAAEALKREEELREAKRQQQRLNFLLSQTELYSHFMQNKAGGSAPPDEEDVPDEDEEEDPEEAQLKREALRAAQHAVSQQKMRTNAFDSETVRLRQTSESVLPTDDSSSMDPSKIDLLHPSTMPEKSSVQTPELFKGVLKEYQLKGLQWLVNCYEQGLNGILADEMGLGKTVQAMAFLSHLAEDKNIWGPFLVVAPASVVNNWAEELIRFCPDLKILPYWGPERMILRKNINPKRLYRRDASFHILITNYQILVNEEKLLRRVKWQYMVLDEAQAIKSSSSQRWKTLLSFSCRNRLLLTGTPIQNNMAELWALLHFIMPTLFDSHEQFNEWFSKGIEGHAEHGGALNEHQLSRLHAILKPFMLRRVKIDVIAEMTKKKEEIVPCKLSSRQQIFYQAIKNKISLNELLDGSRGNLNDKKLLSLMNIVMQLRKVCNHPELFERNEGSSYFYFADIPNSLLSPPFGALQDVHYAGKRNPIIFEIPKLVYDGIICNTENSGSICGFQNGYLNRLFNIFLPSNIHRSAIPEVNSSNESVLSSGAFGFTRLSNLCPVEAFFLATSSFFEGLAFSVMRWNRNYTDEIMDAFLDSEDTDIQFSQNDSTRVRAVARLLLSSTKAKPSLLRTKIGTGPSEGPYEALVLSHHDRLASNIRVLRSAYTYIPPARAPPINVSCADRNFAYKFTDEMYDPWVMKLFLGFARTSEFNGPRQPVALHPLIQELNTDLPILEPMLQLPYRIFGSSPPMSNFDPAKMLTDSGKLHTLDMLLRRLRAEGHRVLLFAQMTKMLDILEDYMNFRKFKYFRLDGSSAISDRRDMVRAFQNRNDVFVFLLSTRAGGLGINLTAADTVIFYEIDWNPTQDQQAMDRTHRLGQTKEVTVYRLICKDTIEEKILQRAKQKNAVQELVMKGKHVQDDHLLRQEDVVSLLIDDTQIAHKLKEISMQVNIT

SEQ ID NO: 58274 - protein, 147 aa, Zea Mays
METGGLPMDLTDGIEKLRANMSAKYDRAYNILHSDHSVTPGSPGLSRRSASSSGGSGSAFIQLDPEVQLPSGSGRSKRGQHSSARSLGNLDTVEEDFPLEQETYWKKLNRLKPHMRGAPIQWTRSQKQSSRISNFISIPQVSHNLNP

SEQ ID NO: 58275 - protein, 793 aa, Zea Mays
MSSPLEDVSVGMEEEDQRPLNRALLHRSATTNASQVAMVGSNPCPIESLDYEMIENELFDQNWRTRRKADQVRYVVLKWTFCFAIGILTGIVGFFINLAVENVAGFKHQAVSALMDSASYWTAFWVFAGCNLALLLLASSITAFLSPAAGGSGIPEVKAYLNGVDAPNIFSLRTLAVKVVGNIAAVSSSLHVGKAGPMVHTGACIAAIFGQGGSRKYGLTCRWLRYFKNDRDRRDLVTIGAGAGVAAAFRAPVGGVLFALESLSSWWRSALIWRSFFTTAVVAVVLRLFIELCGTGRCGMFGRGGLIMYDVSTVFDDLMTYHLKDIPTVILIGVTGALLGGLYNFLMIKVLRLYNAINERGGAHKLLLAATVSIVTSCCVFGLPWLAPCRPCPTTGPLSSPDGTCHALNRFRRFHCPKGHYNDLASLFLNINDDAIRNLYSTGTNDVYHPVSMVIFFVASYALGVLSYGVVAPSGLFVPIILTGATYGRLVAMLLGGRSGLDHGLVAILGSASFLGGTLRMTVSVCVIILELTNNLLLLPLVMLVLLISKTVADSFNSSIYDLILRLKGLPHLDGHAEPYMRQLAVGDVVAGPLRSFGGVEKVGNVVHTLRTTGHHAFPVVDEPPFSPAPVLYGLVLRAHLLVLLKKREFLVAPERCPKEYVAERFQAEDFDKRGSGKQDTIADVVLSPEEMEMYVDLHPFTNTSPYTVVETMSLAKALVLFREVGLRHLLVVPKACDRSPVVGILTRHDFMPEHILELHPVLLRSRWKRLRWQRGAMAKYFRSLIVWVANSG

SEQ ID NO: 58276 - protein, 286 aa, Zea Mays
MLPLQRPELFNRGQLMKPCKGILLFGPPGTGKTMLAKAVATEAGANFINISMSSISSKWLGEGEKFVKAVFSLASKIAPSVIFVDEVDGMLGRRENPGEHEAMRKMKNEFMVNWDGLRTKEKERVLVLAATNRPFDLDEAVIRRLPRRLMVNLPDASNRRKILSVILAKEDLADDVDLEAIANLTEGYSGSDLKNLCVTAAHRPIREILEKEKKERASAETENRPLPLSHTSNDVRALRISDFIHAHEQVCASVSSDSSNMNELVQWNDLYGEGGSRKKTTLSYFM

SEQ ID NO: 58277 - protein, 622 aa, Zea Mays
MFLSPVKSSDRKNADSEMGSSKLHGFHLDADYPEGSLGSREAETGEYCKGSSFLTKNEGSGKPLKKGKKSQKRRKKAAHKTGDQFEDDREACSGTDEGHRSIKIKEDSELESLGWPSSTSNKRSRQLFFGESSAQIKDENKDVDSDDRPGMPAAVSVYEQKVNSKSTARKVKRQPEISNSEMVTRKKAKVTKDPHHDGSTTSDVKQQACTCGVKTEKKKRKSSTTKVSAEEGKVSSNIGTTTQGDTTQADLSSKGKSCRKIGIQQALIEECKSTKVANDTGSDKFSHSVNNVIDLKDKLSHCLSSRLLRRWCMFEWFYSAIDYPWFAKSEFVEYLNHVKLGHVPRLTRVEWGVIRSSLGKPRRLSKQFLHEEREKLSQYRDSVRQHYAELRSGVREGLPTDLARPLAVGQRVIACHPRTRELHDGNILTVDNNRCRVQFDRPELGVEFVMDIDCMPLHPMENESLRQKNIVNKYLSEVKLEDQMNDLGSGGAARFASNVNVNCGDAAFQIPSSHPVNSLTKQAKVGTVDSIVQAKATVNEVAIAAQQAMYNQPCSLSQIQEREADIRALAELSRALDKKEALLVELRHMNEEVSRKQKDGETVRVEAFQDAICYGACAAKRF

SEQ ID NO: 58278 - protein, 335 aa, Zea Mays
MATFPVSLCCFCPHPFRKFVEYVVNLKFDEEPDYAKCASLFHSVLSVVGSNPDVRPINTDGAQKLIHQFGQKRGRFFIEEEADEQPKKKIRVGMPATQWISVYNGRVPMKQRYHYNVSDSRVGQHIEKGNADGLFISCITSCSDLWALIMDAGTGFTSQIYELIPHFLHKEWVMDQWERDYYITAVAGANNGSSLVVMSKGTKYTQQSYKVSNSFPYKWINKKWQDGFYVTSMATAGSRWAVVMSHNAGFSNQVVELDFLYPSEGIHKRWDRGYWITAAPATCDQAAFVLSVPRRRLTDETQETLRTINFPSKHVKDKWSKNLYLASVCYGRTIS

SEQ ID NO: 58279 - protein, 66 aa, Zea Mays
MINVQLLHPGRQMAKIMLTYKNELCYQGPSSCNIDRACCAYFLSVLSGELKWCHSLFVRYNYFFFQ

SEQ ID NO: 58280 - protein, 805 aa, Zea Mays
MYSSLSLHTLNAIISRVLFIIMQQLCFSPIKPVTYKLQSAVSCCLTHSVRLIYLSESERRTDICPLVRRRTREQLHCQENLENAETTRSCPLPTRGVAACQRLEAGTCGEDGKPPSTPADRITEISNDVHTPAPTPSSVKSSTDSALGGGSNAEPTWRADDLQPCPHPSLPLPSLQGPSPVRHRIREGRPVSPGPSSFTPPSPLKGAPRSTIPTGDLQQTSSTRARPASMAMRLLSPSTPPPRFPSPGQKAPASISASSSSYFSVRLRRARAAAAAAAGAAAAGGSDRRSGRFEGEAMSGAFDRGLAEIARKVPLFEPTADGELAAAAGERPLPINLELWLYRVKVHTRKFEFPEAEKLLDKCISFWPEDGRPYVALGKLYSKQSRYDKARAVYERGCQATQGENPYIWQCWAVLESKGGNIRRARELFDAATVADAKHIAAWHGWAILEIKQGNIKKARTLFEQASQSNPKSCASWLAWAQVEMRAGNNTMARKLFEKAVQASPKNRFSWHVWALFEANEGNIDRARKLLKIGHAVNPRDPVILQSLALLEYNFSSANVARVLFRKASQIDPRHQPVWIAWGWMEWKERNARTARALYQRALSVNSTNECAARCLQAWGVLEQRAGNYTAARRLLRSSLSINSQSEVTWMTWAALEEEQGDPVRAEEIRNLYFQQRTEVVDDASWVIGFLDIIDPALDSVKRLLNLDQPSRPARQDDVKSTTEPCPPTAKSSETSAGNDARNNGSEAMGTLTSDFDLDAFIKKRLALDPSELDAVLEGSDPRGVVSQRRKQRLPRKPLPLLPVP

SEQ ID NO: 58281 - protein, 358 aa, Zea Mays
MTRTVAHKIMACLPPSEVAPATSLLLADLLPRYVDPSCVRVVQGGIAETTALLELQWDKIFYTGNSRVGRIVMSYAAKHLTPVVLELGGKCPVVVDSDVNLHVAAKRIAAGKWGCNSGQACVSPDYVVTTKSFAPKLLESLKRVLFEFYGEEPLRSPDLSRVVNSNHFNRLMALMDDYSVSGNVAFGGQIDERRLRIAPTLLLDVPLDSAMMKEEIFGPLLPIITVDKIGESFAVINSMPKPLAAYLFSNDGQLKQQFERTVSAGGIMFNDTGIHLTNPNLPFGGVGESGMGAYHGAFSFDAFSHRKAVLDRSFLGEARARYPPYTPAKLAILRGVLNGSPLATVQAAAGCTGGASAD

SEQ ID NO: 58282 - protein, 580 aa, Zea Mays
MAGSIELQLQQLGSSKHASPPPISPAPRTSMAAGEGGGGDIGADSERRLQKAMDKLYHFPKPKSSSTGGSKPSSSTSAPSSGRAVGKAAAEAARRFGVVRGSRLPHQMLAMAAISPPPPCRPWDRADLMRRLGSFKAMTWFAKPKVISPVNCARRGWTNIEPDVITCEACGARLLFSTPSSWTTQQVEKAAAVFSLKLDSGHKLLCPWIDNICDESLALFPPTPPPVLVGNYYELLSSLLRLLALPRISCSSLETMKKRNPQLEQFLSEPFSSSVVLKGGLMLTEDSTIKDLDDAFQDADTYYQALKIISLCGWEPRLLPYAVDCGTEFHSDANSTSKLAQPEQSSSMKRKRSTDEPHLLEGDADDVDTSTIGANHDQPGENSEKSISNLVVSTEQKQDGSHSNAAKDTELDEASNETQPETGSPLRKSITSTYADADQHGLEPRFCSVQGTNEEPSGGVTLTEMHANNSRSTEVSTITESLVNREKEKQGLYDRMNEFDPIKQHRTFCPWTSPDYGEPLPGWRLTLSALLAGDKRSDGDLQVDIQTSLLDEEDDPLTSVRKLFMTPPPKRRRIQQSEKS

SEQ ID NO: 58283 - protein, 121 aa, Zea Mays
MEAQNKFYFLQPEMLMYMISKPYAIRSYLTEGEEKKQLIGMARATSDHAFNATIWDVLVDPSYQGQGLGKALMEKVIRTLLQRDINNITLFADNKVIDFYKNLGFEVDPQGIKGMFWYPRF

SEQ ID NO: 58284 - protein, 695 aa, Zea Mays
MLEPAYEHIVLVQYREVDVVRNYSSQLSNGLPEPLSSLGYPNAICGNQYHSSSSGASECSESHQSYSNLSSVTEVSSYSGNKEYTKNDGGLLSIPEVGHTCLQQNRTDNGNSKNKSGLNIALKKIAEQLSLGEDDDDYIFSNQAHSVGGDNQVKHIQQEGTQKGLSRNIAPSWEDVLQSSSGLPISSIYQQSDVEYQKNSEYHPPERLDSSDLRIQLAAAKKFLLGPEATVDSPSLNSVLRNRANCVTDTISAYDSRFGSSLNPDWQTKTALTFQSNSQGSEITELFDHGHFEHYSREDTTFSLGQTNKFNIREISPEWAFSYEITKVIITGDFLCNPSNLGWAVMFGDSEVPAKVVQPGVLLCHTPLHCSGNLRICITSGNREVCSEFKDFEFRSKPSSSFTDIAPSSRHLKSSEELLILAKFARMLLSGNGNPEVPDGDPQSGQCPKLKMDEGLWDRLIEELKVGCESPLSSVDWILEELLKSKLQKWLSVKLRGFNGTDSISKHDQGIIHLISALGYEWALSSVLSVGVGLNFRDSNGWTALHWAAYFGSCSFRRNTKVAKVATFLNMRRNAVKIQAHVRGHQVRKKYRTIVSTVSVLEKVILRWRRKGHGLRGFRAEQQSMVEAIEEDDEEDDDFDDDEAVKIFRRQKVDQAVKEAVSRVLSMVDSTEARMQYRRMLEEFRQATNWKDQMK

SEQ ID NO: 58285 - protein, 302 aa, Zea Mays
MAGAGGRRPRGRRRGGTAPSPTSTSSSTSPSPAARSSSTRYITSVIPIGGMFAMTLWLGNSAYLYISVAFAQMLKAIMPVAVFLLGAAFGLEEMSYKMLSIMSVISVGVIVASVGEITISWVGVVYQMGGVVAEALRLIFIEIFLKKKGVKLNLISMMYYVSPCSAVCLFIPWLFLEKPKMDDSISWNFPPFTLFLNCLCTFVLNMSVFLVISRTSALTARVTGVVRDWSVVLLSAAIFADTQLTFINIIGYAIAIAGVVAYNNHKLKVKPQANPQQGDENKVISGSTQDVVLSVSSAKETS

SEQ ID NO: 58286 - protein, 963 aa, Zea Mays
MFHAKQDIIVSNSEDKSIRIWDATKRTGIQTFRREHDRFWILAAHPEMNLLAAGHDSGMIVFKLERERPAFCVSGDTVFYVKDRFLRFFEYSTQKEVQVAPIRRPGSVSLNQSPRMLSYSPTENAVLICSDADGGSYELYIVPKDSAGRSDYLQEAKKGAGSSAVFVARNRFAVLEKSSNQVLVKNLKNEIVKKSPLPIATDAIYYAGTGNLLCKAEDRVAIFDLQQRLVLGELQTPAIKYVVWSSDMESVALLSKHAVVIATKKLVHRCTLHETIRVKSGAWDENGVFIYTTLNHMKYCLPNGDSGIIKTIDVPIYITRVVGNNIFCLDRDGKNKLVAVDASEYIFKLALLRKRYDHVMSMIKNSQLCGQAVISYLQQKGFPEVALHFVKDEKTRFNLALESGNIQIAVASAKEIDDKDHWYKLGIEALRQGNVGIVEYAYQRTKNFERLAFLYLITGYLDKVGFMCKIAGQNNNLMGQFHNALYLGDAKKRVEILENAGQLPLAYVTAATHGLTEFAERIAAELGENVPSLPEGKPKSLLIPPAPLTACGDWPLLRVMRGIFEGGLDATGRADLEEDDEAAGADWGDEELDIVDASEVVANGDGFDVEEGEPNEEGGEEGGWDLEDLELPPETETPKAVGNARSALFVAPTPGIPVSQIWTQRSSLAGEQAAAGNFDTAMRLLSRQLGIKNFVPLMPLFLDLHMGSHTYLRGLAAAPVISVAVEKGWNESASPNVRGPPALVFSFSRMEDRLKAAYKATTEGKFPEALRQFLSILHTIPVIVVDSRREVDEVKELIEIVREYVLGLRMELKRKELRDDVTRQQELAAYFTNCKLQRVHMRLVLASAMALCFKQKNYATAAHFARMLLENSPQEAQAKKARQVLQACHDKDDSHQLNYDFRNPFVVCGATYVPIYRGQKDVSCPYCGSRFVPSIEGQLCTICELAAVGADASGLLCSPTQSR

SEQ ID NO: 58287 - protein, 240 aa, Zea Mays
MFGSTEPQLLYVNGESKIVLIPIVVAVDCPFPPSDKIGINSVQRENEEIVPMKAMKMAWVPYVPLEDRLSRIDIFKTKIFTLGCTQRRSALKHLKIERVKKFDYCMPYYMPLQPLEDEENTTINFLYPLEPPIVDEFDWEMDDYEDFADQKVQEGSLPEGEKEKFKEFLKEKVRERKRELRQAKEARKKAIDDMDPAMKEAFENIKFYKFYPVKTPDTPDVNNVKARYINRYYRNAHYLK

SEQ ID NO: 58288 - protein, 583 aa, Zea Mays
MEPKGELAQKPIEEAINSLEIDASTKASNVNLPAKKDASSSDAVSCISSGDAASTAKESEMNRETSFGDQGMYYYGYYYPGSYGGWDENGYFVGYNGVEVHPAVVQTDNGSYLCHLPGYENGYASYSQVVPGGIASVDGQYVSKEPYYSTALPIQDPRTPGIFAQPIAYRTELASAYSWDPSFVLLDGVQGHPVGVHQTNYAARPKYSFNKHVIPSSKATRSAKSAADTVKGSSSALETVTNAVNSSPPSKSANKTPGASITKGYLPYSKSVMHTNNQEKNSVYQSKGINVKESGRSWNSREKLGRSKLNGQGDSESNENNHTDNLKHSLSHRSDVVGLSSAGDANASIPSPVAISKNACNLSDFVTKVAQERIAEKGTKCPVFLFFSVNASGQFCGVAEMVGPVDFNRNMNFWQQDKWNGFFSVKWHIIKDVPNPQFRHIILENNENKPVTNSRDTQEVNFSQGTEMLNIFKNFTCKTSILDDFDFYENRQKVMQDRRGKLLTTSFDHPLPKAEKSPEIKSQTQLISGPEVGRAKSDEGQGNNVGMVLDTTKKNEEQSSNVPEILDAACSNKEQPNKIAIEG

SEQ ID NO: 58289 - protein, 329 aa, Zea Mays
MSHGNGMLNSVKVERWPAAVAANGQPRPMDVLHDGSSPPFLTKTYDMVDDPTTNAVVSWSAANNSFVVWDPHIFGTVLLPRYFKHNNFSSFVRQLNTYGFRKVDPDRWEFANEEFLRGHFGYEEEIDQLKRDKQLLMAEVVKLRQEHQNTRSDLQAMEEKLQDTEQKQQQMMAFMARVMQNPDFMRQLISQREMRKELEDAISKKRRRRIDQGHEAGSMGTGSSLEQGPQGVFEPQEPVESLANGVPSDLESSSVEAKGLEVRQGVSSGGSEHLNGRPSGELNDDFWEDLLHEGGLGADAGNAVGQDDMNMDMDPDVSLPQLKQHGPRH

SEQ ID NO: 58290 - protein, 1599 aa, Zea Mays
MVRDHAALRRTPAKASASEAGNDENSPGVVPDVAAVGVAVAATDPGRPPLLAIQPPASGLKRKPESPAPTPSKLPFRTPEKAATRSRFGWVPPRADEAPPRVGVGATPHCAMTTPRAHRGKAVTVAPAASEGGSTHSTPTKSVTKPAHSIGASGSRPPMSGGGPRGAGFGLGFTMAGRGPPTSLGPPTVVNSVEVPHFELREDPSFWMDNNVQVVIRVRPLNNNEKNLHSYYRCLKQESAQTITWIGQPETRFTFDHVACEAVDQEVLFRVAGLPMVENCMAGYNSCVFAYGQTGSGKTYTMLGEISDLEVRPSPDRGMTPRIFEFLFARIKAEEESRRDEKLKYSCKCSFLEIYNEQITDLLDPSATNLPLREDIRNGVYVENLTEFEVGCASDIIKLLMQGSANRRVAATNMNRESSRSHSVFTCIIESRWEKDSASNLRFARLNLVDLAGSERQRTSGAEGERLKEAVNINKSLSTLGLVIMSLVDLAHGKQRHIPYRDSRLTFLLQDSLGGNSKTMIIANVSPSVCSANETLSTLKFAQRARLIQNNAVVNEDASGDVLALQHQIRLLKEELAVLKRQHVTRSLSFSADVFGGDVDDGSENMSVDDKNDNKAHNGHFLKDIRFSNKQVRSLEEALAGALRRESTAENTIKELELQIEQLNELVRQREDDTRSAKMMLKFRDDKIHRMEVLVNSKLPAQSYLLEENKTLSQEVELLRERVDKNPEVTRFALENIRLSSQLKRSQLFFNEGERELLLNEISELRNQVSQILEQRTETEQQNTFSDKTKLKRTSQEVETCRSNRQVCLESNIALTREIADLVEEKTAHAEAEEKPAGLGDKLQEANIHILQSCKHCEAMERELNESRSLIEALESQQIILINEIAELKKGCVEISRLNSELDLHHRQDYLTKEEPKAELLKCFGKEDSPLQRKFKRMQASLEKARNLNTRYQIDQASHCFAEKEMDEVRKQVEVETAKVIQCLEEDLISVQQQLNASNKNDLLAKQSINELQLEIKQLNDKLLEVLKENEIFSSVTKEKEKEIELLSNDWNRLAADIGKCLVDGNAALGEASDQVAFISKSLSQRKWIEKQVRKLCSGISERDELLEELQNRLKEADDIRRDLDLKLRSLRGAMQVVNEEHQQEKCDQEKEIYFLRSQISEQGHVNNHQLEEIHRINLLLDESIETFVQKEVLQQTCVSLQKAMGEEIHRLESQLDQSKIHFAHLLNQTQEKEQLIGKLKNEELNVLLRLMSEVLKTNSTVRELRIGFNTLQSSLYMSPEVIACQNSDLNLEDRVDLRANEAFQSVERQNAEVLCQHSKEMELAVQGMQIMQSQMTKLLQEKENAKEFNLESQRTIKDLSDEVLRLNSHIIEKERSYEAKLEELNTKIHEHDASFISWNEENEALRIEVSEAKLVVAQKSFESATLTAKFEEAQATIRDADSTVKALVEANEKAKFEADKYEEKEALFSAETESMLSEISSLKMLLDMKEQSYKLMEKQFQSGLLEANELALELEDGIRLTQNLLQQKLEFVSSDVEWMKERVQQFAGLTRKWLEENWLEIIGKDCAISVLHLCHMEILLERITGLNAENGFPSARAV

SEQ ID NO: 58291 - protein, 920 aa, Zea Mays
MATAVSKSAVKSHPRLPTTAQPPPPNPGSNAASAGGGAAPPPPPSPAAGATPSKNAAMAELKSRVLAALAKLSDRDTHHIAVEELDRIIRAPPSTDAVPMLLNALAPDSPGLASPARRECLRLLATLCTSHPDAAASHLHKVLAHLARRLKDPASDTSVRDTCRDVAGQLAAVYLRPLSASGVCEAGNATVTLFVKPLFEVMGEQSKSVQGGAAACLAKAVEGAGPGPGAIGMFGKLGPRICKLLGGQGVQAKAGLLGIMGSLAQVGAISSQNMQQTLQSIRDCLENSDWATRKAAADTLSVFATHSVHLIGDGTAPTIAALEACRFDKVRPVRDSMIDAVQLWKKLTGEDANDGRNKDLADGEGKLDSRRSIQRGGKSESFDDSSPDSPSNNVKGSSIAEKAAFLLKKRPTLTDRELNPEFFQKLETRKTDDLAVEVVVPHKTLQSHLRGEDETEEDDDPVGPADSNGSAEDEANLTQMRASFNFQNIRDKWAGQRGNRNKITKARTTDVEDRGEPSTKDSTAAAMNISGEGPFINNKTNWLAIQRQLSHLERQQTSLMNMLQDFMGGSHDSMVTLENRVRGLERVVEEMAREISLSSGRRGGGPALGFDSSPGRSSKHNGFHEYSNSKYGRSGDGRMGFAERYFSADAMASGTKNQSWRPDSEPWDSYAYSGSRSGMNVRRGLDSVSSDNRMARNERSNDQVGPRRGWDKGQGPFRFGEGPSARSAWRASKDEATLEAIRVAGEDNGNSRAAARVAIPELDGEALNDDNQGDERGPLWEAWTRAMDAVHLEDMDSAYAELLSTGDAELLVKLMEQTGPVVDQLSNEVANEVLHAVGQFLMEESLYDVALNWLQQLTDLVMENGSDYLGIPLDAKQDVLLGLHEATAIDLPDDWEGATPLQIMKQLASSWHIDLQQLIN

SEQ ID NO: 58292 - protein, 105 aa, Zea Mays
MVAGGAVKGDDDVQLPCGRGEDDVVKTASLYTVSSKCRCPGHGEQGDPWASKVSSTEGKGQQNDSWSSKMTSRGAEDTRGGWDSKVKGSSCNDGGKWENAGSVEC

SEQ ID NO: 58293 - protein, 72 aa, Zea Mays
MVETRTVSDRLRAPQLSFLINENILGKMLSQLFVFHKSKNFTSDYEIRMPPTVPINHYSDPEETKTNRTGIL

SEQ ID NO: 58294 - protein, 478 aa, Zea Mays
MASLIPPCLSVPTAPGRARLAAPGAPRRRRMAVVRAKIREIFMPALSSTMMEGKIVSWTAAEGDRVGKGDPVVVVESDKADMDVETFHDGIVAVVLVPAGGTAPVGAPIALLAESEEEVALARARAQALSQGQSQAPSPPHAAAALGPPPPAPVAPPATKGIATPYAKKLAKQHRVDIAGVVGTGPHGRVTAADVEAAAGIKHKRPPPPPPPASVDAAPLVPASAVLPPVPGGTVVPFTTMQAAVSKNMVESLRVPTFRVSYSMITDKLDALYEKVKSKGVTKTVLLVKAAAVALTQHPVVNASCRDGKSFSYNNDVNIGVAVALEGGLLTPVLEDADKMDIYLLARKWRVLLKKARMKQLQPNEYNSGTFTLSNLGMFGVDKFDAILPAGQGAIMAVGASRPTVVADKDGFFSIKSEMLVNVTADHRIIYGADLAAFLQTFAKIVEDPECLTLSFFPVLSKVKANEHSLSGRIRWTF

SEQ ID NO: 58295 - protein, 217 aa, Zea Mays
MVSGFGCSYAVTGRKRVKLLAAESSDGEPLGCCVPICDDSLGDLIEWCSEWHHMPSDCGDQTQHTGVFAAMQEYTCSTGNNGVIYPQSGISHSSGQNGAQGTYLQHQHFEGCMYMSGNGQMCGPYLPEQLYEGLSSGFLPQSLAIYAVFGGKTVDPVQLIFLKQFLSQWNVGAVASTPNVSTETERVTSHAKMVFPDNHAGCLRMQKVADKGHILLL

SEQ ID NO: 58296 - protein, 131 aa, Zea Mays
MSSGGVKDFYRQKKKGGVAKTASSSKNKTRHYTGGASVGASDAAQTSALVSHGSWDLKDDFGDEEEQLRQFDVDMKFGPCIGVTRLQRWERASAMGLQPPAHLRDLLLHAASTKNRGGGSPSVECLWEASC

SEQ ID NO: 58297 - protein, 75 aa, Zea Mays
MGREMVIWQLHLLAQMLCQLLIWRKSTILHATSLFKMKGPNEILTMKILSVLSSPGCLTNFVSVIFMCNPQFFNH

SEQ ID NO: 58298 - protein, 68 aa, Zea Mays
MFFVLCSVLRTYSDVLPSSEVGGLSCVYQMCWALDARRSSAHTKKKNTEAHLHVFLRAKIRSWQQREV

SEQ ID NO: 58299 - protein, 341 aa, Zea Mays
MPLGRGHAHFPGSHPVSLNSENLQLLRQRYYYATWKADGTRYMMLIMRHGCFLIDRNFSFRRVQMRFPHRSLQGLQDMTLIDGEMIIDTVPDSGLKRRYLAYDLMALGSVSKTRLPFSERWKMLEDEIIQPRNNEKGLERGAKSNPLYKYDMELFSVRRKAFWVLLTVKKVLKVFIPSLCHDADGLIFQGWDDPYVTRTHEGLLKWKYPEMNSVDFLFELTNDNRQLVFLYERGKKKLMDGARISFTDDVDPSSVAGRIVECSWNKEEQCWACMRIRSDKSTPNDINTYRKVMRSITDNITEEKLLEETDEITLLPMYADRMNVRVHTKMAQHRRRLPPQC

SEQ ID NO: 58300 - protein, 1282 aa, Zea Mays
MEPSPSSRRRSRAAAADKGKDPDPASSDHPSPPAPDDDADVTFPQPFTSASTALQGLLRRLGAGLDDLLPSSSSAPSSATSGHLKRILAGLQAHGDESRQLQSLMQLCEMLSIGTEDSLAAFPVDAFVPILVGMLGREDEPATAGASPDVMLLAARALSNLVDVLPSSCSAVVHYGAIQCFCARLLTIEYMDLAEQSLQALKKISLEHPTACLRAGALMAVLSYLDFFSTGVQRVALSTAANICRKLPSDASEFVMEAVPLLTNLLNHHDSKVLEHASVCLTRIAEAFAYYPDKLDELCNHGLVAQAASLIAVGNSSGQTSLSTSTYTGLIRLLSICASGSLLAVKTLLLLGISGTLKDILSGSALISGTSVSPAVTRPADQMFEIVSLADDLLPHIPARIIKLPTYYHTYKGSSTKKSASIKQEGGGSTGNERSGRERLLREQPELLQQFGMDLLPTMTQDEELDTSPVEIDDALMIDDDDISDDDDDDDDDHEVLQEGSLPICSQDGVHDVKLGDADESNIGSATFSHAQPSSGSGARNTSSRGPDSTEFRSMGTFGSRGAMSFVAATMAGLASVGGRSVRGVRDRRGLSLGGSMNDHNKLIFTAGGKQLNKHLTVYQAIQRQLMLDEDDEERFNGSDIPNDGNRFWGDVFTITYQKADNQVEKGCQGTSTSLNIKSDSYRSISEAQGVSLLDSILQGELPCDLERTNSTYNILALLRILEGLNQLSPRLRVQGASDDFAEGKINTLDELYRTGAKVPSEVFVNSKLTPKLARQMQDVLALCSGSLPSWCYQMTKACPFLFPFETRRQYFYSTAFGLSRALNRLQQQQSDNHSSGGEREVRFGRLQRQKVRVSRNRILDSAAKVMEMFSSQRAVLEVEYFGEVGTGLGPTLEFYTLLSHELQCAQLGLWRATSSYDSGLHTDMKDVIRLDPEDGSSGKELNTDLPGDGMYLIQAPLGLFPRPWPPKVDTSEGSRFFKVLEYFRLIGQVIAKVLQDGRLLDLPLSTAFYKLILGQELDLFDIVSFDSEFGKTLQELQVLVERKQFLESTSGKNQLQVADLCFHGASIEDLCLDFTLPGYPDYVLKEGEGGTIVNIYNLEEYITLVVDATVKSGIKRQVEAFRSGFNQVFDMSSLHIFSPQELDYLICGRQEIWESESLVDNIKFDHGYTAKSPAIVNLLEILSEFTPEQQHAFCQFVTGAPRLPHGGLAALSPKLTIVRKHPSSAVNTSNSTGAVESADDDLPSVMTCANYLKLPPYSTKEIMRKKLLYAILEGRGSFDLS

SEQ ID NO: 58301 - protein, 77 aa, Zea Mays
MDPKHSAEVSKHLDKQNQALMETYGAMSHELHKLQVEEETIMRKLYELMSAEGLLPKKEKQHGENIVASTESKEQEP

SEQ ID NO: 58302 - protein, 1406 aa, Zea Mays
MHLDGVDDELGGGSCAPSPARFELQEDPSFWKDNNVQVAIRIRPLSGSEVSMQGQKRCVRQDSSQSLTWIGHPESRFTFDLVADEHVTQEGMFNVAGVPMVENCIAGYNSCMFAYGQTGSGKTHTMLGDIENGTRRNNVNCGITPRVFEHLFVRIQKEKELRRDEKLMFTCKCSFLEIYNEQILDLLNPNSVNLQIREDARKGIHVENLTEHEISNAREALQQLIEGAANRKVAATNMNRASSRSHSVFTCLIESKWESQGIKHHRFSRLNLVDLAGSERQKSSGAEGERLKEATNINKSLSTLGLVITNLIAVSNKKSQHVPYRDSKLTFLLQDSLGGNSKTTIIANISPSSCCAAETLSTLKFAQRAKYIRNNAIINEDASGDVLSMRLQIQNLKKVISRLQGQLGSDKTESIASHGFVCESPSTFKWDQGHGMFTPLTFDKRATQRNDCDAALVAAFRREQEKEAQLKAVIDAKQTAEQLVAQKTEEVRSFKMRLKFREERIKRLEQVASGKLSAEAHLLQEKENLVKELEVLRGQLDRNPEITKFAMENLQLKEELRRLQSFVDEGEREMMHEQIIVLQDKLLEALDWKLMNEKEPINKGLSLFGESAGDEENEFLRLQAIQNEREIESLRKKMTFCLEAKDNLERHVNELTTELELTKKHNNTYKEFKAAQLQEQGEADLHNLSDAQMELKTLVDAIASASQREAEAHETAIGLAKENEELRLQLKVLIEDNKRLVELYEHTVVNVEANQDGNPVDDLLNAQPAATSDFHAHNSSSVAQESKIVDEKCTNEDNFSRVTSVELRLQLEEMHEENDRLMGLYEKAMQERDEFKRKILEQSDSEAVKHIQLDEKDVEMSEAAENPEVKHIHDSTIAALKEVLQIVRSKLELVQDKVVSAQDAVKYFKALEIASGKAEELSARIELQRLGAQRGQEEITFLKSVLSESQKKKNAFEGKYFLPAASCWNLVLKTKSLAESKFDASFGSMNQKKEQLNHLQTRKIELSAARTRARESETELKSKIDGLKAKLRAHEAQRKEEEKVLFAIDNLDTSTTLMHKPKNYGKATDLLKSEEDRMKLLCELQKAREQRSMVHKEIRSMNECDYIDREIGVLEAEIEDSCISILETDIEKFVRDNTLAEIWEGSAKDLEALLVDYQDCVFQVNLKEEEIKVCSESLQYQARDMDKLQSKLNQAIRELGELLQDRRSLTACSLDEPTLPVGEKVCQPAATCAGSAKGSRKESAAGSRSGRGAGRMREHWHGDGDGDGEDEHEPQPGCGEGAGQAAANCAAVCCCCPLALLDVLLLVTVRLPAGVMRRVRRRRRRRRGHGGAGANRKRPAPASPSGSSGKAMIGAATLDIDEEARGEVESAAAAELEREIMSSHFYGAGFWRSVSSNSSSSSRRYQ

SEQ ID NO: 58303 - protein, 362 aa, Zea Mays
MKALILVGGFGTRLRPLTLSFPKPLVDFANKPMILHQIEALKEVGVTEVVLAINYRPEVMINFLKDFEDKLGITITCSQETEPLGTAGPLALARDKLADGSGEPFFVLNSDVISEYPFAELIKFHKSHGGEATIMVTKVDEPSKYGVVVMEEATGRVERFVEKPKIFVGNKINAGIYLLNPSVLDRIELRPTSIEKEVFPQIAADQQLYAMVLPGFWMDVGQPRDYITGLRLYLDSLRKKSAARLAAGAHVVGNVLVHESAKIGEGCLIGPDVAIGPGCVVEDGVRLSRCTVMRGVRIKKHACISNSIIGWHSTVGQWARIENMTILGEDVHVCDEVYSNGGVVLPHKEIKSSILKPEIVIE

SEQ ID NO: 58304 - protein, 235 aa, Zea Mays
MTSRAAAEAALLLPLRLHSAPLRLRFFCTSASRLRWACSAAALLAVVSLVTAICAMPDAGAGTNVEADAGALRLEIEALRLKVARLESLLEANSKALDIKASILEEDNKLNEAMEREIQLLTNGPDRTKNSQSKSYSAGNIKSMEDEVRQLQHEIIKINSNSYTVESLAHDTEKRVEALSLEVKKIEDMTAEQWIQIRQLEQAFVLTKMMTSKVHERSRPSDTVYKWPGKEIIVK

SEQ ID NO: 58305 - protein, 107 aa, Zea Mays
MPTAANPAAALPLTLDLEDFKGDFSFDALFGGLVDELLPEYRGEDDAAPAPPPPPPVLGAAPPVFPAVDELLGLFKHSCKELVDLRRQIDKRLQNLKKETSHSTLCL

SEQ ID NO: 58306 - protein, 173 aa, Zea Mays
MRSNGQPVYNFCVTVDDATMQISHVIRAEEHLPNTLRQALIYKALGFAMPSFAHVSLILAPDRSKLSKRHGATSVGQYKNMGYLPQAMVNYLALLGWGDGTENEFFTIDDLVQKFTINRVNKSGAVFDATKLKWMNGQHLRSFPHDELIKAFEDRWTDTGILQESESGFAKLI

SEQ ID NO: 58307 - protein, 65 aa, Zea Mays
MLPLKNLDPPVPNMIIWNCVHRQTSGNVNVTVYTHQSEVSLGPRITIVVYTTELLNNYNHRYIYN

SEQ ID NO: 58308 - protein, 1059 aa, Zea Mays
MDIGGSGGIILSPGSEDDKFARRRSRRVSFADTTAVHVFDRDEDFETPPEEREPDSTPAPPSPRRSSVGREVEDDTEEDFNRPPVIFLHDVDSSYPDSAAESIASADDENFFGPVSASFIQTGRPSDSGMSEDDNHDITMDSRTFSLHFRNIAPPDDCTAYSAGSLMTPNTASEGPLKELTASNPARASINGRDTLTDMSLLSGNPRTYGYDKLSPTLNSMMKKIKGSKQTNSPKLGISDVTSDCVLTLSTSEEESREENLCIDNGVSSDELVMVNTIAEHISMRNPVSTSTDLIQDDNEMIIDVQENSKNCNHDHMDDDPGANNTAEPPAKISPAYKSFMINGDVQSHLVDQSSSKDRPSGSNCTASVSSMCNVDMETHLLDQLPGKDNTYAAQSSSEATAILLMDAEQLRQKNEVMDTETVLHTPRTAGLQLQVPRGSISSLRSKRHKLFTNTVSNSKVARQEGCSSGTEFVHHDKRLSSLKHQELAAASQLQLVEKNELGHRASDMFSNTEDHDSTLSVSSHSVPKLKKTNESFVLGTPRRHGLNESTKVLDTLCHAFTLDSQPSRECNSHVDLNGVGRKRTAEENGYAVQECPEKTTKTARSPRKSRKEIPCVSQPSMIEEKQNGAHDNGKSVDIDWSKVVCTITNATEQVLPASISKYNLQQLDMLSDRLDEIHMARKYKRLSTAVRIKAFCGDKQKRLEEARFLHDKLFYEKAKLQINNMKLVKLQKKAQLCQDGIQECCFLKSKILGAGHMEDSSLPAATTVSAGDRQEELDIISEKRLELKIIQRKVEKLRSSLECFHNIEGGIGSDSVVRYAEEQLMMRNQHRIIHWQAGLCKLNDIVKRGNKCDIILNYHNLLFQSDTSSIFVNNSLNGNQIGKTFPNLDASLAFNFVFEAEENQRVSDLQSLQKKTMETSLLLGNLIDVLEEIKLSKLELVNLTSAAFVLESQTRKLGLHLSFMSFKSGKKIAFIIDMTDLNRSVYPSEPSELIKVFEAHTTLAQPSIDETMASIRNLQSGRTAILRLCRMVSRLIHGYNDDLITGVQAVGSKHHPDM

SEQ ID NO: 58309 - protein, 488 aa, Zea Mays
MGNCCRSPAAVAREDVSSSHFPASNAKKKPHQARNGGGAGQKRLSVLGDEGCEVVGIDDKYVLDRELGRGEFGVTYLCMDRGTKELLACKSISKRKLRTAVDVEDVRREVAIMRHLPKSPSVVSLREACEDDGAVHLVMELCEGGELFDRIVARGHYTERAAASVTRTILEVVQLCHRHGVIHRDLKPENFLFANKKENSPLKAIDFGLSIFFKPETEQGVAQAILRGNIDFKREPWPNVSENAKDLVRHMLEPDPKLRLTAKQVLEHHWLQNAKKAPNVPLGDIVKSRLKQFSRMNRFKRRALRVIADHLSAEEVEDIKDMFKTMDTDNDGIVSYEELKTGIAKLGSHLAESEVQMLIEAVDTNGRGALDYGEFLAVSLHLQRMANDEHLRRAFLFFDKDGNGFIEPEELREALVDDGAADSMEEVVNDILQEVDTDKDGKISYEEFVAMMKTGTDWRKASRHYSRGRFNSLSMKLIKDGSVKLGVE

SEQ ID NO: 58310 - protein, 469 aa, Zea Mays
MDVCPGEPTSSNDIPDAVTVPTSNGNEMHGAGGQSNSRLQGSSSTSNLERFSARDDLQVSSLSRTDPIPLTAGPSGSDLHRAMPLNMLLTGGLDVQMFLRNVGSGQQDHSLFGDSRNWEVPFLQGFLMAPNHAGLHPALVNNSVLEDMSIAGTAGTNNLKSPHMRNFGCPGASSSIPLTTGSSRGPNRRYASRSVPGVGNLLLGPQIDEAEAHAVSLGAGSEITASMLAPGTELPCTVKLRIWRHGTNEPCVPLEPEACCLTISHAVLCSEMGAHFSPCGRFLVACVACLLPQTEDDRGSQLPVSYEGAGSSPTRHPLPSHRVIYELRVYSLEAETFGDILASRAIRAAHCLTSIQFSPTSEHILLAYGRRHSSLLRSIVVEGENGVPVYTILEVYRVSDMELVRVLPSAEDEVNVACFHPSPGGGLVYGTKEGKLRILQHNGADMTNMGVGCFIEENMVEIQRYALEC

SEQ ID NO: 58311 - protein, 287 aa, Zea Mays
MMLKQENKSAMEAFREVLEKELSGVNLRSDYEDGYEEEDVNSKGGDNKGTSKKTSSRKARKQEGLKQQYNGEEDQNGGSNATTGGARKKKGGHVRQSSATHDAIDKNYSGSSAEGLRNKRQKSAAQSASVGRREGLRQRSDAKQHPDAAEGSTEPLADVPGSDGAAQGSMQHGTSAPHTEIKAMVRNILFKDIVDKEHDAEMAYVEEVINGICNATDSMVGGGGGDASAKGGRGSKQSGSGVEGESSNATERRRDEATENALAVKGNTPFDEISSEQGNNGDDAGAA

SEQ ID NO: 58312 - protein, 59 aa, Zea Mays
MSEIQESINEFRNRHLSELTELCATSGNSLGYGFSRVMSKSKSISSDDESETVDGALAI

SEQ ID NO: 58313 - protein, 237 aa, Zea Mays
MNKDKAPMPGDGGPSDGLPPQSTRRAGAPPSSSTPPLECDISRMPDFPTRSTGHRRAHSEILGLPDDLDLSAPGGGEGPSLSDENDEELFSMFLDVDKLNSSCGASSEAEAESSSAAGGGGEGAELADAPRPRHQHSQSMDGSMSIKAEQLVGAPGMEGMSSAEAKKAVSAAKLAELALVDPKRAKRIWANRQSAARSKERKMQYIGELELKVQTLQTEATTLSAQLALLQVRTISL

SEQ ID NO: 58314 - protein, 126 aa, Zea Mays
MQPRAWPLARSSTWLPTPAHAHVVLTSAATARLAAAQKPSIPFVYTSLHCILPRPRRNHHALASSEQPQEHRRVRASSSPSSSRHFGAPPDSTRSPCRVADVHGAEFSVAVHVPSSTASLCVSVSR

SEQ ID NO: 58315 - protein, 606 aa, Zea Mays
MFGSTNPFGQSSTSPFGQTSFGTPQGFGQSSTAANNPFAPKPFGSPTTAFGAQTGSSLFATTSTGAFGQQQSTPAFGTTSTGAFGQQQSTPTFGTTSSSQFGSSTPAFGASPTPAFGATSSGSLFGQKPSFGGFGSSSSQSSPFGNTFQQTQPTFGSSTFGSSTPPAFGATAPAFGTTTPAFGTTTAPAFGATTSPAFGSTSTSLFGASSAPMFGSSAFGTSATGFGTSGTTAFGVSSTTPGFGSSSTPSFGTSASAFSFGSSPSFGQTAVSSGSTPFGTTPSPFGAPAPAFGSQTAAPTFGQPQFANQAGGTRIKPYSQTPDVDSATSGTQPAAKLDSISAMPEYKEKSHEELRWEDYQRGDKGGPNTSGTQTLAPSFPSPIQHNTFASTSNPFSTNPFSTNNPFAPKPTTTTSSPFNTSFNNASVASSSLFTSSPGTTMFGQPGVSTLPAPASNSPSLFGNINPAPATSSIFATSVTNNPSPFGTGTSLANTQSAPLFSSAFAQPTSSTPAFSSGSLFGSTNPGSLFTSSGPSLFSTPTFQPSAPAQSSNMFSFQPPIQPAASTGGLPFFPNTNQALTGQPLRRSLFQVDHCPWRFLGICHREG

SEQ ID NO: 58316 - protein, 63 aa, Zea Mays
MLPYASSASTCLHKAPICLISSLLGSLWVGILWAVLRIPRDFPHVHGLQSFSSLPLSVYGLAG

SEQ ID NO: 58317 - protein, 102 aa, Zea Mays
MCSLFVLVCTLRGYIGHVFLPLFWLKKVASFGNLFPSASVVAYDFCIVVLPCWRSVSVVNHALEFDCTTTSARLVGGGDGSSNAGGHPLNRGAVFVSSSVHL

SEQ ID NO: 58318 - protein, 538 aa, Zea Mays
MLKNGKSKDHASEELHVFLGDDTAVFISWLWGHLSSNMHLYVQPQERTREVKDDEAPKEVSGREKSSDVLPRSKHQTHSGHTIESSEATSRRRSNREWKGIGRKGNEKFPLRNVLTDILHGEDKRSQKSNEVRPPPSKQQNDRKRERDDETHQTKKDSSSRSMLGDGASRRLLQFAVRDAVKAVQPTSTSAEPASKRLCSVVATTSTEHMRDRRSERSQDYLNDRRSERSQDNLSDRRSERTRPMLQVHGAALALRAAAEAAADSAKVRSTGSVFKRLGQGNVVKQPSRSREEKRDYEDFEPVTIADEHDSDQYVNNEESEEESGELTMADRVAGSGMYVDSSSEDDMDRDEGITRYQTSLSHDDTFSPFAEKKTVSAPCSVELETNAIRPSSVNDEEQPVPSTPTASKAVAISVDVNMVEPPSYATPKDVHVVEKPYVAPMNSNAASIATNAKELGHAEVQKDSQRSAPSVPVSYSTAHPMEDADSRTLYVNNVHFAATKDSLSRHFNKFGAVLKVVIVTNAATGQPTGFNEKNHII

SEQ ID NO: 58319 - protein, 120 aa, Zea Mays
MDALDLPPPPLPITAPPAPAAHLQRAPSPTVDLAHTPADLALLPSTARWRGGQRRRRRVEVGHEGAEAVGAVVAYARTTPLPQFKPRSATTHARTTPSPFVFHSQLEVHAAGQSVLLEVR

SEQ ID NO: 58320 - protein, 1627 aa, Zea Mays
MSKTRNGSAFSQDEINSHREHFRNELTPDSVASKKPKVRKKEINNSVSTSPHSIPNNQEVIATFCEAVEDFCGKAEIPDDGDGGDWLSIPLDDVKVLVNEITSVRSKRILHEVPMDTVTRLLDVIDRQIRCSQGLSIDVKENSDAFDAEPLVFSALESSHAALAIMTHHDMPKQLYREELIERIIDFSRHQITDCMAASNPTFRALYKPAGNVANDGDDDEGDLENGQVSKRRRTATNLSMRKSSNRVSASVYSAVQKLCLILGFLKELLTTVRLSDSCILQLAKTCFTTFLVDNMQLLQLKAIGVICTVFSSYTQHRSYLVDETLHLLRKLQFSKNAVRTYHLADEDQKQIQMITALLVHLVQFSAIVPDSLKGTVDWTTIVDASSDADYYPIQCHEAATEACCRFWTDVLQRFTAAKSQDMSETKGIIDNLVQDFLTILNLPEYPAAASILEVLCVLLLQNAGLKSKDINARCFAIDLLGGIASRLKRDSVVCSEEKLWILQDFTDKGSDGSIFLKNKCCVCLGGRGINIACNECGRCFHSDCMGAGSQDNLQRDSVCPLCFCKQQLNVLQSYCQSQIKENGKKTAASASKKSAKPTEVSAVEIVQQILLSYLQEAGSQDDGNLFTRWFYLCIWNKDDQHSQEKIIYYLARLKSKEILRDSGNGLAISRDSAKKICLALGQKNSFCRGFDKILALLLASLRENSPVIRAKALRAVSCIVEADPEVLGDKRVQYAVEGRFCDSAISVREAALELVGRHIASHPDVGLKYIEKVAERIKDTGVSVRKRAIKIIRDLCASNPNTDTTHAFVEIISRVNDEESSVQDLVCKTFYELWFEEPTGSHKHLVADGSSVPMEIAKKTEQIVDMLRKMPNHQPLITIIKRNLTLDFLPQSTKAAGINSSMVASIRKRCELICKRLLERILQVEEGAANEMEIHTLPYIVALQAFCIVDPTLCIPVTDPSKFVVTLQPYLNIQVDNKSSAQLLESIIFVIDAVLPLIRKPPQNVVEELEKDLKHMIVRHSYLTVVHACIKCLCALSKSAGRGPGLVENLVNIFYKHLCGANSDSQLLGRSLFCLGLLLRYGYQLMLTSENQLDFPKIINLLQRKYLLKDDFSLKVRALQTLGYILIAKPEFMLQKDMLNLIETALSSEVDYRFKIQGLQNLYEYLRDAESQLTAESTAKPPGQCEINGRSEVPVAAGAGDTNICGGIIQLYWSSILERCLDTNDQVRQSALKIVEVVLRQGLVHPITCVPHLIALEMDPLEGNSKLAHHLLMNMNEKYPSFFESRLGDGLQLSFKFFESIVSNHKMSANIKSNPIAFVKPGISRIYRLIRSNRNSRNKFVHSIVRKFESDSRSRSTVSFLVYCAEVLASLPFTCSDEPLYLIYDINRAIHLRAGGVEGNLKRWTSMSQSQEMAGMPTLPGESHVVMQEEPGGYYDNMGDATERVNDNPCSTSDVDIAKVQGDCHDAIALQLLLKLKRHLKVVYGLDDARCQAFSLKEPPKSGETFSRQNVSFNIGNTNLSLPSCLQDAASVYQDFKTVLREDSMDFAVFVPSVQTRKRPTPRNTTSPTPRSMTRVRRTAAPSVTKARGGARGDDSDDTDDDDWTGGPRVLDFSGGGRVTRQRVQV

SEQ ID NO: 58321 - protein, 128 aa, Zea Mays
MATPNGPSASPMVYPVYLSGVFPQQGGDDQAQGPGIYAIQQNQLAAAMGMGCYAPTTLIPLTYNIPTIGAPAGEENVQDARQQNVPQRQVVVRRFHFAFQLDLTLIFLLAAVVFLLARKAQNKGYFFS

SEQ ID NO: 58322 - protein, 81 aa, Zea Mays
MLLGLPQLEVAGWGGIYSHQPNCSRWRRLLAMGAPESPVCHRTVSGAPPRHPIVRAWSWSTVGGFVLMWHQTVWCPSDHLL

SEQ ID NO: 58323 - protein, 308 aa, Zea Mays
MKLLTAEDVTLFPVSSRSALEAKLSYSKNSDGKHSTEAMYNDPRWRSSKFFELEDYLLSFLDSSTENGKERVRLKLETPIGIADRLLTSCQRLVKLEYEKAVEDLASIKDLVYGANNYAIKLKSDSSSWQNQISSLIERAKGRAVTLMESTLQLSNIDLIFAYTIKGKTGSSMRATSFVQNDILSPTLDDAVNLLGDYSTWLSSSNTREANVYLECFCERWDALVAPEERALLDPNGLVNEGEKLTIKALEGFNASAAAKDFEEEIRELAFGTFGGLGIAGLSASLLTSVLSTTLEDLLALALCSAGG

SEQ ID NO: 58324 - protein, 101 aa, Zea Mays
MRFRVSSVSLTRAPGAISTVSGEIGRPAGGVGPIRPRVLGPPDPSSIQNQPQFSIFERRSERDPEQPQSHRPRRRSPSISSPLPLDLCTVSLFNNQDEPWW

SEQ ID NO: 58325 - protein, 81 aa, Zea Mays
MYAPHPSPQAQGRLQPSWKPVILMSLHVDVYQQRIILRMPTSVRSDCILLMSDISRLGVVSTLSCCNMIAGQLDELPLVCL

SEQ ID NO: 58326 - protein, 1020 aa, Zea Mays
MADPVDIDKALVALKKGTQLLKYGRKGKPKFIPFRLSNDESTLVWVSNNKDKSLKLASVSRILSGQRTLVFQRFLLPEKDHLSFSLIYNDGKRSLDLICKNKVEAEAWFTGLSALICRGQHGSQVQHIDGIRIAGLPFDGARESSLSGSSTFTSDSFENKLSSVNSSKDRSSGEYTYSERTDVSDMQVKSVSSSDIRISVSSALSTSSHGSGGEDSESFGDIYVWGEVICDTISRSGSDRSAYSPGTTTDVLVPKPLESNVMLDVSYVACGVKHAALVTRQAEVFTWGEECSGRLGHGIGTNVFQPRLVESLSTCNVELIACGEFHTCAVTATGDLYTWGDGTHNAGLLGHGSNVSHWIPKRVSGPLDGLPVSAVSCGTWHTALITSSGQLYTFGDGTFGVLGHGNRASCSYPKEVESLKGLRTISVSCGVWHTAAVVEVIISQSNASSGKLFTWGDGDKYRLGHGDRSSKLKPTCVPSLIDYNFHKAACGHTLTIGLTTSGHIFTVGSPVYGQLGNPNNDGRYPRLVEEQLGGGGVVEVACGSYHVAVLTNAGEVYTWGKGTNGRLGHGDIADRKVPTLVEALKDRSVKRVACGSSFTAAICQHKWVSGMEQSQCSACRQPFGFTRKRHNCYNCGLVHCHSCSSKKALRAALSPNPGKPYRVCDSCYVKLSKVLDSGVSYSRNTIPRLPGDTKAERIDTKATRVAQSNSSDMIRNLDVKAAKQTKKSEYSSQVPATLQLKDIPFISAPDLQNLSTVANQYPYDPRSTLPSLRMPYLNYSSSMSSESSESLKDANELLKQEVQKLQAEVNSLRQEREQQDAELQKADAKAREAMNLATEEASKLKTAKDVINSLTAQLKEMSERLPPGACDVKNNGRVMGDLAPEMGREKQMRYGDRFSGLPAQVYQTSNYSETAMVPPQGSSRSEHVDGVREFFSPVQQMANGGGSTTIGYRYRSDDHDRRETDRFQINLQSLNTRSSNSPSNQVDAEWIEQYEPGVYLTLVSLRDGTKELKRVRFSVV

SEQ ID NO: 58327 - protein, 54 aa, Zea Mays
MIGYAFGLSCTYVGLYLMNSGQPALLYLVPSTLGVIVLLGARRGELGQLWNAKV

SEQ ID NO: 58328 - protein, 130 aa, Zea Mays
MGFYKGNGASVMRIVPYAALHFMAYERYRCWILNNCPSLGTGPLVDLLAGSASGGTAVLCTYPLDLARTKLAFQVNSSDELSRALKRGSPQPAYGGIIDVFRCVYSEGGVRALYRGVGIVIPFICHIIIN

SEQ ID NO: 58329 - protein, 119 aa, Zea Mays
MSWDAFSSKVHMVQKGFMGEPKELRPGRGEFHENPSTCICERTDGKAVARAKSQDDQVLNSVADQGKGIGEPAVPNHTDEEAGEPDDDEDVPADKEVVDAEMVDDVLAGDPELEQILSD

SEQ ID NO: 58330 - protein, 339 aa, Zea Mays
MIASVYPFPRPHSCGSLQHWVCPCCNFFVGSPCLVNLFMMDLCTVQSCLSLIEISFSPQENCNYSWSGIVKVWSMPQITKVATLKGHTERATDVVFSPADDCLATASADRTAKLWKPDGSLLMSFDGHLDRLARLAFHPSGKYLGTASFDKTWRLWDINTGKELLLQEGHSRSVYGVSFHPDGSLAASCGLDAYARVWDLRSGRLFFTLKGHVKPVLGVSFSPNGYLVATGSEDNFCRIWDLRKRQMLYSIPAHKSIISHVKFEPQEGYYLATSSYDTKAALWSARDYKPIKSLVGHESKVTSLDISGDGQKIVTVSLDRTIKIWSCRSSTQDNEMELD

SEQ ID NO: 58331 - protein, 182 aa, Zea Mays
MLKFWPWLQLIGWEIDPMIIELSRDYFGMSDLEKATESGGSLLVRIGDALSPSATVEGGFAGIVVDLFCDGKVIPQLQEAKTWLQIAKRLMPDGRIMVNCGGSDTEESLSSPWVQNPTVKALCSAFPGQVSWKRLSEKESVNYVALTGPLPDLDGWSASVPSELSTNRAGPKPMLERRRPGA

SEQ ID NO: 58332 - protein, 388 aa, Zea Mays
MLLRITYAQPTPSAAAQLRLPGPRLRRRRVAASAADGAGNSSSPLHCDPSPHAYLLGPGVEPSGSLSLSTYPITEKGKQRSWVGPSGQYYRELPCPSCRGRGYTPCKECGIDRSSLDCPMCNGKGIQTCLQCSGECVIWQESVDEQPWEKVRSSSPLKVKEDDEVDKLEININNPKRSKRTYASTSPEVAKKISRSLRSLNAQTGLFTKHMKIIHQDPELRAQRVAAIKRTKGTDVARKRASEIQKAFFSDPENRLKRSIAMKGVKFYCSKCGQEGHRSFYCPTLREGSTRVRFRCRLCGREGHNSRTCGKPKSEKEHKQRPHHCSRCGEKGHNRRNCPTSTDLGSDASGYVVNKVNGSNSAVYQCSICLEKGHNRRTCPKRKATLLK

SEQ ID NO: 58333 - protein, 809 aa, Zea Mays
MAAVAPPPDNMDPPPATPPAATPAATLTPPPAATSTPPNPATPGPAAPSPNPNLPPAPASAPPAAFAPPMPPAPVSFAATFRPLGAPAPPPPHQVPQYGALPPNPGYPMPPPMQPPGVPVVMPPGSVRPPVMYGPPQPGAYMPQQGAAVPHPGMPRYPAPYPMVRPGFVPRPMPPPGVVTIQRPPIISGIRAIPPLVALTARPPPPAVMLADKPPTAVYVGKIAPTVDNGFLLSLLQLCGPVKSWKRAEDPSNGKPKGFGFCEFESAEGILRATRLLNKLSLDGQELVININDATKEYLKKHVEEKKRAQVKSKDASGDGTTAVAENESSKSVPDESDKETGDAGDKDSDESTKKFGIVTDEDSQADKDVAEKISSMIEQWLKTRPPPPPPPVQPSADSSGVDKAKNDSADKTDADTVKRAVNETERSETASPDRRKDREHDKDKRDKDIERHDRERERERIRRDREKDHKHREVDRLYRDRLKEWESREREKEYQRYSEKEKEKDREHNRRREILKQEDESDEEDNRKRKRRSSSSLEDRKRRRQREKEEDLADKIREEEEIAEARRRAVELQQQADEAAAAAAAAAEESATLMEVDADDEKETDAQNEPSVVEADNIPSFANSVGAGGLGKENNSEEISMVPSHTKQNNNVPVKKLGFGLIGLGKRTSVPSVFAEEDDENNVDKSIRPLVPIDYNEELQAVQANSSTGANVAAAAEFAKRISVSNSKEEKADTEKDRNRRSSEGRPSDERREKLHDREKDKSKSENKKILDAKQLIDMIPRTKEELFAYDINWVIYDKLVLFRRVFA

SEQ ID NO: 58334 - protein, 417 aa, Zea Mays
MWLRGVAGEGGFQSLNFQSPGVGSWGQQRLHPSLLSNDHDQYQAVVAAAAASQSDGYLKQQFLHLQQPMQSPQEQCNLNPLLQQQILQQGSQQQMVSPDAQNIQSVLNPNAIQQQLQQFQQMQHAHNDQKQKIQPDQPYQVPSSAVLSSPTSLPSHLREKFGFSDPNVNSSSFISSSSNENMLESNFLQGSSKSVDLSRFNQPVVSEQQQQQAWKQKFICSQSMSFGGSVSLNSPTTKDGPVDNKIGRDVQNQTLFSPQVDSSSLLYNMVPNLTSNVADNNISTIPSGSTYLQSPMYGCLDDSSGLLQNTGENDPTTRTFVKVYKSGSVGRSLDITRFSNYAELREELGQMFGIKGQLDDPDRSGWQLVFVDRENDVLLLGDDPWESFVNSVWYIKILSPEDVHKMGKPGNDPRYLS

SEQ ID NO: 58335 - protein, 251 aa, Zea Mays
MANIDMAKILADLDRGAGDARLPKTKLVCTLGPASRSVPMLEKLLRAGMNVARFNFSHGTHQYHQETLDSLRQAMHNTGILCAVMLDTKGPEIRTGFLKDGKPIKLTKGQEITVTTDYDIKGDEKMIAMSYKKLPVDVKPGNVILCADGTISLAVLSCDPDAGTVRCRCENTAMLGERKNCNLPGIVVDLPTLTEKDKEDILGWGVPNDIDMIALSFVRKGSDLVTVRQVLGQHAKRIKLMSKLVSEMQFC

SEQ ID NO: 58336 - protein, 653 aa, Zea Mays
MLEDSTKRRRELEESTESRIQFWKQKEIVVNKFVGLQVKNAQELRLSSVSVRLEIQNCQKRWFEELAGLGQNLKMVTSAAEKYHATLADNRKLFNEIQELKGNIRVYCRIRPFRPWEDEKSTSVEYIGENGELVLSNPTKKGKEAGKNFTFNKVFGPTATQDMVFNDIRPLIRSVLDGYNVCIFAYGQTGSGKTHTMMGPENATEKEWGVNYRALNDLFNISHDRRDTIKYELGVQMVEIYNEQIRDLLGTGGSQKKLGIQNTTQPNGLAVPDATMCPVDSTSHVIELMQTGHNNRSMSATALNERSSRSHSVVTIHVQGQDLKTGNTLRGALHLVDLAGSERVDRSAVTGDRLKEAQHINKSLAALGDVIFSLSQKNAHVPYRNSKLTQVLQTSLGGHAKTLMFVQVNPDVSSYTETLSTLKFAERVSGVELGAARTNKEGKDVKELMDQLSLLKDTIAKKDDEIDQLQLANSSNSLLKSTKHGDSLLKHSASSPGMTSLGKVASFGSGAASDLDNCSDTSDRHSEAGSMLSTDEARQLSQNSADPGGDSDGRLSDISDGGIPAGAETDSSANNVVDQEQDKTSATGKERLAKAVSRVQKLTVPKVGQASSLRPKPRDPSAPKSSVTPGVRKGTTTQATPPAKASGTSKRVP

SEQ ID NO: 58337 - protein, 749 aa, Zea Mays
MTVWYDLLQWRNEMYNSVIDAFKDFGQTNPQLHHLGYRDKAWNVNKLAHIARKQGLPEVCVTILDKMYGHATMEVQEAFVKICEQAKAYLEMKGELVSGLNLINNTNLEFFPVKNKAEIFRLRGDFLLKMNECETANQSYSNAITLFKHLPKGWISWGNYCDMVFKETKDEVWLEYAVSCFFQGIKYGVSNSRSHLARILYLLSFDGQNEPVGRALDKYLEQLPHWVWLSWIPQLLLSLQRSEAQHCKLVLMKIAQVYPQALYYWLRTYLMERRDVATKTEIGRNMLAQQRMQQAMMANNAANNLPDGSARASNHAVGAAGSHDGGNVQGQDPERSTPEGGTNTSHDQGQQSSTGAEGSQVPLRRNSGHGWVTSAASAFDAAKDIMEALRSKHTNLANELELLLSEIGSRFVTLPEERLLAVVNALLHRCYKYPTATTGEVPQSLKKELSGVCRACFSQDAVNKHVDFVKEYKQDFERDLDPESATTFPATLAELTERLKHWKNILQSNVEDRFPAVLKLEEESKTLRDFHVVDIELPGQYFTDQEIAPDHTVKLDRVGPDIPIVRRHGSSFRRLTLIGSDGSQRHFIVQTSLTPNARSDERMLQLFRVLNKMFDKHKESRRRHLAIHTPIIIPVWSQVRMVEDDLILIKPFQGSSLLKQLWSYVCKHTMRLQKILLMIIFSPNICTRFCQLATTCGPSRNNLQSKWLSPASCRICCRLAAGLLTKFYLLKILGRSSRLTSIQLMIQMG

SEQ ID NO: 58338 - protein, 485 aa, Zea Mays
MAGSMVDRATRDMLIGPDWAKNMEICDICNRDPGQSKDVVKALKKRIGHKNPKVQLLALTLLETVIKNCGDILHMHVAERDILHDMVKIVKKKSDPRVKEKVLVLIDTWQDVFGGSHARYPQYYAAYHELVRAGAEFPKRPEKPAPLFNGQSQAARNMRSPDQQEAESSAANDFPALSMSEIHNACGIMDVLAEMLNALDPGNREGLRQEVIVELVDQCRTYKQRVVQLVNSTTDEELMSQGLTLNDDLQRVLAKHDAIAAGIAVRVEKKSKSLQALVETKDSTNQDSKKEQGLIDIEDPTSQDAAKDPNQSTSDQSPFEQLALPAPPVSNGAATSAPQSDLGIDLLSWDDTPATTQNPLALVPVTDPLADSTSSNQNALAIVDTFSENSTTNHNAQPADPFGLNPSSAIPGSQLYNTPTQQPFQSQQPPQQAALYANGGAVDPGTSYDQASQFKNVSSGWNGQAANPVVPLPEQALNYELSVFI

SEQ ID NO: 58339 - protein, 460 aa, Zea Mays
MGYGMSRLDDEYYEAEGQNTGGSGSVQVNDEFATLHNDIFHMTRMRSGLTESYKSMGTNRGIISTAKLLSRREIDCSGKGMFSSGDRAFVLGRHVPMNNPELLDRMDSRAYVSQFSADGTLFVAGFQGSHIRIYDVDRGWSIHKDIHARCLRWTISDVSLSPDQRYLAYSSLAPIIHIVNVGNAARESYANVTDIHDGLDFSQHEDVQYSFGIFSVKFSSDGRELVAGSNDDSIYVYDLHANKLTLRLSAHTSDVNTVAFADETGHLIYSGSDDTLCKVWDRRCLSAGQAAGVLTGHLHGITHIDSRGDGRSFISNGKDQAIKLWDIRKMMSNADSCADGAPAWDYRYSRYPHQHKQLKHPHDQSIATYRGHTVLRTLIRCYFSPSYSTGQKYIYTGSYDSNVCIYDVVSGSQVAKLKWHQMAIRDCSWHPFEPTLVSSSWDGRVVKWTSARDEGASDVD

SEQ ID NO: 58340 - protein, 100 aa, Zea Mays
MKKMEGSENSEEQLMKSFEEKKDAMLSSLWKINVVDIESTLSRVCQAVLRDNTVSKDVLKLRAKALKKLGTIFQGAKSMYRRENSLRVETSTNQQANPSH

SEQ ID NO: 58341 - protein, 472 aa, Zea Mays
MERGYVLDLVACNKGGETASLPSLTHTTKSDEDVLATPKSHPGEEITLPSSDRERDQDDGVLQNAAATNTLTAASQLTDPSGRSRPRFGVNFGLSRAVSLGSSVACSILSSGLPTSANPGEGRGDVDDSSDTVISQQGSAPTAGIDSTLDMLRDSVTAQARAARQARRNLQESEDAILRNSYRRMGSQEPFEGSVRFSRTLSVGRLRDRVLKRPPFSDGLFTPALLYDRAVWLSGNASARQDSAVMQRTNSDRSSESRSDPSTNGLYNLSSERQASNSDLLERRSVFLERRRRIRSQVRALQRLGSRFENLSGHERSCILSGQHRTGTCNCRTGSRQGNPDEETSTRASISRIVMLAEALFEVLDEIHHQSAALSSSRPAFSSIGSVPAPREIVERLPAKVYRRPLKYHSEEAAQCYICLVEYEEGDCLRILPCHHEFHLTCVDKWLKEIHRVCPLCRGDVCRSDALIGKVS

SEQ ID NO: 58342 - protein, 164 aa, Zea Mays
MRQLHGKSLVEVNRSFLEKHNASLMHRAAGAEMMYLLEPNKKMEAINLIEDSTNITSSGHSLLGPVKTWQIQDCIDVHKLLETVFGDQNVANRWKARCAEYFPYSTYFEGIKSAISTYAIDHSLESPPENGIASNPHLKSKDGEQGSLNGTLHIVDDLSSLSIR

SEQ ID NO: 58343 - protein, 426 aa, Zea Mays
MACLVGVDFSAKILASIAKSFEDEYSKEDGLSLRNLTLLFCYLCIFGVTSSDLVYDLLSILSKRLTELDVSTVLTILQCCGMKLRGDDPCAMKDFVLSIQNSVNDLKLHSGVGADGKTDIRSRRMEFMLETICDIKNNKKRPKEDPSHHTRIKKWLQKLKAEDVLLRGLTWSRLLDPDKKGQWWLSGDVPSTVAKIEDVAAVISKDVAETKKLLQLAAAQRMNTDIRRAIFCIIMSAEDYVDAFEKLLRLGLSGKQDREIIRVIVDCCLHEKMFNKYYTVLASKLCNHEKNHKFSLQYCIWDHFKELDNMESSRSMNLAKLVAEMLLNFTLSLATLKVVNLANPVEMTPARVSHFRMLFETLLQKDDARVWNVFTRVAGLPELEVLRDGIVMFIKQHVIAEDSGKDLASKFKIAKKALDNTAGVLM

SEQ ID NO: 58344 - protein, 1799 aa, Zea Mays
MALGDLMASRFGHSSSSPSPSLAPVPPLPHHHHNHHQNHVADDLPVASGPEPKNGLEVPEVEKPASEAYLPQVVVLCDYRHEGIDEATTAALSTSGLVSNWRPKDRTKTGCGALVLCLNISVDPPDVIKISPCARMECWIDPFSMAPPKALESIGKTLHSQYERLQPKARYKLQLDPTVEEVKKLSNTCRKYAREERVLFHYNGHGVPKPTSNGEIWVFNKSYTQYIPLSITDLDSWLKTPSIYVFDCSAAGIIVKAFLERLDWSSTSSASSQKDFILLAACEAHQTLPQSAEFPADVFTACLTTPIKMALHWFCKRTSLHGPLDRSLIDQIPGRQNDRKTLLGELNWIFTAITDTIAWNVLPRDLFQRLFRQDLLVAGLFRNFLLAERIMRSANCSPVSYPLLPPTHQHHMWDAWDMAAEICLSKLPQLIADPNTEFQPSPFFMEQLMAFEVWLDHGSKDKKPPELLPIVLQVLLSQPHRSRVLVLLGRFLDMGPWAVDLALSVGIFPCVLKLLQSSAMDIRQNLVFIWTKILSLDKSCQVELVKDGGHAYFIKFLDSLDAFPEQRAMAAFVIAVIVDGYRMGQEACMNAGLMDVCLRHLQPENSHAQTEPLLLQWLCLCLGKLWEDFPEAQLLGLQTNGPEIVICLLSEPQPEVRAAAVFALGNLLDTTSNSHDDGSDDDEKVKAEINVVRSLLQISSDGSPLVRSEVAIALTRFALGHNKHLKSVASEYWKPQPNSLLKSLPSLANISNPSNVYSPNNILQGRIGPVLRVASDSGAAGRDGRISTSNPIATSSIMHGSPESDDSSQHSDSGILLRGNASNGGFSYTRSRPVDNVIYSQFISTMYSVSKDPDPTIATIGRRALSLIGVEQVVMKNTRFNSGGSHRGETSASNFGMARSSSWRDMKSGSILMKFMTPPVSPPQHDYLPGLRRVCSMEFGQHPINPPNGLADRLLSSAAGPSNAEPLPQSTIYNWSCVQFSRPVLTVSDDNEETNARREEREQIALDYITKCQRSSCKMTSQIASWDTKFELGTKAALLLPFSPIVVAADENEQIRVWNYDDALPVNSFQNHKLSGRGLSKLLLINELDESLLLAASSDGNVRIWKNFAQKGGEKLVTALSSVQGHRAAGRSIVIDWQQQSGYLYASGDMSSILVWDLDKEQLLSTIQSTADTAISSLSTSQVRSGHFAAGFADGSVRIYDVRSPDRFVYVARPHAPRTEKVVSIGFQPGFDPYKIVSASQAGDIQFLDVRRAAEPYLTIEAHRGSLTALVVHRYAPVVASGSAKQMIKVFSLGGEQLTIIGYLPSFMGQRIGSVNCLSFHPYKSLLAAGAGDNALVSIYAEENYKHAVAGLVHYFTATVSRVRNFLWEIKDQVHIVISSPCERPSPAAASHRLLRKKPLSDTGEGVRIPQPQPQPQPPKKHRTEPSAPLTLTLQGGGAMHGGGAASPDAAICISPEAGPIVGVAPAGIRVENCYVFKSRLQEYAQRVGIPTPEYHTLKEGPSHEPVFKSTVFVNNTKYESLPGFFSRKAAEQSAAEVALMEIAMSAPVTEIRNMPAVQETGLCKNLLQEYAQKMNYAIPSYICTKQASGVAPFVCSVEIGGILYIGAAARTKKEAEIKAARTALLAIQSQSEGGANGAKKYIVVPGQRPDKETNKNPTETPIPLRVKKRGSRKKWNKRKFRRMADRIVDAGKDAEGLGTLLHDDYEEARRIGYELPTDTAMVQFNKEVVMTQPGEGDRIVQLEPPRDPAEVQYNKEARSVEQDPPRDPAEVQHNKEARSVEQDPPRDPAEVQHRSVEA

SEQ ID NO: 58345 - protein, 387 aa, Zea Mays
MFLAMTEEVRVIIVKLADRLHNMRTLTHMPQHKQYAIAVETLQVFAPLAKLLGMYRIKSELEYLSFMYVNPTGFAELRKRVEDLYKSHEQELEEANRILRQKIAEDEFLDLVSVETEVRSVYKELYSIYKTTLKSKSSINEVNQVAQLRIIIKPKSCNGVGPLCTAQQICYHVLGLVHGIWTPIPQAVEDYIATPKPNGYQSLHTTVIPFLNESMFHLEVQIRTEDMDLIAERGIAAHYSGRRVASGPVGLGISSGRNAKGKVICLNNTDFALRIGWLNAIREWQEEFVGNMSSREFVDTITRDLLGSRVFVFTPKGEIKNLPKGATVVDYAYLIHTEIGNKMIAAKVNGNLVSPIHVLANAEVVEIITYDDGMERDDPSNRVVWFR

SEQ ID NO: 58346 - protein, 628 aa, Zea Mays
MRSVNGEVEGTHDHEANRRGQLIEWMNALLPEFSLPPDSSDEELRELLSDGVVLCRVANTLIPGVLEGSWDGYAPSDQRLGNLNKFLSVIADMGLPGFSVKDLDEGSMSPVVECLLVLRDSVDPRLGDDIPPDVTRTPLRKQWGVPEMDKPQVHGAALGKRSPAEDKRNGVADPKAHQKTSVFSGQKFCDVFQLKHGSYSGPAAAKISEMMHSNSLDNAPTQSLISVVNGILDESIERKKGEIPHRVVYLLRKVVQEIERRLYIQAEHIRSQNVIMKRREQKYCSKIKVLEMLVNGTNEENQMAINRLQIVKNEKSKIEERRKLSEQDVHRLMREKEHSENIIANLKKDIEAMNRLHEQQLEQTERKAKEMEEQLTTKVKEVEYLLLQSKKKVEEVETASRLKSQLWDKKEDNFQSHMDNQQLIIKDIRILSRSCENDMYALQMQWRNEISNLGSGLKCLVDAAENYHKVLAENQKLFNEVQELKGNIRVYCRVRPFLSGQDKKSTTIDYMGENGELLISNPFKQGKDGHRLFKFNKVFSPFASQAEVFSDIQPLIRSVLDGFNVCIFAYGQTGSGKTYTMSGPSTSKQDWGVNYRALNDLFDISLSRRNAFSYEMQACTQLSRHLMY

SEQ ID NO: 58347 - protein, 127 aa, Zea Mays
MRQLRLGGGSPRSAPSGGSFLGGGYPFGSPKSPAGLYSLPSTPTRPSPVTVTTASGATVLTVERLNLGLIGDEEPVMERVESGRALREKVFERLSKEAAVPSDTAASANVEGAAPAPDVGWVSDLIN

SEQ ID NO: 58348 - protein, 77 aa, Zea Mays
MMVPVGSDDETADVAMDRESSPPAATTRSGGTSRSHSEAERKRRQRINAHLATLRTLLPAASRTCLRMCMRHYNTQF

SEQ ID NO: 58349 - protein, 189 aa, Zea Mays
MDSEHWISRLAAAKRYYAAQLGRVDDVPGMGTEEVEMEVEDDGDMEMELEMALELGDATWPEVACPYCYEDHDVASLCIHLEEDHPYEPHAAPCPICSQRITRDMLNHITMQHGYLFKALLGGGHGHRSNNAVTTNISSDPLLSSFGLSFSASDAPEPSKSASSIPDGTAIRKETPVQPWESRYILLLI

SEQ ID NO: 58350 - protein, 831 aa, Zea Mays
MLSGIIDGLTGANKHARLKGTVVLMRKNVLDLNDFGATVVDSISEFLGKGVTCQLISSTLVDANNGNRGRVGAEANLEQWLTSLPSLTTGESKFGVTFDWEVEKLGVPGAVVVKNNHAAEFFLKTITLDDVPGRGAVTFVANSWVYPADVPAKPDAGGAEAVPRRRAPQPPRRRPAGPLPGARPRVPLRRLQRPRRARRRQPAPHPRRLRRPPVPAPLPHGPQAHQNRPQLGEPTVAGGADLRAAGRALRPPQDVRLPGLLHQGHHAGHHPGGAHVRGHHPGRVRLLPGHHQPVRGRDQAAQDPGARGHAQALPAPARQGPPPRRRGLPAQAPHPTDHPRGQERVEDRRGVRAGGARRRQPDGDHAPHGVPAQEHAGPQQVRRPHQHDHGGAHREEPRGPHGAAGAGRQQALHPGPPRPLHAVPHRRQQPGGQLHLRHQDALLPARRRQARAPRHRAQRAVHRRGPHRGQEQGLHAGVQRRRGLGVAARQGLCRRQRLWLAPTRQPLAEHPRGDGAVRDRDEPAAERDAPGAQAPELALPRHHDHQRAGAADAHQRRRHLRDDRLPGQVRAGHVLRGVQELELHRAGPPRRPRQEGRGGGGPVQPVQGAAADRGLPVRERRAGHLARHRAVGGRVPGHLLPRRRRAAGRRGAAGVVEGGARGRARRPQGRALVAQDAGRVGARQRLHHHHLDRVGAPRRRQLRPVPVRGVPPEQAHGEPAPDAGARQQGVRGAGARPGARLHPHHHEPDPDHHRHLAHRDPLQALLRRGVPRPARHPRVDLRRPGAGGVQEVQRRAGQDRGQGGGREPRPAAEEQERPRRVPLHAALSQHL

SEQ ID NO: 58351 - protein, 64 aa, Zea Mays
MRKIYAGRIFLAGRFATSNTTAARSFGSQAESAALPISIKPAATPSRYHQLLPSLSLAVSHHTG

SEQ ID NO: 58352 - protein, 831 aa, Zea Mays
MGIPSAQATSAPSGRDLYVVQEMLGQGTFGQVAKCWDAETNSYVAVKVIKNQPAFYQQAIMEVSLLRLLNEKFDPDDEHHIVRMLDFFLYQNHLCIAFEMLGNNLYELLKRNSLRGLQMKYVRTFSRQILDALIIMKDAGIIHCDLKPENILIAPTVKTAVGVKVIDFGSVCMEGKTIYSYIQSRYYRSPEVLLGYPYTTAIDMWSFGCIVAELYIGLPLFPGASEYDVLCRMIEIIGGQPPDDLLREAKNTGKFFKHVGSIYPSSEARNGASSAYRILSEDEIEARDSKKPKVGRWYFPRGRLDRLIYTYPWKNLSEGNLPETEKADCLALVDFLRGLVEFDPNKRWSPLQASYHPFITGEAFTGPYEPVQETPRIPVGRAAVVDHNPGGGHLLGAGLSPQVGSINRCLRFNNALQPNMPFSYGSSCGSFGSHGSFNDNAGFSYGSYDFNSVDIYNSPMDPSGFNLRSQLGGSFLGSSPHIRRRPHLSHGGGIRLSPGGPGHMSLGASPSQFTPPNSQMQIPTGPNGRYGASPSRGGHGSSLGKVAVVGQYNRRRNQGYPPMPMPPHEHTSQLIQGHQGDGVSTARFGAYAQGNSTYLHNALPNSSHYSWRSQRGSGSGLPLDPSSSRGSFPPTNYYGFPLHSDASADTLPSTSSVSDPADWDLNSSDKSLLQEDRTLSAGLSDLRLIDASGQTNRSSRLAPFQSHDILSSNPSTMNQRNGHLFHASSLGESTHTPGHVTLDGYEHTTYSQRSFPIYRGQPFQQYNNMTSSYIRPMRAHHNGQPVWSNYRLTEPPPTTMGDGMLWGGRGGHSFAASGLPPTLRKDFGRIF

SEQ ID NO: 58353 - protein, 114 aa, Zea Mays
MECAFVCLRLLCGYRQGNRICHGRRFPFLSDVDVLYSCIFGFNNMPLVCCQASYLQEINGLRPRGLFFLIMRFQVGRDFGYPLKRYAWWCFLVLKNKYPTEPQPFVLSGDFLHY

SEQ ID NO: 58354 - protein, 330 aa, Zea Mays
MSSQSSAGGPAIHHPHSNYHPYIFQHDPPLHSNSRRRRRNHDDPYQPYLPLPHAHSHGATAVVTGTVRCHVPRDPLVLSHLQERLFPTLPQHHPIAGPPPTKRARRAPDTPWDPPPPTLQPALVPVALERPPDVGHSAGALLSRDEIERRSPSRRDGIDSALEARLRASYCAYLHCLGNRLGPQTTIATAVVFCHRFFFHRSHACHDRFLVATAALFLAAKAEETACLLNTVLRASCEVSQNQEFNLLPYMLCGQDWFEQYRESVIQAEQMILTTLDFELEVAHPYASLSSALGKLGLTHTVLFNVAWNLINEGLVEVEKMNQHMHQLFF

SEQ ID NO: 58355 - protein, 908 aa, Zea Mays
MEGSKISASATVTGGTEGSSRVQWYKASSSEFKNEHELEALTPSRVSKTFRIPLGAVGYYIVAKFTPVAPDGEVGEPAYATSDGLVETLPPSLNFLTVTGEFSEGQILTASYGYIGGHEGNSLYSWHLHEAEDDEGTPLSEATGLLQYCVTKEAVGKFVSFKCTPVRDDDIVGEARSFIGKDRVTPGMPTLLSLEVTGDAIEGTTMFASKRYWGGEEGDTMFRWILTNSDGTEKEIEGATSSSYTLKCNDIGFYISVLCKPVRNDGVDGSLVSTEAIGPIIPGPPTCQSLELAGSMVEGGRLTFHAVYTGGLRGSCIQEWFRLHDDGHKDKLTADECLDLDLADIDCRIELMYTPVREDGVHGLPRSVTSDTILPGEPKGVNLILPECFEDNEISPIKTYFGGKEGTGKYTWFRNKEKLDNLEFDLVAESSEVVGETLKYKPSLNDVSSYLILYWVPTRRDGKVGDPLMAISDDPVMAAFPSVSDVHLEQKSSDVYCGLGIYYGGYEGLSLYRWYRESSDGTRLHIDGADSVTYEVTDADYSCRLLFGYTPVRSDGISGEEKLSEPSDVILPELLKIETLNFKGNQVERETLTAAEQIPYSEIQQHIWKNYKKEMKYQWFISNESGGDQSFEPLATQCSRSYKVRFEDIGRCLKCECFVTDVFGRSSELVSAVTAPILPGRPKIEKLEIEGRGFHTDLYAVQGTYSGGKEGKSKIQWLRSMVGSPDLISIPGETGRTYEANVDDVGYRLVAIYTPVREDGVEGQPVSVSTEQIAVEPELYREVKQKLDDGSVKFEVLCDKDRTPKKAQVMGHLERRVLEVNRKRIKVVKPGSKTSFPSTEVRGTYAPPFHVELYRNDQHRFKIVVDGDTEVDLMVQTRHMRDRIILTIRGLAQKFNSTSLNTLLRIES

SEQ ID NO: 58356 - protein, 715 aa, Zea Mays
MGDGASGRGGGGGAGRRVGEYELLRPIGSGAYSQVWLGRHRARGTEVAVKEIAMERLSNKLRESLLSEVDILRRIRHDNVIALHESIKDHGSIYLILEYCRGGDLHAYLQRHKRVSEKVARHFIRQLASGLQMLRDNNVVHRDLKPQNILLVENNENSLLKIADFGFAKFLQPFALAETLCGSPLYMAPEVMQAQKYDAKADLWSVGVILYQLVTGRPPFNGGNQIQLLKNILRTCEIRFPSDCDLSHGCIDLCRKLLRLNSVERLTVEEFVHHPFLSEHAPEKTLSLTQSDIRDGFPRNNSSPTRHSNHSSQEDCMPFPLDDESSGQDEGPVPDSKSLMKSYGFPMGKRLDKTSGQKSPPKHNSLFSRYVLGNNHAPSSQHHGHSGKVTKESKIHEVQGQKVVYPEDSPIIDSLEFVDQEYVFVSGPHLEGSSSSTNASQQLNVPAKYDNSSVSPPKLTFMSAPMPINGLPINRQQLAGTGSFDSHCSPASGTSQGSADISDAMDQPPSDYLTRIRLLEQYASAIAGLVRDEIKGGRHLEAFSIQLIVLATWKQAIHIGNTFVASPARESPSQDIPMKGHIAGASHLPANSKLADDACMQIEKQFLSEVEYAEELASIVGQIADGTEMPDAIEMIFQSALLIGRRGGVDEMFGKAADAMTGYMRAVSMLRFLLVEAPSLALNPPLTLTRSDRNRLRTYIDALNTRLCQMQSQRH

SEQ ID NO: 58357 - protein, 988 aa, Zea Mays
MMHVLVWRALQIVSNVDNMEENKQNESFQDMESTGDVLGVPTHFQNDGSALYLLTHALSPPSAGAVGHWLTQQSSSSIFSGYTNYDGVAADKEEAHSSTLSRNSPTRFTKENSANKMHGDVLTESRGELRPDPRFDAINAVSLAIEDDADNTVDVHVFIRGNNVKSHRRNLDGIAGCNINVFPEEKDVLNNLISAICSIDPDILVGWEIQLGSLGFLAERAAYLGIGLLKRISRTPHELNHPPKIPVDNSSQVLSETSSADDIIDDVSENDWSHTHASGIHVGGRIVLNLWRLMRAEVKLNNYSLEAVADEVLRRKIPLIPSRILNRWFATGPGRGRHRCIEYISNRARINLEIMNQMDLVNRTSELARVFGIDFFSVLSRGSQYRVESMLLRLAHTQNYLAISPGNQQVASQPAMECLPLVMEPESAFYPDPVVVLDFQSLYPSMIIAYNLCYSTCLGKVFPSKSDVLGVSSYSADPHTLVDLKNQLLLTPNGVLYVQPEIRKGVLPRLLEEILSTRIMVKQAMKKLSPSQQVLHRIFNARQLALKLIANVTYGYTAAGFSGRMPCAELADSIVQCGRRTLETAISFVNQHPLWKARVVYGDTDSMFVLLKGRSREEAFRIGKEIASSITAMNPDPVTLKFEKVYQPCFLLTKKRYVGYSYESPEQNEPVFDAKGIETVRRDTCPAVAKILERSIRIMFEEQDLTKVRTYLERQWTHILSGKVSILDFIFAKEVRLGTYSARASTLPPAAIVATKAMLSDPRAEPRYAERVPYVVIHGEPGARLADMVIDPYGLLEVGSPYRLNEQYYITKQIIPALQRVFGLLGADLNKWFNEMPRPIRSTLAKRQFAAAHGSFSRDGSFIRLGLNNKTSAKGGRIDTYYMSSHCSICGDMIQGSESFCNNCLKSEAVVATVVAGRTSKLEREIQHLAAICGHCGGADWIVESGVKCISLACPVFYERRKVQRELVVVSESAGEAGYYPFCCAELF

SEQ ID NO: 58358 - protein, 377 aa, Zea Mays
MVMQRFSWPYGGRSASLCGSFTGWREYPMGLVGAEFQVVFDLPPGVYQYRFLVDGVWRCDETKPFVCDEYGLISNEVLVENNVQPVVQPEPSIRGTNLDEGTVLTTMPPESSSQNPGVQIAVFRHVVSGILLHNTIYEVVPLSSKLAVLDTQLPVKQAFKIMHDEGLALVPLWDDHQGTITGMLTALDFVLMLRKLQRNIRVTGNEELEMHPISAWKEAKLQFYGGPDGAAMQRRPLIHVKDSDSLADVALTIIRNEISSVPIFKCMPDSSGVPFLNLATLQGILKFLCSKLQEQAGGCSLLHNQLLSIPIGTWSPHTGRSSSRHLRTLLLSSPLNTCLDFLLEDRVSSIPIVDDKGALHDVYSLSYCLFFWKGCVL

SEQ ID NO: 58359 - protein, 300 aa, Zea Mays
MAARRGPHVIKLHDPNPPLLGRAPGTAPAAIPAPSRDEGILAQHPRAAPSSASASHPAFALIEERLVARDQDIQELLVDNQRFAATHVALQQQLIAAQHELRAVSVAATRARAEREVEVRALADQAAHIEAEARAVAAARAEVDQVHADVQVLVAARTDLVNRLQGLREKLAHKKAEASKTDSVRAQIETMRREIQKGRAAVDFEKKAHSDNLEQSKAMEKNMIAVASEIERLRGELANAEKGATAVNPAAAVGNSGYVAAYGNSEPTYTAMYGNPDATYTAQAYPDAYNTNQIMEQSSF

SEQ ID NO: 58360 - protein, 420 aa, Zea Mays
MDPCAFVRVTVDQLLLKLPAVPRPSSSAGVYPSNSPCFCTLTLQDHPSSLSRTALLPLACASGPAALVVSVHAGPTGTTCGMGASRALGRVRVAVDVARAAAGETVVARDGWVDVGKPASGPSAPPRASARAQIHMVVRAEPDPRYVFQFGGEPECGPVVYQVPGGAARGGQRQPVFTCRFSAGRRAARSRSLTPQSSMSRSTSRRLRSWLSSTLHGEGRDGAHSRREQRKGWTVTIHDLSGSPVAAASMVTPFVPSPGSGRVSRANPGAWLILQATGAGPSSWKPWARLEAWRERGPVDALGYRLELVFDSGAHECAVPIAESSISTKRGGQFVIDPATFPEAAAGAAWPLAGGFVMGSTVEGERRASRPTVQVGVQHVACMGDVAVFVALSAAVDLCMDACRLFSQRLRKELCQDQDE

SEQ ID NO: 58361 - protein, 429 aa, Zea Mays
MRLPAGARLALLLARRSLSSSPRIPRAHTGIWSEAPSRSSPFSPPSSARRSFHGTRPVAARDYYDVLGVSKSASQAEIKKAYYGLAKKLHPDTNKGDADAERKFQEVQRAYETLKDEQKRSLYDQVGPDQYEKTASGGGGTGFEGGFGNPFEDIFGGGGGGGGMNDFFRNIFGDRDFGGRDVKVALELSFVEAVQGCSKTVTFQTSVTCEICGGAGVPPGTTPETCLSCRGSGFIFMQTGPFRMQSTCTKCGGSGKTVKEFCKACRGNKVVPGRKSVRLDILPGSDNEDTIKVVRSGGEDPDGRPGDLYVTLEVREDPVFRREKGDIHVDAVLNVTQAILGGTVQVPTLSGDVVLKIKPGTQPGQKVVLRGKGIKTRNSPYHGDQYVHFNVNIPENLTSRQRELIEEFAKEEQGEDEKDAKAAAGASGG

SEQ ID NO: 58362 - protein, 153 aa, Zea Mays
MADSSAPTRVMMAVNESSLKGYPHPSISCRTAFDWTLSKLVRSNPGGFHFLFVHVQVPDEDGFDDMDSIYASPEDFHQMKQRDKIRGLHLLEYFVNQCHQLGIKCEAWIRHGDPKEVICSEVKRVQPDLLVVGSRGLGPFQRTNLVQWRELSR

SEQ ID NO: 58363 - protein, 368 aa, Zea Mays
MVDAGQAAKRGKATDEKGQPSAAARTPRQHTPDHPPYCWMIGEAIDELAEDGGSEEDSISAFIRARHPGVPPAHDRFLRHYLGKHVAEGFFLRNAAGRFERNPEENAAEELPVEQTEAGSCNPASVGSLVVDAKHGRGRPPKDGYPSTPPEGRKDGGAGAQWMTPHADKDESRAPSLKPKRRRRLRRQGMATTADSSGEALVAGKKDSREEHEPPRELALVILDDSSNTPTMDKACTKVPPTTRPVDGGQPLDLSATPKGRRRQRKSVAVATGGRSALTPGKKLGCKVSSASPKFAPVVAAGCRTPASVADQGGRKASATLKRHGRPRKLYPVSADEISDDPEIALLALPSPDTSGVIPVAPKLGYLT

SEQ ID NO: 58364 - protein, 971 aa, Zea Mays
MVGAHLAAPTPRCPSLFPVSDSTHLPFPLAAGDPEPGAAHMAGRDERWGARGGPGDTHASTSRAPAGTAGESEGASPDSLRNTPSNIARLEDAIGHCAARRKYLAHTKSPSDGKDVRWYFCNLPLADKVLSSSVPRTEIVGKGDYFRFSERDSLALEASFLEREEVLLAYWWREYAECSAGPRGSLVESDDSAYLYKVEEERVGVPVKGGLYEVDLMRRHCFPVYWNGENRRVLRGHWFARKGGVDWIPLREDVSEQLELAYNCQVWHRRKFQPSGLFAARVDLQGSTLDLHALFTGEDDTWEAWLVFDTGPKLGSNTIKLRRGFSPSESASTKPSQDELRQTKEEEMDDYCSQVPVGHLVFMVHGIGQRLEKANLVDDVVDFRRVTANLAERYLTSYQRSTQRVLFIPCQWRKGLKLSGESTVEKLTLDGVKGLRVALGATVHDVLYYMSPIYCQHIIDSVSNQLNKLYMKFLKRNPGYSGKVSLYGHSLGSVLSYDILCHQESLLAPFPTEYLNMETSDRSQGAKSANEVALHDSGAKDHDTYTLGHSCTGNENSAVDEGSTRTDMSHMDSIVPSCVLEDSLNNPETGVPRGAVVAEQNEKENRIENHQTVYTEEGTTSGVSTKDAEASHISRSAEDVHEEVLDKEKMIISLEEEVKRLKAKLDQLEQHKHLVTESTSGVEYHGGKNGNHALNFGELFTAQGSINQPYSPQIKYTKLNFKVDTFFAVGSPLGVFLSLRNVRIGIGKGRDYWKDKNIIEEMPCCRQMFNIFHPFDPVAYRVEPLVCEDYQKKRPVIVPYHRGGKRIHVGVQEFTEDISARSQAIACQLKSLKVKAVAALLALSRNDTEEDGESANEEGRSYGSIMMERLTGSPDGRIDHVLQHSYLSALGAHTNYWRDHDTALFILKHLYRDIPEDPPSDVVERMHIKLFYERDPVEEETPVTFSDHAAIKEFCRKVRAYSTKMEDDANC

SEQ ID NO: 58365 - protein, 2075 aa, Zea Mays
MNALGDKVGSALIAQAAGVPTLAWSGSHVEVPLECCLDAIPEEMYRKACVTTTEEAVASCQVVGYPAMIKASWGGGGKGIRKVHNDDEVRALFKQVQGEVPGSPIFIMRLASQSRHLEVQLLCDQYGNVAALHSRDCSVQRRHQKIIEEGPVTVAPRETVKALEQAARRLAKAVGYVGAATVEYLYSMETGEYYFLELNPRLQVEHPVTEWIAEVNLPAAQVAVGMGIPLWQIPEIRRFYGMDYGGGYDIWRKTAALAAPFNFDEVDSLWPKGHCVAVRITSEDPDDGFKPTGGKVKEISFKSKPNVWAYFSVKSGGGIHEFADSQFGHVFAYGLSRPAAITNMSLALKEIQIRGEIHSNVDYTVDLLNASDFRENKIHTGWLDTRIAMRVQAERPPWYISVVGGALYKTVTTNAATVSEYVSYLTKGQIPPKHISLVNSTVNLNIEGSKYTIETVRTGHGRYKLRMNDSTVEANVQSLCDGGLLMQLDGNSHVIYAEEEAGGTRLQINGKTCLLQNDHDPSKLLAETPCKLLRFLVADGAHVGADVPYAEVEVMKMCMPLLSPASGVIHCMMSEGQALQAGDLIARLDLDDPSAVKRAEPFDGMFPLMDLPVAASSQVHKRYAASLNAARMVLAGYEHNINEVVQDLVCCLDNPELPFLQWDELMSVLATRLPRNLKSELEDKYKEYKLNFYHGKNKDFPSKLLRDIVEENLAYGSEKEKATNERLVEPLMNLLKSYEGGRESHAHFVVKSLFEEYLTVEELFSDGIQSDVIETLRHQHSKDLQKVVDIVLSHQGVRNKAKLVTALMEKLVYPNPGAYRDLLVRFSSLNHKRYYKLALKASELLEQTKLSELCSSIARSLSDLGMHKGEMTIKDSMEDLVSAPLPVEDALISLFDYSDPTVQQKVIVTYISRLYQPHLVKDSIQMKFKESGAIVFWEFSEGHVDTRNGQGAILGGKRWGAMVVLRSLESASTAIMAALKDSVQYNNSEVNTMHIVLLNAETESNISGTSDDQAQHRMEKLTKILKDSSVASDLQAAGLKVISCIVQRDAGRMPMRHTFLWFDEKNCYEEEHILRHVEPPLSALLELGKLKVKGYNEMKYTPSRDRQWHIYTLRNTENPKMLHRVFFRTIVRQPNAGNKFTSAQVSDTGLGCPEESLSFTSNSILRSLMTAIEELELHAIRTGHSHMFLCILKEQKLLDLVPFSGSTIVDVGQDEATACSLLRSMALKIHELVGARMHHLSVCQWEVKLKLDCDGPASGTWRVVTTNVTSHTCTIDIYREVEDTESQKLLYHSATSSAGPMHGVALNNPYQPLSVIDLKRCSARNNRTTYCYDFPLAFETALQKSWQSNCSSVPEGSENSKSYVKSTELVFAEKHGSWGTPIIPMERPAGLNDIGMVAWILEMSTPEFPNGRQIIVVANDITFRAGSFGPREDAFFEAVTNLACERKLPLIYLAANSGARIGIADEVKSCFRVGWSDERSPERGFQYIYLTEEDYARISSSVIAHKLQLDNGEIRWIIDSVVGKEDGLGVENIHGSAAIASAYSRAYEETFTLTFVTGRTVGIGAYLARLGIRCIQRLDQPIILTGFSALNKLLGREVYSSHMQLGGPKIMATNGVVHLTVSDDLEGVSNILRWLSYVPANIGGPLPITKPLDPPDRPVAYIPENTCDPRAAIRGVDDSQGKWLGGMFDKDSFVETFEGWAKTVVTGRAKLGGIPVGVIAVETQTMMQLIPADPGQLDSHERSVPRAGQVWFPDSATKTAQALLDFNREGLPLFILANWRGFSGGQRDLFEGILQAGSAIVENLRTYNQPAFVYIPMAGELRGGAWVVIDSKINPDRIECYAERTAKGNVLEPQGLIEIKFRSEELQDCMGRLDPELINLKAKLQDAKHGNGSLPDIESLQKSIEARTKQLLPLYTQIAVRFAELHDTSLRMAAKGVIKKVVDWEESRSFFYKRLRRRISEDLLAKEIRRIIGDNFTHQSAMELINEWYLASQATTGSTAGWDDDDAFVAWKDSPENYKGYIQELRAQKVSQSLSDLADSSSDLQAFSQGLSTLLDKMDPSQRVKFVQEVKKVLG

SEQ ID NO: 58366 - protein, 382 aa, Zea Mays
MPVTSGKLKRMIKSRNSILERNLNHVINNIRDAIAASGAFESIVEQLKKGKLEELTLADVKNSSEDTEMIPAVDVDNIEDPSDESAVVPAVITNVGAAPCITSEASLGNMHLEDPVPKTKDSGASSGFTGLTDNKKLSNDQQQAAKATVQVSKRPTAFGALFGKAAAGRRPDLFLGFSNVQGKTKVDKITSSVVLPFHHFSGGAKLSSAALPAKESLHSEPDSIQHSDPACQLEEVIQLDMGTDEQQPPENGNEDDGHCETEDTEMSKSPSGDPSVTEQRFRSLNEERNVKQNQKTPREFEFSVPVVPFDYAEARKNLVSSLPKAERRKDDAVARAINTDAGDKQRGSKKPPGGGENEGNFQHPRRRQAFPPSGNRNATYHQ

SEQ ID NO: 58367 - protein, 163 aa, Zea Mays
MFGQRAMKVENMVKLKEEFDYKSLCRKLDIELDKLIAENERQRKHFDDEVERIRAEAQCRIAEAERECKITLENKEAESTSNDTGEVHNLLQNEKMLRQSAEDEASDLKNQISHWKKLEATATAEIIKLQKMLDAEASQKEKLEEEIGVLRSQLLQMSMEADQ

SEQ ID NO: 58368 - protein, 337 aa, Zea Mays
MIEGNDPVTGHIISTTIGGKNGEPKKTISYMAERVVGTGSFGIVFQAKCLETGETVAIKKVLQDKRYKNRELQIMRSMDHCNAVSLKHCFFSTTSRDELFLNLVMEFVPESLHRVLKHYSNMNQRMPLIYVKLYTYQIFRGLAYIHTVPGVCHRDVKPQNLLVDPLTHQVKICDFGSAKMLVKGEANISYICSRYYRAPELIFGATEYTTSIDIWSAGCVLAELLLGQPLFPGESAVDQLVEIIKVLGTPTREEIRCMNPNYTEFRFPQIKAHPWHKIFHKRMPPEAIDLASRLLQYSPNLRCTARVHIHSLMSCESHMRGCQMDGHFLHCSTLNRN

SEQ ID NO: 58369 - protein, 50 aa, Zea Mays
MDDGPRGSQSVYHRHLHVHLLGGRQMNWPPGWTGREDAAEAEPRSAPMRR

SEQ ID NO: 58370 - protein, 435 aa, Zea Mays
MKLTCLSAAAGGGGGYHSPASHLLELEGVRFLLDCPIDLSALAAFAPVPLAGDAGGLIRAVPRYWLPAAVKEGGVDAVLVSSATGMLGLPFLTGLPGFTNTKVYVTEVAARIGKPMMEELVEMHREFVRYYGPDTDASPKWMEGEELNELMSMSQKAVIEGRENDLTSLVPLYSPGNVEECMHKVQSVKYGEEVCFNGIFMLKASSSGLELGNSTWTIQSPRASITYLPSSVFVSAHALDFDYSSLKENDVILFSDFSSLNDTDEDNEKLNEHSMDETDSSLCRYSVFRDDGADADERVPFVCNNDDITEEIERISFICSCIFGAVKSGGSVLIPIGRLGVILLLLELISEMLHSSSLKVPIFVISETAEEIFAFTNTLPEWLCKSRQEKLFAGEALFGHVELLKEGKLFLFPHLHSKGLLMEGALYCAMSTLEP

SEQ ID NO: 58371 - protein, 540 aa, Zea Mays
MVSFSGIDLKLASSFLFFPVLINSSLCCVTACRLLFSVLFISLDICCVGLICSPAKSVCILISMLHVSVDIISAIEFDKSGNHLATGDRGGRVVLFERTDIADNACRGELERQEYLVSRHPEFRYKTEFQSHEPEFDYLKSLEIEEKINKIKWCQTTNNALFLLSTNDKTIKYWKVQEKKVKRVSVMNLDTSQSSDNGSTSSPGTSSCRALLPNGGCTGKMYSPNNNMSFPPGGCTSLRLPVVVTGQEFTHVARSRRVYAHAHDYHINSISNNSDGETFISADDLRINLWNLEISNQSFNIVDVKPANMEDLTEVITCAEFHPTHCNTLAYSSSKGTIRLIDLRQSALCDNHAKLFEEHEAPGSRSFFTEIIASVSDIKFARDGRHILSRDYMTLKLWDLNMDSGPVATFQVHEYLRPKLCDLYENDSIFDKFECCLSGDGLHVATGSYSNLFRVFGCSPESVEASTLEASRNPMRRQVADPARPARTLTGAVRRGGENTSVDASGNSCDLSTKLLHLAWHPTENSIACAAANSLYMYYA

SEQ ID NO: 58372 - protein, 563 aa, Zea Mays
MCSVECQNQARLLQTLPNSGAVYTSGLFSNSDLHSKVNSTSLRFWRTYHNSGKFDLTDLTHPHMWYPKAREKKRNVFLHVGPTNSGKTYSALKRLEASSSGVYCGPLRLLAREVAQRLNKVNVPCNLITGQERNEIEGAKHSSVTVEMADMTTNYQCAVIDEIQMVGCKSRGYSFTRALLGLCSDELHVCGDPAAVPLIQRILEATGDVVTVQYYERLSPLVPLKSPLGSFSNIKAGDCLVSFSRRGIYKLKKRIEREGKHLCSVVYGSLPPETRTKQATMFNDDTSDLNVLVASDAIGMGLNLNISRIIFSTMMKFDGFCNRELTVAEIKQIAGRAGRYGSKFPVGEVTCLNPQDLPLLHSSLKSASSIIERAGLFPTFDLLSLYSRLHGTDFFHPILERFLEKAKLSPDYFITDCEDMLKVAAIVDDLPLGLYDKYLFCMSPVDFAENYARKGIVRLKEIFTPGTLQVPKTDNQLKELESVHKVLELYVWLSFRMDDSFPDREVAASQKSICSMLIEEYLERFGWQPQDRRKVLGGAQKLLQEYDVSQMNKYFQEVNPGPK

SEQ ID NO: 58373 - protein, 569 aa, Zea Mays
MLLCEAQKVLGNKWTEIAKVVSGRTDNAVKNRFSTLCKRRAKDDELYQENGVPCSNTNAKKVLTETGRLTPGGAGSLVHIKQTRSSSYNLKENLVPNMKLFELEKSTQDARQPLATISSNNQDNVNTVKSQNLVPTTKQLLGPEQHCVKREGNFLKKDDPKVATLLQQSDFLCSLATKIKSDNTSKSMDEAWQQLQDHLVKKEHNKVPENSGSEIASLLEELDDLIVDPYERKDEDEQKLSEHNGRTDVDNDHCNGSSQTSIVVTTNMVPEEMMGDCPVDNCNEDSSLCRKVLSGSTEPCPGAKMTGCGNLSEDQVAEGSVLQRVESISPVITDIDDLLVDPYESEAEDEEKSGEQNGQIDVHAEQCFGSSQTIIEVISDMAPDEVMETCSADNREEHSSICRNVLSGSMAPCPGAEIPTSEKMSELAEDSRLQCMEFASPVLANFASKECGETPEPQVLNEIVEDSRLQCIEFNSPAHTILPDKTGAENFASPSFDVVAKDSKPPSLEFTSPAHTVATFQPYADGIPTPKFTASERSFLLSVLELTSPGSRPETSQQPSCKRALLNSL

SEQ ID NO: 58374 - protein, 77 aa, Zea Mays
MEFVGSGDEGKRRRRRAGKKEIYARLARPVPFGDGKKEFWLDKNKGMICMALSSKALVITGIDDRRYWQHMPTSESR

SEQ ID NO: 58375 - protein, 371 aa, Zea Mays
MAYRRKQGVAAADHRSSYPQDSASSHGYTSFKSIDEPKLGLWRTLATRAKGILDEDGLAHKFEDLRKERPRSDATASSKDQAPNSRWSFENHWKAGDAASRIRPEALSASVNQLSGKIKNALEEGLTIVDNKTSSIIEETKKIQIRRKPAGSSPHVPNSAVDKHTLSTPDLSLRQPESAAQETGLKASRDVANAMAAKAKLVLRELKSVKADLAFAKQRCAQLEEENRLLRETKQKGSKTEEDDDLIRVQLETLLSEKSRLAQENSTYARENRFLREIVDFHQFTTHDVVSLDDGDMEGTEPEEDDDNDNGLICAENVLPAVEENPVDEEHCPVPSKLESPVASLGEPSSSPRSSDCHSASKPDASASDVA

SEQ ID NO: 58376 - protein, 474 aa, Zea Mays
MATSPPQNPSSGEPSDASSLAAAALEAPVRVWRSLVARFPPLPDSSSFLAGVSDLQLRYFGNSRPRRRRRSALPLPLRPVAAHSARIAGEMPKAFVILDDVVQHTLTNLHSIHKSLLFWQAKAEGTNSQKVYFMIFERGPRAFVDATYQTLTRLGSNGRPVQYILHSASDMVSTKLAALTSMQHCLAAFLAEVHSEVDKCREGLTENSDKSLHTLFIVLNTTFSKLEVSLRNACEGQDELFIDDGNLHELFGKLPEVDVESSEWTEALATDGTSLIYQNLQKLDSFLSSQLSSHKRPNKLTIYWLPYTCGAVGLSVCSLWLLRHSSLMGSPDIDNWIRDAKESVAGFWDEHVEKPIISIRDELFETFKQRDKGVMEKQEVQLTEDSLRRMLVAFCEQTEGQKLLEDLPVQAMLETLTKRYEKELIHPIQNLFSGELARAMLIQIQKLKLDLESTMVLREEVILHDVNGGCFLLM

SEQ ID NO: 58377 - protein, 390 aa, Zea Mays
MASPDDPVLSACKKNLSHFRIKELKDVLHQLGLSKQGKKQDLVDRVMAVLLSQQDQAFETNGLPKAKSAVKIVEDTFRKMQDPTNTVAVSRSHELGDSVTCKKKPDDSAQAVKVRCPCGDSKPNDSMIKCIDPQCNIWQHVGCVVIPDTEKSADNISPELPSCFYCEVCRLSRADPFWVTVNHLLLPILIGPSTVAADGSYTVQYTAKSFQLSRANREILQQAECNIQVWCILLSDKVPFRMHWPLHSDMQVNGIYVRVVNRQPTQKLGANGRDDGPLLTDYLKEGPNKISLSRNDTRTFCLGIRIAKRRSLEQVLNLVPKEQDGENFDDALARVRRCVGGGAEANNADSDSDIEVVADFVSVNLRCPLHLWEAQTKMSAAEGDVQFDRD

SEQ ID NO: 58378 - protein, 625 aa, Zea Mays
MDPEKRGYELQNFVAHDAEVRSLSIGKKSRRVFITGGNDRKVKLWAIGKQTPLLTLSGHTSAVEAVQFDSAEVLVLAGSSNGSIKLWDLEEAKVVRSLTGHRSSCTAVEFHPFGEFFASGSSDTDLKIWDIKKKGYIHTYKGHRGAIKTIRFTPDGRWVVTGGEDNIVKVWDLTAGKLLHDFKFHSGQINCIDFHPQEFLLATGSADRTVKFWDLETFELIGSSGPEGTGVRSMVFHPDGKTLFCGLDQSLKVFSWEPVRCHDVVDMGWSNLADLSIYEGKLLGCSYHECRVGLWAADISSMEDNPVKPVDSTANSRPASAMAHSRSSYKIKESGIAQSRVRGSHLTPASTDKTKKDRSSTIPRRPDSSLKSSVQSTTLMRRMKLVDSPSTNTKNVERNVGQRDISLASRAVMANNSATAKKSNLTESALVKDIYTTSQAVSAPIVVPRDILEDKTVSNVRRGTGETAAVPDDFRIPVHRRKPSLSGSAADSDSSSRSVFTEPDVCSEGLSSLKFSFGLTPYHKKEEFGDVDNEGIAQIAEKMERTVSLDHSQQLNDDKSFESPCSTTETAKVKYVRGVAVPLGKTKSLVERWEKRETSSTDYSPQTGSCGDRASRNDNHPFHLQ

SEQ ID NO: 58379 - protein, 108 aa, Zea Mays
MWKGVLMLNTVLTVREHQANSHAKKGWEQFTDEVIKTISQKKSGLVFLLWGNSAQSKTRLIDETKHHILKSAHPSGLSANRGFFGCRHFSKTNEILEKLGLSAIDWQL

SEQ ID NO: 58380 - protein, 834 aa, Zea Mays
MTSSASPNPSPVPVPTPITTANGTTSSPKDQPPPPPPLPQQQQQQGGGQEEAEAADGGGAEAAEAGVLAGVAAEAMEVDGGSGAGDAEAGGSVGGGVGAGAGGGAQQASPATVFRIRLKQSPASLRHKMRVPELCRNFSAVAWCGKLNAIACASETCARIPSSNSSPPFWIPIHILNPERPTECSVFNVKADSPRDFVQFIEWSPRSCPRALLVANFHGRITIWTQPTKGPVNLVRDASLWQCEHEWRQDLSVVTKWLSGISPYRWLPTNSTSSNLKTFEEKFLTQQPQSAVGWPSILCVCSVFSSGSVQLHWSQWPSQNSAHSRWFSTSKGLLGAGPSGIMAADAIVTESGALHVAGVPLVNPSTVVVWEVMPGLGNGIQATAKINAASSVPPSLNPPSWPGFAPLAAYLFSLQDYLVSEGAQTKKLTDNNETTEAASIHCCPVSNFSAYVSPEAAAQSATTTTWGSGVTSVAFDPTRGGSVITVVIVEGQYMSPYDPDEGPSITGWRVQCWESSCQPVVLHPIFGSPTSLGGQPPMQTVWSTRVNKSIPPTEDLKNPQTYVPMPTTSDERSSSECSVDRANRLSFDPYDLPNDVRQLAQIVYSAHGGEVAVAFLRGGVHIFSGPNFDQVDSYHVNVGSAIAPPAFSSSSCCLASVWHDTLKDRTILKIIRVLPPAILSTQTKISSAAWERAIADRFWWSLLARVDWWDAVGCTQSAAEDGIVSLNSVIAFLDADFHSLPTMQQRQQHCPNLDRIKCRLLEGTNAQDVRALVLDMQARLLLDMLGKGIESALTNPSTLLPEPWQASSDMLSSIDADKMTVEPALLPNIQHHIS

SEQ ID NO: 58381 - protein, 61 aa, Zea Mays
MPPPPAPPPPPSACHASSLCMPRLLPSIGRHARNKVKSDIEEAIGSGMEDFVLHIGPKGQR

SEQ ID NO: 58382 - protein, 364 aa, Zea Mays
MLPCFHAERKEVSRHDNATIQRNALESVSSYEGSMSSEKVPPTPHRIPPSPSRFAPSPQIARVGSVNLSIQQILRATQNFSPSFKLGEGGFGMVYRAVLPDGNVVAVKRAKKFAGPRDEFSNEVDLLAKIDHRNLVRLLGFTDKGNERIIITEYVPNGTLREHLDGQHGRVLDFNQRLEIAIDVAHALTYLHLYAEKTIIHRDVKSSNILLTDSYRAKVSDFGFARSGPSDTEKTHISTKVKGTAGYLDPEYLRTYQLTPKSDVFSFGILLVEILSARRPVELKRTPEERITIRWTFKKFNEGNTREILDPLLEDHVDDEVLEKLLSLAFQCAAPTRDDRPTMKEVGEQLWEIRKEYGKSVRKV

SEQ ID NO: 58383 - protein, 205 aa, Zea Mays
MEKLKESEELLERCLAVKKKILPEDHLQVAYTLVHLARLTLHRVVKDRDVNSDVTAYYLAKAKQFSNDSIRITEGQLNSSRKDQNKINNTSTADTDKSAAIILFQALHVFGLIDIAAKQLLGQGEQDYNSVQDALQKCVSLYKEPHTRRLVKNAAKQDYMICLTSLIDMVQSLFPIPHIPGLQELLCEAEQILGELEEESTRKKQ

SEQ ID NO: 58384 - protein, 926 aa, Zea Mays
MDRSINFRGIAGSAGNIMQGMGKFVFGNEGIESKEDSYVERYLYRISNGTIPDDRRSAMTELQSLVAESRSAQMSFGAMGFPILLNILKEDREDVELVRGALETFVSALTPIETSQGPNTEVQPASVNSDLLSQETENISLLLSLLSEEDFYVRYYTIQLLTALLTNSLKRLQEAILLIPRGITVLMDMLMDREVIRNEALLLLTYLTRDAEEIQKIVVFEGVFEKIFSIIREEGYSDGGVVVQDCLELLNNLIRHNASNQMLLKETMGFDPLISILKIRRGSAFNFTQQKTVNLLGALNTVELLLMGGPSGEAGKDANKNANQTALAQKNILDHLLLLGVESQWAPVVLRCMALRCIGNLVLRNPQNLDSLARKQVGEEPHVQPALNAIFSIILRTSVAQEFVAADYVFKCFCERNPNGQALLASTIVPHPNQGNMHEPAIDMPFGSVLLQALVSSDVNGDMEACCRASSVLSHIVKDNMQSKDRVLQIQLETLTPSLGRTEPVLHRIVTCLSIAASTEGENNQNNQPEEPYIQPVILRLLIIWLVDCSNAVNCLLESAVHLNYIIELASSKRYTACVRGLAAVVLGACILYNASHEKGRDAFAVADAISQKIGLTTYFLRFDELRRSLAHPLPEQHHRKELSRSSANSMSDFQEIEEDETNKDDQHPVLSEIFDSQFVNFLSKLEADIRENIMDIFSRTKTATALLPTELEQKNGEVDGEYIKRLKSFVEKQCNEMQDLLARNAMLAEELVRTGGGTTTDTSQRPNNGRERVQIEALRQELEGARRQIEALETDKSQIEAEANNQRNLAVKLESDLKSLSEAYNSIEQANYRLDAEVKTLRQGGSVPYPDVEAIKAQAKEEAEKDSEAELNDLLVCLGQEQTKVEKLSTRLAELGEDVDALLQGIGDDTAIPDDDDDDDEDSEE

SEQ ID NO: 58385 - protein, 466 aa, Zea Mays
MQVLLPYRQDAGASSAPSALATSSATSELNGSKPADAALKGQLVANNGEKLKDNNGDVNISDSSSDSDDEEHGPSKEDCIRQFKVMLKERGVAPFSKWEKELPKIVFDPRFKAIPSHSTRRAIFDHYVRTRAEEERKEKRAALKAAVEAYKELLEEASEDINQKTDYQEFKRKWGADTRFEALDRKEREILFSEKVKAVQEKVQSMRKAVIANFKSMLRESKDITSTSRWAKVKENFRSDPRYKAMKHEERETIFNEYIVELKSAEQEAEQAAKAKVDEQAKLKERERETRKRKEREEQEMERVKMKIRRKEAVSSYQALLVEMIKDPKASWTESKPKLEKDPQGRARNPDLGQGDAEKLFRDHVKDLYERCVRDFRALLSEVITPEVAARTTAEGKTAINSWSEAKGHLRSDLRYNKLPSKDKESIWRRYADDLTRKLRQSDTKEKDKSDTDGKQPRSSDPPRRR

SEQ ID NO: 58386 - protein, 133 aa, Zea Mays
MIFSYPAFKFMGLRSSLPLPHWSVVVSQVLFYFVLEDFIFYWGHRALHTKWLYKHVHSVHHEYATPFGLTSEYAHPAEILFLGFATVVGPALTGPHLFTLWLWMVLRVLETVEAHSGYHFPWSPSNFLPLYGG

SEQ ID NO: 58387 - protein, 141 aa, Zea Mays
MTGKNRSAAIVAAFLMKSRGWRLAQSFQWVKDRRPQVQLTDASQKELLEYELKLFGPSTQTLVPTESFASLGFGYTKPAGDMQTPVFNQTTMPSIFERFNPNDRPTNFTFGVERKAEANPRDNNSDGRVNPTSTENLMDSS

SEQ ID NO: 58388 - protein, 57 aa, Zea Mays
MCLWKVTFVDIFTGSVLTSASRMYLTCLACFFRAITLMQLLLSRCISNRVAYIPSAH

SEQ ID NO: 58389 - protein, 165 aa, Zea Mays
MDSPPPPHLDAPLFGADLIPSGRLRRMRGWRHSPGGLEEEIRMFQTRVLLGGMNMYDRYQDWRLDVDNMTYEELLELGDKIGYVNTGLRDDEITRNLRKVKHPSFSSLRFATEMERKCSICQEEFETNEEMGRLDCGHSYHVYCIKQWLSQKNICPVCKTAVSKN

SEQ ID NO: 58390 - protein, 86 aa, Zea Mays
MEGDTDEARRSELGSSPADQQMQGAGAGSAKSSSGRGSTALSTRFLQAATKHDSSSCRGQGGEGRGAGDGGRSARAAESMNSSEKS

SEQ ID NO: 58391 - protein, 550 aa, Zea Mays
MKAVERAKLVRSLRHESRRLRLLVLVIGFFLVTLTFVVVSKPDALLFNLNGRLSVDQAPRSLLIRQRVDADEGRSAETLASATGDPKVVEDDTYGEEASAKARANANARGTTAEEERMLASEPEQRKRAQEATTSEILDTEFNLTPDVDQRNGRDRSHQAALDNMERDKPLCDFSNFRANVCEMRGNIRIHPNGSSVIYMEPTSSGSKRNEQWKIKPYPRKGDELCLNHITEVTVKSSIVAPECSKYHDVPAVIFALTGYTGNLFHDFTDVLVPLFTTASEFNGEVQFLITDMAIWWTRKYAVVFEKLTKYPLIDFNKDNEVHCFNHAIVGLHAYMEFTIDPLKAPHNYSMVDFNQFMRRTYSLPRDAVRAPGETPQTRKPRLLIISRQRTRMFLNLKEIVAMAEEIGYEVVVEEANVNSNVGHFAKVVNSVDVMMGVHGAGLTNCVFLPHGATLIQIVPWGALDGICRIDFGYPAEQMGLRYKHYSIGVHESSLTEQYPLDHEIFRNPLAFHKNGFEFVRQTFMDTQNVRLDCNRFRPVLLEALDQLNQ

SEQ ID NO: 58392 - protein, 223 aa, Zea Mays
MAMEEGSGAVEKGPAVGTVADASASVIGEGAVKEEAGGRRQPPAGYAAVVIGGTFDRLHQGHHLFLKAAAELARERIVVGVCDGPMLAKKQYADLIQPIEKRMQNAMDYIKFIKPDLDVRVEPIVDPFGPSIVDQGLEAIIVSKETLPGGHAVNRKRAERGLTQLQIEVIELVPEESTGDKISSTAFRKMEAERALQQQNKQDDTAVGTPVGVQNIAVQSHGA

SEQ ID NO: 58393 - protein, 591 aa, Zea Mays
MDETPTSSGQSEDSSCEPNWWPPDLLEKIESASISRKHDVLGNLRSSSWKASQLLWSTGSYSGLIPNGFYSIIPDKKLKETFPTIPSVDDLQTLEADGLKADIIIVDTERDKKVFMLKQLSAALVKGLSSSPALVIKKIAGLVFDCFKRQNPDASPAKGSIEDTHFFGYKGPQLLGQIRHGSCRPRAILFKVLADAVGLESKLVVGLPDDGAVGFVDSYKHMSVVVSLNSMELLVDLMRFPGQLIPFSAKAIFISHISAAGESDSAENDSCDSPLEPNSPLYGLSDKVETEGIESSSNLSGRSLRNMMLRSRTFSEGKLSTSCSEPNIANAFWRHSQRRGVAEEPRGASSSPEHPLMRARGRSILGGEKQSFQEYTESGAASRSDGLGGTSTSNARRIRRRSISITPEIGDDIVRAVRAMNETLKQNRLQRDHVEGSCSYVTEDQSNANDCPNKDDASRIIGATDSDSRNRTGPTQKAMSLPSSPHEYRGQDTQKGDDFISKEKMALAWNKVFQSSPFLNKPLLPFEEWNIDFSEITIGTRVGIGFFGEVFRGIWNGTDVAIKVFLEQDLTTENMEDFCNEIYILRYQNFS

SEQ ID NO: 58394 - protein, 409 aa, Zea Mays
MLETMYPHGVNNFLDARSTLTLSSVYHFQSTRCFPFLDHQPLSYSSLQNPPSNLSNGGVENCHLLQSFSAIEDIGFDLEMHQGEGFLEGMLLDGWLLNLVRICGFVEDSVASWTLTNLLHSPNEKLQVSAADFWDGILSLDEAGEPLVNLGYFPSYSVLKRAMLSYGYLFDTSGTKASISGSTAAGGPDDSLPHNIIAWLRVVSACCKIRKVHSIFSPSEAEELLAIAISLFLDRRLEGLLLVLGDCLNSLILYFNTSEWETSCVMVAESIAQRVTLDLNCLRVVDCITGTNKRSKILRSQVALQLLKISFGLKILKLVTSINVKEKECDFFRLYVYLVLMDNLLFSSDAFRDKTGMVDAWRNYLRNCSTQIGCTDWRFYAPKARNKASYLLQGSILKKSSGDGKSCVR

SEQ ID NO: 58395 - protein, 77 aa, Zea Mays
MLPEAVAIVVAPTDPTRSYGIFRLTEPGGMDVLRECDESGFHTHRETTNGSPIYETCSKVHFNPNLRFEIVDLRSAQ

SEQ ID NO: 58396 - protein, 213 aa, Zea Mays
MAEFLEASCVAWRQTELREGGRGRTKQQQQRHPLASFPFSPSSPTAGVASTRARPAGGCRRCTRGPWAAAAYLYLRAAGGGGGGGSYASPLAMDAGVEKCGDAAAEGGGDLYAVLGLKKECSDADLKVAYRKLAKKWHPDKCSSSSISVKHMEEAKEKFQEIQGAYSVLSDANKRLLYDVGVYDDEDDEDSMQGMGDFIGEMTQMMSQVRPMA

SEQ ID NO: 58397 - protein, 821 aa, Zea Mays
MAVEKSSSGTSTPSTTSTMDRFQKIVLSWDYLRLIAESKGGKQAKVLQHVKNTYVSVAEYLGVFEPLLFEEVKAQIIQGRSNDEEESGMDWRRGAVGSCTESEGFHKLSVAVEDNFQDNVSENDLLLISKEKFEEGSTPNAYAFALVEQRGGGIHISLRTFVAGEIQNLNVAKPVKSTRLQHFASIIASQNSLLWILKVCSLSTIMREFTAMHSVASLPFKDLILSATEAHKDGDDQSRAWNVPEPLMDYLKVNLNDSQLEAVNAGLSRRSFVLIQGPPGTGKTQTILGLLSAVLHSAPARMQIKGGFDVLKHGPELDIDGKRAHWIKASPWLLGANPRDLIMPVDGDDGFYPTGNELKPEIVSSNRKYRAHVLVCAPSNSALDEIVLRVLKTGIRDENNNTYNPKIVRIGVKALHSVKAVSMDYLIQQKLSGVDRTLDGGRRGAGEYDRIRASILDEAAIVFSTLSFSGSSIFSRMTRAFDVVIIDEAAQAVEPATLIPLIHGCRQIFLVGDPVQLPATVISQTAQKLGYGTSLFKRFQAAGFPVQMLKIQYRMHPEISTFPSKEFYEGVLQDGEGLSRKRPWHSYSCFGPFCFFDVDGIESQPSGSGSWVNQDEVEFITLLYHQLALRYPELKSSPEVGVISPYRHQVKLLKDSFRSTFGDQSRELIDVSTVDGFQGREKEIVIFSCVRCNKEQKIGFVSDFRRMNVAITRAKSAVLVVGSASTLKQDKHWNNLVESAKERNCLFKVPKPLTAFFAEDNLKTMKVERRPPPELNARVLEEINQEVVRQELMNVDDAADHADAGDDDDADMDADDGGGDD

SEQ ID NO: 58398 - protein, 95 aa, Zea Mays
MVNTQAAADVVDCSNPKNSKYYVVVVQYMARLNAENIKNFLYELNEKQIPKKRFNMRLAPEEESHKLTGFVHNAVTCIGMETNIPIDGPTLVTQD

SEQ ID NO: 58399 - protein, 87 aa, Zea Mays
MARFVDPLVVGRVIGEVVDLFVPSISMTVAYDGPKDISNGCLLKPSATAAPPLVRISGRRNDLYTLIMTDPDAPSPSNPTMREYLHC

SEQ ID NO: 58400 - protein, 691 aa, Zea Mays
MTSLSRELVFLILQFLDEEKFKETVHKLEQESGFYFNIKYFEDEVLNGNWDEVERYLGGFTKVDDNRYSMKIFFEIRKQKYLEALDKHDRSKAVEILVKDLKVFASFNEELFKEITQLLTLENFRENEQLSKYGDTKSARQIMLAELKKLIEANPLFRDKLQFPSLKTSRLRTLINQSLNWQHQLCKNPRPNPDIKTLFVDHSCGQPNGARAPSPANSPLLGSMPKPGGFPPLGAHGPFQPAPTPVPPLAGWMSNPPAITHPAVSGGAIGFGTPTNPAVLLKHPRTPTTGNPGMDYPSGDSDHISKRTRPVGMSEESHNYQQDDFHKAVARTLSQGSAPMSMDFHPLQQTLLLVGTNVGDIGLWDVGTKERLVVRNFKVWDLGKCTMTLQAALVKDPAVSVNRIIWSPDGTLFGVAYSRHIVQIYSYNGGDDIRQHLEIDAHVGGVNDIAFAHPNKQLCIITCGDDKTIKVWEATSGAKQFTFEGHEAPVYSVCPHYKENIQFIFSTALDGKIKAWLYDNLGSRVDYDAPGHWCTTMAYSADGSRLFSCGTSKDGESHLVEWNESEGAVKRTYQGFRKRSMGVVQFDTTRNRFLAAGDEFMIKIWDMDSTGLLTTIDADGGLTASPRIRFNKEGTLLAVSTADNGIKILANADGLRLLRTLENRSFDASRNASEAVTKLQQAVQELVLRQL

SEQ ID NO: 58401 - protein, 551 aa, Zea Mays
MAYLLLHPQFTCSQPPSHRLRTSQDAVDGLSDESDGETSTKKKRTPRRGRKKATVETSRDVGEEIEVITEQTAAEETKEVKRRGRKKAATSASSEEEKDKAKEPKKRGRRKVKTVEEPIDNAGEHLSKDLMLYNEREDQTRLQNSASVLESKIASVLHEDIGEVDDLIPLVCCFGPAKYSFIPSGRPANRLIDHEIHDRMKDMFWSPDKFVRAPGGSSSNVALALAAIGGRVAFMGKLGDDDYGQSLLYHLNINGVQTRAVYMDPSAPTAVSLMKVRTEGSLKTNCVKPCAEDCFLPSDINPAVLKEAKMFYYNSSALLEPTTESSLLKAIDVSKKFGGTIFFDLNLPLPLWSSSKETKSLIKEAWEAANIIEVTKQELEFLCSIKPSEKFDTNDNDKSKFTHYSSEVIMKLWHSNLKVLFVTNGTSKIHYYTETHNGWVRGTEDAPITPFTGDMSQSGDAIVAALMRMLVINPHLITDKVYLHKAVKHAIKCGVIDQWVLARERGFLPKERADPTSEQYEVKSITEREYRTLPDAMQSENTSTSELAYVE

SEQ ID NO: 58402 - protein, 781 aa, Zea Mays
MLSGVDHDVPDGIGMARLAWTRLPTADGEGAGPSTSEAADDELLSGAAIESLDYEVIENYAYREEQAQRSKFWVPYYVMLKWLFALLIGVGTGLAAIFINLAVENFSGWKYTATFAIIKHSYFVGFFVYTVFNLALVFSSVYIVTNFAPAAAGSGIPEIKGYLNGVDTHGILLFRTLVGKIFGSIGSVGGGLALGKEGPLVHTGACIASLLGQGGSAKYHLSSRWVRIFESDRDRRDLVTCGCAAGVAAAFRAPVGGVLFALEEVTSWWRSHLMWRVFFTSAVVAVVVRSAMNWCNSGKCGHFGAGGFIIWDISGGQEDYSYQELFPMAIIGVIGGLLGALFNQLTLYITKWRRTCLHKKGKRVQIFEACLISLVTSTISFVLPLLRKCSPCPKLETNSGIECPHPPGTDGNFVNFYCSQDREYNDLATIFFNTQDDAIRNLFSAKTFHEYSAQSLITFLVMFYFLAVVTFGTAVPAGQFVPGIMIGSTYGRLVGMFVVKFYKKLNIEEGTYALLGAASFLGGSMRMTVSLCVIMVEITNNLKLLPLIMLVLLVSKAVGDFFNEGLYEEQARLRGIPLLDSRPKQVMRNMNARDACKNQKVVCLPRVSRVVDIISVLRTNKHNGFPVVDRGQNGESLVIGLILRSHLLVLLQAKVDFQNSAFPCGPGVLNRHNFSDFVKPASSKGKSIDDIHLTEDELGLYLDLAPFLNPSPYIVPEDMSLAKVYNLFRQLGLRHIFVVPRPSRVVGLITRKDLLLEEDNNNVMPELQSTSGLAERQNARG

SEQ ID NO: 58403 - protein, 123 aa, Zea Mays
MATAGAFHAGGFLLLPVRRSLRGPSPSPWSHFRTHFISSKPPPSTPLPPPVPPARLSPVGSAFGPPSRKTGAVGAGAGAGVVGWYLGLLDARPVLTKSVTAAVIFTAADVSSQARLLLRLLQD

SEQ ID NO: 58404 - protein, 194 aa, Zea Mays
MEPPNQRRQNKSRHSNHKHNPNFSCILNHSNPCNLKCSCIRQHSIPSNLKCSCTPSHNSSHKCRCTLRRSCTLSHSSPKCRSIRSCSNSHNYRPTRSHRNPKCKSTHSRSSPHKCSCSHQSSRPPNPNLRYISTITGGAHKRSCSPNCQVSCRHRGKPDLALTVRDYCWHILGTCMLACDSLDPDLGFCASCTM

SEQ ID NO: 58405 - protein, 53 aa, Zea Mays
MHVSYSLHSLDCNLADGEYVLIPEQGGVHEEDQEQAPETAIEDLPTAPAIEGK

SEQ ID NO: 58406 - protein, 390 aa, Zea Mays
MGSYAYKYCMCFTRKFRSPDAQPPPDVRAAHLSFASDAHALRRFVAGVQGESPADVDRILAMLSGGHSHGIARLVTRSPAASTPTLEDFFAFLFSPDLNPPIAHQVHQDMSAPFSHYFVFTGHNSYLTGNQLNSDSSDVPIVKALQRGVRVIELDMWPNPSKDNVDILHGGTLTAPVEMIKCLKSIKEYAFCASNYPLVITLEDHLTSDLQAKVATMLTETFGDLLFVPNPDPMKEFPSPASLMKRIIISTKPPQEYKEFLKAENNRSGSGNIAELPDQGSLRRIDSNADESDGKDELDEQDEEDSDEDDPKFQQDTACEYRKLITIQAGKPKGHLRDALKVDPDKVRRLSLSETQLAKATISHGAEVIRRIYSVCIQRARGLILQTTIQ

SEQ ID NO: 58407 - protein, 303 aa, Zea Mays
MAGALLSSPHYLWSPTSQPSLRPRSRGPLGTGAVRVLPPRRRARVLASCSREPAAMNRGLEVERRRLLMSGLVSSFTIVLPISGAYAVMETNEDVKMNTQVDEINAYSFLYPVELPGKKFSFKWVESRKPERYSSAAPLSPDARQRIVSERVDMIHNVVISVSIGPPNSRFLPSKDKSLWDPKDVADCILSDRSTLKVTTGQRMTESSVLDAHATEVDGEPYWYYEYLVRKSPTKSASEPNLFRHNVTCTAERDGYLYSLNASTLSKQWESMGPFLQQTVASFRLLPPTENYVPPYKDPWRFW

SEQ ID NO: 58408 - protein, 147 aa, Zea Mays
MRRRRRLRGGVGRTAGTAGGERGRAVCTRAVGCRARPDDVPSFAAKPDWCPVFLRASLRQFEGLEDAADVLVNSFHEIEPKEADYMALTWHAKTIGPTLPSFYLDDDCLPLNKTYGFNLFNSIRGAWQWIVQFWQTIHLGCEVKRRT

SEQ ID NO: 58409 - protein, 400 aa, Zea Mays
MSSPSPLCAASCSTALRAPPPPLLRFRRSYAPVAASVPRTAPAVSDDLVLRIAEQLEDSVTSTSPLLDPLRSASALSLLSTRWPTRRSSEAFRFTDISYLRSLPISLPSREPDLKLPSSPFSSHVLFSDGILVSSSGAHVSALADLPPGRARDRAAAALAAAAEFAHKDLFYDFNAVGARDVVVVHVPEGVKVADDPIHIMFAYTNSFAESMLMSNPRVLVVAEKSAEVAIVEEHFGAGEEGGCYWANPVAEIIIDEGARVVHSYVQHQSFAAAHTKWTVVQQDTTSKYEFVEVSTGAKLNRHNLHIEQLGPETETELSTLHLTSQNKQIHDLHSRLILDHPRGFSRQLHKCIACGTGNSIFDGNIKVNSSSSMYHQYTREGAAPISDTVIHPDTHVAKY

SEQ ID NO: 58410 - protein, 549 aa, Zea Mays
MASANAISTASLLRPLSQGRATRSQRFVVRANAKDIAFDQKSRAALQAGVEKLANAVGVTLGPRGRNVVLDEYGNPKVVNDGVTIARAIELYDPMENAGAALIREVASKTNDSAGDGTTTASVLAREIIKLGLLSVTSGANPVSLKKGIDKTVQGLIQELENKSRPVKGGGDIKAVASISAGNDEFIGSMIAEAIDKVGPDGVLSIESSSSFETTVEVEEGMEITSIKEILPILEKTTQLRAPLFIIAEDITGEALATLVVNKLRGILNVAAIKAPSFGERRKAVLQDIAIVTGAEFLAKDLGLLVENATEEQLGTARKVTIHQTTTTLIADAASKDEIQARIAQLKKELAETDSVYDTEKLAERIAKLAGGVAVIKVGAATETELEDRQLRIEDAKNATFAAIEEGIVPGGGAAYVHLSTVVPKIKEAIEDPDERLALILFKIRWYELYLPEALVAPASLIAHNAGVEGEVVVEKIKESDWEVGYNAMTDKYENLMEAGVIDPAKVTRCALQNAASVAGMVLTTQAIVVEKPKPKPQVAEPPEGALTV

SEQ ID NO: 58411 - protein, 63 aa, Zea Mays
MKTKLRSFSSVFWTRNEGSVRGSDKILEAWTTCLMMEKTFIPLKYLVVCVHRTECMIVIFTTL

SEQ ID NO: 58412 - protein, 397 aa, Zea Mays
MDGRRRGGGAMAWLLLLLASLCTGACGLNADGVLLMSFKNTVTADPLGALAGWSYSDAAPCAWNGVICNGFPQDDTAPAAANVTSASADGNGTATVARNATGATAAAGLGASLAAATVSRVISLVLPNAQLSGTLPPDLGRVEHLRHLDLSGNGLSGSLPPTLLNATELRVLSLAGNALSGELPDAAAAYARGLQQLNLSGNALAGRLPAALCRLPSLLALGLASNHLAGELPVGGLGTLELVDLSDNDFNGSLPSDFGGTALRLLNVSSNKLAGAVPTELAAVVPANATVDLSRNNFTGAIPQAGPFAAQPAAAYEGAEKLKDFEAQVRAVARFRHPNILRLRGFYWGADEKLLIHDYAPNGSLANIAFSSKFLLRLSPAPTFIQILEIASESCLI

SEQ ID NO: 58413 - protein, 560 aa, Zea Mays
MAGPTSRLLILARRADRRRCLPFLVPRALQAAPPTFSPALPLPPCLPASTPVMSYSSAFTSVHGERPSSEYAKIRKESLETQFGRILGSSSRRHFADRGFGPFLALYRAATISFHVVKLTIWHLLLNDMHKRAEKFRETLIRLGPFYIKLGQALSTRPDILPSAYCQELAKLQDQIPPFPTRIALRTIESQLGSRISDLFADISPEPIAAASLGQVYKAHLRSGELVAVKVQRPGMAPLLTLDALLFHMIGGQMKRFAKARKDLLVAVNEIVRHMFDEIDYILEGKNAERFATLYSHGSSGVNSEASTSIKVPKVYWNYTCKTILTLEWIDGIKLTDAERISKANLNRKRMIDEGLYCSLRQLLEEGFFHADPHPGNLVATEGGSLAYFDFGMMGDIPRHYRVGLIQMLVHYVNRDSLGLANDFHSLGFVPEGTDLLAVADALRFSFGDVRRQSNDFQGVMNHLYDVMYEFSFSLPPDYALVIRALGSLEGTAKALDPEFKVIESAYPFVIGRLLADPSPDMRKILRELLICDDGSIRWNRLERLFHGPILSVNMITNLW

SEQ ID NO: 58414 - protein, 120 aa, Zea Mays
MLFSTPKVHIIIDFHCPLSSHSPEAVVATELFVDLLVDYLNAYAYDAQIAGLFYSIYVTSAGFQVSLGGYNDKMRVLLNAILVQIVKFEVKPNRFSALKLRESYGLLSPLMPLRVKSLVG

SEQ ID NO: 58415 - protein, 73 aa, Zea Mays
MSLVLHVRRGRHYFPCELVELLGLTLRPRRHGNDEDTRARARPTSSCLSLWLSRLCEVHESSVKYAHAINLIG

SEQ ID NO: 58416 - protein, 241 aa, Zea Mays
MLPCHISCIEATGSPISTGRWCCKNCSAGTKEPVEGDMVLAHGNPNCLHESCVVCDRLAACRSPKCDNSRALVISSVDPEIDTCYSCKICGGTEEDEKRFLICGNVLCRYMYYHIGCLKSMQISTSVERGSPCWYCPSCLCRVCLCDKDDDLTILCDGCDEAYHIYCITPRHTSIPKGQWYCSSCSVERAEEGMRQYERRTLKLHRKEDAGLQSWNFDGVDLLLSAAEQLRIDEQLETRTD

SEQ ID NO: 58417 - protein, 134 aa, Zea Mays
MKILVAVKRVVDYAVKVRVRPDGRGVETANVKMSMNPFCEIAVEEALRLREAGVAAEVVAATVGPAQSADTLRTALAMGADRAVHVLHDPDPARPLLPLAVAKILRAVALQEKPGLVILGKQIGVGGDDRCFDT

SEQ ID NO: 58418 - protein, 140 aa, Zea Mays
MSSPSAISTELLQAAASELLQRRRGFRPCRPAEERRFAASHSMKGREEKRWEYLVGARCRRRGQRKPQHPGLGRRRRQLWSESEESKRAGMQRTEGERGNAGGAVVCGLQPREDCQTQMRLRRDLFCAGLQFDGFGFFTK

SEQ ID NO: 58419 - protein, 357 aa, Zea Mays
MEHSYAQECDFVAIFDADFQPDPDFLLRTIPFLVHNPKIALVQTRWEFVNYNICLLTRIQKMSLDYHFKVEQESGSSVHAFFGFNGTAGVWRVSAIGEAGGWKDRTTVEDMDLAVRASLKGWQFLYVGDIRVKSELPSTFKAYRHQQHRWTCGAANLFRKMAGDIVISKGATVWKKLHLLYSFFFVRRVIAPILTFLFYCVVIPLSVMVPEVSIPAWGMFYIPTAITIMTAIRNPWSIHLVPIWILFENVMSMHRMRAALTGLLETTYVDEWVVTEKVGDHVKDKLEVPLLTPVKPTECVERIYLPELLVAFYLLLCASYDVVLGAGHYYPYIFLQAFAFLVLGFGFAGTVTPCSCS

SEQ ID NO: 58420 - protein, 164 aa, Zea Mays
MLYCRTFKNEIVRAYAQDHFFDVITNSVGLVSALLAVRFKWWMDPVGAILIALYTITTWARTVLENVGTLIGKSAPAEYLTKLTYLIWNHHEEIQHIDTVRAYTFGTHYFVEVDIVLSGDMPLSQAHDIGESLQEKLEQLTEVERAFVHVDFEFTHRPEHKAEV

SEQ ID NO: 58421 - protein, 92 aa, Zea Mays
MSSKLLRLVAVEFSMMGCEAEMEELCHRSRQVEHRAMASLVPSLSYRLHHPFLHPRSHLEIACPRCNSFTLLTGHVQPYTVNLTPLHDIRHN

SEQ ID NO: 58422 - protein, 67 aa, Zea Mays
MIFMTFISMHSIIICVVFSSAYMRCTRLCSLNPGVTGLPKVSTTTTTTPRKRRMASVLDAVLQFTKT

SEQ ID NO: 58423 - protein, 620 aa, Zea Mays
MDRADTSGFVSGGCFVGCSAPSSTVENMGQSTLCMDGLNPAIVSCSHVNGNTQIMNDITARDDGSRLVLGLGPTPNFYSAVSTGSKQAQRLSGQSSTFTDSGMLRLGLHTDGGGAIQCLQGPNGALHSLGIVDEASTSTTVRSMGGYMPSLLFAPRSNPTVNETQVEIPDSLNLTHSTSNSQHIQRHLQFSPEPSAMTESSFGVSSDVVTATTTSERSHSRHPKKCRFKGCSKGARGASGLCIAHGGGQRCHKPGCHKGAESSSAYCKAHGGGRRCEELGCTKSAEGKTDYCIAHGGGRRCEHPGCPKAARGKSGRCIKHGGGKRCLVKGCIRSAEGKAGLCISHGGGRRCQYPDCGKGAQGSTLYCKGHGGGKRCVFDGCSKGAEGSTPLCKAHGGGKRCMFEGGGVCAKSVHGATEYCVAHGGGKRCSVPGCTKSARGRTDCCVKHGGGKRCKVENCGKSAQGSTDFCKAHGGGKRCTWGTGCEKFSRGKSGFCAAHGTLMARQREQEAAKNVGSMIGPGLFSGIVVSSATAASSMTNEHSSSGVSTASDCDGTVRSQSMIPPQVLVPRSMMPSWSTEPVDGGREGGHVVPEGRVHGGGLLSLIGGSFRNADLEKLQS

SEQ ID NO: 58424 - protein, 725 aa, Zea Mays
MVESVEEAECRRAYDSAAEVYMSSFSHIKLAEEDALRDEYEAALRKALDAYNTTAVGTGTSRAHYEKVLNNFCRKAFQDYKKNAFLEADKQCSNAKHNMEKKIRAACTAPGVKVSAVIQVLETALAEYETSCTGPAKWRMLAAFLRQCLEGPILDLCLKLINEVESEKTSFTLRCRSNEDQLELLKKQLEANESHKSEYLKRYKAAINEKQKASVDLSSNLANLRTKCSTLEERCVSISKELDHVRHECTDWRVKYEQSVSQHKAEQDRFVAQLASLESRHSSAEGKLGAAREHAASAQDEAAEWKKKYEMAAVQAKTALERLASVQEQINKIAQERESSIRAEFASHLEGKEEEIRKLVAKIREAESEESVLTERLLVVESKTQGHNKETTGLRDEIKELTSKLEYLRDRAVSYEKQARMLEQEKNHLQEKFLSECKKYDEAEQRYKSAERDAKKAVELADAARTEAIAYQKEKDKAQQLSIEKVAVIERVQRQVDRLEQEKVNLLGEVQRMHNSESDAWSKVTLLESRVAEREKEMDDLLSRSNEQRSSTVRVLESLLATERAARAEANKRAEALSLQLQSAQGKLDILHQELTSIRLVETALDSKLRTTTYGKRLRDNEVRLYSIQDMDIDPPERSRKRTKSNTSPLKPVQTEDGGSVHMREDSVTVSTDVKDDNPDGYKKFTIAKLKEELTKHGFGTQLLELKNPNKKDILALYKKHVLCE

SEQ ID NO: 58425 - protein, 96 aa, Zea Mays
MLMQKITRRWKAKYFSCVGTLAFSCEGALLASGSADCTVKLWDVAFSTKALKTEDTKGSSSANRLRLLKSLPTKSAPVYSLRFSRRNLLFASGALA

SEQ ID NO: 58426 - protein, 76 aa, Zea Mays
MAAPKKTMRALRYDKYGGGAEGLKHVEVPVPSPSKGEVLLKLEAASINPIDWKIQKGMVRPFLPRKFPFIPEQRVD

SEQ ID NO: 58427 - protein, 217 aa, Zea Mays
MEGLALLPLTMRAKVACFRPAHLPPVLAMGAGANNHEESSPLIPAAVAAPAYEKPVSAHAFGGVPRESWNSGILSCLGRNDEFCSSDVEVCLLGTVAPCVLYGSNVERLAAGQGTFANSCLPYTGLYLLGNSLFGWNCLAPWFSHPTRTAPQGSPPWIQQWALRLCHDAAHGADHGAWHVSYSTTFPTLVLSVLPVVYHLLLLALMCDVSPSVNTSL

SEQ ID NO: 58428 - protein, 775 aa, Zea Mays
MAPFGDGGWGGDGGEALLGRDPLRSGSAPPTMEAGAEAAVAAERVFGSVGGGASFFSGIDGRGLGARMDEVTMRHGAAGVQEHFGNSASLSVRPHGQQFNGTGDLDEQQFGLSRVHSGGVMANYSASDMGPLWTDMNPDNVDYCRNIQNRSMSNIGKMNAYGNRDLSASYMFDSNLLDALSGLRLSNSLVMDQWNHGEGQLDEILECQRDFSKIGDENRSPLVGNVFRASRSDVHPLPIYGHGISQRQTSALDGSNVSRFSRHHIKGVDHLSLAAERVAAMQSGNLRRGTNLSRNAYMTNMVNPMSNRYYSNTDLDLVSSRRAFLDDLLAQQYLQEDNLSYDDSRIYHGEPRFSSSRMQRPGSHFYPNSRNILSHGDRQSRFFSLNRKAMGRNIGSQVYHDNALANYLDVPSLDNADRNGADSVELIDVVGHVKEVSMDQYGSRFIQQKLEIASPDDREKIFPEILSNVIVLTTDVFGNYVIQKFFEFATESQLIQLADQLKGRILELSLQMYGCRVVQKVLEVVGMDQKVDIVHELKNYILKCIGDQNGNHVIQKCIECVPEDRIPFVIDPILSQILVLCTHQYGCRVIQRVLEHCHDPVTQSAIMNEIMQQTFHLTDDKFGNYVVQHVLEHGKPEERSVIIQKLSGQVVTLSKQKFASNVIEKCLEFGTPEERDSLIGEIISSGQTFQELMKDQFGNYVVQKVLETCDDKYLEMILSSIKLHLNELKNYTYGKHIVARVEKLIVTGENRARMASMSGQHQQQQPNNCTAVDEH

SEQ ID NO: 58429 - protein, 1291 aa, Zea Mays
MPRSPSPSPSPSPSPERRQNQHQPARRRAAAASSQMLLLHHHHRGGGGRSPSPPPRRSLRPRRAAAPSSRPLVDDFFPFPSSPSSSPSRPRQRGLSPEPSSSDSGCDGGAAGSSVSDRRRRKLKLVVKLSQLPPDQNHRRAPLPPQYSDGSDGADDLAGDGSGDEEQVKPPKKRRIEPRADRSRHREVVAGGRSDPASAPRTKRSSVPGTARTTPLPDRKALEMILEKLQKKDTYGVFAEPVDPEELPDYHDVIEHPMDFSTVRKKLARNAYRSFEQFEDDVFLICSNAMQYNAPDTIYFRQAHSIQELARKKFQELRDEGIPTENPIKSEQKSRPNFCSGEQVKKPVLRYLDDDLDFLSRKDQDKRSNSNNVNDDMSFNGHVKKTLSKNAPDQSCLLQKERINKPISRNSEDNLSSSFHKKQRKKLISRHSEDDLNCPSGRDRARKVISKNSENDENSPFHKHQVKKSAPQRSIDGLSFQEKHIKKPIDGNGEDPGFSSCKRRIEDPFCTNVEDASFSSTKRLSEKPMSEKPISINKEEDLDHCHQESSKKPSCRVEQDDHGYSCDEEAVKKPGCMDSHDAQGSDISAATIASVGDGSNGLSMPQPNNSEPTGCTVANGVIDKDISSPLDEIRSEKTDDILAKPSYKTIVVDENRRKTYDASEGQSPMESDPVFDVFSAEPKELVNVGLDAEHSYAYARSLARFAGSFGAQGWRIASDRIRQALPADVKYGRGWVGEYEPPLLPILVVNDQPRYLKSSETNRQRNASLPRDNERLRSTETNNPKDMRRMTTDNNVVGVPGQLDSPEFKPRLFGVSNELQHRSTGTLSLHENHRVSGNVAKTKRTTNEKTRKGTSSSSARPREMQLQKGASSGALDNLASNKMAGQPRPFLQPPESNRTQPMRKIDSSKNKIPIEMAPQQVECAKGAASGVHDTPLSDGQPKHFFQSQAAASSGVHDMHSSNGQPKHYFQSQAAASSDMHAMPSSNGQPKHYFKSHAAVSSVVHDMPSSNGQPKQIFQSQAVASSGGHDMPSNGQSKPLFQSQEATILQPKNEATWVYHGRPGDGKVGTSNKSRPSTSIGFINKNHQSVNAATFAMNLNGQKIVSDHAKSAGTTAMPVQVNIPNRGLDAPRNMFSAFPAAVRENHSIPPAPMAQSWISFGATTENKPTIVSPTSLDNNCGWKMPFANVQPSDDTKINAVPQLFRHPVQVARENSVQSKGLVIFPQLVQPDFARSQGQPQWQGLVPHMQQKPGKDVLRPDLNIGFPSPRSPPARQSSGINLEAQQPDLALQL

SEQ ID NO: 58430 - protein, 699 aa, Zea Mays
MRGGAHEGRRQWRQVDACARNISARLDFDANGYGDLMDMIFLQVRMEAFAALGKMQRVSEGVLLQSLEKKVMKTDRMGVSIINGQKLPPKLKIPCAAGIFSHGVEDEFYEVRRTACKSLGALAKFSTQYTEKALDLLMDMMNDDTEAVRLQALEALFSMATYGCLSVQEKHMHMFLGLLVDANVLIRDAARKIFGLVNMPKLQIFKSAVDGLVTSLEKYPEEEDIYGIMFSIGKNHGSFSANIAKHLAKEITMASDGELILDKPRVKALLIVSISAPFSDDKHKQLGIPSIIFSYAIPLLEKISCALGEVDQDSLLSYLYHKGGMPFWENRSVSAEFGESESCNVETVKIGAHIENTAKEAKCLDEVLVMKSILEIVEGVWTMRMSCNVCEVRTIFRTCKEELRLLAENSSGSIGALLSFLSEYLDAILFIVEIWQLIQLDKPYTCGLTSLDILLERLDMSVRRMKYCYIGLNRVLEVQVLELSLIAHLCRLSKIAVCSKVVLGKVLWVINRLEDLCADGSCELSDFSGEIKKACDTNRIGDNLIGNINNLFQLFHLKPTTDFGMLKVISAMLRVCDNDSENPLQYICGLPVGVSFKISLWNISGHHRLWLRMTIGESVQHTFLEFSRFEGNDEVMSGSMVVPLYATPKTCSFVLRVCLVMECPSAGISTHQGGHGGPSDCVVQLSDELNVYFVSASQW

SEQ ID NO: 58431 - protein, 92 aa, Zea Mays
MKAMKYGSVPVQLNFSSDESRESKGHECRNTVMSQYIISTYGDLSLSQALDDFKNDPSHWDRQIKDGMARGSSWDAKCYSLHWEAYSSITKL

SEQ ID NO: 58432 - protein, 578 aa, Zea Mays
MASSPSPSPITIRATSPPSTATPSPATTTPKPDSPAPVTQPNATPADPPSSPAAPPPLPPPASTPPPQLPSPPPSLPPPPPDAVPPPPVVVATPPPAPAAVVPPPSSPAAVPPPPTPAAPPKASPIRPPAAASPPPSNLPAPNPPADPTPPTVAQPPPPRRRPPRSPQTEPPPLAPPPSGIPVEPSPTSPSPTSADPSIPTPSSPSSPGTTPSTPGSDGTPSVPAPATPGDSVSPVTTGGQGSNKSSSPASQSSSSSVDSGGLSSGAKAGIGVVVAIIVLSLVGAAFWYKKKRRRVHGYHAGFVMPSPASTPTQVLGYSAKTNFSAGSPESKDSMPEFSMSNCRFFTYEELYQITNGFSSQNLLGEGGFGSVYKGCLADGREVAVKKLKDGGGQGEREFHAEVDIISRVHHRHLVSLVGYCISDDQRLLVYDFVPNDTLHYHLHGRGVPVLEWPARVKIAAGSARGIAYLHEDCQPRIIHRDIKSSNILLDNNFEALVADFGLARLAMDACTHVTTRVMGTFGYLAPEYASSGKLTERSDVFSFGVVLLELITGRKPVDASKPLGDESLVEWVSYTSF

SEQ ID NO: 58433 - protein, 176 aa, Zea Mays
MQGKDMIGRARTGTGKTLAFGIPIMDKILSYNEKTGNGRNPLAIILAPTRELARQVEKEFRESAPLDTLCVYGGVPINQQMRALNYGVDIVVGTPGRVIDLLRRGVLNLSQIQFVVLDEADQMLAVGFDEDVEVIMEQLPQNRQSMLFSATMPSWIRKISNKYLKDPVIIDLSCIE

SEQ ID NO: 58434 - protein, 221 aa, Zea Mays
MATAVSTPADLSPAPVPRRRGRPPKNPAPAPAPAPAPAVAEVIGDYERERAARIRENMERMQKLGILDLAQTLSYSAAGSARGTGSGRRRRKPVDPGPAGGARVKPASPAPSRRSLRLKDVESISYCETEPKKEKHSEVGKIEVVEVGAKEEIYTEEHDRLLGTCYTPWTLFVDGYGKDGKRIYDQVRGQTCHQCRKLLVIIQAAVNARLFKGSSVEIVCI

SEQ ID NO: 58435 - protein, 387 aa, Zea Mays
MNKIFRENIDFLLERFENGDLCGVVELQQLLDILELTHQSISRFLELDSYSLMLSEMQENLSLVSYSSRISSQIWSEMQTDFLPNFILCNTTQRFVRSAKGTHHSSHRSSASTGKPYFYCGSHRQIDTTQFMQSAPWLGLVPGNDGQVKHAYSDNTPFTTLLSAASNAVTSSPTCPNPSTFLVMSKQAEAASLLYKSNLNSGSVLEYALAFTSAALDRHYSKWSATPKTGFIDITTSKDFYRIFSGLQYSYLEDSINNPSKKQEMLGDSVAWAGCTIMYLLGQQQHFELFDFSYQFLNVAEVESATVSHYQSSERTKSSNFLQGYEGILEAMRKARRLNNHVFSMLRARCPLEDKVACAIKPSGAPLHRMKFMNTVSAFETLPQRVT

SEQ ID NO: 58436 - protein, 50 aa, Zea Mays
MIRYKVQRPTIVHHGLGTSAHDFIYYRFLCQTKAIKHVHDNLFELINKQE

SEQ ID NO: 58437 - protein, 387 aa, Zea Mays
MARWLFLVKSSEKLVSKAMKYVRRLYYACPSEVVSVLLDLMELDAAGFESSDMQETDSLSVNHSSDTQLSISDMKTIILKLSEKEPRLLLSVLKSVIEMIDAKEDLAYKDESRSCLPAGPSKAKGLCPLVLWLVTNIKEHKDSGYIGLVHEKGVLSSDKNAIPHFCLAKLLQKLLNLSTTSERYLIDAAWLLIEMVNDSNTKEKLRKLPVLSLGRMAKSSSLPDSRTICNEQGSVENATETLELFKVQLKRQKNGGTEGSFSTSTPKKHDRWSIAKSWTPCPIGTAPCSFSSCAVLPAFDSIGHEQNSTLEHGTFEEVDHSERFEPQPEELEDESILEMPRSSPENEISDVKELMCPLKGRLLVGGFWKMVDEEELLLIKSKMKILL

SEQ ID NO: 58438 - protein, 86 aa, Zea Mays
MKRSFLVLMMAAYQLNLLLQWIRSLLLDLVFQNHQATSKRLPLISRLQHLSLSALPRTASLVISYSEPKELVIVMRNFQIATISAW

SEQ ID NO: 58439 - protein, 258 aa, Zea Mays
MGSVPEEKAKLGFGGLVGDLREVYESGRTQGLEWRQSQLRGLVRLLEEKEEEIFDVLHEDLGKHRGEAFRDEVGVLKKSVVDKLQNLKNWAAPEKAHTPLVAFPATALVVPEPLGVVLVFSCWNLPIGSSRVGRLIMAQAAKHLTPVALELGSKCPCIVDWLDSDRDSQVAVNRIIGAKWSTCSGQACIAIDYLLVEEEFAPILIEMLKSTLERFFTKPEYMARILNEKQFQRLSGFLADRRVASSVVHGGHFNPKTL

SEQ ID NO: 58440 - protein, 582 aa, Zea Mays
MTTPGTPSSSGVENAANEYGFFKRIWTMWNGPKNVKSEVSQNCESTSAEVIDDLQVSQNCESTFAKVIDDLRTPLEEYNGDHRIKLLRRIHETSSKNDRSDGTEGMLAVSDNLSISLGDDHSEKIKRDPSIPENPEPCRKPAAVSMIKSGKKDDISEMNRGMFNWASRWWPFGKSDADSSTTNINATDEPRTDSIEEFESSNAPTNGSAQQVVHEIFTKPDLWSVLEQQLSEPLGSEVVLKAKTRQELAHRLQKLNCWPLKGLLDKDLHHLVHLLISEKKWIEETSSRIFPFRLTLPRKRRCVPSSSSKSNGLSYIFSSGKPQKGRYVDNNSRKSRSLTREEILSDCHKLVKELLSEHEYGFNIGIFKRRFSQEYGYELEHRKLGYLDLETLLHIMPDVRVKFPRVMRSEHGNGQAGSKGDGNRSSGDDLIWEELGPVSATTETAAAAADAGADKETCYRPPTPSDDEFSDSDSIKDRQPRRNAEQQSSLLQIIGAWNSSKGGDVSSNKPQDIDGLVDCSRSSPGSAGTSAASGKVQTSSPKLPHKQYSFVSDSGEESDPDKLVESVLDSLQKARGGSKLHN

SEQ ID NO: 58441 - protein, 323 aa, Zea Mays
MGNCCRSPAAAAREDVKSSHFPASAGGKKKPHQQARNGGPGSGEKKRLSVLGEEGCDVGAGGIEEKYALDRELGRGEFGVTYLCMDRGTRELLACKSISKRKLRTPVDVEDVRREVAIMRHLPRSPSIVSLREACEDDGAVHLVMELCEGGELFDRIVARGHYTERAAAAVTRTIVEVVQLCHRHGVMHRDLKPENFLFANKKENSPLKAIDFGLSIFFKPGEKFSEIVGSPYYMAPEVLKRNYGPEIDIWSAGVILYILLCGVPPFWAETEQGVAQAILRGNIDFKREPWPNVSDNAKDLVRQMLQPDPKLRLTAKQVLGYC

SEQ ID NO: 58442 - protein, 996 aa, Zea Mays
MDAAGGAKGRDGVDKKEVGSGSGNGGGDAGKKVPFTGLFRYADGTDVLLMLLGTVGALANGVSQPVMTVIFGQVINAFGDATIDDVLNRVNQAVLNFVYLGIATAVVSFLQVSCWTMTGERQATRIRSLYLKSVLRQEIAFFDVEMTTGQIVSRMSGDTVLVQDAIGEKVGKFQQLVATFIGGFVIAFVKGWLLSLVMLACIPPVVIAGGIVSKMLAKISTKGQASYSDAGNIVEQTLGAIKTVVSFNGEKQAIALYNKLIHKSYKAAVEEGITNGFGMGSVFCIFFSSYGLAIWYGGKLVLSKGYSGGDVINILFAIMTGAMSLGNATPCMAAFAEGQSAAYRLFTTIKRKPEIDPDDQTGKQLEDIKGDVDLNDVYFSYPARPEQLIFDGFSLHVSSGTTMAIVGESGSGKSTVISLVERFYDPQAGEVLIDGVNIKSLQLDWIRGKIGLVNQEPLLFMTSIKDNITYGKEDATIEEIKRAAELANAANFIDKLPNGYDTMVGQRGAQLSGGQKQRIAIARAIIKNPRILLLDEATSALDVESERIVQEALNRIMLDRTTLVVAHRLSTVRNADCISVVQQGKIVEQGPHDELVMNPDGAYSQLIRLQESKEEEEQKPERHVSDSRSKSRSLSLKRSISRGSMGNSSQHFLTLPIGMPGSVELLEGNDENWEEDEKEQARDGDREAPKKAPMGRLASLNKPEVPILVLGSLAAGVHGVLFPLFGLMISNAIKTFYEPPHQLKKDASFWGLMCVVLGIVSILSIPVEYFLFGVAGGKLIERIRALSFRSIVHQEVAWFDDPKNSSGALGARLSVDALNVRRLVGDNLALAVQVTSTLIAGFVIAFVADWKLTLIILCVMPLSGVQGYAQVKFLKGFSQDAKILYEDASQVATDAVSSIRTVASFCAEKRVTTIYDDKCEASKKQGVRTGMVGGLGFGFSFLMLYLTYGLCFYVGAQFVRHNKSTFGDVFKVRKNASYHQRCSLSLSLSLSLSLSL

SEQ ID NO: 58443 - protein, 491 aa, Zea Mays
MAIGGFVEAPAGADYGGRVTSFVVLSCIVAGSGGILFGYDLGISGGVTSMESFLRKFFPDVYHQMKGDKDVSNYCRFDSELLTVFTSSLYIAGLVATLFASSVTRRILLGVGLGFTNQSIPLYLSEMAPPQYRGAINNGFELCISIGILIANLINYGVEKIAGGWGWRISLSLAAVPAAFLTVGAIYLPETPSFIIQRRGGSNNVDEARLLLQRLRGTTRVQKELDDLVSATRTTTTGRPFRTILRRKYRPQLVIALLVPFFNQVTGINVINFYAPVMFRTIGLKESASLMSAVVTRVCATAANVVAMVVVDRFGRRKLFLVGGVQMILSQAMVGAVLAAKFQEHGGMEKEYAYLVLVIMCVFVAGFAWSWGPLTYLVPTEICPLEIRSAGQSVVIAVIFFVTFLIGQTFLAMLCHLKFGTFFLFGGWVCVMTLFVYFFLPETKQLPMEQMEQVWRTHWFWKRIVDEDAAGEQPREEAAGTIALSSTSTTT

SEQ ID NO: 58444 - protein, 365 aa, Zea Mays
MSDTELSQSTVVFGLRMWVLVGIGVGAAFVLLLVLISVLCLLAFRRRRRRRQRPANPAQQLPTTAPPKNPTNAKAEKEFKVEVEAIGRVRHKNLVRLLGYCAEGNQRMLVYEYVDNGNLEQWLHGDVGPRSPLAWDDRMKIILGTAKGLMYLHEGLEPKVVHRDVKSSNILLDKQWNAKLSDFGLAKLLGSERSYVTTRVMGTFGYVAPEYAGTGMLNETSDIYSFGILIMEIISGRVPVDYNRPPGEVNLVDWLKTMVSTRNSDGVVDPKIPKKPSSRALKKALLVALRCVDPDALKRPKISHVIHMLEVDDFPYRDDRRGTRAPGQARLPETPAGGSGRPETDSSGNGGSTQAEPFRWRNPEA

SEQ ID NO: 58445 - protein, 1055 aa, Zea Mays
MGTPVNIIVGSHVWLEDPGEAWVDGVVTEIKGGDATIATTNGKTVVASLGSVYPKDTEAPPAGVDDMTKLAYLHEPGVLHNLSCRYGLNEIYTYTGNILIAVNPFQRLPHLYDVHMMEQYKGASFGELSPHLFAIADACYRALINDQASQAILVSGESGAGKTETTKMLMRYLAFMGGRSGTEGRTVEQQVLESNPVLEAFGNAKTVKNNNSSRFGKFVEIQFDKHGKISGAAVRTYLLERSRVCQVSDPERNYHCFYMLCSAPPEDVKRFKVGDPRSFHYLNQTNCYEVANVDDAREYIETRNAMDIVGIDQEEQDAIFRVVAAILHLGNINFSKGQEIDSSKLRDDKSVHHLKTVAELLMCDEKALEDSLCQRVIVTPDGNITKPLDPGSAALSRDALAKTVYSRLFDWIVDKINNSIGQDPDATNIIGVLDIYGFESFKINSFEQLCINLTNEKLQQHFNQHVFKMEQEEYTREEIDWSYVEFVDNQDVLDLIEKKPGGIIALLDEACMFPKSTHETFAQKMYQTYKVHKRFSKPKLARTAFTINHYAGDVTYQADQFLDKNKDYVVAEHQALLNSSRCPFVANLFPPLPEETSKQSKFSSIGTRFKQQLQSLMETLNTTEPHYIRCVKPNAVLKPGIFENYNVLNQLRCGGVLEAIRISCAGYPTKRTFDEFIDRFGMLAPELVDSDEKAACAAICDRMGLKGYQIGKTKVFLRAGQMAELDARRAEILANAARLIQRRIKTHLMRKEFIKLRKASVQSQKFWRARLAKKIFEYMRRDAASIRIQKHVRAHSARKAYLQVYESATAIQTGLRAMAARNEHRFRRETRASIIIQTRWRQHRAYTAYKQQQKASLILQCLWRARIARKELRKLRMEARETGALKEAKDKLEKRVEELTWRLDVEKRLRADLEEAKSHEIEKLQSALQKMQENLEEAHAAIVNEKEAAKLAIEQAPPKIVEVPVIDNAKLEELTTQNKELEDELSTFKQKAEDLENKLIEFQKQSDELSQETQEQASKVTELQELVERLEASLSNMESEYPFLRHILMSYEKVS

SEQ ID NO: 58446 - protein, 570 aa, Zea Mays
MDLVAEGHMQEARSFFHTFREDHEVMHSRDLQKLEGVLSPSHLEEMELARSFRKNKFKIKLCEYSYELLLQYLQKTQALVVLGVINEHITFEVSPGQPSLISDDADVVALIGTSKDLAKQINQKEVHWGLLEDSVEERMEKALAESDKIEAESKDADAEDNKKRNAEGGKQGASLKKAKKDKLVGATGKSVRTETSMVSVAPRVKPELTLPATPVEVEQSILEDLRNRAQLNSVALPSVSFYTFLNTHNGLNCSSISHDGSLVVGGFSDSSVKVWDMSKMGQPAKISRSQGENGPSQGERISTLDEGKRTYTLFQGHSGPVYSAAFSPFGDFLLSSSSDSTIRLWSTKLNANLVCYKGHNYPVWDVQFSPVGHYFASASHDRTARIWSMDKIQPLRIMAGHLSDVDCVQWHVNCNYIATGSSDKTVRLWDVQTGECIRMFIGHRSMVLSLAMSPDGRYMASGDEDGTIMIWDLSTGRCVSPLLGHSSCVWTLAFSCEGALLASGSADCTVKLWDVASSTKTLKTEDTKGSSANRLRLLKALPTKSTPVYSLRFSRRNLLFASGALSLSSS

SEQ ID NO: 58447 - protein, 598 aa, Zea Mays
MNNGIAAANVTPSYNKTLVLLGNPGCVDPELKVFCSLKQERMIAYNTSLAKCSSTASCSSDQRLNPANCGCAYPYAGKMVFRAPLFTDLTNSATFQQLEASFTTQLSLRDGSVFLSDIHFNSDNYLQIQVALFPSSGVSFSVADLIRIGFDLSNQTYKPPSNFGPYYFIADPYALLAGASSRGSKKSHISTGAIAGIAVAGGILVIALIGMVLFALRQKRRVKEVTGRTDPFVSWGVSQKDSGGAPQLKGARLFSLNELKNCTNNFSDTHEIGSGGYGKVYKGTLVDGTRVAIKRAERGSMQGVVEFKNEIELLSRVHHRNLVSLIGFCYEQGEQMLVYEYVSSGTLRENLLVRGTYLDWKKRLRIALGSARGLAYLHELADPPIIHRDVKSTNILLDDHLKAKVADFGLSKLVADTQKGHVSTQVKGTLGYLDPEYYMTQQLSEKSDVYSFGVVMLELVSGRQPIESGKYIVREVKLAIDPNDRDHYGLRGLLDPAIRDNARTAGFRRFVQLAMLCVDESAAARPAMGEVVKDIEAMLQNEVSGPDGATSSAGSSANDFDGAGGGARSHPYSDVEITRGSYGDNASDYMPYFEVKPK

SEQ ID NO: 58448 - protein, 656 aa, Zea Mays
MFYSHTILARKSPLGTVWIAAHLERKIKKPQIDGIDIPTYAGHLLLGLVRIYSWKVQYLFQDCNRMLTTMRTSFASVQVDLPIDADCAPFESITLPSTLNLDALNLDDAISLMDTPDNHQKTLDQITLPEGEYVMIELDEDARVEQSGPAPSLHMGPTAIEDETSPPFHDGFGANNDPNEEAPIDRPIGNSPVNSNIANLTDGALDPPEKMREAPHEFPHLKLTESILGNDDPMDLDHDSSPFVQNKAITPPVIDETTSAGRQVPGRSISNLRAPNTFDAFADDAPLNFDIQLPEFRLEPSPRPVQENKDNRRPKAQVSNRNRKRGMKFDYKIVLSNDCMRKQIDGAELDELICKRRKLPQTALDVWRFSRTNRQGSFLLEPLLHGTCSDLQETYERNFPCVSGLDAECSNVAGVANDDPDASLERQLSPNVPRTAELSYHELTPTSPGNAEAQPEPPLPTLKSPGAAGAVPDDDMLPELPRFSPIDVPSSIRGNDTPYKTPGGTPSWLGGSAVSEIPSSDGNYSLPGQSTRDSDNMSFLFPINEDDEHPEIPGLMSTPGGVSSVATGTTGLGSMSARTRAVALFFKDHASSPSDDQPGKFSLNKILEGKTRKQAARMFFETTVLKSYNYIDVQQEDPYGAIEILVKPLLSAAKLT

SEQ ID NO: 58449 - protein, 766 aa, Zea Mays
MNKLLMEENDRLQKQVSQLVYENGYYRQQTQSAGLATTDTSCESVVTSGPQNVAAVLPQAQPRDAGPAGLMSIAEETLTEFLSKATGTAVEWVQMPGMKPGPDSIGIIAISHGCPGVAARACGLVGMEPAKVAEVLKDRPLWLRDCRSMEVVNVLPAGTSGTVELLYMQLYAPTTLAPARDFWLLRYTSILDDGSLVVCERSLGANQGGPSMPLVQPFVRGEMLPSGFLVRPSDGGGSVIHIVDHMDLEPWSVPEVVRPLYESSAMVAQKMSMAALRYLRQVAHEDTAHSVVTGGWGRQPASLRALSQKLTRGFNEALNGLADDGWSVVGSDGVDDVCVSVSSSPSRVVSCNATFSNGPVVGTGSSSVLCAKASMLLQDVSPPELLRFMREQRSQWADSNLDAFFASAMKPDFCSLPIPPRLGGFGGQVILPLAHTFDPEEFLEVIKVGNAGNYQDALLHRDLFLLQMYNGVDENMAGTCSELIFAPIDASFSDDSPLLPSGFRIIPIDAPLDTSSPKCTLDLASTLEAGTPRSRTSGSGGPGTAAAACAGSKAVMTIVFQFAFESHLQDSVAAMARQYVRSIVASVQRIALALSSARLVVPHGSGVSHGAPAAGPEAATLARWICQSYRFHFGAELIKSADGSGCGEAVLKTLWHHAGAILCCSLKALPVFTFANQSGLDMLETTLVALQDIALERVFDDQGRKNLCAELPGVMEQGFACVPGGMCVSGLGRPVSYEKALAWKVLDDGSGGVHCVCFMFVNWSFV

SEQ ID NO: 58450 - protein, 464 aa, Zea Mays
MGRRRRFAQLDDDDDDDEDVPINFKPSGGASSSDAKPRKPQPPPQQRREQEAETKTRRRRGRPKRRRDPGSEDEEPEELELQTEDPREEEITEAVPVAVGDPVKITGKGKKQKKHYASFEYEGNSFELEDPVLLTPEDSNQKPYVAILKDITETDGSLYVTGQWFYRPEEADKKEGGFWVARDTRELFYSFHTDDVPAESVMHKCVVHFIPQQKQIPSRKQHPGFIVQKVYDAVEKKLWNLTDKDYEDNKQQEIDLLVKKTIDRIGQLPDLEPEETPLENNYLSNKRGLRKKPVNPIDVTREPPVGKSEQFAKAETPGSDKIRNYDTLVKYKVLTGHSHRDRWLDKLIESIPLASKENAGTSADANSTAKSSISGSPAKDVGSAENEKSYGLDVVVEIMTALERSAYEALGTDFGKYNQKLRQLQFNIKNISKLRRRLMDKELDPPVLLTMSPDELKENCVSLY

SEQ ID NO: 58451 - protein, 479 aa, Zea Mays
MSGAVVNCVNIRLNAETIAFLLEHSVAEVVMVDQEFCTLAEESLKIIGKKKTSAFRRPPILIVIGDPTCDPKSLQHALGKGAIEYEEFLKTGDPEFSWKPPKDEWQSIALGYTSGTTSSPKGVVLHHRGAYLMALSVAIVWGMPEGAVYLWTLPMFHCNGWCYTWALAAFCGTSICLRQVSTKAIYEGITKQGVTHFCAAPVVLNNLINAPASETFLPLPRVVSVNVAGAAPTPSLLGALSIRGFRVTHTYGLSETYGPSTVCAWKPEWDELPLEERSRLHCRQGVRYIAMEGLDVVDPKTMAPVPADGKSYGEIVLRGNAVMKGYLKNPRANAEAFAGGWYHSGDLGVKHPDGYVEVRDRMKDVIISGGENISSLEVEKVLCAHPAVLEVSVVARADERWGESPCAFVTLKDGAAADGSDEAALANDIMRFCRERMPGYWVPKSVIFGPLPKTATGKIKKHELRARAKELGPVKKSRM

SEQ ID NO: 58452 - protein, 462 aa, Zea Mays
MAELAASLVVAPLLSMLKEKVSSSLLNQYNVMEGMEKHHKTLMRWLPAIQEVIADAERQTSRRGVEKWLEQLKTTAYEANEVFDDFEYEALRRRAKKNGHIAKLAIMARVKLFPTHNRVAFHIRMSYRLRRIVDTFKDLVEEMNTFGFNKLEPEATTTWKEWRETDSIIVDPENIVARSRHDERKKIVNLLVNGHVTDGDLMVVPIVGMGGLGKTTLAQLIYNDPQVKEHFHLLKWDYQIDMDKLIQLWMANGFISDQKKVPAETVGKRIVNELVSRSFFQYEERSWMGYNSTTFLKIHDLMHDLALSVSEKECVCITRELIKNSELLPSAARHILIQNWIGKEIHGYLYGSMRKMSRPIQTFMFDGSSEAAGVQHLSRYSSLRVLSVPGIGFHLTIKPKHQCHLRFLDIKDSVIKELPDDISVLYNLQTLFVICTQMGAQGWRACLQSLDKSPHFEQLHGL

SEQ ID NO: 58453 - protein, 234 aa, Zea Mays
MPHSVGADDVSGSGSGSGSGNVKSLFPSSSTTSTTPTQDEYRGSPPDLLSRTTSSNQPQELCLTLQSTNNHHHQQQQQQQIFSHVSPNHHGSMISVAGVQGWPEAHGQRMPPWHAPENSGAGDDGRGAAGNGDSYMFGVPGPRQGLDHLQGQLIFSQGEPLQSSGGGWPSSSARAWLDPLVAIHQHQPSTMSGQVGFGHLVGGAGSGFMGFLAPPAQRLQLQSEDEQGSEAMRE

SEQ ID NO: 58454 - protein, 321 aa, Zea Mays
MGSWRKAYGALKDSTKVGLAKVNSEFKELDIAIVKATNHVECPPKERHVRKILLATSANRPRADLSYCIYALSRRLSKTKNWIVALKTLIVVHRLLREGDPMFKEEFLAYSSRGNILHIANFKDDSSQSAWDCSAWIRAYGCFLEERLECLRVLRYDIETERLVRYPQTSSKVHSKTRTLPSPELLEQLPALQQLLFRVVGVQPEGAACSNYLIQYALALVLKESFKIYCSINDGIINLVDMFFEMPKYDAINALAIYKRAGLQAENLAEFYDFCKQLELARTFQFPTLSHPHRFLQRWKSTSEKHPDPRSRVRRARSRSY

SEQ ID NO: 58455 - protein, 415 aa, Zea Mays
MQSISSELEVLGRHDHPRLTVPFLKAVSEISKACRHESTCLPDEAQSFYEKVSSEGQEVKIMIEKRMESSAISERKNVDARSYFMTLEYWEDLFCKLNEMRRYRRIVGSLAGSCLSAAIPLLSSNKETACLVALDIVESAAISIANVEEAYKCECQSKGVIEEAIQFCSFDELLDGTDATEDVDENRLLPAMNKLWPYLVICLRNKISVPVVRKCTEMLRRAICISGGDFYVRRFHKDGPIVWRLLALSPFRRLSKMDEKAIILPYRDTSLNSEEPMAEISSQKIQIAVLDMIAAISSNKRSAVALESVLKKVCGLVVGIAYSSLTGLQEAAIRALAGLACMDADLVWLLLADVYYSLNQRESLLPNQDLALVSDLLPPPVSSREYLFVQYGGEGVRCDVDPSSVHYVFRRMQGV

SEQ ID NO: 58456 - protein, 81 aa, Zea Mays
MASAAAATQVGTYFLRNYYNLLQQTPDVVHQFYSEASTMVRVDDLTGNNTATRSCRSAIAKPRAGDGAGTLLELMVMHDLP

SEQ ID NO: 58457 - protein, 522 aa, Zea Mays
MCVLFPVIVLLLLALHPPRHLPPAAERRLGSASARARRRHSGSSCSRPASQSVSIAAMDDPGASADPAARHHLSPQQLGGQPPVPRSPTPLDLASAAAASGYRRLSPSLRPPAHPQARLSSPYGQIPSPGAGAHHARSLSQPLFFSLDSLPPPPYADLGAAPAVPPSPPPSTSDPPPLGLPPRRAGHRRSQSDIPFGFAQLSPPLPPPAPVKREVTAAADGCRSDGGGGDDAALYDLVNAYMDLDGLDPLNSSEDRHDDRDSRASGTRAGSAAESSENEAESQSTSADRKDGGKSRHCRSLSIDSFMGKLSFAAGEESPKLPLPSPGGSLTRSGSGSLEGGAVALFNMEFTNGEFTDSEKKKIMANERLAEIALTDPKRVKRILANRQSAARSKERKMRYIQELEHKVQVLQTEATTLSAQLTMLQRDSAGLATQNNELKIRLQAMEQQAQLRDALNEALTAEVQRLKLATGEVTDGRMPKGLQQQMNSQMLQIQQLQVQQQAPQAQQQGQRQQQQQPQKSA

SEQ ID NO: 58458 - protein, 217 aa, Zea Mays
MWRLLDPDSRLINSVQLHDRMVCVKSGLKKSLLNVFHDGSCHPGMALVIDDRLKVWDEKDQLRVHVVPAFTPYYAPQAEANCSIPVLCVARNVACNVRGGFFNVHLFAFCCQPNTSATRLPHQLLISTNSHCHGLVHLDTSCLKSSRPNTIVLSGLSGSGKTTIYYQKDKVKPVHVIDVPGHARLKPKLDEVLPKVAAVVFVVDAQDFLSSMQAAAE

SEQ ID NO: 58459 - protein, 819 aa, Zea Mays
MSDVNLDGISYIIIDEAHERSLNTDLLLAMIKKKLLDRLDLRLIIMSATADADRLAEYFYGCQIFHVRGRTFPVEIKYVPDVSAEASLNSVPSISSVASSTASYVTDVVQMVNIIHKNEEEGAILAFLTSQLEVEWACETFSDPNAVVLPMHGKLSSLEQNLVFKSYPGKRKIIFCTNIAETSLTIKDVKYVVDCGLAKEYRFVPTSGLNVLKVNWISQSSANQRAGRAGRTGAGKCYRLYPESDFGMMEVHQEPEIRKVHLGTAVLRILALGVTDVKCFEFIDAPDPEAIAMAVNNLEQLGAIECKRSGFELTDIGHDLVKLGIEPRLGKIMLDCFSYGLMKEGLVLASVMANASSIFCRVGTNEEKYKADRLKVPFCHPDGDLFTSLAVYKKWETGYGNKNTWCWQNSINAKTLRRCQETISELEKCLKHELNIIVPSYWSWNPEKPTMHDTSLKKIILSSLRGNLAMFSGHENLGYKVISAGQRVQLHPSCSLFIYGSKPEWVVFSEILSAVNQYLVCVTAVGLNEVLTVHPMSFIKQLEESKLQRKVITGIGNKSLRRFCGKSGQNLQNIISLLRKDCRDDHIMVDLDFSSSEVLLFAKEHDMEKVFCKVNYALELEAKLLRDECDERRPGSSTIALFGSGAEIKHLELGKRYLTVEILHQNARVIDEKELVCLVDSLVPGIANFHKTGNFQTNLDETKWGRFTFLKPDYAEDAISKLNGIEFHGSLLKVSPVSIYSHSGLPFPAVRAKVSWPRKASRGVALVTCASGEAEFIVKDCFALGVGGRYVNCEAWHTIWRRMRMEISVLSLLQMPQKQ

SEQ ID NO: 58460 - protein, 116 aa, Zea Mays
MQLKAALHHAILLLTLAVCTPACAHLAQPLPRALSLSLSLSDPQDSSAPPSPWLSPACRASRSLPPPPPQLCGWPRGQTGSDHPDDGRVPHRQQTVGRWATTTVVVRRCRQVGPSS

SEQ ID NO: 58461 - protein, 213 aa, Zea Mays
MKLVGDRLPQFSARASMLVSGSLDFVGINHYTTLYVRNDRMRIRKLVMNDASTDAAVIPTAYRHGKKIGETAASGWLHIVPWGMFKLMKHIKEKYGNPPVIITENGMDDANNRFSKLEDDLQDDKRIQYHKDYMSNLLDAIRKEGCNVHGYFVWSLLDNWEWNSGYTVRFGLYYIDYNNNLTRIPKASVEWFRQVLAQKTAGLEYSGSTVASS

SEQ ID NO: 58462 - protein, 243 aa, Zea Mays
MDKYEAVRDIGSGNFGVARLMRNRETRELVAVKLIERGHRIDENVYREIVNHRSLRHPNIIQFIEVILTPTHLAIVMEYAAGGELFDRIVDRGRFSEDETRYFFQQLICGVSYCHHMQICHRDLKLENVLLDGSPAPRLKICDFGYSKYYIQGQSQQWGHQHILHQRCFLGGSMMGSLQMYGHVELLFLSCLWEPTRLKIRMILKILERPFSELQQFNIISQTTFAYLMIADNSFHVSLSAIH

SEQ ID NO: 58463 - protein, 52 aa, Zea Mays
MTSAQNNNAFLDGSWMMLMYLENTCASRSSNCVVKLIDSSWPFLVPVICLYS

SEQ ID NO: 58464 - protein, 82 aa, Zea Mays
MNITWNKSGLQVTTHVVISFSESEILEVVESEFLSHNLQAETLLGYLREQRQGVACRAGAVAATSLASAVMDDGAGVSSPCL

SEQ ID NO: 58465 - protein, 73 aa, Zea Mays
MPCSGVDSFFHQTGQCLAHAEYMVLVIKKCFYRVYIGSEQLPWKVVHRKYIGITNAILKKLCLPIVLSVFYQH

SEQ ID NO: 58466 - protein, 679 aa, Zea Mays
MVAAVRVDARGWYTGPGMVVPGVVSHATGDEDGATQLELPEAFLSKTPYIREALLLPALANRNEKIIAGLACLMCEVGQAAPALVAEGGSQALALTDGLLRCVAFTSEDWEIAESTLQFWCSLAHFILGIDVKSAKRNVVQELFVPVFSSLLDALLFRAQMDTDEHGSDGAPCIPERLTQFRMNLEELLVDICLLLGAPAYINRLFSGGWDFSSQTIPWKEVEVRMYALSMVADTILQDEGSFDFSIIMHFVNILSSRTPVELNGNLFLVYKSFGDVVGSYSKWLSSSQCNIKPLLLFCASGISKSVSSNACSLALRKLCEDAPSFIHEPQNLEILFWIGEGMNKGNLQLEDEEEIISAITHALSSISEKELKKSSLARLLCSSYSAVEKIIDIDRDQLLRQNPAAYTQSLDLAVRGLYRMSALFHHLATSVTSGLVDDDIIIVLLGIFWPLLESLFRSSHMENVHLSAAICRSLSSAIHSCGHHFHILLPKVMECLSANFLLFQRHDCFLRTAANVIEEFGHKEEYGALCVRTFEILSSASSISALNSSYTCDQEPDLVEAYTYFTSMFIRCCPKEAIVASSSLIELSFQKAAICSTAMHRGAALAAMSYMSCFLETALAAVLESPECIPNGSPGVALIQILARCGEGLLSNVLYALLGVSALSRSEPYLGFQTSLLT

SEQ ID NO: 58467 - protein, 272 aa, Zea Mays
MMLSDPKDCTLCKGREIIIGEHVTNMMQIFSLKLAKIDVDGGPIELYGYIATRDVLEPLLNYIVNVSRNDPITIEQGSLIEMTGPKRGIELCGEIMLEFDMRIKRGGEEKDDPQLIDGVAIVLDEMSMPRSTYAFTKRIHGDCGAVDITVSRLDFAVEATIQLHVSEVEGSFSLRAGCFTSGLCEEIQIFKGTISEPRALRRCVVAAVHDTWMDVKLKVDDSGHSYSSDDNPEHWCSFKTTSHGWTCQQVKLEFASILVKVTWSSTCFMELF

SEQ ID NO: 58468 - protein, 156 aa, Zea Mays
MVAEEKLLKEGNVRERLEARRVLFQKTGDKGYKKVAGPKSGSRVVPYSGEGDGDSEETAETEDAPEEFQSAHKDEDLSKIRMQLVQIENQQASLLNLLQVELGVTGSGPCEVRTTSFSNKAGCLKTIPLLVYFRNFLFSKLRAEIVCPILLWGFYS

SEQ ID NO: 58469 - protein, 1792 aa, Zea Mays
MGLLSVSRWAFEQGLVCSPNNWNCMEKLLEVLISIRDEVACLSVANLILNSWPSHHRALHVKKTIECAEPVPFAPRGIDILEPKHAKLIFSNKRKSVDDEICQEIGTKKSKHSATLQLNEAKWLALLDGILSLISANTEKAGEYNCSNTVDRCSISEGSAKGLAYNIIDVVISTDTLKSVETAGGNGNDSHHGEILPYDCKATVKEKDGNSDREHPHERRSTRLERLRSRKSGKDENGSDGKDISHAMTQFLESFILKGPSPVEKAYCSGNADASNPDTHNYTSNEEANDLKQFLCKISKNFGPHHIGYMLLEEMAHLKVPFQDYFVKLIELDKLTRGWAEDRSASCNLFLAELYYDRALCSGSPPTSSELSDSSYHLCKIIESVALELPFNISVREIHSTNLDTESSRTGESSSELIERSHENGHINMLNDQKSKHDSSSNMNCAFWIRFFWLSGCLSLSSDCKEKAYKEFNIALSILKNSNKTKSYGEVILLPHTKLVKSLTTDRILREINLIRLESLLWNNDENINKITHTEFMQLLPPLLLSTKDAYVGNAYGPQRESENVISLELSALDVLISACEKAKPMNIQVYLDSHRRKIQVLTVAAGMVGSVTPLKAKGSSNVEFVEAMNRNRLENVVEAVKDVSRNASKAKDIIDQCDNSDGQDGWSPLMSIVGDIQSLLLTIMCAAVKIILSRKLSCSGTSYQVDHLECSCLIDAAIAFCKLQHLDPTISIKTQVDLIVAVHDLLAEYGLCCAGRDGEGEEGMFLKFAIKHLMALDVKLKSQLNSNGMEEDAVPKDVRAEDSVADEPSVSDNKQNSDDEEESELDEIQSCLDSALDQAFFCLYGLKINPDSCSEDDLAVHKNTSRGDYQTKEQCADVFQYVLPYAKALSKTGLVKLRRVLRAIRKHFPQPPYDLFVNNPIDNFLDGPDSCEKILSEICESNESREAILNVLFPGERGYEAFKKLSTASSEPYSDVYENLYYFIAQAEDISATDKHTGFVLKKEGEEFVEQSANIFKYDLLYNPLRFESWQKLSNLYDEVEVDLLLNDGSKHISILDWRTNTDLIRRVEMGRRHSRRCLLMSSLLAKTAPEQSEAHELLALVYYDSLQNVVPFYDQRATLPVKDSSWETFCKNSMKHFEKAFEIKEQWLHAFYLGKLCEKLGHSFSKALSYYNKAMMLNPTAVDPVYRIHASRLKLLYTQGKQNLEAIQVVADYTYNQSTKENVLSMLGSMTKVLQSSSDKTSLDTKEENKFFESDILDKVWHILYDDCLYALGTCVEGELKHFHKARYKLAQGYYRRGEAGDLERAKEELSFCFKSSRSSFTVNMWEIDGTVRKGRRKNPNVGGSRKNLEVSLSESSRKFITCIRKYMILYLNLLEKNTDLWTLEKAYTYLRTDKRFALCLGDIVPVGLGKYILVLTAAIHNPEIRRASGDASVEQLLEKMFTVFMDHANMWADISNIPEVNSPELSESNLYSYIHQYIHLLESDVRLDVLEGLNEKIRKRFKTPKLSNSNFAKICKHASLAWCRCILIKLASITPLPESADATNQPAPLSNGLLLYVDLQPDELLISSPDGPAQFKGLDMNWFETLNRIKNIPVKQTSEDNLETAVTLMKSTYNFYRESPCGTFPSGINLYTVTPSQAPIEGLPPTAAVVETLDLSIPRKLLLWVYTLVHGRYSNISSVVKYCDEMKLRSKRGTPAASASSQVVQPVSHSTVSSQVVSKEKSSQVEPAEAAQNPSDLAATCVPAYQEVGGASASQSAIEAQKATAAASQLTRSGSSRAMENAQDGGERK

SEQ ID NO: 58470 - protein, 59 aa, Zea Mays
MVPVFLALMLAKRTTEPERISLLQKWKTSWVAVRERRFKDSSTVDVDCGYAVVSSISEQ

SEQ ID NO: 58471 - protein, 630 aa, Zea Mays
MKRTDIEFNVVVTQMNGKDYSSNSVHVFHIGKLRIKLRKGWSTKARESYSTTMKLCGSRGGGNAAARAVFWHPRKGSSYTLAFETDRDRNAAIMIARKFASNCNIALAGPGDQVHVNIIGSAVAAHAGGEEESRAARLQSFFASVLSGLFGQAEAEDEDEDEEMPTRNHNAAAAAAPQHHHHNRGGAPALGKSKAVPGRADAMNRRAPLGDIGNLVSVRPAEGKPQLQEQINRPITRSFGAQLVKNVQANAAIKVRRAIMLLPFSTSLPKSSNAAILPARHAPRQERKAPAKQPPPEDVIVLSSDSEQSRTQLESSASSVRSRKKVINTLSSVLSARSKAACGITDKRRQVAVIEDIDKLDVNNELAVVEYIEDIYTFYKIAQHDRRPCDYIDTQVEINPKMRAILAGWIIEVHHKFELMPETLYLTMYIIDQYLSLQPVLRRELQLVGVSAMLIACKYEEIWAPEVNDFILISDSAYSREQILSMEKGILNSLEWNLTVPTVYMFLVRFLKAAALGNKVEKEMENMVFFFAELALMQYGLVTRLPSLVAASVVYAARLTLKRAPLWTDTLKHHTGFRESETELIECTKLLVSAHSSAADSKLRSVYKKYSSEQFGGVALRPPAAAVEIK

SEQ ID NO: 58472 - protein, 187 aa, Zea Mays
MYRFLVDGVWRCDETKPFVRDEYGLISNEVLVENNVLPVVQPEPSIRGTNMDKGTILKTMPLEPSSQNPSMQIAVIRHVVSGILLHNTIYDVVPLSSKGLALVPFWDDRQGTITGMLTASDFVLILRKLQRNIQVIGNEEPISAWKEAKLQFYGGPDGAVMQRTPLIHTGNIDLRAKKEAQLGMLPV

SEQ ID NO: 58473 - protein, 227 aa, Zea Mays
MAPPAALHHRTPLLLPRRTVALGATATARAARAASLAVRAQPDTTAAAVSTTAPEPTPEFKPPPGFKAPEPKRFEVKSGQLGSVLGASLAIPLRLGTGVFVLGYSPSLVSASEIPSDQYALEFGAWKVKEESKIGQCKRPEKPIEIYEFEGEMVTVLDLDVLFYPCPKKGPTFRPKVLEMGGKKQFPYMVDPNTGVAMYESDDIIKYLADTYGVYSTHLLFTFALKG

SEQ ID NO: 58474 - protein, 290 aa, Zea Mays
MEDMEMDGAFEQVAVELVAQGVIGKRVDEMESGFLMALDYMIQLAQKDTDDERKSILEVIKQTVLDHLTKKCPPHVQVVGLLCQTEKKESRHELLRRVAAGGGVFKNDKGLKCQIPGANLNDIANQADDLVESMESRDTIPDRKLLARLVIVREEARNMMGGGLLDERNDRGLTTLPEAEVNFLSKLVALKPGKALERMIKNVMNGRGEGADNVEQPSADSHSEQESLTGVLGRGSVSGHKPRPVRPGMFLETVSKVLGGVYASNTSGITAQHLEWVHQTTLKILQEMAF

SEQ ID NO: 58475 - protein, 151 aa, Zea Mays
MPLALTPENDVGKEELKQLQVQLEDINKLAHKQVRRILWSGLGFLITQVGLFFRLTFWEFSWDVMEPITFFTTTTGLIVGYAYFLITSRDPTYRDFMERMFESRQRKLIERQNFNLDKYLELQRRCKDPLEKACGTTNTDMAHLHELSIHK

SEQ ID NO: 58476 - protein, 126 aa, Zea Mays
MKYNCEAFNSKDDVQCSICLGEYREKEILRIIPTCRHSFHLACLDLWLEKQTTCPICRVSLEELQAAMPSVCSIQQLPPEPDPDPDPENSDNPAPQCFQPARQHPRDQNNSQETHESVEVIIEIRR

SEQ ID NO: 58477 - protein, 932 aa, Zea Mays
MEKSKLKKVREYRLGKCYHNKTGEEFVAHSSNVNCLKIGRKTSRVLVTGGEDHKVNLWAIGKPNSILSLSGHTSAVESVGFDSTEVFVAAGAASGTIKLWDLEEAKIVRTLTGHRSNCMSVDFHPFGEFFASGSLDTNLKIWDIRRKNCIHTYKGHTRGVNTIRFTPDGRWVVSGGEDNIVKLWDLTAGKLLHEFKCHEGQIQCIDFHPHEFLLATGSADKTVKFWDLETFELIGSTGPETTGVRSMTFNPDGRSLLCGLHESLKVFSWEPIRCHDTVDVGWSRLADLNVHEGKLLGCSFNQSCVGIWVVDLTRLEPYTMGTSTKVNGHSELKTVSSGTLPLQNDSGSRANIGRSSVLQNTENNLKTTSGRLSASQNSDSAPKETNSAPSSGLIPSTPHRAGVGSHNRSVGNSAFQSGGTTLKRSSLRNNSASNVHNFSKADVVPVIVPRTSSGGELATDSRSDAADVAPVLPKVTRRVEPATDSRKESNDVELVVPRASSRMEIADLAPISSSKSGRRLESAPDSKEESADTAPVVVSNPRANVRMEIVSDSAPALSKSNRKLDSGTNSKKESADAVIVPRTNSRMEMISDSRREPSAGRISPFRIQSRYAEPRKLAHARTDSNKVDSRSKITETEDFNCQIFLPRRNSVFQTISSEEPREDVKCGPVDRVGFSNSSEPNASVRNENYVPRMRKPGDNCYIEVSRAGRARSSVSNWEGRDQPPSHEEPTTSSSTLAPTGHPYSSRGSNQASEAPIIASDEDVLSLIMERHDLFLSSTKSRLMKLQIIHQMWERNDIRGVLSAMDRMGDHAVCADMASVLMEKSETITLDLCTSILPVVTDLLESKIDRHLVVALELLVKLVRTFGPMIHSTVSSGPCVGVDLEAEQRRERCNLCFIELEKAKNKLPSLTRRKGAVANAAQELALVFQEIMS

SEQ ID NO: 58478 - protein, 52 aa, Zea Mays
MSWSERYSDELEAPVPPIVPGGKFTLSAVMGGALLVIVPELIKDVMQLQGLH

SEQ ID NO: 58479 - protein, 645 aa, Zea Mays
MNGGGGRRRYSSEQLLFDVPSNAGAGRWAQQFQVPGMYDGAQKFGYGGGLDESDMRFTANKLMSKSAVFPDGNYLKAFTEKEKAAPVAKIKVVVRKRPLNKKEVSKKEEDIIDIEQRSNSLTVHETKLKVDLTEYVEKHEFVFDAVLDEDVSNDEVYRETVEPVVPSIFNRTKATCFAYGQTGSGKTYTMRPLPLKASQDILRLMHHAYRNQGFQLHVSFFEIYGGKLFDLLNDRSKLCMREDAKQKVCIVGLQEYRVSDVETIKELIEKGSATRSTGTTGANEESSRSHAILQLAIKRRVDGNDSKPPRPVGKLSFIDLAGSERGADTSDNDKQTRIEGAEINKSLLALKECIRALDNDQTHIPFRGSKLTEVLRDSFIGDSRTVMISCISPSSGSCEHTLNTLRYADRVKSLSKGSNAKKDVSLAVPLRESSPSPLPSVVPSFSASEVMNDITERNNFGWPKQQYVKERPAPTFVERMPKVKDAVEFATSDGAYLKGQRSQGCMAPNIAEIPDTMYQQRRQPARKAKDTALRNNMRNSVAYPTRSVEPDEDDHLNNLLQEEEGLVSAHREQVEATLDILKEEMNILGEADQPGFQLDDYNITRLSSILSQKAAGIVDLQARLEQFQRLLDENNVLLYAQSPRL

SEQ ID NO: 58480 - protein, 264 aa, Zea Mays
MDEEEVHIAVGKNSRKEKANILWAAANFPRATIVLVHVHWPSKWMPFMGGKVLYKFADEKEKEMHRGREMKVMVNMLSQYKKMCGTRKVSAHYLTHDDTVAGVVNLIKKLKIKRIVIGSRNMSRQVVVRQCCQVWLVLNGKHISTSNDHLEYSENIGYGGGSSGILASIHELGEESDGYVTPRSDLVDETMDEESAEMNDSDQLVTEDETLTEQGTEESVTSEDMENFFQENADQSDEIQNFRNIADKAEKIMVQSDTNEQGLS

SEQ ID NO: 58481 - protein, 964 aa, Zea Mays
MAGAAASPVAAHVVERFRSRLREEAGSGEPGASAVVRLYAEALRELTFNCKPVITELTIVAGQHAALAAGGIAGAVCARVAEVPPDQILPSLYLLDSIVKNIGGEYVEHFAIRLQSVFVDAYYRVHPNQYASMRRLFRTWWPVFPSSVLHSIEDDLQFSPSENNRPTTSTNVHQTESLSPRPSHGIHVNPKYLEAQHKFKRVNVAHQSAAQDTRQMSDVQEDLINGLTSNSSQGRPSVFQKSSLQYADDPGQQEMFRPLAGAIRATSPHLLRTHASDVNLDGPLANSRRNLSRSPPLDVFPRNVSPKRPLERLPPSHSVLGPDPRKLPDRNGRLRWALDDGAQWPTISMLDEEYRKQSARELIDAYGNCQGRDADERLPKVQRLDSNGMTSKSGARNWLTSEEEYSWEDMSPTLTDRVRSSMPSFPPGTMRIGFPGANAGLLESDVGRHNFLSQATRSSVDVSPFNIEDRISAASHVDISTRRYPSNFGVQNGALLEYQNSEHTLNHGRIATMPAPPWQQPIGLPLRIQGPEHPSVLGRIPQPVDGEMPVKRLDISGTYNGLNVDKPLVKHRSSPAPAPTEWLPLHHAQSQTLPLIPPDTKHVRSASDSLEISSFVSHGGSSSVFVPRHQYDAVDRKTGTSNLAQPPSPYQNQDLLPSSQQNQGTILGNQAHPHRPLKLHPHAHPHHQETFRSFAPGMSVSPFQGQGGNATMTPVSVLPTSFSVPPAVPPYGVLSAPGFPMPPLPPGPPAPVSLQMGSSSSQVGGPQPFVSGLLSNLMRHGVISLEPPSQSQDSVGVDFNVDLKVRNESVTNALYQDLPRQCKTCGLRFKCQEEHRAHMDWHVTKNRNSKNRKKSSRKYFVTAVEWLRAAETVGNDGVPAFVLSDPVPDRQEEKEIAVPADEEQTSCALCQEPFEDFYSDETDEWMYRGAVYMNAPDGNIDGLEWSQLGPIVHAKCRSGPGNTS

SEQ ID NO: 58482 - protein, 386 aa, Zea Mays
MRIEKNMHDFSYAHMLKVARRLNGVQLLTAHVLWSSLGSSIRGFINIHYSCLQCTEEAHRPVNCETVSKWILKNSAESENMNWILANSKPCPKCKRPIEKNQGCMHMTCTPPCKFEFCWLCLGAWSDHGERTGGFYACNRYESAKKEGVYDETDARRERAKNSLERYMHYYERWASNQTSRQKAQADLLKAEKDQIANLTDIFGIPETQLKFIIEAWSQIIECRRVLKWTYAYGYYLDDKIKSEFFEYLQGEAESGLERLHQCAEKDLQIFLPSVKSDSTETTTPTVAEFGEFRVKLAGLTSVTRNYFENLVQALEAGLEDVRATGQAAGTSSTATSSKKGGTKSKKKQHTAPSSDHTDDGWPCERCTFLNPPTVDACSVCEKSRY

SEQ ID NO: 58483 - protein, 135 aa, Zea Mays
MRTANTKMLPRAAADEETREGEMGPDLLGLGLLPPPMAGGGHGGGSAAQRRPYQKTGFDEPLRFAADAPLPVRPRPRPVDVDDGVVPAAAPPASMPKPPASSTAARWAPAELASSPTKVCVPGPSPRRKAETHLF

SEQ ID NO: 58484 - protein, 472 aa, Zea Mays
MTHESSSSSVVTGIPIHDRRRPIPSCPLSPSPLFLRASNAYAVTSVLSSLSAAEPTVNFFTVAHAQACRARSARQKEGRTRGTQFQMADCMQEWPEPVVRVQALAESGLSVIPSCYVKPPCDRPAPAPAPTMAPPAPAVHPRKKEPSSDAIASIPVVDLGELLAADGAVATVTEAVAAACRDWGFFQVVNHGVRPELMRAAREAWRGFFRRPPAEKQRYANSPRTYEGYGSRLGVQRGAVLDWGDYFFLHLAPEAAKSTPRFWPAQPSNCKDVSEEYGREVVRLCELLMRVLSVSLGLDEAHLQRAFGGAECGATLRANYYPRCPQPDLTLGLSAHSDPGALTVLLADVLVRGLQVRRAAADDWVTVQPVRDAFIVNVGDQVQILSNSVYKSVEHRVVVNAEEERISLALFYNPKGDVPIAPAPELVAAASLPALYPTMTFDEYRLYVRNKGARGKAQIEALKGQGTPESQL

SEQ ID NO: 58485 - protein, 83 aa, Zea Mays
MNREIWLDLNKTLAFRNSSRSPERLRTRAQLIRCIATLVCISALDFLPLPRAFHRVLQHEKSCRNFGGTAALTPTHSFCKELM

SEQ ID NO: 58486 - protein, 374 aa, Zea Mays
MLHGAQQASASSTAGPRPKSTAILQSDQPPRAAAAREGGRGGTGPESLVRGSVVAPCVSCGICGGLLRDATAFTECLHAFCRKCIYDKVAKDNIKCCPKCGIFMGNPLEKLRPDHSLEHIRPLIFPAKRRKVVTMKKRKERVSSESTLPSVVGTTAEESTALIPAASESKAQKDLTPVGRDALSRIRGRDFDSACGLTEDTGALIVWQAPPILEETAAHNQLDSKQDPDSFRPPATSDIEYQRQGPTAQMTNISFMVGNSSHARPTDQDDENMRGDILTLINESNARIMEMYDAHISKLKAGNIKLIEQLENERAAALERTRILEERLQQELENERTVAAERTRLLEKKLQRELEHEREAAIERTRVLDERLQR

SEQ ID NO: 58487 - protein, 163 aa, Zea Mays
MHSNEMEDIQEAYAGQIVAVFGVDCASGDTFTDGTVKYTMTSMNVPEPVMSLAVSPISKDSGGQFSKALNRFQKEDPTFRVGLDAESGQTIISGMGELHLDIYVERIKREYKVDAKVGKPRVNFRETITQRAEFDYLHKKQSGGQGTLSLYLQVLMVNSNLIT

SEQ ID NO: 58488 - protein, 141 aa, Zea Mays
MGDTGRWEIELKGAPVGLGIGRAARPGAPWLGEGALGWPDWKREEQGRHGWMRARAERESSAGRMTTVKIPAADKKRRQKFQQKNSGGIFFCFPEYSDAAYQMEERKRWRDKAREGRCTYGIFEEELDVQAVEKSPGDLAR

SEQ ID NO: 58489 - protein, 584 aa, Zea Mays
MDPFIWTLCNDLHDGGRVPTIESLKAVNPTDSAIEVVIVDKVADYDLRQLISMAIDVSLNRTDSKEIATRLAAVVSTKMGGSVAATEEHELGPRWRDSVGFLKISSGSVVLPIGKLSVGFCCHRALLFKTLADSINLPCRIVKGCKYCKAGAATSCLVRFGHDRECLIDLIGNPGFLSEPDSLLNGLSSISVSSPLRPPKHDSADNSDNFKLFAKKYFLDCQSLNLMFSDPAAGTVIDLDEVMGSNLGLNSSHATNSDCQATFTHLKAGTRRSSQDGSFIMQRSSQEDTQSGLSDPFSDMSLEIEDLIIPWSELVLKEKIGAGSFGTVHRADWNGSDVAVKILMEQDFHPERLKEFLREVAIMRSLRHPNIVLLMGAVTQPPNLSIVTEYLSRGSLYRLLHRHAARENLEERRRLSMAFDVAKGMNYLHKRNPPIVHRDLKSPNLLVDKKYTVKVCDFGLSRLKANTFLSSKTAAGTPEWMAPEVLRDEPSNEKSDVYSFGVILWELMTLQQPWSNLNPAQVVAAVGFKGQRLEIPSSVDPKVAAVIESCWVREPWRRPSFASIMESLKLLIKTLPPNQLLEEN

SEQ ID NO: 58490 - protein, 357 aa, Zea Mays
MFLESPVGVGFSYTNTSSDLLQLGDKITADDAYKFLLNWFKRFPQYRSHDFYIAGESYAGHYVPQLSEKIFDGNRAGPKESYVNLKGLMVGNALMDDETDQTGMVDYAWDHAVISDRVYADVKARCDFSMANVTDACNAALQEYFAVYRLIDMYSLYTPVCTDDPAGSSASSSYDARGHRKVAVHGAAPRIFSKYRGWIMKPAGYDPCTAQYAETYFNRPDVQAALHANVTKIGYNWTHCSDVINTWNDAAFSTLPTIRKLVAGGLRVWVFSGDTDGRIPVTSTRLTLNKLGLKTVQEWTPWYDHLQVGGWTIVYEGLTFVTIRGAGHEVPLHAPRQALTLFSNFLAGTKMPPMAFP

SEQ ID NO: 58491 - protein, 318 aa, Zea Mays
MALLRLQEQCSLLRISSSHHPNPIDIPRNPRKNQLLVPNAAKIANASEIPVPRIPTSTSKAAILARKAALWRDALVPVAAAFASCPLPSLAAEGDGKEYVFKKYKPVSAIDAFRKLRDVPEVQLLDIRRGKSVRFMAPPKLKLIDKSTVQVEFDEEDEKGFVKEVLARFPDPANTVVCVLDNFDGNSSKVAELLVENGFKEAYAIKGGLRGPEGWQAVQENYLPPSVHVFPKKKRGAKLAHTDASNDGTYVQQEGSEESSAPPSRFVVNTSAESKDVYENPNGSTTAAKHATRRPLSPYPNYPDLKPPSSPTPSKPTN

SEQ ID NO: 58492 - protein, 119 aa, Zea Mays
MSEMFAYHATMMSNTLRTSIVVFTRTGFMAILLSHYRPSGTIFAFTDEERVRQRLALYQGVCPVQMEFSDDAEKTFGNALSYLLKHGMVKDGEEVALVQSGKHPIWRSQSTHNIQVRKI

SEQ ID NO: 58493 - protein, 207 aa, Zea Mays
MGAPKQRWTSEEEAALRAGVARHGVGNWRMILNDPELSSTLRYRSNVDLKDKWRNMNVIVTSSSTRDRGRTSTRRTRAAPKNNDQLLAMSTITSEVDDEIVDVKPIVSMSVEGWNTSNSKKSHSRLDNIIMEAIKNLNEPTGSHRTTIANYIEEQYWPPSDFDHLLSAKLKYLATSGKLLKGQEGQLTSQDATMYISESSCNVRGLL

SEQ ID NO: 58494 - protein, 1046 aa, Zea Mays
MALSGMRGLSVFISDIRNCHNKEQERLRVDKELGNIRTRFKNEKGLSPYEKKKYVWKMLYIYMLGYDVDFGHMETVSLISAPKYPEKQVGYIVTSCLLNENNDFLRMVINTVRNDIIGRNETFQCLALTMVGNIGGKEFSESLAPDVQKLLISSSCRPVVRKKAALCLLRLYRKNPDVVNIDGWADRMAQLLDERDLGVLTSVTSLFVSLVSNNVEAYWNCLPKCVRILERLARNQDIPQEYTYYGIPSPWLQVKTMRALQYFPTIEDPNARRALFEVLQRILMGTDVVKNVNKNNASHAVLFEALALVMHLDAEKEMMSQCVALLGKFIAVREPNIRYLGLENMTRMLLVTDVQDIIKRHQAQIITSLKDPDISIRRRALDLLYGMCDVTNAKEIVEELLQYLDTAEFAMREELSLKAAILAEKFAPQLLWYVDVILQLIDKAGDFVSDDIWYRVVQFVTNNEDLQSYAATKAREYLDKPALHETMVKVSAYLLGEYGHLLARRPGCSPKELFAIINDKLPTVSASTVAILLSTYAKILMHTQPPDVGLQQQILTIFKKYESYIDVEIQQRAVEYFELSRKGPALADVLAEMPKFPERESALLKKAEDAEIDTAEQSAIKLRSQQQTSSALVVADHPPANGFAPPVNNLTLVKMPSQTVSDTQESGVSYEEAPKPPVEAPKENGTPVEVQNRDTNITEINNEIKAEPPSTSHSTSPGDLLLADLLGPLAIEGPPAVEQNPAQGLNANQSPAGDLALATLDDQSNSVQPIVNVEEKFHILCTKDSGVLYEDPYIQIGLKAEWRAHHGRLVLFLGNKNTSALTSVRALILPPSHLKMELSSVPDTIPPRAQVQVPLEVANLLASRDVAVLDFSYAFGTSLVDAKLRLPVVLNKFLQTITLTPEEFFSQWKALTVHSLKVQEVVKGVKPMPLSEMANLFMSLHLAVAPGLDNNPNNLVACTTFFSEATRAMLCLIRVETDPQDRTQLRLTVASGDQYLTFELKEFIKEHLVDIPRTQVAPPRAAVQPQLPTTAPATYNDPGTMLAGLL

SEQ ID NO: 58495 - protein, 158 aa, Zea Mays
MRLSIGQVHRNVLALASSRSCFVLGDRVSFRMLSQPRVAGFHQTAWRGSQILEDNRGGPLTLASLEVQSRVEYGKKGKMERTGGPKPSSRASSLYVKPKVSSNVKPAKSALMKPAGIKKTLKVDEALFSAKSFEELGLPPLLVDQLNKEGLTAPTEAL

SEQ ID NO: 58496 - protein, 124 aa, Zea Mays
MARGGGDRSREDDPFSDGGTTETDSDESSPRGVGARGPGSTSNPILTRLAVSRNSSPLAAATAAPGVCLLRFAWESAAGSLVGAVVGYGKGLVMMKGIKGSFADAASSAKESMQESQAVALALL

SEQ ID NO: 58497 - protein, 210 aa, Zea Mays
MLNGTIISNANAGDFFDNSSHSDGFLELKDFGDAANLDFPLGNGSSIWPLDCWAWKTPDSAESLNGTNDEIPPLPDDQTFQPDELEQLLQSIQEDSHLGSSIIDPPHSSMTNSVLPDEDCLMFYDAPFDSTMCDDGFAQNGILGSAATNLSGIGMVDDGMPYFDAMDGNLFNDILGSIQQPDGSSSHAFNGPVLTQEMVRLRVVLLERDL

SEQ ID NO: 58498 - protein, 1220 aa, Zea Mays
MPSTEICQVGDQSVAVPLELYDLDGLGDVLSLVAWNTLLSEDERLRLAAFLPDMDQETFARTLVELFAGRNFHFGSPLAAFFKRLKGGLCDPRVNLYRRGTRFAERRKHCYWIQSYHNSMVRGLREIKDCLKGHERYSLAEKIRMLHTLKAQQQQRKALELARRAGSETDSESRGSGEQVLDRLKHDKSGQKKSGKLVKEKSKGLLRAGMPKGVDEDYMGGSGRDAVMSLSELSRYDPRTHRGKLPRSIEGHYSEDLGYGRDSSRSWFQRALPKPVKKELTTTYDGNLYGNNYSDNHTASPYHYGRNPIANQGVTLAAAYDPPYFDTRRNSRYSGRDWAQGGKGVHTNALMGDEMNWPAGIHTGTLHDRQKGQSAGDYRSRKDQAGYGLKVKSYKSIDQQVNDAHVGSDPRSKISQAKMAGKSSTQLDRTGQKHSRSNAVYAQSDETESDSSEKFEDGGEVHYLERKPERHHSGYYRPAHGAKKPNKLAKVAKMNYPTTDADLEPSQSKGFEGKGSETGYLRDVDVMVTEQISDVMKPPAASGERKRKGAGNLDMHVYHNSDLHEINEDANDSSRLAENERFASRSGHAGQDSNGDYVGTERVSSSSKKAKGRVEVPSLDEHGEHLSSGSKLVENIGGSKKKNKKKPESSTTDAAIIAEPAAAVPEINVVAAEPEKVEKPKKKYVPITPTIHTGFSFSVVHLLTAVKKAMVTPAEDTPATAKQPDGEEGKICFNNEEHIKTPHQEQSTTDQTEQVLEGANASAAEQTVPINAPALTVQEIVNRIRENPGDPRILETQEPLQDLVRGVLKVLSSRTAPLGAKGWKALVAYEKSNKSWFWVGPVPSVSSYDDPDEETSAEAWSIPHKMLVKLVDAFSNWLKSGQETLKQIGSLPPPPPPNPANLDLKERFKELKAQKSLNTISPSSDEARAYFQREEFLRYSIPDRAFCYTAVDGEKSIVAPLRRGGGKPTAKARGHPMLLPDRPPHVTILCLVRDAASRLPARTGTRADVCSLLRDSQYLNHEEANKEAAINQVVSGALDRLHYERDPCVLYDNDKKLWTYLHRGREEEDFEDDGTSSTKKWKRPRRDLSDPAEPGAANDDVDDEGTGTPPGSNAKKQKADHGDSTLSGEANDEGNHPTQNPSSGGLEGDPDLNARNYEESGGVVYMDARTDVGVGSNSIDAKPGSRADDNTASWQSLPEQNKTSTALPEDTSMDGTPGPA

SEQ ID NO: 58499 - protein, 155 aa, Zea Mays
MVYKESRFTAAGDTIVAVDSPFGRLGLTVCYDLRFPELYQILRFKHQAQVLLVPSAFTKITGEAHWEILLRARAIETQCYVIAAAQAGKHNEKRESYGDSIIIDPWGTVIARLPDRLSTGFAVADLDLSKVEAVRTRMPISEHRKFDSDWKPTPL

SEQ ID NO: 58500 - protein, 173 aa, Zea Mays
MKIRSHRKSNTGGPEEREIPVLVFSAGLADIIEEVFRQKLHKTFKNIKVVSNRMVFNEEGRLIAFKGKTIHVLNKNEHALDMAAPVHGNPGDPNGSMDDYSLVKKRTNVLLLGDHIGDLGMSDGLNYDNRIAVGFLNANIEKSLKDYSSAFDIVYLNDAPMHGVVQLVSELCP

SEQ ID NO: 58501 - protein, 888 aa, Zea Mays
MEIISLSPSSFKCQIAHWRQGHKDECHPPTVNTRPDDEGKAEEGRAAQENVSVGVKQVSEMNKPAVGSETSDLNHNLKSSNGKSKHTLSEAVCTSAKVPGGHQSNSTVEISENVPVSVDSSKMGSSMKHANANFGEDGSSTKDLNGVSPCKSQSSPSNINGHSSFVNDEFCNHSKEHQRAKDGSVVDDCLQTSSTRELEDSSIPQAAAYAVLEPKSSRTPIHVELERSKTKSVGNDSIQSMKPVPSALTVDKATSVRGNCSITLNSSKVADNLPDRNFEPSDRSGSTANNLATSLKKMVRQQTAPKVVRHYPSESTLFPYELFVRLYVKVELRPFGLHNLGNSCYANAVLQCLMFTRPLTTYLLEGLHSKNCSQNGWCFMCEFEKLIVEGKRRKIALSPTGILSHLNDIGSSFGPGKQEDAHEFLRYAIDAMQSVCTKEARKGGVLRSAEETTLVQLIFGGYLRSKIKCSRCHVSSEQCEPMLDLTVEIDGDISSLDEALVRFTSTEALDGENKYHCSRCKSYERAKKKLTIEEAPNILTIALKRYQSGKFGKISKAIRFPETLNIVCYMNPDTDDISPVYSLYAVVVHHDVMNAAFSGHYVCYVKDTHGKWFKADDSQVKPVSLDNVMSKCAYMLLYARCSPRAPSSVRQAISDPARPKKAKQKVVPGGTTWRGGSFNRHQDGQRHSNHTADDLTHAFDEYRNAPYSPSDSPSPSESSSLFSNSDAGSHSTVSTDSSESTRNSTSTEEYEYVFGAADQMYPGGPMGGAPVESDQMYPGGPMGGAPVESDYSTYSRSRSSLNTSSSGRDAYSAASSADHKHQVVGSGGQVEGDESTSLLYTDRSNQQLSSKLTDQYRQLDGSGHDPGETRGGVLLRRPSRDRTAQTFY

SEQ ID NO: 58502 - protein, 1250 aa, Zea Mays
MKFFKPLPILNKTEINPTKPLRKETQLLSPPASTQRIRGNRPPMGSLRGAAASSAAPRAGDLVTTQVSLGGFDATVKALDLADFLELNAGSVWRCRLKTSWTPPDAYPDFLLPTVTSAAAPPPQYDRVPPHAFVHFARPEGARAAADAAGRSELILSGKPLRAASAQDSSLRASRRRSVSPFRFPGSRLEVGDLPASDAFIAAWRGPASGLEFSVDPFDGSCHFIFARDTAFKVREFRESVVMRCDVKLQFPVRDVAEVRVFRLDCSLLIRLSAAPLVCYRTADDDIHVSVPFDLLDDDDPWIRTTDITPSGAIGRCGAYRITFSPRFWPKMERALTYMRDRRVAILDCVGGWGARRGLTVRDEPEFGERMQDLFFCVQHAEGLKFPVLFLVNALVHKGVISQHHLTPEFFGLLQRKEDDVNVAALREFWGDKFPVFDACGRLKNLQDRVARYLKHLRNKIGDVNSEVRRLVITPTKAYCMPPEVERSNRVIRHYSEVSDRFLRVTFMDERMQMLNSNVLNFSAAQIVKDLMSNSFLHKTTVYKRVKTFLTEGFHMCGRKYSFLAFSSNQLRDRSAWFFAEDRTTTVETIRKWMGRFTSKNVAKHAARMGQCFSSTYATVVLQPHEVNECLDEVEHNGYIFSDGIGKITCDLALEVAQKLQLTDNPPSAYQIRYAGFKGVISVWEGKNDGIRLSLRPSMHKFESNHTVLEVVSWTKFQPGFLNRQIITLLSSLNVPDAIFAQMQEAMLSNLNNILSDSDVAFDIVTASCAEQGTTAALMLSAGISPGTEPHLKAMLLAIRSSQLLGLLEKTRIFVPKGRWLMGCLDELGILEQGQCFIRASSPSLNNCLVKYGSRLSAANTNAETILGTIVMAKNPCLHPGDVRILEAVDVPELHHLVDCLVFPKKGERPHANEASGSDLDGDLYFVTWDENLIPPGKKSWNPMDYSPAEAKQLPRAVSQHDIVGFFLKNMVNEKLGPISNAHVVHADMSEYGAMDEKCIQLAELAATAVDFPKTGKIVSMPASLRPKLYPDFMGKEDAISYRSEKILGRLYRSIQEASSDDLVPEETCTSNNLPYDADMEVAGAADFLSSAWQCKCSYETQLNALLNQYGVRTEAELVTEHIWSLPKYSSRRQGDIKERLKNAYYALHKEFRSIFESIVTDQTEISDDEKSRFYEMKASAWYQVTYHPEWVQKSREMFKSDCEDMPARLSFAWIAVEHLARIKIRCRGEVKVDSPRPVERLAAYISGSM

SEQ ID NO: 58503 - protein, 867 aa, Zea Mays
MQKHSGLRSLEGFRSLVGSTSTAMKVANPRPSPDTGGISYGSFANLKITAEKLVKEQASVKTDLEMAHVKLRRATEQINIIEGKLQQALNENAKLKVKQTEDSKLWQGLDSKLSSTKTLCDQLTETLQQLASQTEQAEEDKKFFEEMLGKNSKALDEFNCLLRDLSTKLEYAEQKIISGRQEMLQIKQEKEEMDRSYKGQLYSNDTTIKEKDSLIKQLEGSLDDNKSRLIYLDSRLQCMEQELKLKDDVCISLKGNLASSESEKNSLELMNKGHILEIKKLCQDNKDLNELFSSFMVKVTELDKEHASMSSHVSRLISSFERFYEMAQEEKMLMARSSKDKFEHLQSQYVDLTSENNALKTEIEELKSRLIELQRTQEIVMVQHVEECQVAEDKIRRLESEAEVSASNINQLEKLASELQGRIQKLLEDSTFAENHKQELLQKILKLESDNQELLGQMQSIMEEKSNNAESLHGEITKRDQQVDTLENQINQLRSVLDEKEQLYLCSVQKEKTLEEQKLQVEALLSATECKLSDAKKQYDLMLEGEKIELSKHLKELSLKNDQAINEIRKKYELEKIEITNAEKEKAEKLIREIENKCNEKISQNKHDSQRYLICLKEEHGTTVARIQQDNEHKESTLRAYHKEELQRIQSQAENEMRERLSLLRKEHEVQIKSLRMHHEEECQRMQEELELQKSKEEKQRALLQLQWKVMGESQRVDQEVNSKKEYSVSSIRRSDPYGRKEQEVQLVSPETNRKDVNLPGILQSPISNMLRKVEKVSQDIPKHRKVTHHEYEVETANGRITKRRKTRSTVMFGEPNSQKPLHNTTDKDVKKLKKVPTRSRAHPANIGELFSEGSLNPYADDPYAFD

SEQ ID NO: 58504 - protein, 405 aa, Zea Mays
MDGRRRGGGAMAWLLLLLASLCTGACGLNADGVLLMSFKNTVTADFGGTALRLLNVSSNKLAGAVPTELAAVVPANATVDLSRNNFTGAIPQAGPFAAQPAAAYEGAEKLKDFEAQVRAVARFRHPNILRLRGFYWGADEKLLIHDYAPNGSLANIAFSRRFGSSSPLHLSLEARLRIARGVARGLAYIHEKKGVHGNLKPSNILLGGDMEPWIGDLGLDRLASGEAAPHYRAGASARLFGSKRSMHSTSSLPDLSQMPGPGASPCGSASAAAAAASAAPAPYQAPECLKNLRPTAKWDVYAFGMVLLELLSGRVYSEVELCQWHAGLVAAEEHGRVLRMADPTLRGEADGREDALLACFRLAFACCAMAPGKRPSMRDAAMVLERTAAAAAPGAAASSSGAAVP

SEQ ID NO: 58505 - protein, 69 aa, Zea Mays
MHVHVRKQKHQMSLNHWVLMHDHVRTNSNQHKRKFEIEEIEEVWLVFSMNTGTFNIIIFHSCITCYMFY

SEQ ID NO: 58506 - protein, 924 aa, Zea Mays
MASAMKLLGRSSLASPAAAAPGRERRGGPCFAAVGREGSAHRRRSSLRSTAPVGALAERVVVTPAPPERAGAGPPEPHPQSVAARAVVTVRRRRKEDAKRRVAEQLDAYADRVGRSVLLELISTETDPRKGGPKKSRRSALVGWFEKKDVKTERVVYTADFTVDGSFGEPGAVTVLNRHQREFFIESIVVEGFPSGPAHFTCNSWVQPTRVDRNPRVFFTNKPYLPAETPPGLQELRRQQLSDLRGEGADTGERRITDRVWEYDVYNDLGNPDKGAEFARPVLGGEQQLPYPRRMRTGRPKTITGKPPLSHDRAESRVEYPEPIYVSRDEEFEDGKNEMLSEGALKALLHNFMPLLVSSVSPDIRDFAGFHDVDNLFKEGLRLKQALQDQLFQKIPFVRKIQENSEGLLRYDTPDIIKKDKFAWLRDDEFARQALAGINPVNIERLQAFPPMSKLDPAVYGPPESAITEEHIIGQLDGMSVQQALQDDRLYMLDYHDIFMPFLDRINALDGRKAYGTRTLFFLTAAGTLKPIAIELCLPPMTDGCARAKRVFTPPADATSNWLWQLAKAHVCSNDAGVHQLINHWLRTHAAMEPFIIAAHRHLSTMHPIFKLLKPHMRYTLKINALARQILINGDGVIESGFTPGRYCMEMSSFAYRELWRLDQEGLPADLIRRGMAVEDPTQPHGLRLLIEDYPYATDGLLLWSAIRRWCDAYVAMYYPSDESVQGDTELQSWYREAVHTGHADKRDAPWWPRLSTPADLASLLTTLLWLTSAQHAALNFGQYPLGGYIPNRPPLMRRLVPAEGDPEYAHLVADPHRFFLSALPSLTQTTTFMTVIDTLSTHSADEQYLGERPDEAWTADPAALAAAREFADEVRRAEEEIERRNADTGRRNRCGAGVLPYELMAPTSGPGITCRGVPNSVTI

SEQ ID NO: 58507 - protein, 605 aa, Zea Mays
MAQKTKEAEITEQDSLLLTRNLLRIAIYNISYIRGLFHEKYFSDKSVPALEMKIKKLMPMDAESRRLIDWMEKGVYDALQKKYLKTLLFCICEKEEGPMIEEYAFSFSYPNTSTEEVAMNMSRTGSKKGSTTFTSNASEVTPDQMRSSACKMIRTLVSLMRTLDPMPEERTILMKLLYYDDVTPEDYEPPFFKCCADNEAISIWNKNPLKMEVGNVNSKHLVLALKVKSVLDPCDDDNVNSEGDGMTVDNESDHDDDFSDTEVHPPKADHYIIAPNGKDKDQDTGTISEDDTQDTAHEEELTSQVKEWICSRDSGTINVSDVLSNFPDISMELVEDIMDRLLKDGILSRASKDGYTVNQKADPKTPHIKKEAIMPDVSPTNVTKHNNGDLLYMKALYHALPMDYVTIAKLQGKLDGEASQNTVRKLIDKMVQDGYVKNSANRRLGKAVIHSESTNKRLLEIKKILEVNEGEKMAIDTNTEHPEPEHKDLLRVYEVGDGSTMGCLHSIGSDLTRTRELPELQQNVSMQSGQEASTVGKDSSRTPTSVRELAVPVCSLESGVLGKRIKRSLTGGNEMQSTQDKRSRKASMVKEAILQHVKCQNPQAQ

SEQ ID NO: 58508 - protein, 261 aa, Zea Mays
MSATNVLQGHDILMATMLNGAAIMDGALLLIAANESCPQPQTSEHLAAVEIMRLQHIIILQNKIDLIQESAAMNQHEAIQKFIQGTIAEGAPVVPISAQLKYNIDVICEYLVKKIPIPERNFTSPPNMIVIRSFDVNKPGSEVDEIRGGVAGGSILRGVLRVNQKIEVRPGIVMKDETGNIKCTPIYSRIVSLYAEQNELQFAVPGGLIGVGTTMDPTLTRADRLVGQVLGEVGSLPDVYVELEINFFLLRRLLGVEAHQG

SEQ ID NO: 58509 - protein, 316 aa, Zea Mays
MLKKYYMSLLYHFEQLYFFRVQGWHQQEIDSRMNSSIEIKTEGQAYHKRKRGINTSSDPASSSDNVDVDVIVDGKFEHGYIVTVIMGSKSTKAILYNCTEEPALPTPEPPVANNSTGLKGVRRRRRRRKKLSTTDPRHPKPNRSGYNFFFQDQHRILKPQYPAQDRLISKMIGERWNNLSPEDKAVYQQRGVEDKERYRTQLAAYKELRTGQPISNAVPIQQRLPLTEVTIDEVDSKVSQDDMLLSNQGYSSSDESDHSGEKNVEDELNTETSPEVSMETTGSPGHPDPSRDGDHFELRRRENPKADEKDNAPPDS

SEQ ID NO: 58510 - protein, 833 aa, Zea Mays
MSPVHSPMISRSIRNLQIAVLSYQNKTNTSAVTDVEEHKCLNSELWHACAGPLVSLPAVGSRVVYFPQGHSEQVAASTNKEMESQIPSYPNLPPQLICQLHNVTMQADAETEEVYAQMTLQPLNPQELKDPYLPAELGLVSKQPTNYFCKTLTASDTSTHGGFSVPRRAAEKVFPPLDFTQQPPCQELMATDLHGNEWKFRHIFRGQPKRHLLTTGWSVFVSAKRLVAGDSVLFIWNDNNQLLLGIRRANRPQTVMPSSVLSSDSMHIGLLAAAAHAASTNSRFTIFYNPRASPSEFVIPLAKYVKAVYHTRISVGMRFRMLFETEESSVRRYMGTITGISDLDSVRWPNSHWRSVKVGWDESTAGDRQPRVSLWEIEPLTTFPTYTSPFPLRLKRPWPTGLPSLHGGKDDDLANSLMWLRDTTNPGFQSLNFGGLGAFQDPTKQASPTMLQFQQPQNIAGRAAPLSSQILQQAHPQFQQQPYIQNISESTIQAQGQSEFLKQQIQRSQSFNEQKPQLQPQQESQQQQQSQCLQAPQHQQIQQNIANYQSVSNALSAFSQLSSASQSTPMALQTILPFSQAQSFTDTSASSLSPSNTNTMQNTLRPFSSEAVSHLSMPRPTAIPVPDAWSSKRAAVESLLPSRPQDSSQMQQLDSTPASIPHSSALAPLPGRGCLVDQDANPDPQNHLLFGVSIDSQSLLMEGGIHGLQNGNDSTAIPYSTSNFLSPSQNDFPLDHTLNSSGCLDDSGYVPPCSDNSDQVNRPPATFVKVYKSGTYGRSLDITRFSSYHELRRELGRLFGLEGQLEDPLRSGWQLVFVDREEDVLLVGDDPWQ

SEQ ID NO: 58511 - protein, 157 aa, Zea Mays
MSVFGGDSWARDAQQRKRRLDELLLPITAPSSPSTPDSFKKLHNGKLACLICPHRPVLDTPLMLSMHNKGARHIAAESRLREKELSKKHEISKRLALSSDVSHSNSGNPRTSVWPTNIKEKPLIEETRRAILEAQSSRFNDFQGTVHWKYWITRMEL

SEQ ID NO: 58512 - protein, 275 aa, Zea Mays
MEKPFFDSIPGTPVQKSVFDYSVPSTPMQNSVFDYSIPSTPMQKPLFDSVPGTPVQKSVFDSVPSTPMQKSVFDSAPSTPTQKPFFDSFPSTPMQRSMFDSGPSRAESPTAGSVYGKEQKGFFDSSVPSTPMYNSNLTPRYSEAGDDSFDTMSQYSSFGMHDNNSFGQIDSFSRFDSFRSNADNGGNDAFARFDSFRSTSDQGGGNSFMRYDSMNSSSDHDRTDTFARFDSMKNSDFNNQGYSFDDDDPFGTGPFKSTETSNSPTRHGTDAWSAF

SEQ ID NO: 58513 - protein, 173 aa, Zea Mays
MTIYNLIPFLKCLLCSGLQGILYRSTLIHIALDTFRISFSKGNRAGGASSRSIFSTVSNCTEVVGDALLGNIVFIFMLLLGVRFFLKLSFDIIRYRDILFAVIISSYFKLFLFTMMVWEFPSSVIFIVEMFVLSSNVVALRVVSQFPRAHCFAVCLLAHAAKYLTQRWILGTP

SEQ ID NO: 58514 - protein, 592 aa, Zea Mays
MSVSMKDLDPAFRGSGQKDGLEIWRIENFKPIPAPASSYGKFFMGDSYIILKTTALKNGSLRHDIHYWIGKDTSQDEAGTAAILTVELDAALGGRAVQYREIQGNETEKFLSYFRPCIMPQPGGVASGFNHVEVNEQDYKTHLYVCHGKHVVHVNEVPFARSSLNHDDIFILDTKSKIFQFSGSNSSIQERAKALEVVQYIKDTFHEGKCEIASVEDGRMMADAEAGEFWGFFGGFAPLPRRAPAEGNEKHDETAFKLLCFDQGKLEPVDCQSLAHELLETNKCYFLDCGAELYVWMGRITSLMERKGASEAAEKLLSDSNRTRTHIIKVIEGFETVTFKSKFKEWPQTPELKLSSEDGRGKVAALLKRQGLNVKGLMKAAPTQEEPQSYIDSTGNLQVWRVNDKDKVQLSPSDQSKFYTGDCYIFQYTYPGDDKEECLIGTWFGKKSIEEDRVIAVSLASKMVESAKFQAVQARFYEGKEPIQFFVIFQSFQVFKGGLSSGYKRFIAENGIDDESYSEDGLALFRIQGSGPENMQAIQVEPVASSLNSSYCYILHNGNTVFTWAGNLTTALDQELMERQLDVIKRTLASVS

SEQ ID NO: 58515 - protein, 457 aa, Zea Mays
MAREQLEESIVADGNGKEEEVGVMGIGAADGADDQHGGGKLSMKSLLWHGGSVWDAWFSCASNQVAQVLLTLPYSFSQLGMLSGVLLQIFYGFLGSWTAYLISVLYVEYRSRKEKEGVSFKNHVIQWFEVLDGLLGPYWKAAGLAFNCTFLLFGSVIQLIACASNIYYINDRLDKRTWTYIFGACCATTVFIPSFHNYRIWSFLGLGMTTYTAWYLAIAALLNGQAEGVAHSGPTKLVLYFTGATNILYTFGGHAVTVEIMHAMWKPAKFKYIYLLATLYVFTLTLPSSAAMYWAFGDELLTHSNAFSLLPKTRWRDAAVILMLIHQFITFGFACTPLYFVWEKVIGMHDAKSIFKRALARLPIVVPIWFLAIIFPFFGPINSAVGALLVSFTVYIIPALAHVLTYRTASARMVRIHMHACICIALHPRRLANNNNGVLWPGRPSRCLMPTGSGTSK

SEQ ID NO: 58516 - protein, 952 aa, Zea Mays
MEKPCSLLVHFDKGSAAMANEIKADLEGSDGPAKADAMRRAISLLLNGETLPQLFITIVRYVLPSEDHTVQKLLLLYLEIIDRRDPAGRALPEMILICQNLRNNLQSPNEYIRGVTLRFLCRLSEPEVLEPLVPSVLANLEHRHHFIRRHAVSSVSAIYRLPHGDQLIPDAPELVERFLASEQDASARRNAFLMLCACAQDRAVAYLLSNADRVAEWPDLLQMAVVDLIRKVCRSQNRANKGRYITIITSLLSTPSTAVVYECAGALVSLSSAPTAVRAAANTYCQLLSSQSDNNVKLILLDRLNELHTLHRDVMVGVVMDVLRALASPNLDVKRKVLDLVLDLLTPRNVEEVVLYLKKEVVKTQAGDLEKGGEYRQMLVQAIHACAVEYSEVAGSVVHLLMDFLGDTNVAAAVDVVLFVREIIETNPKLRVSMIQRLIDTFYQIRASRVCSCALWILGEYSLSLSEVESAIATIKQCLGDLPFYTVSDEGEATDSAKPAKAVVNSVTVSSRRPVVLADGTYATQSAATETILTPSVAPGSLASTLNLRSLILSGDFFLAAVVACTLAKLVLRLEEVQPSKVESNKACTGALLIMTSILQLGQSSYLPHPIDNDSYDRIVLCVRLLCNTGDDVRKIWLQSCRQSFAKMLAEKQFRETEEMKAKAQISHAQPDDLIDFYHLKSRKGMSQLELEDEVHDDLKAATGGFTKDADDANKLNRILQLTGFSDPVYAEAFVTVHHYDIVLDVTVINRTKETLQNLCLELATMGDLKLVDRPQNYTLAPESSKQIRANIKVSSTETGVIFGNIVYETSNVMERSVVVLNDIHIDIMDYISPATCADVTFRNMWAEFEWENKVAVNTVIQDEKEFLNHIIKSTNMKCLTPPSALDGECGFLAANLYAKSVFGEDALVNISIEKQHDGKLSGYIRIRSKTQGIALSLGNPRARDTSAVALN

SEQ ID NO: 58517 - protein, 392 aa, Zea Mays
MLLFEPKGRPEDEDNEFYIQSKKNICVGCGEKSHYIRYRIIPSCYRMHFPEHLKSHRSHDIVLLCVDCHEIAHSAAEKYKRRIAEEFGIPLFVQKIMNSGDISLITNTSVSEDKLNGTGVSPLQLRTAAMALLRHGSTMPLKRCEELMQIVKSYYGGRDVTPEDLEMALLVGMSPHERRRLEKKKGYSFRAQAQTIIRKSSSNTISEDSGHGSENCHALSARFPEVGTGSNGQQEFDETGNQNQLENLTLSQGSSSLPVSMEDTTSDHDTVTLETDTEQQARGACTPGNSHDDKEQSICDNSSQVISKNAEKISLLGHGHHGKQVVELLFSNGGEEFVNQFCQRWRQIFVEAVHPRYLPSGWNINHSGRRDFGDFSVYKPPRKDPQSATARD

SEQ ID NO: 58518 - protein, 140 aa, Zea Mays
MVISLVERRRQAGSWSIGFAWGGRSWWPCDPSSSSLGPTMAAAPSHETLEREREREGHGGGRGGRDGCKSSSHCYRHQVVTGQWGPLLQAVGPIRSRWLPILYLMYQGLLAVSRIQFPHLYMLYINDNISEFCPRLNRLF

SEQ ID NO: 58519 - protein, 110 aa, Zea Mays
MLVEEVWERRSRSEQTRIEESPSRETTDAERAGRSGRGFLDLLPWRAWARTESRGGDLGRGRGIAGERVGRGEPGGRESEGCWFADAALGTRGAEAVVAERRMARRDTTG

SEQ ID NO: 58520 - protein, 923 aa, Zea Mays
MRADLSTIQQTLTPEAAAALARAIDEAARRRHGQTTPLHVAAALLAAPAGLLRQACARAAAAGAGPGAAGSAGGAHPLQCRALELCFSVALDRLPAAASAAAAAASHASGPPVSNALVAALKRAQAQQRRGCPEAAQQPLLAVKVELEQLVLSILDDPSVSRVMREASFSSSAVKTTIEQSLASPSPPPSAVSTPTVAATTTLAPSPSPLSRLGSANAYMNPRLAAAAGGGGDDARKVLDVMLKPARRNPVLVGDAGPDAVLKEAVRRIPMAGSPSLAGAKVLPLESDLAKLAGDKAALAARIGDLGPVIQRLLVDHGAVVLDLGDLKWLVDGPAAAASEGGKAVVSEMARLLRQFGSGKVWAVGTAACATYLRCKVYHPTMEAEWDLQAVSIARSAPLAGAALRPGSTGILGNSVGMLSHTLRPMPVTPTALRWPPGAGSDNPLMAKPVMCLLCKGSYDRELAKLAAEQKENPASRAEAAKPGLPHWMQPSSDQPQTKEQELKRKEAAEELEKKWRETCARTHGNRAGAPALSLGLAALVPRPPVEPKIQHSRGGVPTLQMNTNWEKPEGTPTSELRKSPLGSPVKTDLALGPMDPGATVENDQKENYTEGLTSMQKAKIAGISDIESFKRLLKVLTQKVSWQSDAASAIAAVVIQCRTGSGKRRNIGTRGDIWLLFVGPDQAGKRKMVNALSELMVNAQPVVVNFGGDSRLSKDGNGLNPGFWGKTSLDRVTEAVRQNPCSVIILEGIDQVDAVVRGKIKRAMETGRLVDSRGREVSLGNVIFVLTTNWLPEELRRPKFETLLQDEGRMLEVASSNWQLELSIEDKQVKHRADWLCDDARPAKVAKELSGGQGLSLDLNLAVGALDDTDGSRNSSDLSVEQEHEKGHLAVKCSTPAPDYDLLNLVDDAIVFRPVDFAPAPA

SEQ ID NO: 58521 - protein, 66 aa, Zea Mays
MITIRELHLSYLSCRVRSGDYRVVGVRYGLENVSTGTSFVPIPCIHLSIVKTPSIGTYFHYTYTYE

SEQ ID NO: 58522 - protein, 561 aa, Zea Mays
MDDVCEGKDFSFPEQEERVLELWAKLDAFHEQLRRTEGGEEFVFYDGPPFATGLPHYGHILAGTIKDVVTRHQSMRGRHVSRRFGWDCHGLPVEFEIDKLLGITNRQQVFDLGIGKYNETCRSIVTKYVSEWEAMVTRTGRWIDFKNDYKTMDLNFMESVWWVFAQLWEKDLVYKGFKVMPYSTGCKTALSNFEAALDYRTVPDPAVMVSFPIVGDMDNAAFVAWTTTPWTLPSNLALCINANLMYAKVRDKSNGKVYVIAESRLGQLPVKAKASGKKQAPSKGSNAEAAQDGLDKESYELLVKIPGPYLVGLKYTPLFDFFIELQETAFRVIADNYVTDDSGTGVVHCAPAFGEDDHRVCLAAGIFETAGLVVAVDDDGCFIEKISDFKGRYVKEADKDIISAVKDKGRLVSKGSIEHSYPFCWRSGTPLIYRAVPSWFVKVEKIKDQLLECNKETYWVPDYVKEKRFHNWLEGARDWAISRSRFWGTPLPLWMSQDRKEIVVMDSIEKLEKLSGVKVTDLHRHYVDDITIPSKRGPKFGTLKRVDDLPLGIKIFRWRIG

SEQ ID NO: 58523 - protein, 1489 aa, Zea Mays
MQSMIRIVGLSATLPTYLEVAHFLRVNPDTGLFFFDSSYRPVPLAQQYIGISERDYTKRSELFNTLCYEKVVESIKQGHQALVFVHTRKDTGKTARTLIDLAAKAGELELFSSADHPQFPLIKKDVSKAKSREVVEFFESGFGIHNAGMMRSDRSLMERLFGDGLLKVLVCTATLAWGVNLPAHTVVIKGTQLYDPKAGGWRDLGMLDVMQIFGRAGRPQFDKSGEGIIITTHDKLAYYLRLLTSQLPIESQFLGSLKDNLNAEVALGTVTNVREACTWLGYTYLFIRMKTNPLVYGITWEEVMGDPSMGAKQRTFIIDAARALDKAKMMRFDEKSGNFYCTELGRIASHFYLQYSSVETYNEMLRRHMSESELITMVAHSSEFENIVVREEEQDELEALARKACPLEIKGGPTDKHGKISILIQVYISRAPIDSSSLHSDAQYISQSLARIMRALFEICLRRGWSEMSSLLLQYCKAVDRKIWPHLHPLRQFDKDLSPQVLWKLEERNVDLDHLYEMEENEIGALIRFSHQGKLVKQYVGYFPYVNLSATVSPITRTVLKVDLHITPEFVWKDRYHGMSERWWIIVEDSENDTIYHSELFTLTKKMARGTPTKISFNVPIFEPHPPQYYIHAISDSWLHAETLFTVSFHNLTLPQTQITHTELLDLKPLPLSALGNKTYEDLYRFSHFNPIQTQAFHVLYHTDNNVLLGAPTGSGKTISAELAMLHLFSTQPDMKVVYIAPLKAIVRERMNDWRKRLVIQLGKKMVEMTGDFTPDLMALLSADIIISTPEKWDGISRNWHSRSYVMKVGLMILDEIHLLGADRGPILEVIVSRMRYISSQTERSIRFVGLSTALANARDLADWLGVTDDGLFNFKPSVRPVPLEVHIQGYPGKFYCPRMNSMNKPAYAAICTHSPNKPVLIFVSSRRQTRLTALDIIQLAASDEKPRQFLSIEDNSLDMVLSQVSDSNLRHTLQFGIGLHHAGLNDRDRSLVEELFSNNKIQVLVCTSTLAWGVNLPAHLVIIKGTEYYDGKTKRYIDYDITDILQMMGRAGRPQYDQHGKAVILVHEPKKSFYKKFLYEPFPVESNLREHLHDHINAEIVSGTISNKEEAIIYLTWTYLYRRLVVNPAYYGLEDTETNTLNSYLSRLVETTFEDLEDSGCIKVDDHSVKYLILGKIASQYYLSYLTVSMFGSNIGPNTTLEVFLHILSAASEFDELPVRHNEDNLNRILSGNVPYPVDQHHLDDPHVKANLLFQAHFSRAELPISDYVTDLKSVLDQSIRIIQAMIDVCANSGWLTSALTCMHLLQMIIQGLWFERDYESLWMLPSMNDDILDHLKSRGVSTVPSLLDLSREELRRVLQPFSASELYQDLQHFPHVDVKVKLHNEQERSKPPTLNIRLQLKNSRRSASRAFAPRFPKAKQEAWWLVLGNATSSELYGLKRISFADRVINTRMELPQTFNVQETKLILVSDCYLGFDLEYSLEHLTKG

SEQ ID NO: 58524 - protein, 161 aa, Zea Mays
MQMMRSFVTVAQENYPNRLGVLFVVRLPPVVRVIAQTFLQVLKPSTKQKLRFEGDSYKKTLAEFLQAVPAFLGGKCSCPRCEKPRNSSVVQAGEGSKNQARLVSVDGGSPVVDFDFDEEEIPSPYSCENAIRAAIICLLMVCIFIAFLAGMNDPASVPPSA

SEQ ID NO: 58525 - protein, 175 aa, Zea Mays
MPSWAFPRASFIPSPRWQSPSNYAPMIVPQGLVQMQSWNSYTGQLQSPGAQQTYGSSQQGEASTGNQGMLSPYRPSSFPVPQYALQRENVFPERPDEPECQYYMKTGDCKFGAVCKFHHPRVRSLPPPDCVLSPMGLPLRPGEELCKFYSRYGICKFGANCKFDHPTVVAPMVYA

SEQ ID NO: 58526 - protein, 232 aa, Zea Mays
MTGYRSRSPSRSYSPRRRYSRSPPRRKRYDDPRDRYRWAGAGGGGDRRGYGRPLAQSGLLIRNISLTARPEDIRATFEQFGPIKDVYLPRNFHTRELRGFGFVKFRYPEDAAVAKREMHHQVIGGREISIVYAEENRKTPQEMRMRTRTSGRYMDERYTRLSRSPRSRSHFRRDFRGRERPDSYSPQYSHSPRPRDSRHHRSDGRSPTPSLDDHKPKATPVNGGHGPAVASR

SEQ ID NO: 58527 - protein, 525 aa, Zea Mays
MATADQSRIFMKDVKRVIIKVGTAVVTRHDGRVSTGNFGVLCEQVKEINALGYEVIIVSSGAVGVGKQRLNYRKLVNSSFADMQKPQTELDGKACAAVGQSGLMALYDMLFTQLDVSSSQLLVTDSDFENPNFRERLRETVESLLDLKVVPIFNENDAISTRKAPYEDSSGIFWDNDSLAGLLAIELKADLLVLLSDVDGLYSGPPSEPQSKMIHTYIKDKYHNEITFGDKSRVGRGGMTAKVKAALVASNSGTPVVITSGSASGSIIRVLQGEKIGTLFHKDASLWEPSSDVSACEMAVTARECSRRLQNLSSDERNKILLDVADALEKNENLIRTENEADVAAAQDAGYEKFLVDRLTLKPGKISALAKSIRTLARMEDPINQILKRTEIAENLILEKTSCPLGVLLVIFESRPDALVQIASLAIRSGNGLLLKGGKEAMRSNKVLHKLHDVIDLVIPRGSNKLVSQIKTSTKIPVLGHADGICHVYIDKSANMNMAKQIVMDAKIDYPAACNAMVCLICYNL

SEQ ID NO: 58528 - protein, 875 aa, Zea Mays
MRMVEMLSHQLRVDQAILTGESCSVAKEVESTPAMNAVYQDKTNILFSGTVVVAGRARAIVIGIGSNTAMGSIRDAMLRTEDPHPSIYMVIILLTVKNLTILQEATPLKKKLDEFGTFLAKVIAGICILVWVVNIGHFRDPSHGGFVRGAIHYFKVAVALAVAAIPEGLPAVVTTCLALGTKRMARLNAIVRSLPSVETLGCTTVICSDKTGTLTTNMMSVSKVCVVRSVHQRPMTDEYSISGTTFAPDGFIYDADGLQLEFPPQSPCLLHLAMCSALCNESTLQYNPDKKSYEKIGESTEVALRVLVEKVGLPGFDSMPSSLNMLTKHERASYCNHYWENQFRKISVLEFSRDRKMMSVLCSRKHQEIMFSKGAPESIMARCTHILCNDDGSSVPLTMDIRNELEARFQSFAGKDTLRCLALALKRMPAGQQSICYGDEANLTFIGLVGMLDPPREEVWDAIHSCMSAGIRVIVVTGDNKSTAESLCRQIGAFEHLNDFSGYSYTASEFEGLPPLERTNALQRMVLFSRVEPSHKKMLVEALQAHNEVVAMTGDGVNDAPALKKADIGIAMGSGTAVAKSASDMVLADDNFATIVAAVAEGRAIYNNTKQFIRYMISSNIGEVVCIFVAAVLGMPDTLIPVQLLWVNLVTDGLPATAIGFNKPDGNIMSVKPRKVNEAVVSGWLFFRYLVIGAYVGLATIAGFVWWFVYSDNGPKLPYSELCVFTGTIVPWPAVNFDSCSTRQTSYSCSIFEDRHPSTVSMTVLVVVEMFNALNNLSENQSLLVIHPWSNLWLVGSIILTMLLHVAVLYIEPLSALFSVSPLSWVEWKIVLYLSFPVILIDEVLKFFSRRSPRGRRFPLRLWRREILPKESRDN

SEQ ID NO: 58529 - protein, 191 aa, Zea Mays
MPVQHIQASSSTPPATGEPRIGMRSCPIDVEAIDDDAVIYSSRPLPRARQQLTTTESITIIIDDDSETNLETAGDALDEHVNLLLSLGIERSHEPTSATNTFPGISMVDTPKVNTFKWIQVPPEPVKEVPKEPKLSCPICMNEITEAASTVCGHIFCQPCIKAAIKAQKKCPTCRRKLTPRQQHRVYLPSP

SEQ ID NO: 58530 - protein, 161 aa, Zea Mays
MAKTKQGNKDVDSYTIGGTNKVVYVGDCVLMRASDSDNQPYVARVEKMEGDGRGSVRVQVRWYYRPEESKGGRRQFHGAKELFLSDHFDLQSAHTIEGKCVVHSFKNYTRLDNVGPEDFFCRFEYKAATGSFTPDRVAVYCKCEMPYNPDDLMVQCDACKH

SEQ ID NO: 58531 - protein, 607 aa, Zea Mays
MRILGQGDADCSEYINDILAQVSTKTESNKNAGNAILYECVETIMSIEATSGLRVLAINILGRFLSNRDNNIRYVALNMLMKAIAVDTQAVQRHRATILECVKDADVSIRKRALELVYLLVNDTNVKPLTKELVDYLEVSDQDFKEDLTAKICSIVEKFSLDRLWYLDQMFRVLSLAGNHVKDDVWHALIVLVSNASELQGYSVRSLYKALQASSEQESLVRVAVWCIGEYGEMLVNNLSMLDMEEPITVTEYDAVDAVEAALQRYSADVTTRAMCLVSLLKLSSRFPPTSERIKEIVAQNKGNTVLELQQRSIEFSSIIQRHQSMKSSLLERMPVLDEANYLVKRAASIQAAVPSVNSAPAVTSGGPFKLPNGVGKPAAPLADLLDLSSDDAPVTTSAPTTAPNDFLQDLLGIGLTDSSPIGGAPSTSTDILMDLLSIGSSSVQNGPPTANFSLPGIETKSVAVTPQVVDLLDGLSSGTSLPDENATYPTITAFQSATLRITFSFKKQPGKPQETTISASFTNLATTTFTDFVFQAAVPKFIQLRLDPASSSTLPASGNGSVTQSLSVTNNQHGQKPLAMRIRMSYKVNGEDRLEQGQISNFPAGL

SEQ ID NO: 58532 - protein, 254 aa, Zea Mays
MACPCLRMVRFLCMEDDNEVTGESPVADEWDMLSLTSSIYASPLFRRGFDPINLPGYGNVINIQEGTQTGLVMSDGFVFPPSEHENLPIEPEHEDLPIEPGHDESNTNSVEKESSCAGNNDDDWCHVSPEEIDDVSNENLADNSDLPTASEATVPDSQPTEINAKREKDHRTCKADHTCERWWKKKTTYLFHHIKGVTTLCSVVAAGAVVGFVVMGQRWQQDHWHLHQFKFSVSGELIRDGHPRRIWGGVSLHL

SEQ ID NO: 58533 - protein, 533 aa, Zea Mays
MGFVCGVAAAYVVWALCEVVVGPENRTVVSKDNFLRVNLIGDFGGYTSIPAFEDFYLVTPRKSAGSGEPQNLGAEYRKWMLLERVRFTDGVECNKIGVGYEAFQNQPNFCASPFESCLNNQLWTFLESDKNRISMSRQPQYVVQGRFQRINQHPDASVHSFSIGVTEVINSNLRIELSADDIEYMYQRSPGNITDISVPAFEVLSQYGTAKVTTKNIGTLEASYTLTFHCSSGISFMEEQYYILKPNEESTRLFYLHASTDQAAKYQCTAILKASDSSELDRQECVFSTTATVLDNGTQIIGSNGYKLGFFDTIKGYLVSFWDFLIDLISGKSCRLNKCRSFFDFSCHAQYRCITWLVMLVLLLFMLPAGAIVLYLLHQKGFFDPVYDWWDDLLGADYRAHRRHKKGRRHHHHHHDHHHHRHHHHHGHSHGHDHHPHSHHHAHQRRKIEPSHHHVLHRQQPGTAAEGHRHKHDPALGVQHREAGHLGHKRRHGKAVVAEDALDLEFRERRPYEVRHAGHLHRDHHHHHHSWEV

SEQ ID NO: 58534 - protein, 221 aa, Zea Mays
MLASYGGGGRGVHLSSHKDILLGRGGRSFLLGNTWFLLSTYPARLLHTTDRRAPAAFLAVINRPPCMRPHRAGQGLLQRGGIVMAACGYALGRAELGAAKRQQPDKDPSAGTRSSNVAATGSLGSAARPDVSFRYRGADSCKKVAASLKSSEPWGNRAFWTNAAGPGWKLSFAVEPWTKGFSTSCAAPYSAGATEHQLSLDEKVDNSTVASDSDGHQFLKN

SEQ ID NO: 58535 - protein, 689 aa, Zea Mays
MPQVKSSYDGAGGDYIKWMCGAGGRPGGAMASLHRGVGSLVRDISDPCLNPSPVKGNRMLKPERWHACFDSDGKAICFRKALKFIVLGGVDPSIRAEVWEFLIGCYTLSTTAEYRGKLRAARREKYRYLIKQCQSMHTSIGTGELAYAVGSKLMDVRTLPKETEGGEVSTSQQAEHEVPCSLAENSNLIYGSGCTTRPHKRKICSKSAETVGFNQHNDNSRGSGDCDVIGEPRYDSDAFIDFPSLTGTNLVANGDGDSNGVEENPCNFLVSEHRVRPHDEHMHSFQINNNIDLIIESNTFSNDIFRPSSSDSAIFHSDAYKHDRWLDDTGYSEEIIDSLRISDAPESDLVDGMKSNGSIADKDRVSEWLWTLHRIVVDVVRTDSHLDFYGESRNMARMSDILAVYAWVDPSTGYCQGMSDLLSPFVVIYEDDADAFWCFEMLLRRMRENFQMEGPTGVMKQLQALWKIMELTDAELFEHFSAIGAESLHFAFRMLLVLFRRELSFEESLIMWEMMWAADFDEEAVRHLEENCLEPLLVDLSNGLSSEVKEVHRINSSTRRKPRTRKCHSRNGEICGACHPGMKSSTRNHLCGLSGATIWARPQQMPHPSASVLAKGGDYELPIFCVAAILIINRQKIIRGTHSIDDAIKMFNDNVLKINVKRCVRLAIKLRKKYLYKSLKGGSSDDKES

SEQ ID NO: 58536 - protein, 195 aa, Zea Mays
MAILGALRLAPSPPALAGAAPPATSPYTAVRSSVHFRLANAGAAALVAASLLAADPAVAFIGGGPYGKQVTRGQDLTGKDFSGQTLIKQDFKTSILRQANFKGANLLGASFFDADLTSADLSDADLRGADLSLANLTKANLSNANLEGALATGNTSFKDFTDVPLRDDQREYLCKIADGVNSTTGNPTKETLFCS

SEQ ID NO: 58537 - protein, 476 aa, Zea Mays
MQSGYGGVSEFQQFIMDGGFAMSAPPQQQQPPATAQEMGGPFRRPLDIDYLQSSSSSKRTGKEKVATPAAPANYFKKGDAAAAGGGNYKLFSELEAIYKPGSGGAQTGSGSCLTGDDNAILEPAVADLPAVGPQQLNTSETSAGEEAAAVVQPQQQPQASADAARRKRKRRRQEQLSASASFFERLVQRLMEHQESLHRGFLEAMERRERERAARDEAWRRQEADKFAREAGARAQDRASAAAREAAIIAYLEKISGESITLPAPPAAAASGDDATAAGKELVPYDGGDATAAEGGGGSLHLSSTSRWPKHEVEALIRVRTGLEGRFQELGLKGPLWEEVSARMAAAGYGRNAKRCKEKWENINKYFRKAKESGKKRPAHAKTCPYFDELDRLYSRSADGGGGEARQLGSSELLDAVIKYPDVRYGPPVFGGGNANNEGGEDDDSDGEEEEEEEEDGIGKGRAGDDQDDEVDNDDE

SEQ ID NO: 58538 - protein, 112 aa, Zea Mays
MGKGFASYLAMKTGPEGGDAAAAQQALIDADLRELGVAARKLANHAFVLGGGLGFGTSFLKWLAFLAAVYLLILDRTNWKTNMLTALLVPYIFFTLPNVLFSLIRTCMLVTC

SEQ ID NO: 58539 - protein, 537 aa, Zea Mays
MYIFRIDGNTLRLYTSHWAPERWQEYEPLLNYCRDNGIKLVACGTPLEVVRTVQAEGIRSLSKAQRKLYAPPAGSGFVSGFTSISGRSLIDKISSTRGSPFGPSSYLSAQARVVDDYTMSQTIMKEISNGDPSGMLVVVTGASHVMYGPRGIGVPARISKKMQKKNQVVILLDPERQSIRREGEIPVADFLWYSAAKPCSRNCFDRAEIARVMNAAGRRREALPQDLQKGIDLGVVSPEILQNFFDLEKYPVMAELIHRFQGFRERLLADPKFLNRLAIEEAISITTTLLAQYEKRKGRFFEEIDYVLTDTIRGSVVDFFTVWLPAPTISLLSFADDGSGESVELLKGILGSLPDNAFQKGIVGQNWNINQRFASVLMGGLKLAGVGFISSIGAGVASDVLYGARRILKPSANMEVGRKRSPIWKSAAVYSCFLGTSANLRYQVIAGLIEHRLGENLMAYYDQPLIANLLSFVSRTVNSYWGTQQWIDLARVTGVQRTNKELPSPEVSSASEMPLLECGTAEVQNADDSSNQSNDLT

SEQ ID NO: 58540 - protein, 349 aa, Zea Mays
MLLVVATWLLLMFTDGLNEKHLQELFWYVRFGLWWIILGVASSIGLGSGLHTFIMYLAPHVALFTIKAVQCGRVDLKSAPYDTILLERRPSWLEKDCLQFGPPIYHETIPFSKILQEVYLEAILWGIGTALGELPPYFLSRTASMSGRIIDELEDLDASISEGFLSSALRQAKRWLMSHSQYLSFTLILLLASVPNPLFDLAGILCGQFNIPFWKFFLATLIGKAIVKVCIQTTLVITLCNNQLLDLVEKRLIWAFSNVPGVASVLPSFVSKLKMDKNKFLSAHVAASASTSVKGKKWNLSFSLVWNTLVWLMVANFIIQIVTSTAQGYLRTQQEREISKKLETELSAS

SEQ ID NO: 58541 - protein, 809 aa, Zea Mays
MSAPKLDRNPSIRDRVEDTLHAHRNELVALLSKYVNKGKGILQPHHILDALDEVQGSGGRALAEGPFLDVLRSAQEAIVLPPFVAIAVRPRPGVWEYVRVNVHELSVEQLTVSEYLRFKEELVDGQHNDPYVLELDFEPFNVSVPRPNRSSSIGNGVQFLNRHLSSIMFRNRDCLEPLLDFLRGHRHKGHVMMLNDRIQSLGRLQSVLTKAEEHLSKLPADTPYSQFAYKFQEWGLEKGWGDTAGHVLEMIHLLLDIIQAPDPSTLEKFLGRIPMIFNVVVVSPHGYFGQANVLGLPDTGGQIVYILDQVRALENEMVLRLKKQGLDVSPKILIVTRLIPDAKGTSCNQRLERISGTQHTYILRVPFRNENGILKKWISRFDVWPYLETFAEDAAGEIAAELQGTPDFIIGNYSDGNLVASLLSYKMGITQCNIAHALEKTKYPDSDIFWKNFDEKYHFSCQFTADIIAMNNADFIITSTYQEIAGSKNTVGQYESHTAFTLPGLYRVVHGIDVFDPKFNIVSPGADMSIYFPHTEKAKRLTSLHGSIENLIYDPEQNDEHIGHLDDRSKPILFSMARLDRVKNITGLVEAFAKCAKLRELVNLVVVAGYNDVNKSKDREEIAEIEKMHELIKTHNLFGQFRWISAQTNRARNGELYRYIADTHGAFVQPAFYEAFGLTVVEAMTCGLPTFATLHGGPAEIIEHGVSGFHIDPYHPEQAANLMADFFERCKQDPDHWVKISGAGLQRIYEKYTWKIYSERLMTLAGVYGFWKYVSKLERLETRRYLEMFYILKFRELAKTVPLAIDQPQ

SEQ ID NO: 58542 - protein, 353 aa, Zea Mays
MSTHAASRRSSSSSAVAKRPAIAEGATKAAGPGPTAAQAKKRTALVNITNVAAPGARVAAVGKVAPPVTGAKLNPATSGAPLKKPSLANARTIRGSAAKSASIKPAPPVSRHDSSSEQKHNVLVPTTVHVPSRAPALVPYSSFVSPGRSRDSVSTDETMSTCDSMKSPDFEYIDNGGCSMLASLQRRADEHLRTSEDRDVEENKWKKNGPAPMEIDSICEVDSNLEDPQLCAALASDIYMHLREAEMKKRPSTDFMKTIQKDVNPSMRAILIDWLVEVAEEYRLAPDTLYLTVNYIDRYLSGNEINRQRLQLLGVACMLIAAKYEEICAPQVEEFCYITDNTYFRDEKWKLLC

SEQ ID NO: 58543 - protein, 566 aa, Zea Mays
MTSAWLVRAYVPMLLRSRISSASMEKTRRHRVLAVLLLLVVVLVSALPDLGSCHKDDAGQGGTTNPEEDMVSVSEARTTHHGDRTRKFLHEQQQQNRYWSGDFGDKVSSLTDSSQYPPDSGGSSSQSPASTFKPDQWQPWLPWAPKAPPPMSVPPAQAPAPFPAGVVSNPGHSIALPPQPAVVVPADAGSRPAVGAGVPAGGAGARPRSGGVGRPVYAMAAAGASLAAAAAVALLVLCYRSSSVVTVRPWATGLSGQLQKAFVTGVPSLKRSELEAACEDFSNVIGSLSDYMVYKGTLSTGVEIAVVSTTKNSAKEWSKHCESQFRKKITSLSRVNHKNFVNLLGYCQEEQPFTRMMVFEYAPNGTLFEHLHVREDGYLDWPTRLRVAVGVAYCLEHMHQLSPPEILRALDTSTICLTDDFAAKISDVFFCDEPRRQEGSLSLSALSDRESVVYSYGMVLLETMTGRFTASDGGLLEAWAAAYLRGERQLRDVMDPALRRSFHAATVDRLDGVIRGCTDREPRRRLTIAEVAKRLREITAMSPDAATPKVSPLWWAELEIICAEVN

SEQ ID NO: 58544 - protein, 145 aa, Zea Mays
MDNAFVFMIKNGGIDTEADYPFTGHDGTCDLKLKNTRVVSIDSFERVPINYERALQKAVAHQPVSASIEASRRAFQLYSSRGRQGLLDREELVGHPVGRGRVRPDGAQRQGEGRQVRHRHGAAVPGEGGPEPAAGPDAAVAREAA

SEQ ID NO: 58545 - protein, 486 aa, Zea Mays
MNPYFVGILVPVAVSLLLRKRRKAQRMRGVPVEVGGEPGYAVRNYRFEQPVETHWEGVSTLADLFEQSCKEYVYMPLLGTRKLISRETEAAPGGRSFEKLHLGEYEWKCYAECFKSVCNFSSGLIRVGHQKNERVAIFAETRAEWQIGLQACFRQNITVVTIYASLGEEALCHSLNETEVTTVVCGQKELKKLIDISGQLDTVKRVVYINEEGISTEVSLAQNCTSWIVESFEEVTRLGAEAPVEANMPLPSDVAVIMYTSGSTGLPKGVMMTHRNVLATLSAVMTIVPALGSKDIYLAYLPLAHILELAAEALMAAVGASIGYGSPLTLIDTSNKIKKGTLGDASALKPTLMTAVPAILDRIRDGVRKKVDTKGGIAKQLFDIAYNRRLAAINGSWLGAWGLEKLLWDTLVFGKVRAILGGKIRFVLSGGAPLSGDTQRFINICLGAPIGQGYGLTETCAGGTFSEYDDTSVGRVGAPLPCSYIK

SEQ ID NO: 58546 - protein, 368 aa, Zea Mays
MGFSSSGDVLNCNTYEVATACALALEADKLICVVDGQVFDDHGRAIQYMSIEEADLLIRKRARQSDIAASYVKVVDEEGINSLHKGDDRPSLSPKAYINGYAASFRNGLGFNNGNGIYSGEQGFAIGGEERLSRSNADPFKNGLGFNNGNGIYSGEQGFAIGGEERLSRSNGYLSELVAAAYVCHGGVQRVHIIDGCVDGSLLLELFTRDGAGTMIARDVYEGTRMATAEDLPGIRKIIRPLEDSGVLVRRTDAQLLEALESFYVVERDGSIIACAALFPFPEEQSGEVAAIAVSEECRGRGQGDKLLDYVEKMALSLGLKKLFLLTTRTADWFVRRGFSECSIGSIPEQRRKRINLSRGSKYYIKQL

SEQ ID NO: 58547 - protein, 381 aa, Zea Mays
MGFLSALSPNYLCLVALRFLVGVGVGGSHVFISWFLEFVPAQNRGTWMVIFSLFWTLGTILEASLAWVVLPALNWRWLLVFTALPCFLLLPFFGLTPESPRYLCAQNRMSDATSVLERMANANQSALPPGVLTYNRQTKCDHDVLAPESECLLPVREKECTVDNAKSSESGSLAALRMLLSRELLRSTLLLWFVFYANSFAYYGLVLLTSQLSDANKSCASGVSFGLRQKEINLYKDTFITSLAEIPGLFLSAVLVDWFGRKASMWSMMFACCAFLGPLVLQQTELLTTILLFGARACAMGSFTVLCLYAPEVYPTFVRSTGAGIATAIGRIGGVVCPLVAVAMLRSCHQMEALIVFEVILCLAAVACMFFPVETKGRGMD

SEQ ID NO: 58548 - protein, 105 aa, Zea Mays
MSSRAARPWRASATRERGGRRKHRMDCAPFAAICERRRKIRVWRREERRGGARDPGSRAQGRDVMAAPPIRCGLATPTSMTISRAGAEVPEDKRRREEQSTSVDD

SEQ ID NO: 58549 - protein, 216 aa, Zea Mays
MRCWDAPEKADVLVSELLGSFGDNELSPECLDGAQRFLKPDGISIPSSYTSFIQPITASKLHNDIKAHKDIAHFETAYVVKLHRIATLAPPQQVFTFTHPNFSPNASNQRYTKLQFEMLPDMGSCLVHGFAGYFDSVLYKDVHLGIEPNTATPNMFSWFPIFFPLRKPIYVPEGSPIEVHFWRCCAPTKVWYEWAVTTPTLSPIHNSNGRSYWVGL

SEQ ID NO: 58550 - protein, 1379 aa, Zea Mays
MSLTAAPVAFIGLDELSVELAASFLRSGACVRSFTPEAERSPSAALAELNGLLQCASPVEAARDAALVVVLSDAGGVDELFFGVEGIAKGLCAGSIVLIHSTLLPSQLEKLEQELTDQKKDVFLLDGYIFTGLSDELKQQIIIVASGRQDIAEKASKFFHGLYKTIYFAEGEFCTSRKIRMVNDLLEGIHFVASIEAMYLGVRAGIHPTIIYDIISNAAGSSRIFVELVPKLLSEDPLLIDFLKSTRKKASHVMDMSKSVTFPLPLLGVAYQQLVHGSSAVTGDGSASPLKVWEASFGVNIVDAAGEQIYDASKLADQLVAESKAAKRIGFIGLGAMGFGMASHLLKSGFCVVAYDVYKPTMARFADLGGSTKGSPEEIAKDVEILIIMVANESQADSVLFGNAGAVPVLSAGTSVILSSTVSPGFVIHLNRRLEAECRQIKLVDAPVSGGVKRAADGTLTIMTSGTDEALHCTGSVLSALSEKLYVIKGGCGAASSVKMVNQLLAGVHIASAAEAMSFAARLNLRTRRVFEIMQHARGYSWMFGNRVPHMLDNDYTPYSAVDIFVKDLGIVSCESSNSRIPVHVSSIAHQLFISGSASGWGRYDDAAVVKVYETLTGVKVEGKAPMLSKEDVLQSLPSEWPEDPIDNLVPIASHSSKKFLVVLDDDPTGTQTVHDIEVLTEWPVEALVEQFLKLPTCFFILTNSRSMTADKAMLLVQTICKNLKAAAEKVPGVSYTIVLRGDSTLRGHFPEEADAAVSVLGEMDAWIICPFFLQGGRYTINDIHYVADSDRLIPAGETEFAKDAVFGYKSSNLRQWVEEKTKGRVLENQVSTISITLLRKQGPTAVCEHLCSLEKGSVCIVNAASDRDMAVFASGMIQAELKGKRFLCRTAASFVSARIGIKPKPPICPNDLGLKRALTGGLIIVGSYVPKTTKQVDELRSQFGQSLRVIEVSVEMVSMKSMEDRDQEIRRIVELGNAYIQSRKDTLILTSRQLITGKTPEESLEINYKVSSALVEIVRRIDSKPHYIIAKGGITSSDIATKALEAKRAKVMGQALAGVPLWQLGPESRFPGVPYIVFPGNVGDNSALAKVVKSWASPSRSSTKEILLNAEKGGYAVGAFNVYNLEGIEAVVAAAEAEKSPAILQIHPSALKQGGVPLVACCIAAAEQSSVPISVHYDHGISKSDLLQALEAGFDSVMVDGSHLTLGDNILYTKSISSLAHAKGLLVEAELGRLSGSEDGMTVEEYEARFTDVAQAEEFIDETSIDALAVCIGNVHGKYPPSGPNLKFDLLKDLRALTLKKGVSLVLHGASGLSHELVKECIDLGVRKFNVNTEVRNSYLASLRKPEKDLIQVMASAKEAMKAVVAEKLRLFGSCGKA

SEQ ID NO: 58551 - protein, 607 aa, Zea Mays
MAVATTARWLLLLAVVSAAAASGKHERWRVGGQVVEKERRRVVAESEAGSVSAVDVADAAGTAYRLHFITMDPGALFLPVQLHADMVFYVHSGRGKVTSIEEESSEQSSLEVERGDVYNFEQGSILYIQSYPNASRQRLRIYAIFTSEGINADDPSKPKVEAYSSVSNLVKGFETDVLRLGFGVKPEVVEAIKSAKTPPPIIAYNPEEEKGDKKPGWTENIIDALLGVRDPEEFLNKKKKKKDKHKDKKSKSKAFNFYSGKPDVQNCYGWSRMMTSKDLDALHGSSIGMFMVNLTTGSMMGPHWNPKATEIAIVTEGSGIVQTVCPSSSSSSSSPSGGSSGDHHHGHKRRGGPGGRGDEGEGEGGRARWQCRNSVFRVKEGDVFVVPRFHPMAQMSFNDDSFVFVGFSTHMGQNHPQFLAGKGSVLQAIGKKVLALALGQRDPTAVDKLLSAQRESTILPCVSCAEELAEKAEEERKEREEKEKEEEREREREEKERKEREREEKERKEREREEEERREEEEERARKEQEKQRRREKEEEERARRREEEEREREEEEERRREEEEGGGGRGDEPEREEEGGDKPPYRLSKKLKKRYHARAGVFSRSG

SEQ ID NO: 58552 - protein, 431 aa, Zea Mays
MGSFLWKQPSYLFILIILHLVAHEARTLSSDGEALLAFKKAVTNSDGVFLNWREQDADPCNWKGVRCDSHSKRVIDLILAYHRLVGPIPPEIGKLNQLQTLSLQGNSLYGSLPPELGNCTKLQQLYLQGNYLSGYIPSEFGDLVELEALDLSSNTLSGSVPHSLDKLSKLTLFNVSMNFLTGAIPSSGSLVNFNETSFVGNLGLCGKQINLVCKDALQSSSNGLQSPSPDDMINKRNGKNSTRLVISAVATVGALLLVALMCFWGCFLYKNFGKKDMRGFRVELCGGSSVVMFHGDLPYSSKDILKKLETIDEENIIGAGGFGTVYKLAMDDGNVFALKRIVKTNEGLDRFFDRELEILGSVKHRYLVNLRGYCNSPSSKLLIYDYLQGGSLDEVLHEKSEQLDWDARINIILGAAKVSRPVYQTLDLQSF

SEQ ID NO: 58553 - protein, 455 aa, Zea Mays
MGRNLPAEQVEAPRSSKMDKKRKKDKKRKLAAEAEEEAAVTATVETVKSSKKKRVENEPGAGAVEAENGAEKTVAVTGKGSEDPKYAPLRSFSAAELPSQVLECCSAFARPSPIQAHAWPFLLDGRDFIGIAATGSGKTIAFGVPALMHIRKKVGGKAGKKAVPRCLVLSPTRELAQQIADVLSEAGAPCGIKSVCLYGGTKKEPQISALKSGVDIVIGTPGRMKDLIEMGVCCLNEVSFVVLDEADRMLDLGFEPEVRAILSQTSSVRQMVMFSATWPLAVHKLAQEFMDPNPIKVVIGSEDLAANHDVMQIVEVLDDRTRDSRLLALLDKYHQAQSNRVLVFVLYKKEAARVETMLQRRGWKAVSVHGDKAQHDRTKALSLFKEGKCPLMIATDVASRGLDIPDVEVVINYSYPLTTEDYVHRIGRTGRAGKKGVAHTFFTQANKALLIFHPC

SEQ ID NO: 58554 - protein, 196 aa, Zea Mays
MNFSLFSRPAALVRASLQRPPPPQTGTDKVSNVTTSTRVESTVLQSASGPRIAPVFTDQRTAWSQSKEVRFSCAPALAAGNLHQDMPLGRPGNNMTPQGKMETKKACEVAVATPSLCSGNGESWREQKRKSQAECSASQDDDLDDESGGMRGSGGRGTKRSRTAEVHNLSERRRRDRINEKMRALQELIPNCNKLH

SEQ ID NO: 58555 - protein, 2188 aa, Zea Mays
MKERSSLCESAADGNWGLKYKRKRSKLTVSPSNENEATSPTSDSPMSHGSTKKKLKHDTNISPSAKKIRGHDGYFFECVECDLGGNLLCCDSCPRVYHLECLNPPLKRLPPGKWQCPRCRPKKGSLKMLGNAEVGTSKHEKSTRTYAGTTSGSPPSHTKVSFKTRNSTQDKTGSKEQGKQSSGGTMMGGDPNNEVEKKNTLILHLKKHSMKELSENAKPLKSKFVGEPSEEKIVKHGSVLKLKKHSDRMDLSPNKSKSRGQNSQRESKRPGTKKLKYSMSDDDSVSSSEPSTSLDNNEPPPKRKPSDGKAPSSSTKKGKKKVKFIEKRHSECVVGDKTTTSQEDQQVDRILGCRLQTNKINPLSHASFKQFESANLQVEDMALPLASAGIPNKSHDGTESSRNGTVEDICADESANHSGHSLEMQKDRNSKSHENESCKREQGNNILSICFVDETSIMKDDQVGRENVAASKKGEDATYDLPAEKDDTKLPVTRADAMTRTNQEHTDESKQHGKIKQITDKDYNDAGYEFLIKWVGKSNIHNTWVSESEVKILAKRKLENYKTKYGTSLINICKEQWCQPQRVIALRASVDEVEEALIKWCGLSYDECTWERLDEPTLMKYSHLVTQFKNFECQALDKDVVKDYANTRNRHELNVLADQPKELKGGMLFPHQLEALNWLRKCWHKSKNVILADEMGLGKTVSACAFLSSLCCEFKINLPCLVLVPLSTMPNWMAEFASWAPHLNVVEYHGSARSRSIIRQYEWHAGDSSQIGKTKRSYKLNVLLTTYEMVLVDAAYLRSVSWEVLVVDEGHRLKNSSSKLFSLLNSLSFQHRVLLTGTPLQNNIGEMYNLLNFLQPTSFPSLSSFEEKFNDLTTAEKVEELKKLVAPHMLRRLKKDAMQNIPPKTERMVPVELTSIQAEYYRAMLTKNYQVLRNIGKGGAHQSLLNIVMQLRKVCNHPYLIHGTEPESGSPEFLHEMRIKASAKLTLLHSMLKILHKEGHRVLIFSQMTKLLDILEDYLTLEFGPKTFERVDGSVSVAERQAAIARFNQDKTRFVFLLSTRSCGLGINLATADTVIIYDSDFNPHADIQAMNRAHRIGQSNRLLVYRLVVRASVEERILQLAKKKLMLDQLFVNKSESQKEVEDIIRWGTEELFGSSDSVDGKDSNEASGSVADVEFKHRRKTGGLGDVYEDKCIGGSTKLVWDENAILKLLDRSNLPSSVAESTDGDLDNDMLGTVKSIDWNDELNDHPGTNEDIAPIDNDGSELASESKQGATNRLEENEWDKLLRVRWEQYQIEEEASLGRGKRLRKAVSYRETFATLPNEALSEGSDEGDEPKREYTAAGLVLKEKYGKLRARQKERIAQRHIIKNYAVDNLEEFMTPYISIANEPAENPLIIVEDPSSSQLCGAKCFSESTGEMRQSSKKSRRYSEIPQDLYARIPDNAASSKDNSKATDVFNPGTPNHLLPVLGLCAPNADQVNSYKNSICAPSIKEHKRASGDVVNKQLSTPADHSNELRNEVQSASDKVIFPGASEEALRRISNMIPDNYFPFSHIPPISGKAVDPVEYIGASNASFQGKLGLPNFSLEDNTPLKHIKPIPDIFPYLSLGAHKDYIRSSVPELPDSSLLPNFMADIAGTSKQKSFMSGPLPGLGLSPGQPIHLTMPDNHKKVLDNIMMRAQYASNKFLKKRSKLDYWSEDELDALWIGVRRHGRGNWDAMLRDPKLKFLNNRTSEELASRWILEEQKIIDEPMSAATRRSNSTAFPGISDAMMSRALNESNLSKMRMEQPKLQSHVTDIQLGSSDILSRFPHVEAPNYINSGEGGPPQIPWQDFKHRSSYGGDFPGGAFDKLEKPDVGLIPPFMPNPFMTDSIDSLPINRKNNSSIPRSEIRSSSRENILFSGVSDGQINLLHEMQRHVRSGKQPIEIKLNHIDHSNPQLGNASDLGGLKSNKLPHWLQEAVRAPASSKPPERGLPATVSAIAQSMCLLLGEQEPSIPPFLILGTPLSPPKDPRINSKKRKLRKAHQSTSHVGDCIATQAPPSVKASAAPLAVDCNDGAPSLNLNSALLSSSAVSKKLDELPPTFKESNQTMDGSEAVAGKLEAPEIGCQVTGSSPVDDKARESSGSPVKDTPDAGVRLQGSDNSAMAFSALPLEAPVTSSRAEPVACDGSDMKEDIPLDAESNGNLEER

SEQ ID NO: 58556 - protein, 193 aa, Zea Mays
MEISSSVDCGQEKEQPTNKRPRSESTTESSTKASREKIRRDKLNERFLELGAILEPGKTPKMDKTAILSDAIRVVGELRSEAKKLKDSNENLQEKIKELKAEKNELRDEKQRLKAEKESLEQQIKFLNARPSLVPHHPVIPASAFPAPQGPAAAARHKLMMPVIGYPGFPMWQFMPPSDVDTSDDPRSCPPVA

SEQ ID NO: 58557 - protein, 108 aa, Zea Mays
MKGVVPEGEELMPHRSSQTIANTGGNNPTQSEAPLATPSTTIRKLCRNRGLILQDELIATGAYGVMEQEMLAMGTNDAMEDEMVAAMGVTEAMGEKRKYKRKRLFQDV

SEQ ID NO: 58558 - protein, 831 aa, Zea Mays
MSSEPLPAESPEAPASASGSPSKDAVGTEARAVRNLWVGGISPSISKEELEGEFLKFGKVEGVAFSQDQTSAYIDFEKLEDAISAHRSLNGKMLGGKELCVDFQRSKGRAEWSEASSFNGRVPGPVGDKRGSGPLKSSAGVRMREAQPTNVLWVGFPGSYRVIDEEALKHAMSVFGVVTKIKVFQTRQYAFVEFANVAEACNAKMNLDGHLFNDPRIQILFSNSGLAPNKLDNPTSVAGFPSSEIYSSDGRLGPGIGSGTLQGYDPPRGGRTRYYDYAGMPTPGGILSQPEPFDPREAKRMRLAAGADPYDVRAGSTGLYSAGYRHQGSSVHAEGSSSPVIRVRGTVHRTSYIEHCWRGSIAKGGSPVCRARCLPITKGSDIPLPDVMNCSARTGLDMLAKHYADATGFDIVFFLPDSEDDFVSYTEFLRYLGSKSRAGVVKVDAGTTLFLVPPSDFLTNVLQVDGPERLYGVVLHIPQISAAAALRPQLTGTEQQPYYDERGTLPTSQRKYSIISPNDSGHLDADYRTSLHEDSMHRLGHIPGRPRVDEGQAVQPALAGFPANQAAGLQVQSSLKPDIMATLAKLLPSVQSSPLVSGQMNAIDRTSQIQDPSMLSKVWNPENQVTASNSSFGQMANVQHPGQQFSGQASAAHLTNYGNMVSAQERSIQHTAYNPEVTLNLPPPPPLPTIPHSSATLQSQGGHSLPSQTNQQLYQPEQYYVPQNNYGPLVPVSHSNLQISNTNNPTLTIPQVNPGPPTNNQIGNLAQPQHSMPLHVDRASQDFSSQGQQQNRGPGAAQAPEEDKSKKYQATLQLAQNLLLQLQQRGSGNQS

SEQ ID NO: 58559 - protein, 362 aa, Zea Mays
MFVQISPNENDVGETLCSLNFASRVRGIELGQAKKQVDIGELSRYKLMVGRAKQDSKNKDAQIKSMEERIQILEAKNKTKDLLTMNLQEKIKELESQLLVERKIARQHVDNKIAQDHLQKQHGMKEENSYSRSPMAERNLNSTAEKAAAPKDLGGISKQMFSDSNTDTYSFKQLMSLGDEKENDPEAAVQLPPTTKARRVSLCNGGAHQRPLNPASRRTSLIPLPRRNSLLPMPVAKPAAAAAAVLPLDKITENLSSPPLCSPPAVSNDKGSRSRRINSILRRSLQKKVVIRPSLAAQAGKKAAGAAAARGTDSARRAARRVPVSDGAGGQRYSRTGTRSGGGATSDQNIAAPLLLKKPVEI

SEQ ID NO: 58560 - protein, 129 aa, Zea Mays
MNTYTRIEPFTFHQHIGEAVFIPAGCPFQLKNLQSTVQLALNFLSPESLPESVRLSQEIRCLPNGHLAKLKMLEVKKISLYAASSAVREIQRITLDPKFNLDPSFEDQNLTRAVSENLARVNKRKVSCS

SEQ ID NO: 58561 - protein, 151 aa, Zea Mays
MAYNGQYGFGSYGMGLEDKLGLYPSSSGTLSQDIQMSEEHSGVVKKRKGVEDCVTLLHDAGDQQTKGSPQPERNSVEEGNRKISPKMQSKEDSSDGDGTKEDYVHIRAKRGQATNSHSLAERLRRKKISERMKLLQDLVPGCNHWQGSHAR

SEQ ID NO: 58562 - protein, 272 aa, Zea Mays
MAVARLCAAAAAARLQPALAAGARGLGTAAEVAAGARWEPMGAREYYDYRRAMYGDITHKAILVDAAGTLLAPTEPMAQVYRTIGQKYGVDYSEDEILMRYRWAYAQPWGRSRLRYVNDGRPFWQYIVSSSTGCSNLEYFEELYQYYTTEKAWHLCDPDAGRVFEALRKAGVKTAVVSNFDTRLRPLLQALKCDRWFDAVAVSAEVAAEKPNPTIFLKACELLGVKPEEVVHIGDDRRNDLWGARDAGCDAWLWGSDVYSFKEVAERIGVEV

SEQ ID NO: 58563 - protein, 275 aa, Zea Mays
MGPLCLWPAPHTHSSPPSPLAADTPVSSRPRTRHPAAVPVLHPAPCPTTTRPSLPTGHGVSRRSGSQGKFPGLSVRHCSLSASTSFSAAACQCGVHCPASHPGPGARVLCLCLCSTSPAPAPQVHVHHLALTLLARSLVHAPASRRNRGREADGHDARQVGVGRDEPGGVVAASVAEAGRRRRRQRRLLRAEPVAGVARRRLQVLVDAAHAGLQQPQRVAVAPLLRPPLPLLLRQPLLRQPPQGRRRGPQGAQRQGVARVQRHRGGGPVRGPRRR

SEQ ID NO: 58564 - protein, 1148 aa, Zea Mays
MATLAPPAVEVEPEADAMALASEAAAPELPSSHSQLDFFKTRVQLLCESNTRDFDAWVSLINAAEGTSADDIEVMSLVYHNFLLEFPLCYGYWIKYAAHKARLCTTRYVMDVYEQAVHAVPHSVDIWVNYCEFGICAFEEPAHVRSLFERALSLVGKDYLCYHLWDKYIEFESSQKQLIHLATIFINTLKFPTKKLHMYYESFRKFVTLLEQEVTSCVAEILSEKVHASEMVGTEGSELDISTIIADLFDQKGGHLSPEALKHYLSAGEKLYKMSSKIYKEICYFEASIKRPFFNVKTLDDDQLENWHQYLDFVEKNGDFDWAVKLYERCLIPCANYSEFWIRYSEYVDAKGGREIANHALGRASSCFAKEVPAFCMYYALFKEQIGDALVARSVFTKTRSYFTSGFYANINRLANMEKRMGNTKAASEIYETAIEDAMQKNNIELLPDLYSNFAQFIYVASHSIIQAKQVFVDGINRAPCKPLIKGFIQFMSTHGGPKDIPLLDSVISNAVTPGSDVSTALSREDREDISLLFLEFVDLYGGIKELRKAWARHSILFPHSTGNISRHYSTMGNSLQETKKRRNTEPLMIARDHSLEDTMKLKQTLKTDDFSLIVDKESEPQVDKDIVDSGKRHGDAGAQKALDLVNSHKETITTAQECTDMVYSEHILDKNRIEKQMNSHAKEDINQDLILHEQNDEKTNSHEAETPVAESGDCDSPSKAIASSENINFQGKVIEVSASSHLETVCSKYDSPSGPNMHKEGSSSGPARISPELEERHHVEVQVKVDTEHHFSVSNANLEISFDGPNPTECDKEISAIGHGSQDYIQSSQSHQLSACAKPWSLDSAKTKSDTVSIQAQLRNQLENAQTYQSNNLSQNMQQQELTMPHNVQTSAQIQDQLLAQPNHRNQQYLQMMQGYATQMGEYYQQQLYYLQAQHNQQMQSLQQQQLPTEHLQQTFMQQVQQLNQQLVLWQQQVQQQPQVVLQQALPVQQLPDEKQGQCPSGDSKHGQNKQQQQAPQMDQQSQQLQQQQLLYLQQQQQMYLIQQQQMYQQQQAQQQQLLQQQLMQQQQYVLQMPQHQQDSVRQQQQQLFEQQQQQMMLLQRQQQHIMQQQIQPYVQQQQNQQGPKDQTYKSNHQEGDLVFIALGTID

SEQ ID NO: 58565 - protein, 286 aa, Zea Mays
MDKTVKLWDITTSTCLKTFSHTDYVTCIQFNPVDDNFFISGSLDEKVRIWNVRDRKIEDWNDLHEMVTAACYSPDGQVAMVGSHKGSCHIFDTSEKKLQYKSQIDLRIRKKKSGQKKITGFQFAPGSSSEVLITSADSRIRVVNGDEFVHKFKGFRNTSSQISSSVAHNGKYVICASEDSHVYVWRHDNSSHPSKSRSTVDVTNSYEHFHCHGVTVAVTWPGAEARCSFGPESNKHSDSYVAMNSGPDLPVENTRHSSDASDIICNESPACQGVTSRTPADTRRRS

SEQ ID NO: 58566 - protein, 307 aa, Zea Mays
MGEVFGQWGRIALQASVIINNVGVLIVYMIIIGDVLSGTTSGDVHHRGILEGWFGAHLWNSRAIVLLATALLVFAPLVSFKRLDSLRYTSALSVALAVVFVVITAGIAIIKLFNGTVAMPKLFPELDGLNSIWNLFTAVPVLVTAYICHYNVHSIDNELEDRTQIKPIVRTSLFLCSSVYIATSFFAYLLFGEGTLDDVLANFDANLGIPFSSVFDDIVRVSYAAHVMLVFPIVFFALRLNLDGLLFPTSRHISRDNKRFAIITVSLLAVIYLAAILIPSIWDAFQFTGATAAVLIGFIFPAMVILR

SEQ ID NO: 58567 - protein, 885 aa, Zea Mays
MLTLQYLNLQFNRLSHSYVIPSWICCDMRGNVENTMKGCKLKYTGVATMNSLAEPSTSSHACDSALLCVQSESSPNLKHHAPHKIKKGWRRRDCLQQRARQERLESSRSKLNEKYIDEMAVNMAEDECPSSLHDMENKLGIRTIDEETSVQDSLKETSSISEDLFSIVDDDLDGLTKDCGTMVQDHYDEEKPGFNMRGYNDDNSCISGEPACFSRSRVCSVEKELDDTASSVHDVGEIARDNSSVTPKFALKSKRHPDMDSNPKPSKCPRPIDERSKLSYKYSVESFCSIDDHLPDGFYDAGRDMPFMSLEEYERSLGLYAREVILLDREQDEELDTIASSAQLLLSSLTRPSSCEMEEDAGHDLLRASVLALFVSDCFGGCDRSASLGRTRRAIVSLRKEQPFVCTCSAGNLGDNNEAKQTNILSGHFDFAGLCNRSIHLIKERRNSGIVPIGSLQLGVCRHRAVLMKYLCDRADPPIPCELVRGHLDYTPHAWNIVPVKKRNGWVRMIVDACYPTNIKEETDPEYFCRYIPLSRLQIVLDDEGYTPRCSFPSVSSCKEIEVTPSSSVYHCKIGAVDAAAKIRYLDTRRVSNDEVKLFEYKLLGEVRMLGALRKHRSIVDIYGHQLSSKWVQVDGDKEYRILQSIILMEYVNGGSLKGYLTKLLKEGKKCVPIDLSVYIAREVACALLEMHKKLVIHRDIKSENVLIDLDPKRNAGAPIVKLSDFDRSVPLYSLSHTCCISQLGTHPPDVCVGTPCWMAPEVVKAMHEKHHYGLEIDIWSFGCFLLEMLTLQMPYQGLSDTEIYDLILRKKQRPRLTQELEAFWTMDEPATRLKLGITSDAHADKLRHLIDLFYQCTRGHASRRPKAVQIYNSLCSLPTCYDMR

SEQ ID NO: 58568 - protein, 87 aa, Zea Mays
MPGPTGSQLQILEYPLQSGGGAGLGYGTRLSGYTAPDHSRKTSAHSLETGPTSCWTPCSSKGVLNCKLGLLNSNVIIPARVGTVWVG

SEQ ID NO: 58569 - protein, 65 aa, Zea Mays
MASDGDASPPRKRMLLELPCDEEGANVSQNVGVSASSATPAAARDSQEQGEIYDELVILCTCVLC

SEQ ID NO: 58570 - protein, 374 aa, Zea Mays
MDLVAEGHMQEARSFFHTFREDHEVMHSRDLQKLEGVLSPSHLEEMELARSFRKNKFKIKLCEYSYELLLQYLQKTQALVVLGVINEHITFEVSPGQPSLISDDADVVALIGTSKDLAKQINQKEVHWGLLEDSVEERMEKALAESDKIEAESKDADAEDNKKRNAEGGKQGASLKKAKKDKLVGATGKSVRTETSMVSVAPRVKPELTLPATPVEVEQSILEDLRNRAQLNSVALPSVSFYTFLNTHNGLNCSSISHDGSLVVGGFSDSSVKVWDMSKMGQPAKISRSQGENGPSQGERISTLDEGKRTYTLFQGHSGPVYSAAFSPFGDFLLSSSSDSTIRLWSTKLNANLVCYKGHNYPVWDVQSSWPLLC

SEQ ID NO: 58571 - protein, 794 aa, Zea Mays
MSPVQDGLLITKPPGMRFPSRRNVPMSVDPVGHLHNGSSFDAVSVSGSDASSGRYTPKISATMHNSYLQDSSNALSPFANNGTVRNPLTSSGDWSGSSAPDASTDGSTSNSGEAGLRGEDDDVEKLRSEIATLTRKLDVSDMELQTLRKQIVKESRRGQDLSKEMSSLREERDALRREYEGLRGAKKMIHDSNGSGKRLSDGYDPWSQVEELKQDLNHEKNLNADLRLQLQKMQESNSELLLAVKDLDEMLEQKNRDISILQEDTQEDPQEAEYEHALSNVHNSGRKIALSETSSYQEKEDELMLDALAKKRDDISTSELEKKILELSNEIELYKKDREDIEMQMEQLALDYEILKQENHDISSRLEQTQLREQLRMQYECSAHLAIISDLEANVESLDNELQTQAKKFEADIAEIMSAKVEQEQRAIKAEDSLRKIRWNNATTAERLQEEFKVLSSQVSSAFSANEQQLVQARKEVAELQLQKSQLEELLQKAQGDLGSVQDQHRVKVQQLITLVDFKSKEIDRLLMELKSKSDEFHNQKRCDEAKLNALSEEIDLLNSKIDKLSSERNELFEKNEQKEKELAGISEKDMQLQDKTAEITSLNKELVFLKDQVKMHLDELHSLKRLKNEREETIGKLQIDIGSLKLQCDNLKTSLSKKESEKDSLASQVLKLRRSLETRDRAKANGQISDVKDNQHANNKRTKHNTGSTGSIAALPGTNRQGEDGDCNGPDMRNTTDQSAKELASMKERNRAIEEELKELHERYSEISLRFAEVEGERQQLVMTVRSLKNSLR

SEQ ID NO: 58572 - protein, 90 aa, Zea Mays
MHAIARHGPGCKWVRLLRNRVSAQQARERKKAYLTDLEVKVRDLEKKNSEMEERLSTLQNENQMLRQILKNTAVNRRGSGSTASGEGHGQ

SEQ ID NO: 58573 - protein, 56 aa, Zea Mays
MTEAAESTWAATASLDSPAITAGSNVSSSTVGFSVQFVLWAKSNSKRSYKLLKNRY

SEQ ID NO: 58574 - protein, 148 aa, Zea Mays
MPTSLSPYPASSLPGPALAPSWSRHPCFPCFRCNPSPAGSSTVKPPCIVRDPRLPPLMHSPKPPIMPSPPKYLPPADPPVPSHVVPPRPLPNPNHFPKAVSRPNSQMMPIPSPSRPVSQHWKAPRKKENSRTSNFSPIAPSPYALLHT

SEQ ID NO: 58575 - protein, 471 aa, Zea Mays
MGNMTRSNSPVSRRIVLSFLDFLNSVELAPGVDPEALEVAKDCLESIFSVNSTATGDAIQPGLLFELFASLEANERDQARAALLSQSVSNKPSQTAGTSNVEEDSNKCTTSNSDSQVEDTFELGDELFAKFYAALDEINFFKTSPAGAEDPGLLSKATQYFDDALLKLGKKRASLVDIAESFKSRGNEFMRSNQHLKAVELYTCAIALNQQNAIYYCNRAAAYTLLNMNNKAIEDCLKSIEIDPHYSKAYSRLGSAYFAMGNYHDALYKGYLKAAELDPSNENVRQNIEVTKKKLAEQRVPPEEQNTHAGQAQGPHPIFTSGGVPFNLFPPGSSPVQEFFAGWSSDVGAPPPGHSISINLNDIFGQANVNASGQGSSQTGNSNNHTPSASFSTGAAVPPPFAFSGSGNEGTQARQASNGLEGEHGEPGIHRDDDVHINLAGPEQAAEALRAVMQMLGPQMGQHEGAPRGPG

SEQ ID NO: 58576 - protein, 292 aa, Zea Mays
MEIRAPPTSLSLAPPPASASFRRTPLRTFFLNGSVSLKVVQVRQSNVNRFKCNSIQSNLFDRLTRVARSYANAVLSSFEDPEKILEQAVLEMNDDLTKMRQATAQVLASQKRLENKYKAAEQASADWYRRAQLALQKGDEDLAREALKRRKSYADNASSLRSQLDQQKGVVENLISNTRVLESKIAEAKQKKDTLKARAQSAKTATKVSEMLGNVNTSSALSAFEKMEEKVMAMESQAEALGQLATDDLEGKFALLENSSVDDDLSQLKKELSGSSLYVDLFTRWKGVTVAF

SEQ ID NO: 58577 - protein, 61 aa, Zea Mays
MIVFFSYFVLHFSLGCGVLEVPLLTRVRISIVKYFGKSILWHLISMCQPLSLIFYVVISRM

SEQ ID NO: 58578 - protein, 90 aa, Zea Mays
MMTMAPVMHDPFYASNGYAAPHGVQMAAMAQQQQAFMLQQQQMMTMAPAQPVVHHPMQMQQNPANPFGNPFAAAGMPLHAGPGNVYTGLI

SEQ ID NO: 58579 - protein, 56 aa, Zea Mays
MCPCACIKFKSCSSKEKLQLSLSLSLSLYRGRCCSVSLSVVSAQLGLVLHENLENL

SEQ ID NO: 58580 - protein, 221 aa, Zea Mays
MAAPAPATTGDLLRVDPLELRFPFELKKQISCSMQLSNHTDDYIAFKVKTTSPKKYSVRPNTGVVLPRSTCDVVVTMQAQREAPPDMQCKDKFLVQSVVAPAGITVKDVTGDMPPSPVPEESEEGSPPRASESENGDGPSGGFTRALRERIEPQDKSTEAGALVSKLTEEKNSAIQQNHRLRQELDLVRQEISKRRGGGFSFIVVIIVALIGAILGYLMKS

SEQ ID NO: 58581 - protein, 366 aa, Zea Mays
MFFDFFEPPNLAEKIHVEEWIPSIQQVVTMASDLAKALQYLQILGVVHRDIKPANILLDKDLHPYLADFGLAMFQKDIKRVSVENWKSSGKPTGGFHKKNMVGTLIYMAPEILRKDIHTEKSDVYSFAISINELLTGVVPYTDLRAEAQAHTVLEMTYTEQQLTAAIVSQGLRPALALPESGAPPTLLSLIQRCWDPDPEKRPSFEDIIDELNIVQKHIVSNASVPSSPVSKTQNGTIEVHHYQEALNWFNQGELFVKGSSRSDLKNLWSDCFDQSSEYHPTLSWGSFATCGRRETMEDTHFVLPHVSEENDVFAFGIFDGHRGSAAAEFSVRAVPGFLKQFGQGASPTDALSEAFVRTDIAFREN

SEQ ID NO: 58582 - protein, 526 aa, Zea Mays
MMQIVESHKAVNRMSQSALAACMAPLLLRPLLLGECDIDNEFSMGGDSSFQLLQAAAAANHAQAIVIIMMEEFDQIFDDLEEGSCSSDAYTESEDDDVDKEYSTDNDINDDDDGSYDSGEDDIEEDLDYSDDSEHDSKINTNVKDGKVKNNISETAEVAQAKGASHMETNSQSNQKQESCGPNGSKDRILRSTSRSSSSREKSMEKSCSSAHRGKRTLWGRTSARKDLSTEEIECCSDDESLIEKLESNKVDLQSKIAKEAKENAILQSSLEKRKEELHERRLALEKEVENLREQLQKERSLRTSLESGVMNLRRGQVSLPSTTDSKVSGQQLCCESCNKRLLNTDRLGGPESSSVAASPTIGSDSASGMVKKEQKTFQGDIEQSRKQTAQDSPSSTDKPGHEAVGGSSQRAPQRRQSIAREGQDGWSSSSSNSKWNLAQKQYSNSPLIRGLHGSSRLEDFGGSIPPAASSALVKLTNRLNFLKERRALLASEMQSLDLGRPPAAAAAPSAKSPTPKGHERKKSRD

SEQ ID NO: 58583 - protein, 147 aa, Zea Mays
MLRKAVVAFIACTAFFLAFSAYSRRQGVAEVQLPAVTHRVYLDVEIDGQHIGRIVIGLYGEVVPKTVGVVAMANSGLDSNGSQFYITTIKTSWLDGEHVVFGRVIQGMDTVYAIEGGAGTYNGKPRKKAVITDAGEIPKEKWGDQEA

SEQ ID NO: 58584 - protein, 185 aa, Zea Mays
MGGGVMRTAAKVSIAGGAAAAKSGRFRNAAPVFATAPAAAGSEAAPLVSVSSGEVPPAAAQWAASWELDDWEFADWRDDAAAAAAVVEREATAAAAKPRLVFAPPSREEAEEATTELRDAVERAYFNESPVEVVKEQDKEFNKLATDAMIPSMPGHVVQAFTLLKSSTEAQVCAMAYVNISFEGN

SEQ ID NO: 58585 - protein, 274 aa, Zea Mays
MKPEEAVVATLSSLPDEVVDTVGTVLPSEDSVSERKRKLEFLEMQEELIKEEEKRQEKDDKAKLEEPKATEEDLALKEMTEPTVREKEELKKAKTHDKKEQLCNISQALAVLASVSSVTKERQEFLSLVNKEIELYNNMLAKEGTDGEEEARRAYKAAREESDHAAEAAVGEKVSSALIDRVDAMLQKLEKEIDDVDARIGNRWQLLDRDCDGKVTPEEVAAAANYLKDTIGAEGVQELISNLSKDNEGNILVEDIVKLASQTEENNEAEETAR

SEQ ID NO: 58586 - protein, 132 aa, Zea Mays
MAEKEGAKVGAEEMEEREQEGEAEEVEVKFRLFDGSDIGPVRCNAATTTVAALKDRVVADWPKDKQIIPKTASDVKLISGGKILENDKNVAQCRAPFGDLPSSAITMHVVVQPSSAKSKPDFRSILYPQRCM

SEQ ID NO: 58587 - protein, 593 aa, Zea Mays
MPSTANVSQQEAPRPLEKVNLLAARNERESFQIALRPKVSWATSGIAGSVQIQCTDLCSSSGDRLVVGQSITLRRVVPILGVPDALVPIDPLSPQISIQPGETAAVWVSVNVPCGQPPGLYEGEIFITAVKTELDSRTESLPKSEKCRLYRELRSCLDLTGPRDYSSPEEMVQRLTSASTVLRRVLDNPALQDCQENNGFGDMMDEDVINNISVRLKLSLTVWDFTLPVTPSLPAVFGISETVIEDRFCLEHGTEGWYSALDHHFRWLLQYRISPFFCRWGDSMRILAYTCPWPADHPKANEYYSDPRLAAYAVPYAPILSCTDAAKNSLRREVEILKSKPHWSKAYFYLWDEPLNVEQYDMICNISNELRSYAPDVRILTTYYCGPSGSELAPSTFEAFAKVPNVLRPHTQIFCTSEWVLGTREDLVKDIVAELRPDLGEEWWTYVCMGPSDPQPNWHLGMRGTQHRAVMWRVWKEGGTGFLYWGSNCYEKAMIPSAEICFRRGLPPGDGVLFYPGEVFSSSHEPVASTRLERILSGMQDIEYLKLYSSRYGREEGLALIEKTGMYLGPDRYTLDHGPVDVMRGEVYRTCRS

SEQ ID NO: 58588 - protein, 524 aa, Zea Mays
MLLQPIPTATLAARPRSSEASFPFRCHRRRRVLLPVRADLTPISLSASAPSRPAKPAVCTADELHYASVDGAGWRLALWRYRPPRNAPVRNHPLMLLSGVGTNAVGFDLSPGASFARHMSSQGFDTWIVEVRGAGLSMREYDDSTPSGSVTFEDVSSGIQPLNSTFEATSIQSSGGYASDCDDLGIVALDEPPLLAELSNFFDRISKLMEEAVVNGNFHEITEKVSVLSEMVESSTIIGPVREESLRLLKNFQDQLDSWERFVATQMDLTSEYNWDFDHYLEEDIPAALEYIKQHSRAKDGKLLAIGHSMGGILLYAMLSRSGFEGVSSNLAAIVTLASSVDYTTSNSSLKLLLPLAHPAQALNVPAVPLGTLLAAAYPWASGPPYLFSWLNPQISAQDMMHPELLAKLVSNNFCTVPAKVVLQLTTAFREGGLCNRNGTFSYKDHLRECQTPVLALAGDKDLICPPDAVYETVKLIPNHKVDYRVFGKPQGPHYAHYDLVGGRLAINEVYPCIIEFLSRHDGY

SEQ ID NO: 58589 - protein, 168 aa, Zea Mays
MIQIHFLVQCGLPELEKEVDEKIDQFSAWVEKHPNRRSQICLSFFDEKHRHPGWFVNKTERIYWEQWFINLQVMFPKRYSKSNSSKGLTNIQANAVEETSTRRAALEASINEVLFQIIKFANEKKDHIPAIPDRIFNHEIMIPSSDSVFGWNTDVIRRVLNSGHPYSL

SEQ ID NO: 58590 - protein, 163 aa, Zea Mays
MIYQLDLPQILEDEYGGWLSPMVVEDFTAYADVCFREFGDRVSHWTTLDEVNVAAIGSYDNGQIAPGRCSDPFGTKKCTVGNSSVEPYIAAHNMLLAHASATRLYREKYQAVQKGVVGINIYTMWSYPLTNSTADLEATQRFLDFYSGWYLLDSCCITNVEHL

SEQ ID NO: 58591 - protein, 207 aa, Zea Mays
MLQIQITPPASPLRRPSVPEEGEAPNREHQGKGSAPRHRHGGLLRHDPLRPAARSRRRSRLHEARQRRVSGRRGRIRRCAPSRWCAQRLGLRARQRWRCRHLCHRPSDRLCCAIDCCHGNKIRQNTKDNACWNCRFYQCTRTDILRVQDIYRWQQGLYVGECRVNLLGVWCSVYMFVRQLNVKTTKSSVYQLYFSEANTVPNNDGMS

SEQ ID NO: 58592 - protein, 132 aa, Zea Mays
MAKPRRGRSASRSTSGSSSRSPSHSVSSGSVSSRSRSFSSSSSQSRSRSPPPAKRSSPGARKGRSPSPPPKKGSPSKKVRSPSPPPKKASPPRKASPPAESVVLCIDHLSRNVNEAHLKEIFVQLGTSKPEK

SEQ ID NO: 58593 - protein, 307 aa, Zea Mays
MLPLQQPCQYSGSSMLSPPQIASPSGQRRAYLSVSLAPQPAMDLVLVASPNGPHLRLLKQAMALVVFSMRAIDRLAIVTNATTATRAFPLRRMTSHAKRMALQVIEHLCCVGGTDPVGALHKGLKILEDRAHRNPSNCILHLSDHPVRNCVGGVDMNHSSIPVHQFHVGLGFGVRSGFIMHEFEELLARLLGGVIGDTQLRIGEHGGMVRLGELRGGEERRIPLDLAADCGFILVGYSYLEGGREEQLRTGEIAVGFEEKGDNGYCGMREMGLSIGGERRSCCAERRDYHDPFMARRWAKHFNVYRA

SEQ ID NO: 58594 - protein, 797 aa, Zea Mays
MSTCLHVQDPRNIAMSRPLIADLGIVSVCKNESSRSSCSTGNNNIRKDFLNGLLEAGATESSGSPNCQLGNDVSSEQSTTIDILQKLFLPSSGPWHVNNEFVSAALMKLPENEHSRQLHNATSDVLSKLHVVMRTVDNLHLKHRQLAANYQKQRDSSAWNRAEQKRLKEELTSVVAKLEGSKQKLAVLKAQGDNKQATPILVPTLGNKNMTAEKVRDKQTELQDLEATHKELMELISKRLEEIRRLHTERIEILNKLATFQNILTDFKSIHSSKAFQLVNDQLQKSQAELDDHQTLLEKLQVEMDTFVWRERQFNQKVDLAEIPQKVSAYCVSRIADLEKDVQKLCNEKNMLVLKLEEASREPGRNQVISEFKALVSSLPREMGAVQSELSKHKDASLQLHSLRAEVHSLSSIQTRKEQEIEEMSFRSAHAGSDISQLQSLVRELRENTQELKLFVELYKHESTDSRQLMESRDRELAEWARVHILKYSLSESKLEQRVISANEAEAISQQRLATAEAEIAELGQKLETSRRDLVKQSDILKSKHEECEAYVVEIESIGHAYEDIMSQNQQLLQQIIERDDHNTKLFMEGVKSKQSHDALHLEVRSLQRNLQHASTLMDLCNQKTIRLEDQLRGWSERLRRLSEDGMQQSISLGNYQKKLSGMHGEAPKLRQSMDVLQAKAGSNRLEIAELLIELENERFGKKRLEDDLDLMSSKANSLREKTDNSAVLQKLLHEAKEYRGILKCGICHDRQKEVVIAKCYHLFCSQCIQKPLGSRQKRCPSCGLSFGVNDVKPIYI

SEQ ID NO: 58595 - protein, 58 aa, Zea Mays
MMPFMLGVCFLCPSMDCLWHKYHYCPSCGEKVGEFRKSDPCLVVDATRWSEPSFAVPA

SEQ ID NO: 58596 - protein, 182 aa, Zea Mays
MNNKAIVDDWRIKLLLPLLWLIDFLLKQRPIASALFNRVKNRDNLKDILLSVYGNKDAVDDELVEIIRGPADTEGALDAFVSTVTGPPGPSPIALMPRLADLPVLVLWGDRDPFTPIDGPVGKFFSKLPSELPNVTLYMLEGVGHCPHDDRPDLVHDRLLPWLEALLPPAAGAVTTTTTTVV

SEQ ID NO: 58597 - protein, 82 aa, Zea Mays
MGVQLGVSICMSASAMYGCKSATRSALGNMVHVRLCARRIMHETVQFTCTLHFCFCREALVLCIASMPASLEELHPFVLGVY

SEQ ID NO: 58598 - protein, 291 aa, Zea Mays
MTSELEQLRNAASAAKSEAAMLSAEIEQMRASIGTAEVRCRAARKIEEAARAAEALALAEIKILLRNEASVEDLQGMEDVSLSLEEYSELAAKAQEADERSRKKIDAAMVQVDEANRTESDSLRKLEEARLQVEECKKALQDAQKRVDAANRGKSAVEEALRRCRSTTGHRRRSVHDPPRFKHPAPRSRDSQNMDIVGVSKGPLKPTLSIGQILSMKLMGPDGYDKSVWDDASEASTMSLGHILNRRHAVVYSSDATAQKKFPGKRKKFAFTGLSIFLARQAKRKKEKGSH

SEQ ID NO: 58599 - protein, 152 aa, Zea Mays
MAHQKREGSYADDDSTSKRIKGTDTASETGDSVESSVSQQMDAEARRTCQKESEAPSDKCVSDGECAANSKVLGEQKMVLTVVEADAADDKGCRHTMEDAWVVLPNAGAESPGSLRCVHFAIYDGHGGRLAADYAQKHLHQNVIAAGLPHGY

SEQ ID NO: 58600 - protein, 654 aa, Zea Mays
MPSQVMDPRRHLSQFSNPTVAASSFSEEQFRLPTERQVGFWKQESLHHIGSKSVASSPIEKPQPIGTKTVGRVEPQPYKLRDQKTAFSLEHKTFGQERHVNLPPSLWRADQDPNLQSDPSLFPDGRRTSPNEAYNENGLFSSSLSEIFDRKLGLRSMDVRLRQPVQKVDLTHVDDEPFELTEEIEAQIIGNILPDDDDLLSDVLDVGYTAHANMGDDVDDDIFYTGGGMELETDENKKNTELNGANDGLGLLNGTMNGEHPYGEHPSRTLFVRNINSSVEDSELKLLFENYGEISNLYTACKHRGFVMISYYDIRSAWNAMRALQNKPLRRRKLDIHYSIPKDNPSEKDINQGMLVVFNVDPSITNNDIHQIFSEYGDIKEIRDAPQKGHHKIIEFYDVRAAEGAARALNRSDLAGKKIKLETGRLSGARRSTQHMSKELGQEEFGVCKLGSPSTNSPSLPSLGSSNIAAMTSCGRENGSMHGLHSGLLTSMSPFREASFLGLSSTLPQSLSSPIGIASAATHSNQAPLGELSHSLSRMNGHVNYGFQGLGAIHPHSLPDVHNGANNGTPYNLNTITPVGVNKNSRTAEAVDSRHLHKVGSGNLNGHSFDRAGEGGKFVNFDILVSIFMFDPILSHFHSLSMCFVIKLLGLSGL

SEQ ID NO: 58601 - protein, 1045 aa, Zea Mays
MLTQMISIVFRRMESEQVSVSPGSSVVKDMPSSITNDSENGEISTDGQDEEKVTLGDALSMNRPSEAPPTSVEELQNLAGGADIKGLEAVLDKAVELEDGKKVSRGIDLDTVNIIQRDALLLFRTLCKMSMKEESDEVATKTRLLSLELLQGLLEGVSNVFIKNFHFIDSVKAYLSYALLRASVSSSPVVFQYACGMFSVLLLRFRESLKGEIGVFFPLIVLRSLDSSDSPLSQKASVLRMLEKVCKDPQMLADVFVNYDCDLEGPNLFERTVSALSRIAQGSQIADTNSIVSSQTVSVKSSSLQCLVIILKSLADWEQLRRDSSKQGSIVESHEEDASRRLTTDEMKNQEDGRNQFERAKAHKSTMEAAISEFNRKPSKGIEYLLSNKLVENKASSVAQFLKSNPSLDKVMIGEYLGQHEEFPLAVMHSYVDSMKFIGLKFDAAIRAFLKGFRLPGEAQKIDRIMEKFAERYCADNPELFKNADTAYVLAYAVIMLNTDAHNPMVWPKMSKSDFVRMNTASDAEECVPNELLEEIYDSIVKEEIKMKDDSHDTSKSTKRPETEERGRLVNILNLALPRLKSASDTKAESEKIIKQTQALFKNQGQKKGVFHVAQQVELVRPMLEAVGWPLLATFSVTMEEGDSKPRVVSCMEGFRAGIHLTRVLGMDTMRYAFLTSLVRFTFLHAPKEMRSKNVEALRTLLGLADTDMDALQDTWNAVLECVSRLEYITSNPSISATVMLGSNQISRDSVVQSLKELAGKPAEQIFVNSVKLPSDSIVEFFTALCGVSAEELKQTPARVFSLQKLVEISYYNMARIRLVWARIWSVLAQHFIAAGSHNEEKVAMYAIDSLRQLGMKYLERAELNNFTFQSDILKPFVILMRNTHNSKIRGLIVDCIVQLIKSKVGSIKSGWRCVFMIFTAAADDEDESIVESAFENVEQVILEHFDQVVGDCFMDCVNCLIGFANNKCTPRISLKAIALLRICEDRLAEGFIPGGAIKPIDVVPEANFDVTEHYWFPMLAGLSDLTLDSRPEACWKGWAFFFWG

SEQ ID NO: 58602 - protein, 122 aa, Zea Mays
MLQEEIDKEIEDKKTELEPKVVEAYEASPPEVKALFKDKKPVKVIKKNSAAVTKFLDELAKIGHVISLDLSRHVPIFHGKSYIPSFLYAQQAALEEILYQFEEKLQAEKVEAARKQEELQSV

SEQ ID NO: 58603 - protein, 1152 aa, Zea Mays
MIKQQQQQAPPAPAPAAAPPPSACEGEKKAPPINSELWHACAGPLVSLPPAGSLVVYFPQGHSEQVAASMQKDVDGHVPSYPNLPSKLICLLHNVTLHADPETDEVYAQMTLLPVTSYGKEALQLSELALKQPRPQTEFFCKTLTASDTSTHGGFSVPRRAAEKIFPPLDFSMQPPAQEIQARDLHDNVWTFRHIYRGQPKRHLLTTGWSLFVSGKRLLAGDSVIFVRDEKQQLLLGTRRANRQPTNISSSVLSSDSMHIGILAAAAHAAANNSPFTIFYNPRASPTEFVVPFAKYQKALYGNQISLGMRFRMMFETEELGTRRYMGTITGISDLDPVRWKNSQWRNIQVGWDESAAGERRNRVSIWEIEPVAAPFFICPPPFFGSKRPRQLDDESSEMENLLKRAMPWLGEEICIKDPQTQNTIMPGLSLVQWMNMNMQQNSFANSAMQSEYLRSLSNPNMQNLGVADLSRQLNLQNQILQQNSIQFSSPKLPQQMQLANELSKASLPLNQIGVGTKPQEQTQDPNNLQRQQQSMNQLLPLSQSQTNLVQAQVLIQNQMQQQKQPTSMAQNQQPAASQSLILPQQQQQQQQHQQQKLVHQQQQILLQQQQLQQQQQLQQQQQNQQQLNKMAAQMPNLASHQPQLSDQQLQLQLLQKLQQQQQSLLSQPAVTLAQLPLIQEQQKLIIDMQQQLSNSQPLSQQQTMPQQSIQVPSRATPPPTTTVQQESQQKLPQKHVGFTDTSHTTIPPTTSVNTISVVGSPLMATGATHSVVTDEIPSCSTSPSTANGNHIVQPVLGRNQLCSMINYEKVPQSTPMSIPSSLEAVTATPRSIKELPKLNSNVKQSVMASKLPNAGHVAQNLTNNAPPTDYPETASSATSVWLSQADGLLHHSFPMSNFNQQQQMFKAAAPETDIQGADPSNNTLFGINGDGQLGFPMGADDFLSNGIDASKYQGHISTDIDGNYRISKDGQQEISSSMVSQSFGASDMAFNSIDSGMNDGGFVNRTSWPPAPPLKRMRTFTKVYKRGAVGRSIDISQFSGYDELKHALARMFSMEGQLEERQRIGWKLVYKDHEDDILLLGDDPWEEFVNCVKCIRILSPQEVQQISLDGDLGNNILPNQACSSSDGGNAWRARCDQNSGNPSTGSYDQFE

SEQ ID NO: 58604 - protein, 1095 aa, Zea Mays
MDCRTLGAEAAQEPGRGHGHRRLSSEALLKIKQAFRSTAVDLPPEESTAPYHSITLPETFDLDDFELPEAVFQGDTDHHVSTKEQITLQDNPEKTGYSTSQFGLDERFGDGSSSHIGLDLEEELILNKDHSIHLESDDGIIIQGRSSVPSTDMEIDDNKSTNITAEGYSNMDGGPSSHVKLGPLNADDLGGNSIRNWTGYNVQTPDLNDILLHNNEDIAGPSTSYYQPSPFTCDEPASPEFISAQAPATPGLMEETVPSRVHESPVLSPQRKASPSTNDETAKADTPAAPASDFLHSATGNASDVVGAEMTELGLAKPVQVESSVVQDSDASVQQHTSEGLPSQGQASHLEAAADKLVGSDGIAASVDETVTVNATIEDVPLAVNDSEPCVDGSAGPSVVNLVQMDGPLFDAQGTVLSADFQHEVQAMQQVVASNDRLNELSTSEFAEPEKMLTAPNAEFNHAIDLGQITAEKGTIESDGSNIIGSLTSRKRHLEYSLPALESETTKKLPSRPHVKRTNDFVPHDDDILASILVGRTPGFTLDSTPLPPRESSLKRPRLGSKMGTLKRKVQIDDAMVLHADTIRQQLINTEDIRRIRKKAPCTRSEIWMIEKGSLEDDLFHEPIFSCLSEELNNLHNRTYETIVHPAVQRMELHGQLDMPETIPEYRNIAGFGSATIDGPLHIPDGIQSDAMLSGANVAYGATAAFGLQIPPDYQVNRASNDFVVGTQLQEVAKPFIGNEHEVAPPDREHAQVDTLYSDRFQGVPSDLQRSNDANVSSQDVVLDNSGQACAHAVDGMTREFNHFVHRDANLFGSTEVPASEITGVEYNQDASGFPRQTEDDNTVEYNQDASGFPRPTEGGNAVEYNQDVSGFPRPTEDGKTVEYNQDASGFPRPTEDENTVEYNQDASGFPQPTEDENTVEYNQDASGFPRPTEDENAASATGDNSGFQENNTGSHMDLDMMNDYEVKECNDFGSAIHGVDTDFLNYGDDDNDDDFVDADEPNPSEFQSLDNSGWSSRTRGVARYLKTLFDEESGLGRKSVAIDHLVRGKTRKEASRMFFETLVLTTKDYISVDQPNPFDFVSVKPGPKLLMSEF

SEQ ID NO: 58605 - protein, 135 aa, Zea Mays
MVFFSFRFLVSFDLVLCNHSLLLQVLQQRSSRAPWASCISCCGTHLHSPGTHRSLCGTDNLYIKRGMNLRLLEMRTQALIFTVLAAIHRSLWHRSSETQSEENAVAGPGIQKELVISVIVAYSCNHPSCITISSC

SEQ ID NO: 58606 - protein, 209 aa, Zea Mays
MSGSYGSDDYRGGGGGGVVVEAGAEEDTIKVVVVTVVLMTTVVAEVAAMEDETRRTKRVVKVATMLVVMDKLLKVLLPTVVLQAHTHQAMVPRLHTNMVVPQAGKAACLLHMLVDMVVSPCLGVEDLGVHRHLIVAALVFILVVLVLNQLEKSSNVMKIVTRHVTTQGFTYQICLLMSLLRNYRSYLEESARLGGSSKNVVTKTSGPGT

SEQ ID NO: 58607 - protein, 139 aa, Zea Mays
MGTTSLDPLQIREFMEIQSVNYNGDTYHLISKNCNHFCEDICKRLTGNFIPKWVNRLARMGAVCNCILPESLKINAAGHDPASRAEDSERKMLTSSFSCFCSISLCQRHFSTSSPSLRSSANGTSWDTKQSNSTRLKKS

SEQ ID NO: 58608 - protein, 65 aa, Zea Mays
MTIMLVCSYVQDARVCLLCLVKLWGNVGLSISVFFARGQSPNSSLPFYPLTKSLPHPHVCGRFMI

SEQ ID NO: 58609 - protein, 1395 aa, Zea Mays
MAAAPPVAGEDIKDGVEVCLFDESADGFSRTVRAISELVDIEPETDFPEAEVERLSSSITFLREWRHFSYEPKSVTFTNGTESTSYRDDMHSVTLPQFSSASVPQITPQEDRGDNTVSFDFILYAGGNVWALDWCPRLCDKPDSSINCEYLAVSAHPPGSSYHKLGMPLTGRGIIQVWCLLAPFEDSHSHQPVNAFNNGKQRGRPRKIPCSDKLVPVPKGPRGRPKKRSYDDQLEPVPKRPRGRPRKYPLPVAKFEGSSQNGESQDIILFDPLSTSSFIPDDLSLASVMPTEKSVQSTPKRGADVELGKETTCQTASFGCSLDHTACTEFNAKLCIVAVDAALPPIDKLTCSPGTVSGDVCTAPTLTTAICTKPKRPRGRPRKYPVQINGRSVSGTVAELGQESTCQPVSFGHTVCTEFNANLSIVPVDAALPIVDKLCSSSGTVVKESVCTEPSPATATRKQPKRTRGMPRKYSDTMIDLGKDTTGHPVLFGRSMDHTACTESNSSFSIVAVDASSLFASSSTATCDDKSKGQSIRGKDKKKTISNALYCPVVSGVESQSICSTEILPNDPAVSVENALPSAQNTVSMNELCSASLLNREGNACKSALSDDSELPIHISPKSSNKRESSGRRGRGRPKTIPLSAGTGHFVASVASLPKTTCVLTSSSNLTSLNKSGGKFIVSSVSSCGCDVEKCSVHSGVLLSDDAPPAHGLQNTNCKEESNTKIGKAGSRNKPVAVEHNHFTDLNVKEQKVQTTPMSGDPVILVENCMEGQGPRKAGGQLQRIPASNKSSGASVGGGTYKIETLSTPMTKGSSKNNDMAYGAGLNQSQNAIVGCEGMEVIESNTANYTSHCNENARANQVAPSFKNSDRVIDETEAAELGPLKEPREDDNLFTCVNSNSASITSDIAQPRVVLCLAHNGKVAWDIKWKPPLLSQPEQKSRLGFLAVLLGNGALEVWEVPSPCMIQKIYSPSKVEGSDPRFLKLQPVFRCVKVKCRNRQSIPLTVDWSPSPPHDMILAGCHDGTVALWNFSMNLPTQDSKPFMCVTADSVPIRALSWAPYISEESTDTFVTAGEDGLKFWDLRDPYHPLWELTTAPRAVLSLHWLKDGRGIIISLEDGTLKFLSLPRIANDVPATGRPFSGTKTQGVATYQLSEYLIWSVHASEPTGCVAYCGADGTAVYFQLKSRFWDKEPGRNRVPYFLCGSLSEDGENIKIGSRLQTSPLPNVPVGTKKGSKPSQSIVQALATSDVTSLLTYQLNSPTGNNDAVNLEAHDDQDDGRSKEQGAGAVNQELDGEQDDGHREEQAAGMVTTEFGDDQADGHSEEQGAGAIISATPAKEENDGTWNDKGVQSPKDLNVVPPNSVALNQVRWNMNKGSQRWLCYGGAAGIIRCQRI

SEQ ID NO: 58610 - protein, 822 aa, Zea Mays
MISAVSMPVVTSSGTIPVVVSSATVPSLRYDDCTMCQKALPHAHSDNIIREQGNSRATGNLEAAPMFYSPHQDSGSNKSSLGASSGTPTNYVAEPRAGNTAVMTQFNSTLPARKPAVQATASPDTGVPVQPTVIPLPVSSAPAPDGVFVGHSPQAGAEDPVRYQQQLFSYSMQPAQVLVNGPQGIDASAYKDSNHPAAEPLREYAHNLLHDYARAIDVHTQAVHLGPIAPPESTVHGKPSTYGIIDHAKVGKLPLNIDGSSIYKSQAGGYHIGITNAFAAPAFNQEENISRHSEKPRYAFDIGTQNVHPDIIQQPPNLAVQSNLIAPIEPPGSNEKVTVLPSNSGAQVPSGSPVQRPKEMANHLVSIPPNGSNKFPLQSTVGIDRVEGTQEPAYADSLFSNQDPWKAVGNASLVPPRPNKLTKESVVSGGQYIDGHMPDMNMHAAIPSEEDSCFKDMHTVKLNKGPGEDSIKRQLQAVAEGVAASVLQPPFPEKTVVFSGDHIDSHGAEVDVKFQDEGNNQSDKISQGVQVLDDNDNLQIIKNSDLEELRELGSGTFGTVYHGKWRGSDVAIKRINDRCFAGKASEQERMRTDFWNEADKLASLHHPNVVAFYGVVVDGPGGSVATVTEYMANGSLRQALQRHEKIFDRRRRLLIAMDVAFGMEYLHGKNIVHFDLKSDNLLVNLRDPQRPICKVGDLGLSKVKCQTLISGGVRGTLPWMAPELLNGSSSLVSEKVDVFSFGIVMWELLTGEEPYAELHYGAIIGGIVNNTLRPPVPESCDPQWRSLMERCWSAEPSERPSFTEVGKSLRAMASPTKAQQSK

SEQ ID NO: 58611 - protein, 658 aa, Zea Mays
MSQPHAAAPASKRPFSSTTTSPSPTSSPATPLMKKAKHPAATASSVGTVEKNGIHLDTAAAAATGGGRTNGEEDAEMVLVDQDELPAPSAPASAGVAANLFRKKATLPQPSTSARKPLRIRIGQPKLPKNFEEDTWTILKDAITAIFLKQKLSCDVEKLYQAAGDLCLHKLGANLYERIKKECEIHIAEKISALVGQSPDLVVFLSLVQRTWQDFCDQMLIIRGIALLLDVKYVKNVANICSVWDMGLQLFRKHLSLSPEIEHKTVTGLLRLIESERLGEAIDRTLLSHLLKMLTALGMYSESFEKPFLECTSEFYATEGVKYMQQSDIPDYLKHVESRLQEEHERCILYLEANTRKPLIATTETQLLDRHTSAIIEKGFAMLMDANRINDLLRMYNLFQRVNAVELLKQALSSYIRATGQGIIMDEEKDRELVPFLLDFKASLDKILEESFAKNEAFSNTMKDSFEHLINLRQNRPAELIAKFLDEKLRAGNKGTSEEELEGILDKVLVMFRFIQGKDVFEAFYKKDLAKRLLLGKSASIDAEKSMITKLKTECGSQFTNKLEGMFKDIELSKEINDSFRQSSQARTKLPSGIEMSVHVLTTGYWPTYPPMDVKLPHELNVYQDIFKEFYLSKYSGRRLMWHAYQLKLSEINNYVFP

SEQ ID NO: 58612 - protein, 141 aa, Zea Mays
MVLLSVDGIIVPIMLSLSCVIFLAPLHGFAFWFDVEFNGPVRQKSKKQPSQSLDENTQNASPSNRKRKPDVSIVLSTAPEDAPTHWQQTLLYLFEPIELNKDQIIEGSVTISQSQQHARFLNICLKYFTGDQWYVKESVMR

SEQ ID NO: 58613 - protein, 443 aa, Zea Mays
MAPVAKVGGLADVISGLGKALQKKGHLVEIILPKYDCMQHNQINNLKVLDVVVKSYFEGNMFANKIWTGTVEGLPVYFIEPQHPGKFFWRAQYYGEHDDFKRFSYFSRVALELLYQSGKKVDIIHCHDWQTAFVAPLYWDVYANLGFNSARICFTCHNFEYQGIAPAQDLAYCGLDVDHLDRPDRMRDNSHGRINVVKGAVVYSNIVTTVSPTYAQEVRSEGGRGLQDTLKVHSKKFVGILNGIDTDTWNPSTDRFLKVQYSANDLYGKSANKAALRKQLKLASTQASQPLREFEGIADQFQNNNNVRLLLKYDDALAHMIFAASDMFIVPSMFEPCGLTQMVAMRYGSVPVVRRTGGLNDSVFDLDDETIPMEVRNGFTFLKADEQDFGNALERAFNYYHRKPEVWKQLVQKDMKIDFSWDTSVSQYEEIYQKTATRARAAA

SEQ ID NO: 58614 - protein, 430 aa, Zea Mays
MRQRHGAPIPPRSNFATLDENTGVIISRRADRHFEEEGPILCAALDGMKLRSFPEYEVRVRYATEHRCGVVVKGPKLSGNISGTDPLKDNRLHLKAEPLDGSEEAKNTAAVVNELSMEITRILVSHPINAKRAAEGKNIANVVLLRGCGIRIEVPAFETKHGLAPCMVAPTKIIAGLGLSLGIDILEAPGATGDYRTLLTSKAKAIAKALSAPMDTPPRVFVPGEDGYKAGKENGYDFGFLHIKAKCIFRFFLLVLTIYVIVIALVIMSMQAIDDAGHDKAVKLKVRGLEAVDRAIGQLARLLWEAEKAGHYQYFLCVTGDHSTPVEYGDHSFEPVPFAICRLRDYAGAIGEDNIMNTQLDDFPLPSVKSGEDLLDSIESLEHKPGQLKAFSGDSVCEFNEIAAARGCLGRFPGSEMMGIIKKFIKAKND

SEQ ID NO: 58615 - protein, 536 aa, Zea Mays
MRANSYPIMMEEDMENGRSYQERPRAFSTVRSKSSVPLAFRLLMRVNPRAVIILSLLVFSGVLYVGASTSPILVFVFCICTLSLFFSVYLTKWVLAKDEGPPEMSEISDAIRDGAEGFFRTQYGTISKMAFILAFVILGIYIFRTTTPQQEASGLGRATLAYITVASFLLGALCSGIAGFVGMWVSVRANVRVSSAARRSARESLQIAVRAGGFSAIVVVCMAVFGVAILYSTFYVWLGVDSPGSMKVTDLPLLLVGYGFGASFVALFAQLGGGIYTKAADVGADLVGKVEQGIPEDDPRNPAVIADLVGDNVGDCAARGADLFESIAAEIISAMILGGTMAQRCKIEDPSGFILFPLVVHSFDLVVSSVGILSIRGTRDSGLISPIEDPMAIMQKGYSVTIMLAVLTFGVSTRWLLYTEQAPSAWLNFALCGLVGIITAYAFVWISKYYTDYKHEPVRLLALSSSTGHGTNIIAGVSLGMESTALPVLVISVAIISSYWLGQTSGLVDESGNPTGGLFGTAVATMGMLSTAGMKV

SEQ ID NO: 58616 - protein, 590 aa, Zea Mays
MAVQSNARATDEQRRPVVGVAWALRGGALVRLLLGADAVRAVEPRLPPRLPGPALAKEMHKDLAARVNSVVNSGKIPEVSKCKLMGFSRWSENASFRDHPSIVQILIDGNKRKATDVDGKVLPTLVYMAREKRPQEHHHFKAGSLNALIRVSSVISNSPVIMNVDCDMYSNNSGSIRDALCFFQDEQLGQDIAFVQYPQNFENVVQNDIYGNPINTVNELDHPCLDGWGGMCYYGTGCFHRREALCGRIYSPDYKEDWTRVARKTEDVIDLEGMAESLVTCTYEHNTLWGVEKGVIYGCPLEDVITGLQIQCRGWRSVYHNPPRKGFLGMAPTSLGQILVQHKRWTEGFLQISLSKYSPFLLGHRKISLGLQMGYSVCGFWAANSFPTLYYVTIPSLCFLNGISLFPEITSPWFVPFAYVAVAAYSCSLVESLQCGDTAVEWWNAQRMWLFRRITSYLLAAIDTIRRMLGVTESGFTLTAKVTDPRALERYKKGMMEFGSFSVMFAIITTVALLNLACMMLGVAKVLLRKGAVSLGAMFVQAVLCALIVAINFPVYEAMFVRKDSGRLPASVSVVSLCIVLPFCILPTKL

SEQ ID NO: 58617 - protein, 710 aa, Zea Mays
MDGGEDRTFKANFTSEGVTMLQDRVKEKLSELMGDYSDDTLAEYVVVLLRNGRHKDEAAKELHVFLGDDNDAFVSWLWDHLSSNLHLYVQPKAASSKDDTRSSHNAARGLPVHSVISSTQVNHEPEAETQKTVITHKKKDWGHRKRDWGTIGRGQSETVPLRSVVDNVSLAKEKDLHESHADEKAFHKSHSVRRTRSPDMHNHRKRSREADVRSTKSATHPVNGAPRRLLQFAVRDAVRTVPPVTSGSESASKRLCSVVSTLASDSTLDITHIRLQKTNSDLRIPVATAALRAAAEAAEDALKDSFCGSVFSRLGRMPTINSSEQSPDRRSQDLEGKEYENIDNIQAENQVEFYGRNQHGGSDVYMRDRRTEEATGSLSNIDEYGHNSSVRYNGLGSLRSALPASGGKESLVLGYVRGASEVRSGRLIAQGPPAGSGPRSSEKILNVSGNTNTQKLPTHVTRDDLAFDPQVPMEKVADARKSHVKIAHANDMSMTTDKSKDLIQSSSMLEAQKATSGAAGSNTTGQPEGGSDSRTVFVSNVHFGATKDALSRHFNKFGAILKTHIVTDGVTGQSTGSAYIEFLHKESAEQALTLNGASFMLRILKVVRKNSTEATRSPGLLRVSRGSPFASRLIRTAYPRPTFPGAIRGRLPLRGVAQSLQWKRSATDSSNAVKPSQAAPSAPGNQLVTPTPRSFTYTRTEPKPNDGAMA

SEQ ID NO: 58618 - protein, 938 aa, Zea Mays
MASRHRNASPVTAGKDSPQPASAATSLRLVAEFPLDAPEAKESVTVTVRFRPLSSQEVRLGEEIAWYADGDTIVRSEQNHSIAYAYDRVFGPTTTTRHVYDAAALHVISGAMEGINGTIFAYGVTSSGKTHTMHGDQRSPGIIPLAVKDAFSIIQETPKREFLLRVSYLEIYNEVVNDLLNPSGQNLRIREDLQGTFVEGIKEEVVLSPAHALSLIAAGEEHRHVGSTNFNLLSSRSHTIFTLNLIDLAGSESSRAETTGVRRKEGSYINKSLLTLGTVISKLTDGKATHVPFRDSKLTRLLQSSLSGQGRVSLICTVTPASSNSEETRNTLKFAHRAKHIEIQVSQNKIMDEKSLIKKYQNEICQLKEELDQLKRGILSGTPSKDATEDNVILWKQKLEDGNVKLQSRLEQEEAAKAALLARIQRLTKLILVSTKATQTPRLSQCPRPRRRHSFGEEELACLPHRRRDIVLDGESNDLFVAMEGFDETFEVSSKGENKNRKGLLNWFKLRKHDGGSNAPSLGGDQSSLRKALAAPWTPVEIGLNSQTEQEMSNSPENLSANLLSIDHEEFHSDGLYGEEASLVTRKTSDHVDLLREQLKILSEEVALHKSVLKRLVEGAGRSTMNGHVEIEMKKVSDEIKDKQQQIAHLERQIKGELDQLEHTPSHATLLEQVNEKAFELEVKTADNRILQDQLQQKTRECQALEETVAHLHEQLSQALEANDLLSESIIFQQYTDNNLQTGSQIHIENPESIDISDELHQKAEQSEIDELKQRLCELTEAKTQLETHNQKLQEESMYAKGLASAAGVELKALSGEVTKLMNHNERLANDLALARNSTRVRSGHRVGRRDSYTKRLEPASRRDVHASSERESALEVMLMAKDQREAELQKKIEESKQKEAFLEGELANMWVLVAKLKKGQVIDQDDVSMPYPMDRDS

SEQ ID NO: 58619 - protein, 101 aa, Zea Mays
MSRAFGNRLLKQFVVADPEIQDLEIDGDTEFLILASDGLWDVVPNEHAVAFVKDEDSPEAAARKLTEIAFRRGSTDNITCIVVEFCHDKMVDGSPPSTNKS

SEQ ID NO: 58620 - protein, 221 aa, Zea Mays
MYSVKKTYWFDIYKNIDKIPHVKCPVLVIHGTKDDVVDCSHGKRLYELCQHKYEPLWIEGGDHGNLEKFPVFIRHLKKFLLSIKKLPSEKDAAAEHEPRAAENRTQHGGEAISEAPPRMISRRLESSKKSTIHEAKPRPSSEHTDKRRRSTGHREKARSSTDRRERSRRSVDCFDSILEHEQPEKPRKSFDRIGEKIRAMGLCNVDCFKEPPDSTELSRGS

SEQ ID NO: 58621 - protein, 1195 aa, Zea Mays
MGMDTSMHNVGPMQLLHWKGQEASVKAVMAMRCFQHQTHQEDSTSLPSLGRNLPNAIEEIRRMRSNLNDNSNKARERSRAFGGAMAKIDKLCPNIVRKRSRGDSSSNERSSVLSSGGVTPKNVPQSHLNADDMEAGLQREERTKNAGQNRRIRTSMVEMDARTAGPSRGPGPTDRISDPGKATNGSSAVPEEKIRGLATTIDGWEKPKMKKKRSTIKADMSLAGVLRTVDVDRESKQGMQHKFTNDGRARMTSSSFRSGTVASGTTKADLLSTQNGLVMRPLNRSDQDNGFHPTNKRERQAALDKETPNPRTINKPNEDDSGCNIASLPKANGSARGPRSNSGSILKSYPNIHRSQASSDDWEHPSGTNKLISAGGSGIHKRTKSTHSLSPPIQWGGQRPQKISRSARKSNLVPIITTDSALVPGSLDSPVNEDCAGLPRRASVNSLQQTKRGDHGLSTGPEGNEPVVAEKKLRDKGKRAGELDDGHGSGFQKIAMLGHPSKRNKLPADEDIGDALRRQARVVPGFTLTRPGTPVSIDKLENAPITKQRSVRTVSERTESKSGRPLMKKISERKSNARPRHTSSSVQSDSPVQSEDDHEELLASANAALRSACASTFWRQVEPFFAFLTAEDITYLSQQIHLPDDSSSSRSMEGGECQKYKGGLEYISHPSTPAASNKDDHAALPNGFGLNQLDNDIGVGWEASCIEPILDQLVHGIGVPGWSSVGQRLIQALIDEDRIDSITNNTYISEGYAFDTHEIHFDGGGWKPHSNNYKLEPLANFEASRRGPNGLTMDSDWKYNDVSNRSGNVMDKTKVWPEFQYSEMCFNDRIIIELSEVGVSIEPVPDLAQSEDEDINAEICKLEGQLRKEVVEKKNLLLKLDGIVATAKESQHREFSRLAMDRLLLRAYEKYMAFCGPNVSSSKNVNRTGKHAALSFVKRVLVRCQNYEEAGTSCFDEPIFKDMFLSATSHRRSLDTASQDNNTTARPVHRAGAPDASRGSSHPTDLSFAKEDPWTNNVKQRELLLDEVVGSITGGALRTSSSVLGISLVSNTKGKRSEREGKGHNRDSLRSGRPSPSNAKGERKNKTKLRQKAANISAPSGGLQLPAKTTPPSSGNGKEESAAAAAAAAARHGGDPAANASNDAEMPDLANLELPGLDADFGGWLNLDDDDALQDLDLMGLEIPMDDINEINLMI

SEQ ID NO: 58622 - protein, 241 aa, Zea Mays
MFSCWKIRTYTCQVHYFWPATSDARSMYEAMWHDITDQSGENIVSVTIPVMFGRSIEIPQSCNGVARFDFEYLCGRPVGAADYIAIARNYHTIFISEIPAMSMKIRDKARRFITLIDELYNHHCRLICLAASSIDDLFQGTEEGPLFDLESFQFETESEGTKLRRDVLAEGNAGSGPSTTGLVAILSGQEEMFAFRRAISRLIEMQTPLYLERVLAVHPSFRRPGLARNNRPAVPQPAPAV

SEQ ID NO: 58623 - protein, 446 aa, Zea Mays
MPFCLPVLFPTAHALALRMILQLGVKPSWFECNSSDKLTGDSFKVAPTFGDLRSYMIETTLPPIGDAVVAELLLKVLEPYRKEGCILDDGRASLYSAIVNKGACARFAFAAAIFGDFQEALFWLQLPQALRHFLGKSTSRSREKISQSSLHPDSEQSSRFNRIASRERSASEKSSIFVQNYGQLSSMAFNQEQLWFNASERIPWHDKLDGEDALQKHVHELVSLGNLEAAVSLLLSTPPEGSNFYPNALRAVVLSSAVSQSLHELAVKVVAANMVRTDKSLSGTHLLCAVGRYQEACSQLQDAGCWNDAATLAASHLHGSDYARVLQRWADYVLRGEHNMWRALILYVAAGALPEALDTLRKSQRPDTAAMFLLACHETYSQALSESEPEDDTSVLALTPTPEQTEKLRFPSKNVADEDLIAVSEVFGQYQQKLVHLCMDAEPTSD

SEQ ID NO: 58624 - protein, 107 aa, Zea Mays
MQTLNRARELYAQRLQASPSVDELASLLAQCAIAEAQSSNTNPPQGPGSDPVNMLNSDEACILAESGRKQIILDAFADGSSFICLKCGGLFSTSRKDEHLAYWCGTA

SEQ ID NO: 58625 - protein, 263 aa, Zea Mays
MLVIIAEVFVNIYFFSIDFARASIFYCNTMNSHGAGSHSRLLDLNYPPAEGAGEGASRFSSIPVSHREGSSSMPVQHIQASSSTPPATGEPRIGMRSCPIDVEAIDDDAVIYSSRPLPRARQQLTTTESITIIIDDDSETNLETAGDALDEHVNLLLSLGIERSHEPTSATNTFPGISMVDTPKVNTFKWIQVPPEPVKEVPKEPKLSCPICMNEITEAASTVCGHIFCQPCIKAAIKAQKKCPTCRRKLTPRQQHRVYLPSP

SEQ ID NO: 58626 - protein, 206 aa, Zea Mays
MKASSKVKKEPTAQKKSAGAAGSNAKTSKVKKIKDEDLEDLKEDKKRKKRVGVKEEAKLALAIVKGEKVKKERKVYGLPGQKHDPPEERDPLRIFYESLYEQVPTSDMAATWLMEWGLLPVDVARKCFEKKQGQKVKSPVKAIVAKRIPSSPAKTLPSSAKKLVMPSNSAGKLKSQKKRKASDDTDDDDDDDDFVASKAKTKRHKA

SEQ ID NO: 58627 - protein, 142 aa, Zea Mays
MGSSAPVSGRFPWGEQDVAVCSASRSHPAQPAAERSSVTLPLSTTSVNLTQRQEARGQPASQPSWTTGGRDEWRGLFGGESGRQLISLHQFGESDGDALPVPDLGQRARAGRPAAWLVAAATRDVEARLPWAVPYAESDASV

SEQ ID NO: 58628 - protein, 240 aa, Zea Mays
MREILHIQGGQCGNQIGAKFWEVICDEHGIDHTGKYAGDSDLQLERINVYYNEAGGGRFVPRAVLMDLEPGTMDSVRSGPYGQIFRPDNFVFGQSGAGNNWAKGHYTEGAELIDSVLDVVRKEAENCDCLQGFQVCHSLGGGTGSGMGTLLISKIREEYPDRMMLTFSVFPSPKVSDTVVEPYNATLSVHQLVENADECMVLDNEALYDICFRTLKLATPTCTCISQAFCHHTICSKSVT

SEQ ID NO: 58629 - protein, 1336 aa, Zea Mays
MKNLRLVTRLPQQLQLQIDGETLVASAIDAESRRAFFASSANFIYTVSLPSSSTQEQQLLQWSKTATQHSDMEEVVLDPGDRIVAMDYLMERESLLLGSSDGCLLLYNVEEKTTEVVGRLEGGVNTIASSPDGALLSVTTGLGQLLVITQDWEVLFETSLDPQDETIDNTDSTGGQSRSAISWRGDGKYFATLVAPESFSSPTKLNVWERESGKLHSSSDAKTFMGASLDWMPSGAKVATALDRRTEGKCPLIIFYEKNGLERSHFSIDEPGEVAIQALKWNCNSEILAALVSSGQHDVIKIWTCRNNHWYLKHELRYTKEEGVKFFWDPTKPMHLICWTLSGQVIIHKFAWTTAVSESSIALVIDGSHVLVTPLILGLMPPPMSLFHLAFPCAVNEVSFVTNNSKSHLAAYLSNGSLSVVELPAPDTWEEFEGNGISVDPCCSDFTLNNCMHLTWIDTRTLIGICCYSEHLSSTKIRSSEASNLVDKHDSLFFIHEIELKCSESSVPGSVCSSGWHARVSKKVQLESSVIGVSPNPAKRGSAFIQVSGGKIIEYCSSLNLLNMCPPAQFSGIGSDLCFPASCPWMTAVLCYENGMTEPLLFGLDESGKLYMGKRLLSNNCSSFTLYSSVYGATEPVMSHLLVTTKQDLLFIVDVNEVLLKDIEVTIDGLVSSPARGKQNKEYITVWEKGAKLVGVLHGDEAAVIMQTTRGNLECTYPRKLVLVSIVQALVQKRFKDAIGMVRRHRIDFNIIVDYCGLNAFMDSAADFVKQVNNLTHVTEFVCSMKNSNVSSKLYEAYISFPDQCAIPMADNESSPGLFLGNKVTSVLMAIRKALEEQIEESSSRELCILTTLARSEPPLLEQALNRIKLLRESELLGLDDAKRKLYPSAEESLKHLLWLTDTEAVFSAALGLYDLNLAAIVALNSQKDPKEFLPFLKSLECLPPAIMRYTIDLRLGRYESALRNIVSAGDAYHEDCMKLLNDNPQLFPLGLQLFNEPDKRNQILEAWGDHLSGEKCFEDAALTYQCCSSYQKSLRAYRACGDWRGVFTVAGLLELKREEIVQLAHELCDEFQALGKPGDAARVALEYCSDAERGVSYYIMAREWEEALRVAYMLSTHDLVEAVRDAASECAASLIAEYQEGLLKIGKYAARYLAVRQRRLSLAAKLRSEDRFMDVEDDSVSETSTSFSEMSAYTTRESSASVMSSNASKSRAARRQKKGGKIRAGSPGEEMALVEHLRGMALTGGAQNELKSLLVALIQLGKAETARRVQEAADSFEVSQRAAVKLAEDTVSSDRVEERAHTLERYVRMLRDRESGHGEAGGTWRINALSPPVTG

SEQ ID NO: 58630 - protein, 581 aa, Zea Mays
MSARLRVAELRAELQRRGLDVSGTKPALGLAKARGVAANGGKKDVIQRLLSATADPAAVADGGPQGEKEVIKGGDEEVEVKKEKMVTATKKGAAVLDQHIPDHIKVNYHVLQVGDEIYDATLNQTNVGDNNNKFYIIQVLESDAGGSFMVYNRWGRVGVRGQDKLHGPFPTRDQAIYEFEGKFHNKTNNHWSDRKNFKCYAKKYTWLEMDYGETEKEIEKGSITDQIKETKLETRIAQFISLICNISMMKQRMVEIGYNAEKLPLGKLRKATILKGYHVLKRISDVISKADRRHLEQLTGEFYTVIPHDFGFRKMREFIIDTPQKLKAKLEMVEALGEIEIATKLLEDDSSDQDDPLYARYKQLHCDFTPLEADSDEYSMIKSYLRNTHGKTHSGYTVDIVQIFKVSRHGETERFQKFASTRNRMLLWHGSRLSNWAGILSQGLRIAPPEAPVTGYMFGKGVYFADMFSKSANYCYASEACRSGVLLLCEVALGDMNELLNADYDANNLPKGKLSTKGVGQTAPNMVESKVADDGVVVPLGEPKQEPSKRGGLLYNEYIVYNVDQIRMRYVLHVNFNFKRR

SEQ ID NO: 58631 - protein, 131 aa, Zea Mays
MALTSEGKLYGWGWNKFGQVGVGNNDDHSSPGQVSFPEDQKISQVACGWRHTLALSEKKNVFSWGRGTSGQLGNGEIVDRNTPVLIDALSSDGSACKKLESSTAAPFAAKVWVSPSERYAIVPDENVSSIS

SEQ ID NO: 58632 - protein, 719 aa, Zea Mays
MEPAVATAGEGQRFKRIPRQAWSGNLELGPLLNESLDHWPHLNELVQCYKADFVKDDCKYGHYESVASPSFQNQIFEGPDTDIETELQLCNARHSKSEDATEDDTPSTSGRQIYETESSGSSSKVHCSLSPLPAYEAAFDWENERSLIFGQRVPESIPAISNSGLKITVKVLSLSFQAGLVEPFSGTICLYNRDRRERLSEDFYFHMLPTDMQDQGSLDRRGVFSLDAPSPSVCLLIQLEKAATEEGGVTPSVYSRKEPVHLAEKEKQKLQVWSRIMPYKESFAWAMIPLFESNRAGGLSDAASPSSPLAPSLSGSSSQDSIVDPISKLALDGKVNHYSSGSSVIVEISNLNKVKESYIEDSLQDPKRKVHKPVKGVLRLEVEKLHDDHNDVDNASEGGSMANDLNDAGDINNGRSNRSSFDGIHSSVNSIAIAKKDAHHNGHTSNAENVDNFQAFDFRVLTRSEPFSQLFHCLYVYPLTVSLSRKRNLFVRVELRKDDSDIRKPPLEAVHPRERNTMLQKWGHTQIAVGTRMASYHDEVKISLPALLTPQHHLVFTFFHVDLQMKLEAPKPVIIGYSVLPLSTHIQLLSDVSLPILRELVPHYLQESGKERMDYLEDGKTVFRLRLRLCSSLFPINERIRDFFVEYDRHTLHTSPPWGSELLEAINSLKNVESTALLQFLQPILNMLLHLIGDGGETLQVAAFRAMVNILTRSVAFTT

SEQ ID NO: 58633 - protein, 263 aa, Zea Mays
MSLCSLSGSKHHARTLKDEKSLTLSVSGCKSEIQQDSCKMCSAVERNQACSGIPLISTSQCPDVDGMLGRRENPGEHEAMRKMKNEFMVNWDGLRTREKERVLVLAATNRPFDLDEAVVRRLPRRLMVNLPDASNRRKILSVILAKEDLADDVDLETIANLTEGYSGSDLKNLCVTAAHRPIREILEKEKKERASAEAENRSLPPSHTSNDVRALRTSDFIHAHEQVCASVPSDSSNMSELVQWNDLYGEGGSRKKTTLSYFM

SEQ ID NO: 58634 - protein, 68 aa, Zea Mays
MGCPVVVQRRLQLGHKGKAPHRLHLLLRWRGRVLLLPLLTSTFMFLVQGERAGKDHRLMCGVPNASHL

SEQ ID NO: 58635 - protein, 80 aa, Zea Mays
MSGARHVFLLLCQFVNYLEVVRLPVYYPSEQEKDDPKLYANNVRKLMAVEGNLILSDLGLAEKRVYHAALNGLLCQSYFG

SEQ ID NO: 58636 - protein, 453 aa, Zea Mays
MATADQSRIFMKDVKRVIIKVGTAVVTRHDGRVSTGNFGVLCEQVKEINALGYEVIIVSSGAVGVGKQRLNYRKLVNSSFADMQKPQTELDGKACAAVGQSGLMALYDMLFTQLDVSSSQLLVTDSDFENPNFRERLRETVESLLDLKVVPIFNENDAISTRKAPYEDSSGIFWDNDSLAGLLAIELKADLLVLLSDVDGLYSGPPSEPQSKMIHTYIKDKYHNEITFGDKSRVGRGGMTAKVKAALVASNSGTPVVITSGSASGSIIRVLQGEKIGTLFHKDASLWEPSSDVSACEMAVTARECSRRLQNLSSDERNKILLDVADALEKNENLIRTENEADVAAAQDAGYEKFLVDRLTLKPGKISALAKSIRTLARMEDPINQILKRTEIAENLILEKTSCPLGVLLVIFESRPDALVQIASLAIRSGNGLLLKGGKEAMRSNKVLHKQRG

SEQ ID NO: 58637 - protein, 147 aa, Zea Mays
MDALRAGESGEDHRQVLGRRRPGRGAGLQVPEGRAAVHAGRDEAPARHAEGRRHADGRVGRRAGDGQQARHNQRLHGPQGQEHEESERQRGHAAYVLLDVPVLPHGALLALAVERVHAGLHGVHRGVGSRVILDPFVKDWSGWLVVT

SEQ ID NO: 58638 - protein, 443 aa, Zea Mays
MSGLNHALCNEERILGGLGASTTGDEMSDLPYCLRMHRSEISRAQYVDVRELRIYVGTWNVGGRFPPSDLDIEEWLATEEPAEIYVIGFQEIVPLNAGNIFGAEDNRPVAVWEHIIRETLNKNCSDKSGFKCHSDPLSPSRFNPSDVVLSMEHGLLSESDKDSDGELHPLIERDHNCGLQAKTNENLEAFPEDNLACDAIIDNRTKRKRPEFVRIISKQMVGIFLSIWVRRSLRKHIKNLRVSTVGVGAIGYIGNKGSISVSMSVHETPFCFVCCHLTAGEKDGDDLKRNSNAEEILRRTVFNPENVVGMPMRIYDHKRIIWLGDLNYRINLSYERAHELISKQDWDGLFERDQLKRELRKGCTFDGWFEGVISFAPTYKYEFDSENYVSDESESGRRTPAWCDRILSYGKGIRLLSYKRGELTLSDHRPVAAVYVAEIEVFH

SEQ ID NO: 58639 - protein, 1232 aa, Zea Mays
MDPRRAPPRGGGGLSYSTLFNLEPLQNLRVPVPENLARYGNSSSNGSPSSEGQGSLLDQYNGVHDASHGLHRKRKKHPDGAGDDDHADAYSNKMMEDHYRAMLSEHVQKYRSHGGLSEPLPQFESLKERVKVQKFSLQVTEDPFAIPEGAAGRIRRSIISETGNLQVHYVKVLEKGDTYEIIERSLPKKQIVKKEPFVIVKEESEKTYKLWQYLATKSIPKHHRNFTSLMKKRQVDAKRFSDSCQREVKFKVRRSLKLMRCAAIRTRQLARDMLIFWKRVDKEQYELRKKEEREAAEALKREEELREAKRQQQRLNFLLSQTELYSHFMQNKAGGSAPPDEEDVPDEDEEEDPEEAQLKREALRAAQHAVSQQKMRTNAFDSETVRLRQTSESVLPTDDSSSMDPSKIDLLHPSTMPEKSSVQTPELFKGVLKEYQLKGLQWLVNCYEQGLNGILADEMGLGKTVQAMAFLSHLAEDKNIWGPFLVVAPASVVNNWAEELIRFCPDLKILPYWGPERMILRKNINPKRLYRRDASFHILITNYQILVNEEKLLRRVKWQYMVLDEAQAIKSSSSQRWKTLLSFSCRNRLLLTGTPIQNNMAELWALLHFIMPTLFDSHEQFNEWFSKGIEGHAEHGGALNEHQLSRLHAILKPFMLRRVKIDVIAEMTKKKEEIVPCKLSSRQQIFYQAIKNKISLNELLDGSRGNLNDKKLLSLMNIVMQLRKVCNHPELFERNEGSSYFYFADIPNSLLSPPFGALQDVHYAGKRNPIIFEIPKLVYDGIICNTENSGSICGFQNGYLNRLFNIFLPSNIHRSAIPEVNSSNESVLSSGAFGFTRLSNLCPVEAFFLATSSFFEGLAFSVMRWNRNYTDEIMDAFLDSEDTDIQFSQNDSTRVRAVARLLLSSTKAKPSLLRTKIGTGPSEGPYEALVLSHHDRLASNIRVLRSAYTYIPPARAPPINVSCADRNFAYKFTDEMYDPWVMKLFLGFARTSEFNGPRQPVALHPLIQELNTDLPILEPMLQLPYRIFGSSPPMSNFDPAKMLTDSGKLHTLDMLLRRLRAEGHRVLLFAQMTKMLDILEDYMNFRKFKYFRLDGSSAISDRRDMVRAFQNRNDVFVFLLSTRAGGLGINLTAADTVIFYEIDWNPTQDQQAMDRTHRLGQTKEVTVYRLICKDTIEEKILQRAKQKNAVQELVMKGKHVQDDHLLRQEDVVSLLIDDTQIAHKLKEISMQP

SEQ ID NO: 58640 - protein, 168 aa, Zea Mays
MQVHANEGGVTQTRGGIYWIILPAGYLGSSFWGMVFILASTNLLTTRIAAGCFILALFIVLFVADNWFLRWLCLGFIVFIAVVWVIQEFTSFHILKYVILFIGVMNSLFSVYDIYDDLISRRVNTSDAEKFAEICPCPCNGFAWGVIWGFISFIFLCASIYLGLVILS

SEQ ID NO: 58641 - protein, 508 aa, Zea Mays
MSNKEEKECQMTKEEKRRKKREKHKDMGQSGDYEGKAVMSNKEEKDCQVTEEEKKRKKGKKHKDKGQGSNSDSSCARNHSIEMEQADVSAKMAEDSCLEHAEAVTSKSSAKKHRKKKRKDKEVETIGQKQILDADENVGSEDTKRNSREREHDRKSKKHKRKHQDDETASNGSSGNQIVLGEDKRTEKEYLVTLDLEEDNKSDMSKIGKKTDSKKKRRKERNDGVDLRQNTLVGEGKNGKNNKEKKMCEDENGGGEREKENMGKQKDKCRRVSFTDHVEVFNIGGSDDVEGDGSGETELVHGRRFSPEEDAKLMEAILKYAELKQLGEKGLQMIGESNKHPETRGCWAEIGKALPHRPKKAKYARGKVLLQRSAERKWTAEEYEIIRRFVEKNGRNWKVLAKELGKSEIHVKDTWRRIKFKNLKRGTWSQDEYQNLFDLVNLDMRVKAHQNINTGHRHIRDNISWEAISEKLTTRRAEECCTKWYGQLASPLVKQGIWADTDDYIQNE

SEQ ID NO: 58642 - protein, 128 aa, Zea Mays
MQKQGQAPFDSSAVDNMRRLLEHAGVPGHIYPLSLLCYEVMPPPQQVEKEIGEQRVISFHGAGLSVTEEINYGDITAHTKNADEGRELFTNTLYNSVVNQYNVLKSAIFRDRGAAVSNNVISLSQPWR

SEQ ID NO: 58643 - protein, 99 aa, Zea Mays
MPPPEPRRRATIREQLSALANGKVDEFTLPLGKRLKEGLKRLNSLTVSQRRNIKRQALLTQVSGRNDSVFFATVGAFVLVPPLAILAIGVLTGYIQLFP

SEQ ID NO: 58644 - protein, 821 aa, Zea Mays
MRCPGALHFQDINATQIKYGIQTNSTPVARRGTYEDPTFKFQIPLQVAAEREMARLLIGDPNFSWTVGFKEFAHPATETFSTIAQAGPTFFLAIAMFGFVFQISALVAEKELKLRQAMSTMGLYESAYWLSWFTWEAFLTTLSALFTVLFGMMFQFDFFLHNNFGILFLLFFLFQLNMLSFAFMISTFVAKAASATTVGFAIFIIGFLTQLVTTFGFPYSSDYKKLYRTLWSLFPPDLFAKALNILGKATATPEDKGFSWNQRGECPSFETDCVITIDDIYKWLISTFFLWFVLAIYFDNILPNVNGVRKSVFYFLMPSYWTGKGGKMEEGGLFSFFGSSRPADDATPTDEDVLAEQNLVKEQAANNAVDPNVAVQIHGLRKTYPGTFSIGCCCKCSKSKPFHSVKGLWVNLEKDQLFCLLGPNGAGKTTTISCLTGITPITGGDAFIYGHSVRSTVGMSNIRRMIGVCPQFDILWDALTAKEHMELFASIKGLHPAAITSVAEESLAKVKLSQVTNARAGSYSGGMKRRLSVAIALIGDPKLVFLDEPTTGMDPITRRHVWDIIEEAKKGRAIVLTTHSMEEADILGDRIAIMAKGKLRCIGTSIRLKSKFGTGYIANVNFSGNGHMQSPNINSNTEAPVNPNIEAVKWFFKERLDVNPKEESRTFLTFVIPHHKEPLLTRFFGELQDREGEFGISDIQLGLTTLEEVFLNIAKQAELETSTAEGTLVTLNLSSGTTIQIPKGARFVGIPGTETEEHPRGIMVEVYWDQDENGSLCISGHSDEMPVPVHAELRRPPSLSRRASMDRGRPVGYMIDLNQVP

SEQ ID NO: 58645 - protein, 58 aa, Zea Mays
MRTSILFRLCNRGSSTVLVRLALACTLCWLLGAYTLLAAAGVSAMHAGPWPCPAWRRG

SEQ ID NO: 58646 - protein, 721 aa, Zea Mays
MEGVWRKAKRALGASLCVRLPAVAGDREDGASERRASDALSLDSTAAAHASAPNTPAAPGTGALRRSKSGGKSSKRMCAICFDSMKPGLGQALFTAECSHMFHFHCISSSVKHGNHVCPVCRAKWKEIPFNRSLSSIVPRGRGGLNVNQARLPQQGAYMALLRQVPNRQREGPVLVTSEPSDFNDDEPLHKMEPANIGSSRTVEIKTYSEFSAIQQSSQDDFAVLIHLKAPYANPEQVIGRPVNATSVGYPTARAPVDLVTVLDVSGSMAGTKLALLKRAMGFVIQHLGPSDRLSVIAFSSTARRLFHLQRMSHSGRQQALQTVNSLVASGGTNIADALKKAAKVIEDRSHQNPVCSIILLSDGQDTYNIPSNIRGARPEYSSLVPSSILNRTFGLVPVHGFGFGVDHDSDALHSIAEASGGTFSFIEDEGVIQDAFAQCIGGLLSVVVQNMQVNVECVHPGVQLRSIKSGSYHSKVAAHGRNGSIDVGHLYADEERDFLLSVSLPHCREQTTLLKVACAYRDSLTNEEIKIQGGEVAILRPRSPVSEPVCMEVDRERNRVRAADAIEAARAAAERGALSDAVSILEDCRRILSETFSSRSGDRLCMALDAELREMQERMANRQRYEASGRAYLLSGLSSHSWQRATARGDSTDSDTLVYSYQTPSMVHMLQRSQNHCPSPQGPSQPRVLVKPQPRGGEAGLEVNIIWLGILGNLRWGLWW

SEQ ID NO: 58647 - protein, 677 aa, Zea Mays
MPVLRSAARRAREAQGHPAAADEKAPEAAAAALAAAPAPPPVEKRRRVTRAEEREREEIRPREVVAGEGGDDEGERGMDEPDSAARSADKLTFDDEDGPTVPEAVQVGSSPKYRVDRKLGKGGFGQVYVGHRMSATGPGAVEVALKFEHRTSKGCHYGPPYEWTAYNAIGGIHGFPRVHYKGRQGDYFVMVMDMLGPSLWDVWNNKSHIMSVEMVSCIAIEAICILEKLHSKGYVHGDVKPENFLLGTPGTPEEKKLFLVDLGLATKWKDIATGRHVKYDQRSDVFRGTFRYASVHAHLGRTGSRRDDLESLAYTLVFLLRGCLPWQGYQGDNKSFLVCKKKMATFPVSLCCFCPHPFRKFVEYVVNLKFDEEPDYAKCASLFHSVLSVVGSNPDVRPINTDGAQKLIHQFGQKRGRFFIEEEADEQPKKKIRVGMPATQWISVYNGRVPMKQRYHYNVSDSRVGQHIEKGNADGLFISCITSCSDLWALIMDAGTGFTSQIYELIPHFLHKEWVMDQWERDYYITAVAGANNGSSLVVMSKGTKYTQQSYKVSNSFPYKWINKKWQDGFYVTSMATAGSRWAVVMSHNAGFSNQVVELDFLYPSEGIHKRWDRGYWITAAPATCDQAAFVLSVPRRRLTDETQETLRTINFPSKHVKDKWSKNLYLASVCYGRTIS

SEQ ID NO: 58648 - protein, 1111 aa, Zea Mays
MVFKGRFFSSRHKSSESSSSPDGSNSPRTPTSAPASASAASPASSSSSRSDKKKTKSETPKKRDKLFGSAATAPKSAASSASSSPAGDGRKGSVPHHRDAGVGGGGGASAAALSPILASSLGLNRIKTRSGPLPQEGQRMAAVIGSSNLSRGQGQAEPSAASAGVGGRKGVTSWADTSSSSRGKGKTTELPMRSTAGTSLGPVGKSAVKAKPSAQRNHSGDLRTPTHIPEAACAYDPCETPKESESPRFKAIMQATSAPRKRLPADIKSFSHELNSKGVRPFPFLKPRGIYNLKEVIKVIHVRFEKAKEEVNSDLAVFAGDLVSVMEKYADSHPEWKDALEDLLILARTCCVMTPGEFWLQCEGIVQDLDDHRQELSMGVLKKLYTRMLFILTRCTRLLQFHKESGFAEDEVVIDQRDKIIQSADRQILTQSGVGDTTSRASKSEARKSYSQEQHNLKWKRSQEIKPVNLLPPLDTDVKKVADSPTKERISSWKPFPSPVTKVPKESTPTKLESPNKKTDAHSTVSSHVELSSPVESLPQQQLPVKHQHKTSWGHWSDQPNISEEGSIMCRICEEYVPTQYVEDHSRVCAIADRCDKKGVSVDERLIRVAEMLEKMVESYSPKDLPNAAVSPDVAKVSSSSINEESDGPSPKLSDWSRRGSADMLDYLQETDNTISLDDIKNLPSMTCKTRFGPKSDHGMATSSAGSMTPRSPLTPRSNHIDMLLAGKNAINESGDLPQIVELADIARCIANTPLDEESALSQMVTCIEDLQEIVNRRKHEALTVQTFGTRIEKLHREKYLQLCDSVDMDKVDSASTIMDEEDDVVRSLRASPVHPVKDRTSIDDFEIMKPISRGAFGRVFLAKKRTTGDLFAIKVLRKADMIRKNAVESILAERDILITVRNPFVVRFFYSFTSRENLYLVMEYLNGGDLYSLLRNLGCLDEDVARVYLAEVVLALEYLHSMHIVHRDLKPDNLLIAHDGHIKVGLINSTDLSGPAVSGASLYGDDEPQMNELEQMDHRARRQNRSAVGTPDYLAPEILLGTGHGCSADWWSVGVILFELIVGIPPFNAEHPEAIFENIMNRKIPWPHVPEEMSFDAQDLIDSNRSFLSL

SEQ ID NO: 58649 - protein, 310 aa, Zea Mays
MDQSQRKCIQVLVTKEGKSSDFGVCMYGTNIGSQLFRAQNQSSAKTETLHSDTLIGSKSPAGIASLSAQKDYGCTDEAKSEQLVAPSRRGDSGYGKEDGFHNVNEGHDVWSKATIGSKQSCMPGTGITNLDLILSQMSRMRNQISIGRIQPPIGAEPSDRWLKRLQPDIPDPDIPGSRRPNVGGSPPLRQRNRSFDMALPCNRTDTGTTDCVMEDQSLDKVEKTQEKQESTPIPAKSVNSWIGRWCQGGTPVFHEGPGQGRQATKPGRPSEELEGRFPSIAAMAMMGRAMNKLRPCEHQKMGPLVVWKTD

SEQ ID NO: 58650 - protein, 707 aa, Zea Mays
MAEETANDAQVAQDNEIALSNEAIQGDDLVQGNELVVSEVTTPTIGTRRRRKKSLVWEHFTIEAVAGGATRACCKLCKQTFAYSSGSKIAGTSHLKRHITLGSCPKIKNQEQRLALPSTGGTDNDGEGTIERRTKRRYRYTGYANAAFDQDRSCSYLAKLIIQHDYPLHIVQQPSFAIFIESLQPRFKIVDVETMEGEVYAVYQKEKENLLQAFNSMPGRISLTIGLWTTSQTLGYVSLAGQFIDSEWKVHRRMLNFMMVSSPHSENALSEAISMSLSDWNMKDRLFTITLDNECSSHDIYSANLRDHLSNKNNLMLKGQLFVVRCYAHILNAVALDVIASIHGVVYSIRESIKFIKASSAREEKFAEIALQLEIPSTKTLCLDVTTQWNTTYLMLLAALDYKQTFTTLETCDDNYNEAPSAEDWKKVEAACNYLKLLYDSAHSIMAAANPTANIFFHEAWKLQLELANGTGHEDPTFSSIAKDMHERFDKYWKDCSLVLAIAVVMDPRFKMKLVEFSYSKIYGAGAAKYVKVVDDAVHELYKEYVAQPLPLTPAYVDQGEGNNGPANANSSQGAPASTGDGLLDFDMYLSEIQSSQPSKSELEQYLDESLTPRIQEFDILNWWKLNTVKFPTLSKMARDILAIPVSMVSSGSSIFCAGTGSHMLDDYRSSLRPEIVEALVCAKDWLQYSPPATEAPSSALVKAQGS

SEQ ID NO: 58651 - protein, 341 aa, Zea Mays
MKPNQLITSHVDIHRVYPYEFQPEFSMSHDLGLNLFSQAGTVLGTSLRHHRKISSSGNAMVHGAFNRLNKLSRALYFWLSRPSDPKILRWVASVAATSSRSCQLRFNQMGSHMQNLTKLQFSFPMREEQAVQLILARLASATIGRLLNEQQRACNLLTLAGAVAIVPPLENISSMMLAESITSRNIDSDIRRLVDQPYVEGKCLSCACPSVPSTIFQEDPIEPKTGIKFPTFLEDDSSPSAAVLVGIGFKGMRVMRVKNLNLYAFGLYMQPTSIREKLGPKYASFPTDKLMENPDFYSDLLRENLDIRVRLVVNYNGLSVGAVRDVFEKSLGLRLQKTFTA

SEQ ID NO: 58652 - protein, 133 aa, Zea Mays
MLPHPVPLRKATVPMDMCRTGIPATQSIPQPQDQEYIQARCTHLPHSMQRQGASLIPHPLLRHTMQHQGASLTPHSQLFLVLLHNSCTLRSRCCLSMEISREAHPELANRRHQHHTTVELKSSFAIVLNLFCH

SEQ ID NO: 58653 - protein, 132 aa, Zea Mays
MLSGSLTFSMTLSRFVICSYSTFCSYPPEVVKEMPKEVLVKEVQRLQLALEEQTEMANHSQQQCDRLRNERILCRICFERDICIVMLPCRHHVLCEPCSNKCQSCPICRLTVEGRLFVYDAVMSSNPSCYAV

SEQ ID NO: 58654 - protein, 125 aa, Zea Mays
MVRNILVPGVADPHGKWHSCKHDIDQCSASQLRVLQGFRGDFLKEVAELGNSDSRGLFINSCFVHCQSEIQELWFSSDSPVLGNTTVANAVGDWFFDRSSFQKIDCPYPCDSTCHNRIYDDSSQA

SEQ ID NO: 58655 - protein, 336 aa, Zea Mays
MNYVLKPWPLGEWFYLVIKFGLVQYMIIKSICAILAVILESFGVYCEGEFKLNCGYSYTAVVLNFSQSWALYCLVQFYTVIKDELAHIKPLAKFLTFKSIVFLTWWQGIAIALLFNWGLLRGPIAQELQFKSSIQDFIICIEMGVAAVAHLYVFPAKPYELIGDRLVGDVSVLGDYASVDCPLDPDEVKDSERPTKFRLPQPDDHVRCSTAIKESVRDVVLGGGEYIVNDLKFTVNHAVEPINEKLHMISENIKKREKGKKKTNDDSCIGSPTSLTRVISGIDDPLLNGSLSDNSGPKKARRQHRKSGYAGAESGGESSDHGLGGFEIRGNRWITS

SEQ ID NO: 58656 - protein, 158 aa, Zea Mays
MSTAQRSDRSSGSKPWEMHSYSQQRPGYGSNSQLSDDGSYSDAQDSYAPSYHQNGKAPDFQADEPRPLTYNTGVEERPPPQRRWVPPQPPGVAMPEAAAAIRQPKALPKQPSSDASEAAGEMQVNGSSASDAVTEVPVNGATASDAGRSEIQEQSVAA

SEQ ID NO: 58657 - protein, 455 aa, Zea Mays
MAEILVRRAGSTDEFTRLTSITWINEFVKLGGEQLVPYYADILGAVLPCISDEEEKIRVVARETNEELRAIKADPAEGFDIGAILSIAKRELNSEHEATRIEALHWFFTLLDRYCAEFLAYLNDIFDPLLNALSDPSDAVVLLVLEVHARIAEESHHFHHLVSYLIRTFHNNHFVLEKRGALIVRRLCVLLGAEKVYREFSTILESEVDLDFASVMVQVLNLILLTSTELGELRSPLKKSLVDSCGKDLFQSLYASWRHSPMATISLCLLAQAYNHASCVIQSLGEEDINVNFLVQLDKLIRLLETPVFAYLRLQLLEPGKHTWLLKTLYGLLMLLPQQSAAFKILRTRLKTVPFSENLKRTSSANPYSQILQVTEDGNRNQDMQNYSAINFPFLLQQFENMQLQHRNHLKDQLQSRKSASTLTLSQEIQRYEEAHSSSLSEINRPPSRTSKGIL

SEQ ID NO: 58658 - protein, 526 aa, Zea Mays
MGNCCAAPSTEGSGKTRPKKQKENPYNVAYNRGAAAPPPPPARPGLVVLRDPTGRDLGAEYELGGELGRGEFGVTYLCTEPATGARYACKSISKRKLRTPVDVEDVRREVDIMRHMPPHPNIVSLRAAYEDRDAVHLVMELCEGGELFDRIVARGHYTERAAAAVMRTIVEVVQKCHRHGVMHRDLKPENFLYASKDSSPLKAIDFGLSVFFRPGSPYYMAPEVLKRNYGPEVDVWSAGVILYILLCGVPPFWAETEQGVAQAIIRSVVDFKREPWPRVSEPAKDLVRRMLDPNPLTRFTAAQVLEHPWLHDSKNTPDVSLGDTVRARLQQFAAMNKLKKKALRVIAEHLSAEEVADIKQMFDKMDVNKNGKLTFEEFKAGLRKLGNQMHDSDLQILMDAADVDRNGTLDYEEFVTVSVHVRKIGNDEHIQKAFAYFDRNKSGYIEIEELREALADELDGSDEDIIGGIIRDVDTDKDGKIGYDEFAAMMKAGTDWRKASRQYSRQRFSNLSLKLQKDGSLGADTR

SEQ ID NO: 58659 - protein, 237 aa, Zea Mays
MFTDSHERLVLCAYWICVIYVSVRRFYSISKQSKTERILLRKYYHLVAVLIFSPAVIFQPAFLDLAFGAAFAVFLILEMLRIWEIYPLGRVVHQFMNAFTDHRDSEILIVSHFSLLLGCALPKWMSSGLNDRPLAPFAGILSLGIGDTMASMIGYKYGVLRWSKTGKKTIEGTAAGITSVLAACSILVSLLASSGYILSQNWLSLLIAVTLSGLLEAYTAQLDNAFIPLVFYSLLCL

SEQ ID NO: 58660 - protein, 144 aa, Zea Mays
MYLEDRTVRLQLWDTAGQERFRSLIPSYIRDSSVAVIVFDVASRQSFLNTSKWIEEVRTERGSDVIIVLVGNKTDLVDKRQVSIEEGEGKAKDLGVMFIETSAKAGFNIKALFRKIAAALPGMETLSSAKQEDMVDVNLRRRYH

SEQ ID NO: 58661 - protein, 536 aa, Zea Mays
MTLKDQSILANGDINEDADMLENIEIGEQKQRDEAYKASKKKGTYDDKFNNDSSSKKSILSHYDDQMEDEGVTLDEGGRFTGEAEKKLEELRKRIEGGYVQKKTEDLTSTTKISTDYFTPDEMLKFKKPKKKKSLRKKEKLDLDALEAEAIASGLGAADRGSRNDGKRQSAREEEQAADAEKRSSGYQTAIAKAEEASRALRGEKTAPAKPAEELVFGDDYEDLQKSLEQARKLALRKQEEASASGPRSIVELATATKSQEETEATEGDSEQNKVVITEMEEFVWGLQLNQGTRKPEDDVFMDEDDDAMPSDNVAKDDTNGLAEMEEDALTEIPAKVEEDEVKPDEVIHEVAVGKGLAGALKILKERGSLNEGTDWGGRTTDKKKSKLIGVEDGPKDIRIERIDEFGRVMTPKEAFRHLSHKFHGKGPGKMKQEKRQKKYHDELKTKHMKSSDTPLLAAEKMREAQSRNQTPYLILSGNAKTGQTSDSGGYATLETEQPGSLTPMLGDKKVEHFLGIKRSAKPGSLPPPVPKKPKN

SEQ ID NO: 58662 - protein, 807 aa, Zea Mays
MNLDTALRLFLETFRLPGESQKIQRVLEAFSDRYYEQSPQSFANKDTALLLSYSIIMLNTDQHNMQVKKKMTEDDFIKNNRNINGGSDLPREMLSELYHSICRNEIKTTPEQGLGYFEMSPSRWIDLMRKSKSTSPYIIGDSQPFLDHDMFAVMSGPTIAAIAVVFDHSEHEEVLLTCIEGFLGVAKISAFHHLEDVLDDLVVSLCKFTTLLNTSLVEEPVTAFGDDLKARLATETLFTIANRYGDYIRTGWRNVLDCILRLHKLGLLPARVASDAADDSELPAEAVQRKAAPSSVPPSHIPVMGTPRKSSGLMGRFSQLLSLDSEEPRSQPTEQQLAAHQRTLQTIQKCRIDSIFTESKFLQPDSLLQLAKALIWAAGRPQKVASSPDDEDTAVFCLELLIAITLNNRDRIVLLWQGVYEHIASIVQSTVMPCALVEKAIFGLLRICQRLLPYKENLADELLRSLQLVLKLDARVADAYCENITQEVARLVKANAAHIKSQMGWRTVILLLSITARHPDASEVGFEAIVFIMTEGAHLSLANYGFCIDAARQFAESRVGLADRSVRALDLMSDSVRNLALWSQEIKATTFEEGEKGPEAIREMWLRLLQALKKLSLDQREEVRNHALASLQRCLTSTGELCLQSATWSHAFDLVIFSLLDDLLEISQNHSQKDYRNMEGSLVLAMKLVAKVYLQLLPDLFGLSSFCKLWLGVLSRMEKYVKVKVRGKRSDRLQEVVPDLLKNILLVMKSKGILAKRSTIGGDSLWELTWLHANNISTSLLPDVFPSQEYEQQSSTGSPRGPSPVEA

SEQ ID NO: 58663 - protein, 121 aa, Zea Mays
MEQEASPNGTRPSSSPSPTTPRSCTSRSWTATSPTTISSAKQPSPWRPCFRKAAFPRRFTRSSRRRSTAERSSSRSPSLQQRKLAALMTTRRGRLTAAGVDLSAMGCMHHIYPPREERIIN

SEQ ID NO: 58664 - protein, 105 aa, Zea Mays
MDPAPRRISGALLEKQQSFSVFISAAVQCGRCRDACRVVLVNLNSQFLLSIPGSHIVEGSNVPKVKTENNNRLLVHTQYVFRAQVTYPALEKKKNSNLQLRSSSR

SEQ ID NO: 58665 - protein, 76 aa, Zea Mays
MNSIEPFNRLVRLAARAFYDDVSMKGDNQPKTSRGDNRGMAVVVLDALTSQQKTQKHIMLQLLMMVNQLLRREKRK

SEQ ID NO: 58666 - protein, 189 aa, Zea Mays
MTLRARVAAKAEEKRLELLYIQWTEHHKRLSNFLRTKAEPPIYYMPTKPIIDDPAIVEQNKEKVFEEWKSMRRAELTRFQKQVEEQYLSNVERQLERIQNARNARKANGPGNMQEMDKELDTHRAEHGPKPRRVPEEGGNDDDEDAEDMAAEDELMDEVLGINDAINEDPSKPSEEATTEGQPATEEAQ

SEQ ID NO: 58667 - protein, 328 aa, Zea Mays
MAEPTPKSKRTKKAKKPSAREGDGEDMDTLKSDVATFASSLGLLPGAGDSNGGFDDSDFRKSGPMYKSSKFPSKQPHQKPDNTANPHLNPRPTKKPHPLELRDSYAATKPGAVNTNYPLMKAAALSGQWYTDADELEARVLGGRKQVPPAVGLQEMQGIVERKRELAEKLMLQYAREYDAVRRGHGDLKLLDISAKSGTSADKVSAFTCLVEDNPIANMKALDSLLGMITSKVGKRYAFTGFDAIKELFLMRLLPDRKLKSLIQRPLDILPETKDGYSLLLFWHWEDCLKQRYERFVMALEDAVKDMLPNLKDKAMKRGVLCLRSIQG

SEQ ID NO: 58668 - protein, 435 aa, Zea Mays
MAGFCTPAATAAAHAALTPLTSSRKHIAMCLSPRPSGGGGIGGGQRARLASTGAAPQVRALAPTTAAEEAAGPSPAPLNVEYLAAEFAGHGVSFEPVGVSCAVKMSLRNGSVAHVLLPSGLVTSYKPAMWHGTVTEVLHTNVAEVPGGRAVIRGGVFVDLRCDGCDGVWSPSASGAWSLRDVRGSPATSIEVELASAAPGNAAAARCVVTLHPEALATELTVTNNASAASSPPMALTCSVPSHLRVSTPDATYALGLQGSDYRSVEPALSEFSIIPPGYGAARQAAAGTTARNQWANKGLDMILSGGQQDRGAADEPDGEEDDDYKHMTDAMCRVYSNAPREFTIIDREELRLLAQEGVRGAVRLQPRIPVPVVRQVCLRGRRACHAGACDAGARRHVAGGSVPAQPQSLGMLAAGRIDDPGHIKCSRTCIQIIR

SEQ ID NO: 58669 - protein, 290 aa, Zea Mays
MHHRMGRFLLLPALTLVVASAWVPITFADPQATLLNQGCSQYNATPASAFIAALNSTFASLRANLSAASSVGFATAAEPRAAAPAFAMAQCRPYVAGRDCVACFDAAAAGLRATCVAGRAANGGRAILDGCMLRYESAAFFDQSTLPGNTQLCNGSAVQAGGFADAARALVADFAAAVPRVPGLAAAAASGGVYAAAQCVETVGEAGCAQCLNVAVGNIDGCPPNSDGRAVDAGCFMRYSDRSFFPANSTTVDLAIYLRSGATLLQSMRFMANYQKRLTHTALVLSSWKY

SEQ ID NO: 58670 - protein, 486 aa, Zea Mays
MRSTYEIMVEEWNAPKPMHPSLLNEALRWTATDGQKKDLWSPLPYQGWKPCLTPSVSHKLPLEPSGYIQVFLDGGLNQQRMGICDAIAVAKILNATLVIPHLEVNPVWKDSSSFEEIFDVDHFINSLKDEVSIIKVLPKEFSWSTREYYGTGIRATRIKTAPLHASANWYLENVSPILQSYGIVAIAPFSHRLAFDDLPVDLQRLRCKVNFQALVFRSHIISLGETLVKRLRSPVRVHSSKSIHQVVGDTNQAEKYAVLHLRFDKDMAAHSACDFGGGRAEQLALAKYRQVIWQGRVLNSQLTDEELRNTGRCPLTPEEIGLLLVALGFDNRTRLYLASHKVYGGEARISSLRKLFPLMEDKRSLASEDELANVEGKASVLAALDYYISMHSDIFISASPGNMHNALVAHRSYENLKTIRPNMALLGRTFANKSMEWPEFQQVVQAGHKGRYGQIRLRKATQSIYTYPAPDLPNYVLGAKLTLFEV

SEQ ID NO: 58671 - protein, 113 aa, Zea Mays
MPSPSSTFFPRSSARAPTKSRSGSNPRAAEPEAGSVEDEWTTPSILTCGRRDLQRTGDAAGRQHGGAGDVGGPAEHQPLRSPQQPPPRAPGRDQTREVTMGALQTIRLEKSRR

SEQ ID NO: 58672 - protein, 419 aa, Zea Mays
MHARFLSAPSPASAAPSPYVRLAFTGALPRRACWKPRGPASASAPPPRPLHSLCARASMQPASPAHDGHGGPPVHGVSNTVIGVLGGGQLGKMLCHAASQMGIRIVILDPLPGCPASSVCDEHVIGSFNDGDTVREFAKRCGVLTVEIEHVDAATLEKLEKQGVDCEPKASTITIIQDKYRQKKHFSRYEIPLPDFMEVDTLRSIEEAGEKFGYPLMVKSKRLAYDGRGNAVAKNKEELSSVVASLGGFERGLYVERWTPFVKELSVIVARSRDNSTVCYPVVETVHKENICHVVEAPADVSNKIKKLATSVAEKAIKSLEGAGVFAVELFLTEDDQILLNEVAPRPHNSGHHTIESCYTSQYEQHIRAILGLPLGDPSMKAPAAIMYNILGEDEGEAGFFLAHQLISRALTIPGTSVH

SEQ ID NO: 58673 - protein, 861 aa, Zea Mays
MVTEMAARGGEAAAFGAEADRGDFEVFRSGSAPPTVEGALGAAAAAADLLVDDDLRADPAYQSYYYSNAHLNPRLPPPLLSKEDWRSSHHRLRSAAFGGIGDGRRQQQPAAQGTVGLPGIDLARQRSFSTVFQEDSYQRDMDRQTASHNSSESLCSSGIQYGLNRGPGTIGGLHSSNSLRSLDEIPNNDLPSNTFASLLGSSLSRSASPDPELVRRAPSPSLPPIGVKVGNTDKMNGGSSSFRRSSSAIGGSDDLVAALSGMNLSSRAMSGQTMDQSQLYQDVDNVQKFLFDRQGDQPNGNQQHYMRRPEHGQSKLSDGYSANLANSSTMRNQINSGSFTSFDSLSLGSGFPSPRIGSRSPGGTVSSRQNLAGMSNMLNYNGIGSPTASPSLQTSIDPAYIQYLAQIAATWDDPLMDRSHLGSSYMDLLGTQKANLGPLLQSQKQYGYCGNLGFNLGGYAGSPLTSPVLPSSPIAPGSPLRHGDRNMRFPPGMRNFGNSFGSWNSGMSGKMDANLMPSLLEEFKSNKSKSYELSEIAGHVVEFSADQYGSRFIQQKLETASTEEKDMVFSEIMPQALTLMTDVFGNYVVQKFFEHGSTAQIKELAGQLIGRVLALSLQMYGCRVIQKTKMVAELEGHVMRCVRDQNGNHVIQKCIECIPQHAIEFIVSTFYGQVVMLSTHPYGCRVIQRVLEHCDDPKTQQIMMDEILQSVCLLAQDQYGNYVVQHVLEHGKPHERSAIIEKLIGQVVQMSQQKFASNVIEKCLAFGNPVERQVLIGEMLGSTSESEPLEVMMKDQFANYVVQKVLETCDDQQREMILTRIKTHLNTLKKYTYGKHIVARVEKLVAAGEKRLGLQPACTAA

SEQ ID NO: 58674 - protein, 94 aa, Zea Mays
MCRSRQAGMLSSRKEAGIGEKRVVMGTWREQWAPVPVAEAGALSLVAGEAGTGVMAVVADAAGRRQSVVEVAGMAGIGRWCWRQQRGGWRWSRW

SEQ ID NO: 58675 - protein, 102 aa, Zea Mays
MQHKADHGRCYRFRSRHTEFMHLRIGMKAPSAVLEDGTTVVVKRLKEVVAGMREFEQQMELIGKVCQHQNTVPLRAYYYSKDEKLLVYVPLGNKAAGRTPLD

SEQ ID NO: 58676 - protein, 716 aa, Zea Mays
METNLRAQSPLCSRTRPALAVRPDAAATGLTLSVIRRSRFTRGGLVRCMVSSSDYHKSSPRRTSTSKSKGVPSGGYASRPTAESSTKKIEQSSDDEGDFSRTNGSLYGEAAEQASTAEESSQVYSTGDISSSAERGEAGTEEEADQNQSSALFSVSVDDDSIDRKLDEYRGKISALASSKPKSSSLASVAGQNEPVGGQEEPVTGSKEHDSSIVDAPIRGRPFAEAVVGYKDFTESVAGMAASKNEEEQLVSLEDVVGISTDADIEAPVEDDVDPEVLLRRLQELADENYLIGNNCFSFPEVVMADSMIDLYLNRSMSALASESNVFVKGAFNGWRWNAFTETMHKSELRGDWWCCKLYIPKQAYRLDFVFFNGDTVYENNNHNDFFLEIESGIDEHSFEDFLVEEKRKELERLAAEEAERKIQAEEERKRGEERAAMEADRAQARSEVEMKKEKLRQLLSSASRYADNLWYIEPNTYRGGDRVRLYYHRSSRPLMHDTEIWMHGGYNNWIDGLSIAERLVKSHEKEGDWWYAEVTLPERALLFDWVFADGPPGNARNYDNNGRQDFHAIVPNNISDDIFWVEEEHRIFTRLQQERREREGAERIKAERSAKMKAEMKEKTMRAFLLSQKHIVYTEPLEVHAGTTVDILYNPSNTVLNGKTEVWFRGSFNRWTHPSGPLPPQKMVKAENGSHLRTTGVQNIQCIATFQWTIFYIKY

SEQ ID NO: 58677 - protein, 170 aa, Zea Mays
MPTSKACRERMRRNKLNDRFLELGSALEPGKPVKADKAAILSDATRMVIQLRSESQQLKETNGSLEEKIKELKAEKDELRDEKQKLKLEKESLEHQMKLMASAPAYMPHPTLMPAPFAQAPLAPFHAQGQAAGQKLMMPFVGYPGYPMWQFMPPSEVDTSKDSEACPPVA

SEQ ID NO: 58678 - protein, 827 aa, Zea Mays
MDVHLFPVDLLGLRNSNVWLLLWGKLTSVIRISENTLHSCSDRGKSENKISEDSLGPEVGEQTGKYVINAQAAESSDGTINWNTYCTFARPRIFCLQHALEIEKLLEGKGGVHGLIICHSDISLAKASKSDLHLINISIDDEGHEEDGRDWTSQMGLNLKYSAKLRKEKSENQEQSPLPFGGLLSCPSPVSVVPNLKWLCKRARTPYTVIGTMRGSSATATAAELKPGVKTEIFTNGNVCEDDNRHHSFRQTGLEQPGGLQDCDKPSCSEENGHGRHCLVNIPIAVAEYPMMHQVREGPVSVSTCNDSICLSGSLDLPPHASPVEVTRYLGCIQSTELSSLPAFSVQHFFNDESTSVEGSIDCVSNGCLESQDDILGSRDERLQVQQYQEKMGLRNNPNMKSVDSHLIEGLAVSEGKHGETVAAFLENKERCAKTSYCSNTETKTTKSAIDNRLETHHLGTGPVKLNSSFNEMHSADRQCSLVFGCLDSADVPASTQALSVSPVLMSDEQQVDDAHSAVKAIEHLGNNLANIKHKSLHMDVLMLEDAQVASMAAVPGHEGESVEAGSNSFDILLGALAEESKAADAPGKDEVGKASLTLITLASNEPSVTEGRVVDVVETDTILGAGKDDKQLDQPHGFHLSDLVSRCIGSSNRSDIICYVRRKHKRKRDYSCFVRSPCESLRPRSKPAVVEESEWSRTAEASFAKRGKRTQAVGSFQCDIDLCDMAFETRAELNAHKRNICTDESCGKRFSSHKYLKRHQCVHSEMRPFKCPWEGCKMTFKWLWAQTEHVRVHTGERPYKCSAPDCGQTFRYVSDYSRHRKKFNHY

SEQ ID NO: 58679 - protein, 130 aa, Zea Mays
MLLYNGKTRKFQVRDCLKQNEELRSHLEKLRLEQVSLLKVSNIATQSDGQTENSISNPPQMVIENISLKDQLIKEQSRSEGLSAEIMKLSAELRKAVHAQNNLARLYRPVLRDIESNLMKMKQETYATIQ

SEQ ID NO: 58680 - protein, 170 aa, Zea Mays
MARKTLDQPEGCQMDLKDSLSKFKQQQERCQSSLASIAASTSKPKHRAQPAHAPNVPARPSQPIKFSNDTERLQHINSIRKSPVGAQIKLVIELLYKTRQAFTAEQINEATYVDIHGNKAVFDSLRNNPKVSYDGRRFSYKKVPRRSCCCGSQGCIFKCIGRFAGSEGCW

SEQ ID NO: 58681 - protein, 97 aa, Zea Mays
MMNQHREEDALRGQAVKNQKTLEMRFLLQKAFSTSNKLPQEPIRARFCNHDKQIEQAYDDLLNSSKQTLSSMMELQEAMLESNQATKGANGIATLHI

SEQ ID NO: 58682 - protein, 677 aa, Zea Mays
MPWSQMSVTSQWHPFLRRWILSRYKKLCDSCKPAVVSEVSSCLKVLGSLSEPSDDKSHTGNESSVLEKLDNNVRENMRPDELISSSEQGALAKTESVDNYGNKFSQNKNVDMVRSDNQKSDELTDAKLDDFKGGTVVSDAQHQGSRSDLLMPKSVYDSAGGSTSLTSPGQHFGRAKHLFSEPFDIYGTYVARDVISVSKELWVGSLGNRATEALVRSKFEEFGPLVNFLFYPSRKFSLVEYRNILHAVHACGYMQGSSIWGGFLQVKYLDRLIGSKGVIRGIAIGESRHVYVAKVKNKKDKDEVFDDLKMAGLKWPSGITDIPGENALLLEFETAVDAATAKFYIRHQARPNVCSRDMNLPGHQLLVQNIDHSVPDIDLINAFSQFGEVIRWQINRADSNCFIVYRSQDAAARAKSHLHGARFGLKSISIESRTYSAGSVHDKTVSPVAPLLGQSVPDNSVRHEIRNPIVPGYHAGYAAPGDRPIYGPPPPNTSRAPQGNFPCPPVSTHHGSVMPPPPIQTSFVRPMYPGPGSPWENTTPNPPPFSHVSPRMMPGSNFRVNPASLPFVPSCVTPVSQLPGGSAQHSEKMPPSLPLPTVAPPPFTPLDMPPTHPPPLPISQPPSVPPPPNSPPPQPFADSSDSQKPSSHPQWQGPLLKSGLHYCRIYASRIEFGCLQI

SEQ ID NO: 58683 - protein, 253 aa, Zea Mays
MEFMETDLHQIIRSGQELSEEHCQYFLYQILRGLKYIHSAGVIHRDLKPSNLLLSANCDLKICDFGLARPSSDSDMMTEYVVTRWYRAPELLLNSTDYSAAIDVWSVGCIFMELIDRRPLFPGRDHMHQMRLITEVIGTPTDDELGFTRNEDARKYMRHLPQFPRRPFASLFPRVQPLALDLIERMLTFNPLQRITVAEALAHPYLERLHDVDDEPVCTEPFSFDFERQALTEDQMKQLIFNEAIELNPSFRY

SEQ ID NO: 58684 - protein, 441 aa, Zea Mays
MALARPSSALLSCSSSACLRRLNPLLLSAAACRRPAWAPRRVARRFSAAIASETDVFNSPEVAKSFDFTNEEKIYKWWESQGFFKPNFDRGGDPFVIPMPPPNVTGSLHMGHAMFVTLEDIMVRYFRMKGRPALWIPGTDHAGIATQLVVEKMLAAEGVKRTDMTREEFTKKVWEWKEKYGGTITNQIKRLGASCDWSRERFTLDEQLSRAVAEAFVRLHDKGLIYQGSYLVNWSPNLQTAVSDLEVEYSEEPGNLYFIKYRVAGGTRDDFMTIATTRPETIFGDVAIAVNPEDKRYAQYVGKLAIVPLTCGRHVPIIADRREKQVLALLSKLDVQNVHFTESAPGDANQSVHIVADEGLEAYLPLADMVDVSEEVKRLSKRLSKMQSEYDALVARLNSPSFVEKAPEDIVRGVREKASEADEKISLTKNRLTFLQSTITT

SEQ ID NO: 58685 - protein, 181 aa, Zea Mays
MRIPPLPASSQAREPHAAPAPAPSALGQAALARRRGEASRCHPWARPRRRCTRRPPLPRRARTTTTTSSPSSSSTRWARRPCSPSPPRSRSRRLPSRCSSPLPPRPRLARLPAAPRPLETRIPPLPLGTIVSVFDGHNGPDAPTPTDTEPSSARVTGAPSTLDSPPHRGPFPSPSDQRLPS

SEQ ID NO: 58686 - protein, 361 aa, Zea Mays
MKELQSFRGHTKDVTALAWHPFHEEYFVSGSFDGAIFHWLVGHEAPQIEISNAHDSSVWDLSWHPVGYLLCSGGNDHATKFWCRNRPGDLTRDRYNSGQMQGFGDQHAAFGARGMGGFQMPEPPITPGPFAPGLSRNEGTIPGIGVAMTLAGQSFDGSDGEQRPSIPGLPPGQPPLPPGPHPSLLGQQQQYQQIPQQQHPQFSQPPPPNMPQLQAPAHMLSHSQGSRPTLPQLPPMGGPSVPSQVNPPLPPMPHPTSQMMPQMPQHMMGLNQMHAGSVPPGTVPPMGGFPSGMGNIQGASGSSGVQNFPMGGMYNRPQGQMAPQGQMTSIPGLSSYQGMGNVGLTPPPPQHPPPRGGSATQ

SEQ ID NO: 58687 - protein, 248 aa, Zea Mays
MYGGDEVSAIVIDVGSYSCKAGYAGDDTPKAVFPSVVGSIEQTEDTDDPKPEKEADSASDSKNGAKPMDVDKAKTKRRLYVGQELEFRRDHMEVISSMKDGTVTDWDIVDNIWNHAFRRRLLINPEEHPMLIAEPSTNTAQQREKAAELMFENYKVPALFLAKNAVLTSFASGRATSLVVDSGGGSTVVSAVHDGFVLQKSVSTSPVGGEFLTDCMMKSLESKGIVIRPRYSFKKKEISPGEYKEALT

SEQ ID NO: 58688 - protein, 53 aa, Zea Mays
MMYRMCVFGDLLVAFAEGVNLATVCTSPVTYIYKSAKMNGFTYSLQFFIECFT

SEQ ID NO: 58689 - protein, 197 aa, Zea Mays
MRGWATPGTSRRKNPSNRATGRRRRWATAAHGRRMPSSLRTRKPSKNANADRKHTCMSSDISDPSTPRKVEDAKNISIYNDVIAFTLFELETITKSFRVDYVLGEGGFGTVYKGYIDENVRVGLKSLPVAVKVLNKDGHQGHREWLTEVNCLGQLRHPNLVKLIGYCCEDDHRLLVYEFMFRGSLENHLFRTVTNYI

SEQ ID NO: 58690 - protein, 412 aa, Zea Mays
MEMNTRLQVEHPVTEMIVGQDLVEWQIRVANGERLPLSQEQVPLNGHAFEARIYAENVPRGFLPATGTLHHYRPVPSDPTVRVETGVEEGDTVSMHYDPMIAKLVVWGESRTAALVKLKKCLSTFQIAGLPTNVDFLQELASHSAFEKGLVDTHFIERYKDDLLSISTKSSKESHGVAELGAILAAACICKKEHITSKESLRANKSLSVWYNNPPFRMHHFARHPLDLELEENDGFSEKLLKLFITHKFDGSYFIETEDGTSGLDVKVDHKGDHDFRVDVSGLQTDVTLASYSKGNSKHIHVWHGNHHHHYRQTVRAEHAVEDSSQPSHASEGKSHPKGSVLAPMAGLVVKVLLEDGAQVDAGQPVMVMEAMKMEHVVKAPRAGYVSGLKVTAGQQVFDSSVLFTIKDSSAN

SEQ ID NO: 58691 - protein, 152 aa, Zea Mays
MMACRNPRIGTKIEKRTRTEIVAETVTEIEGETGTVIGIGTGTGIGTETRIAKVGITVKDGNSETVLMITESVILKEEENATKMGIVGIVLGLVQGVEIEDLGHVQEASELVDSTPHPRKQWVQHFQLFQPQATMYGNKANLGSLASLLPVE

SEQ ID NO: 58692 - protein, 61 aa, Zea Mays
MEHGYHLGLRHNMLITRRLSQVTRINKGNLLCRMFCIRENGCPQEKCRTLCIKGINKMLMG

SEQ ID NO: 58693 - protein, 341 aa, Zea Mays
MADESVIVKGNGTIFLAGPPLVKAATGEEISAEDLGGASVHCKVSGVSDHFAQDEIHGLELGRNIVKNLHLAAKGTNIQSSACGYQEPLYDVEELRSIAPADVKQSFDIRSIIARIVDGSEFDEFKKLYGTTLVTGFARICGQPVGIIGNNGILFTESALKGSHFIELCAQRHIPLIFLQNITGFMVGSKSEASGIAKAGAKMVMAVSCAKVPKITIIVGGSFGAGNYGMCGRAYSPNFLFLWPTARISVMGGIQAAGVLAQIEKNNKRRQGVEWSKDEEEAFKAKVVEAYDREGSPYYSTARLWDDGVIDPADTRRVLSLCLSASAKPVPEDTRYGVFRM

SEQ ID NO: 58694 - protein, 755 aa, Zea Mays
MNIRHHNIVLFVGYCAETQEVVVRQEGKHIFAEKRERLLCFEYLHNGSLHKHLTAEPCGLPWHICYQIIKGICLGLHYLHDKNIIHLDLKPDNILLDDDMVPKITDFGLSRLLGNGKSHTITQTRIGTWGYMAPEYLDDGVITMKTDIYSLGVIIRHMVKGRNSADTTDEEVLANWLIRLEKDPSQMMRQQTTRLLFETEYKEQIKACMDISWRCTLRKPMDRPTTQHILLTLEETEAKIKSVVGPTPPNAGQLQIAKFGPWGGDGGKTRDIRMTPCHLHSVTISSGTIIDSIGFSFTDHYGQHHTTGPWGGKEGTNKIELGPSEFLTGVSGTSGPFKNLTNVVTSLTFVTNTRSYGPFGKGRGTPFHIQTQNNGRIVGFFGRSGQYLYAIGVYTNQDARVARIGRPLGGDEGVLHGITDLSGQQRSRGGGPSGECGDSDDEPNGDFAKFGPWGGDGGQPQDIGTLPCRLDRIKISSGLIIDSIEFSYAGPDSQYRTAGPWGGHGGDNSSFQLAGSEFLTGVSGSIGTFNGHANVITSLTFVTNARSYGPFGRGRGTSFHIPVQGNGCIVGFFGRSGRYLNAIGVYTAPKPEPKAGGDEAVVARIGPWGGVGNALHDIAERPHRLHRVTIFSGTIVNSLEYLYSDGDGQQHTTGPWGGCGGTGRKIHLAPEEFIVEVTGTFHPCAWDRTIPSVVSSLTLVTSTGKTHGPFGTQLGAAFQVPVQSDSRIVGFFAHGDNYIEAIGAYVKKLTESSNR

SEQ ID NO: 58695 - protein, 598 aa, Zea Mays
MPKTPPVNASKNTEPQKQSAPNLTITNGHTSTKVVVKKEHPINDVKHISTWVCKNLACKAVRPAEDSFCKRCSCCICHKFDDNKDPSQWLVCSSDNDSKNCCGSSCHIECAFREKRAGCFDLEQIIHLDGSYSCASCGKISGILGYWKRQLVIGKDARRVDNLCQRIYLSYRLLEGTVHFKELHEIIEDAKAKLESEVGPLDGMSAKNAHGIVSRFSAGIAVQKLCSTAIQRADEWLSSPDLHLRDSLPVACRFKFVDITSSSLIVILKETSSSDTIKGYKLWYWKSREQPSMEKPVIVSKDERKILLYDLTPCTEYSFRVISFTDDGVLGHSESRCRTESREIFVMRAPKNAVGGGATHAQKKDRNQSCKSTGFKIRDIWKNFQEALDAEGCFEGFSEDVHEGSCSRSVTETELSGACRKLHFNSSSVPDLNAEVPVPVDYTENHYYSKKGLVRSNDSGDSETCAVGQTAEPPAVESRQVSKVNSVPVNKCEQNGASAICHEKMLSGSTRQLDGDYEHCVKVVRQLECDGHIENGFRMKFLTWYSLRSTDQERKAVSTFVRTLSNEPSSLAEQLVDSFGEILNSKKAKTGFCSKLWH

SEQ ID NO: 58696 - protein, 935 aa, Zea Mays
MWATLHKPVAHANLRLLLTVSAFSGPLHLGTASAVAAAVTTRRSSSSRGVAATAMPSSSPPPLPPAEETTASAAALAPEGGFSLTEPSFLESLMPKKEIGVDRFLAAHPEYDGRSALIAIFDSGVDPAAAGLQTTSDGKPKILDVLDCTGSGDVDTSKVVKADADGAIVGASGARLVINPSWKNPSQEWHVGCKLIYELFTDTLTSRLKKERKKKWDEENQESISDALKQLNEFEKKHPKPDDTMLKKAHEDMQSRLDYLRKQAEGYDDKGPVIDIVTWNDGDVWRVAVDTQTLEGNNDGGKLADFVPLTNYRLERKYAIFSKLDACSFVANVYNDGNLVSIVTDCSPHATHVAGIAAAFHPDEPLLNGVAPGAQLISCKIGDTRLGSMETGTGLVRALIAAVEHKCDLINMSYGEPTLLPDYGRFIDLSNEVVDKHRIIFISSAGNNGPALNTVGAPGGTSTSIIGVGAYVSPAMAAGAHCVVQPPAKGMEYTWSSRGPTADGDLGVSISAPGGAVAPVPTWTLQSRMLMNGTSMSSPSACGGVALLVSGMKAEGIPLSPYSVRKAIENTAASISNAPEEKLTTGNGLLQVDRAFEYAQQAKKLPLVSYRISINQVGKSVPKLRGIYLRGGNACCQTSEWTVQLDPKFHEGASNLEQLVPFEECLQLHSTDTSVVQIPEYILVTNNGRSFNIVVNPANISSGLHYFEVYGIDYKAPWRGPIFRVPITVIKPIALLGEPPLLSISNLRFQSGHIERRFINVPFGASWAEVTMRTSAFDTPRRFFLDTVQIVLHGISIDQKVSTLDGESPLLIVARSLLASEKLVPVGTLNKIRIPYRPVECNLSSLPTDRDKLPSGKQIIALTLTYKFKLEDNAEIKPHVPLLNNRIYDNKFESQFYRISDSNKRIYSSGDVYPSYVRLSKGEYTLQLYIRISFH

SEQ ID NO: 58697 - protein, 225 aa, Zea Mays
MFGKVCDEHEGYFVHEALSIAIDCLQLDIQMRPEMEHVLFRLRIIVARSKLAAGSNNKPSQHIGRALVNNIDKLHPTLISTISMEELNEATGNFSNDVLIGQGPYAECFLGVLKDGQNLAVKRLRTSEEIQVEVPTILRMCYHDNVVQFLGCFLEGGTRVLAYEYAPRGSLHDILHGKMGIKGARPGPPLSWLQRVKIAVTLVFQYMMPIAGFIIGPSTILSGNI

SEQ ID NO: 58698 - protein, 143 aa, Zea Mays
MGQHLHNPSAATTDTSCESVVTSGQHHQQQNPAVPCPQRDANNPARVTIESNMNCCRLGANGWDEAWSGFHWNHRCFAQLQWRSRPSRSRSGSRTAPAYSWDVCFHGYVVYLVRVRRGGRKRPLPKCIIYGNPKHQGITQLKF

SEQ ID NO: 58699 - protein, 273 aa, Zea Mays
MAPTAEPSSRPPQWRPRTGPPPGLKNLGNTCYLNSVLQCLASTPPLATFCLASRHSNQCKKVFPNRDNDCALCVLERQIARLLRADAGALDSPAKVIRCMPLFAEHFRWGRQEDAHEFLRYVVDACHTADLRMRKGLRAAAASGNCGEDVRGQGVCLVMRETFGGALLSQVKCLECKGESNKTDEIMDISLDLPGSSSVADALSRFFHPETLDGANKYCCERYAVLYLKRNKWFLDEGSMYCKNFHCLLAKDAKAVLRCFRVDNNIFSGNKIM

SEQ ID NO: 58700 - protein, 965 aa, Zea Mays
MDLPSLAVVLRAALSHVPEERKAAEESLNQFQFTPQHLVRLLQIIVDGSCDMAVRQVASIHFKNFIAKNWSPNDPDESPKVLESDKAMVRENVLGFIVQVPPLLRAQLGESIKTIIHSDYPEQWPSLLHWVSHNIDLQNQIFGALYVLRVLARKYEKILATPLKATKLEIPKQLFDPNVFNAWMVLFINLLERPVPVEGQPMDPEIRKSWAWWKVKKWTIHILNRLYTRFGDLKLQKPESKAFAQMFQKTYAGKILACHMQLLNAIRSGDYLPDRVINLVLQYLTNSVTKNSMYQMMQPQIDILLFEIIFPLMCFNDNDQKLWEEDPHEYVRKGYDIIEDLYSPRTAAMDFVSELIRKRGKNNLQKFIHFIVDIFRRYDEAPADLKPYRQKDGALLAIGTLCDKLKQTDPYKTELESSMGCWAVCPYQLFRPEQFSSGYALYVSGMRDPDLPVRVDSVFALRCFVEACKDLNEIRPILPQLLDEFFKLMNEVENEDLVFTLETIVDKFGEEMAPYALGLCQNLAAAFWRCMASSEADDEADDSGALAAVGCLRAISTILESISSLPHLFLQIEPTLLPIMRRMLTSDGQDVYEEVLEIVSYMTFFSPTISLDMWSLWPLMMEALNDWAIDFFENILVPLDNYISRGTDIFLASKDPDYQQSLWDALQSIMMDENMEDSDIEPAPKLIEVVFQNCKGNVDQWVEHYLRITIARLRRAQKPYLKCLLVQVIANALYYNPALTLESLNKLGVAADIFNHWFAMLQQVKKSGARVNFKREHDKKVCCLGLTSLIALPADKIPAEALDRIFKATLELLVAYKDQVAEAKKENEEAADDMDGFDADEEDDDEVDSDKEMGVDDEDGDEISSLQLQKLAAEARGFQPADEDDDSDDDFSDDEELHSPIDEVDPFIFFVETVQALQASDPARFQNLMQTLDFRYQALASGIGQHAEQRKIEIEREKSEKANAQ

SEQ ID NO: 58701 - protein, 222 aa, Zea Mays
MAGRREGEHQASPWRSGTPAAEEDSGAFPSAIIFFALVGATATTAAVGQLRRTVSWFYTQLSRSEPYVFWEDIPRRPNRHRCGEAWERYHQRMRDRTEDQRERVERIRHMQDVFKKERSKCRDYRNWDSHNPNYYQHHQRDDWYWNAEAFYANQRTNFRAMTREAMTYTMSHHYSVLGLDRSRSEPFSDAEIKNAFRRKAMEYHPDQNQNNKGIYVLRNFLF

SEQ ID NO: 58702 - protein, 203 aa, Zea Mays
MLLSAGPKLSQNSTDLEHEVAMNLCFLPKQTHIYIWYICQFVVTILLLVFWPTNGLGSLPCMNTFMSFMRSVGAELLSRTKEKDDEDDGDYDMVFDAEGSMHLVKKAVAKTPSASSDSRPTGRGSVVARATAGRHRLEPDSSIRVDMGSEMTSEDGGKLARAGKSGARKVLQRLFRVIQSVLVIAALNAPLYMMLLFKDWIDR

SEQ ID NO: 58703 - protein, 114 aa, Zea Mays
MLFFPSSIKRKDSFVRDRALVLRELYSAAQRESCIGQQEILERENLPRAETSIHGIVTNIVRYDTEDEKLAPPKNDLMNHSRSNPAKRHVEGTDCHSSLPKKLKYFLKDKKLNC

SEQ ID NO: 58704 - protein, 378 aa, Zea Mays
MASDNRASVFPFAAAVLVVLLAGGAAADDASSDDDAGTSRTPGCSNKFQLVKVKNWVNGTEGTTFVGLSAKFGAPLPRDIHEAKKSFAVLSNPIDCCSNLTSKLTSSVAIATRGECAFTEKANIAQASGSTGLLVINDNEELYKMVCGENDTSINVTIPVVMIPQSAGKKLKNLLHHGASVEVQLYSPNRPTVDLSACFLWIMAVGTIVCASLWTEFVTCEQVDERYNQLTRKDGPDTGTKYREDKEVFEISAKGAFIFIIVASVFLLLLFYFMSSWFVWVLIVLFCIGGIEGMHACLVTLLARIFKDCGQKTVQLPVLGEVLILSVGIVPFCAVFAILWAVYRHASFAWIGQDVLGICLMITVLQMARLPNIKTVFW

SEQ ID NO: 58705 - protein, 687 aa, Zea Mays
MATLVRPPALHVRAVSGGGNKDRVAPQRPWWGGNKPISPRQSGGSGARGGAGGGGVALDQVLGVLRRDGEFVQAAVGAPLRDVFWLRFLEKKQRKQQQPRPKHKPFRQQQEEEEVVVVDESPPAFPPPSYPSGLSCVELMAADFQALKVYAGSARHSLARRFLGSNSKGKSEQQPKPKPQEQQKEQQHILQAPAFPPPSYPPGLSCMELMMADLEALKLYINYYSAILTTPLPQHYDPDLLAQYFASRPHILASRVIQILFTFLSAVVKMRISKRAQLTTDATYSSGNSGNGFDDTQYMVGQLLKETFLNLGPTFIKVGQSLSTRPDIIGSEICEALAELHERVPTFPREDAMKIIEGEFGCPVSHMFSYVSDEPVASASFGQVYQGRTVDGSLVAIKVQRPDLLPSVLRDIYILRLGLAFIRKIAKRRSNISLYGDELGRGFVGELDYNIEAANATKFMEVHSRYPFMLVPKVLKQLTRKRVLTMEWVAGENPKDLLSLSKGVSEKFTQASDNQKLEAKSRLLDLVNKGVEASLVQLLETGLLHADPHPGNLRYTPEGRVGFLDFGLLCMMERKHQRAMLASIVHIVNGDWASVVYDLTEMDVVPPKTNLRRVTMDLEDALGEVTFEDGIPEIKFSKAGTSLYYRFNSVQWWLDIFVPIFYFKRSTVPNAVLFTLLLPLFIAAYTF

SEQ ID NO: 58706 - protein, 143 aa, Zea Mays
MEPSPTSSSPAVARRLSPETAAASPEAEDRKDDVGVDGDGMATSSVASDSDYETTQMCDLLKSKVGSLEFLQKLNGIQKSVDQNCAVEPDTSWDIIKSDLWEDGDSDDGYVLVKQEDVVDGITSFMAACLLSLKRTKVAIFFT

SEQ ID NO: 58707 - protein, 576 aa, Zea Mays
MLMNEKPVFPRRSRYVITTPRCYCILSRLPFFELHFGVLQSILMEERLEWLTDGVSMLTSLSLEESCENDICEGTAVTAQKHYLDSNTTDVDKSSESSNGVSSTELSDTDSSSGCRENQLDFVSKEQQQNSSCEEQSNFKREIVTCSDASEVSDHFVPEDTSSDQSGVKHHELHSAPSIPDESGARNCDDSPKENVDDEELDLFIIDTILPLMRSRLCEDCESSPSSQGSPSEGRNFDTQESDSEEPSSIGDGDLVKHNNILQWAKAKKYGSLQVVCQYYQLQCPARGSTLAFHPLEHLHSLSFHRPGETVLHIAGSTIELRSRDTSLEVAEMRNALFAEEESTALSTWAVASICGCLRLEHVMTLFAAALLEKQIVIVCSNLGMLSASVLSILPLIRPYQWQSLLMTVLPNDMMDFLDAPVPYIVGVQNKTSDVLNRLTNAVVIDANRNQIKSSSVPQLPQHRELLSALRPYHSILVGESYLARKRPVYECTDAQVEGAKGFLAVLRDYLDTLCSNLRSHTITNVQSNNDKVSLLLKESFIGSFPSRDRPFMKLFVDTQLFSVHTDLVLSFYQKD

SEQ ID NO: 58708 - protein, 434 aa, Zea Mays
MIIVNIVHDISRMFGRGSPRMNLIQAATMKKISPRSTTNKRKKRTSPKVGRLRANWNSGLEKGLVEILQDHNNDCYKGQNGWSSEAWNRIVKLFHEKFSYVTFTKCQIQDKEKELKRDYKALKEARQQSGVSWDERLCRIEAEEPIWNNLTTSNERLKKFRTKSFPLFEALGELYDGNIAEGTMNFTSIEPSRPPVTQPCQGAATQPSQAAFTLTQPSQIAFTQPSLAAFARPSRTAFRHPSLAAFPQPSQAAFAQPSQTIFTQPSEATFTQPSEATFTQPSEATFTQPSQAAFTQPSQANISQAICDEDDELRVLDPPAPASVSKRAKNVGTGNSRTRINKRTQDGNVVEMMGRFLEMKEKQAEADERATTNANEDDFPIQTCIAIVDGMEEFSDDEKVDSYDVFKDAQNRAIFMTAKDATRIKWLRKKIART

SEQ ID NO: 58709 - protein, 134 aa, Zea Mays
MLNHERPAPALRSDPGMPSSHAQSIFYAATVLALSLYYWLGTNYLTMILGPATLSLAAYLSWLRVSRGLHTLNQVMVGAVVGSAVGALWFVLWHWLVQEAFASSVLVRVAVILGSSAFCVSFVVYMIRHWLKDE

SEQ ID NO: 58710 - protein, 557 aa, Zea Mays
MARNLTDNRTRNTLVMIVIFGLCSFFYLLGVWQKSGSGGGDGIQTWVNEQTKCAQLPNLSFETHHSASNLLNDTDNSKIEPFKPCDEQYTDYTPCEEQSRAMTFPRDNMIYRERHCPPDKEKLYCLIPAPKGYVAPFRWPKSRDFVHYANVPHKSLTVEKAIQNWVHYEGNVFRFPGGGTQFPQGADKYIDQLASVIPIAEGKVRTALDTGCGVASLGAYLFKKNVLTISFAPRDNHEAQVQFALERGVPAYIGVLGSIKLPFPSRAFDMAHCSRCLIPWSGNDGMYMMEVDRVLRPGGYWVLSGPPIGWKIYYEGWQHSKEDLQNEQRKIEQFAQLLCWKKISEKDGIAIWRKRLNDKSCSMKQYNPKGVKCGLTSDSDVWYKKMEVCIDPLPNVNSVSKVAGGQLEPFPKRLYAVPPRITLGSVPGFSVQSYEEDNKLWQKYVEAYKNTNNLLDTGRYRNIMDMNAGFSTYPRTYDLIHSNGIFSLYQNKCQFEDILLEMDRILRPEGAVIIRDKVDVLVKVEKIANAMRWKTRLADHEVTEMQKTCQKDQLTLH

SEQ ID NO: 58711 - protein, 540 aa, Zea Mays
MHKIVPWEARPHIFTPTPMLHFFLAYQSTIVPSKQFQDYAKPPKVQLHNSVPQKQELPDRCMIPAKLPHASQVSAHLSGNNCLGCAAGSDLRKWAAAEKFQPSSKSSGHLNATGQKAHSLVDSEKPSNQRPAIIVKSHTTRLPVGNPDGTIVIRTDQYNRDDLRLDYMYAKFFVIKSIGEADVHKSIKYGVWSSSSSGNSKLDSAFRDADRISRRHSTKCPVFLFFSVNGSGHFCGMAEMVGPVDFHKDMDFWCQDKWTGCFPVRWHIVKDIPNGSLQHITLQNNENKPVTHSRDTQEVPYLPGMSVINIFKDIKVRYCLFDDFMSYEAEEAQKRAHRRCKLSSNAPDFVPVSQRTKDESGTEQRESRSVLVDRTSGIQNAAEKPHDTKVIKPQDPCVSEEQASEAEKENGPQGCRCSGNQGQEEAAKTATNHPPASGLKAAGAEGKQQQQRWKKVENPKQHADSVPAQCSQEEAPEKRLNGVSGCSSAVQEGCEEQRAAAKLASLKIGSRAAVEADRKTSAVGVVTIGSMPVRVDCCDV

SEQ ID NO: 58712 - protein, 322 aa, Zea Mays
MSATAESGGDLSAARRRWDLTNKGAESTPILKDAVEISTDEESDGVVTCHPNGNTDGCEETISGSHDDDSPEGQETSSIKEPDVEGDTQEDKRVNQDSLKLIDEESAPPKSPAKSATASSRSERPKRVVPRPFSLSNQRSLFGVNGGVANPLANKDKSGDKSSISPASMTKKSTQMALRKTLQPEKFYTKLEEKHKALEAEKDEAEARKKDEQDVALKQLRKSLVIRAKPMPSFYQEGPPPKAELKKVPPTRAKSPKFTSSRRRSCSDTPLTPGGENTNATSTRPHRHSIGSPRDANRVQQCSPKSGVATKTRSVKAELKAL

SEQ ID NO: 58713 - protein, 953 aa, Zea Mays
MALQLRRFLPHGYGQRHRAVTHVLSPPPPLAMLQFEVFQRYSSAPWPLSPFRPCEMCGVAFRSNSTRKMCSRNIFGVASQPKSSTFFTTGLSGNRSSVCFRARDSRGIALKTNNIVNSRPFSTIYSKKLRFLIKNKTSCNNLNVRREDGSVAHSLFCRSEKRQSTVATCSTIADEASTSTSNSSKSVTDSKTDTAKMRRSRGSKKEVDGVMKDKEVHTKKKRISSRTCIAATKTTESSSAKQENKKTDNCKLKKGTDSPKEKKVNNRSKSKAKVSASSVSSEAEICMKSSIDGSGIEKKPLVPLYPPRAKSVVVVESATKAKVIQNYLGDMYEVLPSYGHVRDLAGRSKSVRPNDDFSMVWEVPAAAWTHLKSIKVALKGAENLILASDPDREGEAIAWHIKEMLEQQGALGCDVTVARVVFHEITENAIKKALMSPRYIDMDLVNAYLARRSLDYVIGFGISPLLWRKLPGCQSAGRVQSAALALVCDRESEIEQFKPQEYWTIAQKLYEGINLSSEETTGLITYIRTDGFHISDGAAEDIRSLVKERYGQKYVLEDTRKYLKKVKNAQEAHEAIRPTSIRRLPSSLVGILDDDSLKLYTLIWKRTMACQMEASRTQMIQVDVGTPEGEMIFHSAASKLDFKGYQSVYEDTEGDSVHEDNFEALSKLMVKDLVSPVNVHLGQHFTKPPSRYSEGALIKKLEELGIGRPSTYASIMKVLQDRKYVTAKSRVLHPEFRGRMVSAFLLHHFSEVADYSFTANMETELDNVSAGLTEWKGLLKGYWERFSKYCADASNLDGRKVERMLEEKFGPILFPNVDTDNRICPSCSEGTLRFKVSRYGEGYFIGCDRHPKCKYIARSLSQQEDETEPTEECQKTFTPRLLGVMPDSDEKVFLKQGPYGHYVQIGEDKKGLFPKRASLSKPACWLGLRLVMGELGVFEGGFGRIFYKRTYAM

SEQ ID NO: 58714 - protein, 137 aa, Zea Mays
MDERGEKEEEHGVVEEETAAVVLKEVEVEMEMVGGSEEASAAPLLLAHPCSLLQLLLRACAGCLVRLLHGHCSDGANDDPKAAADDDDAAPEAAAAAAAAAGDGGDKAATEVWAVRRRPTTPGRPREGSGGNGGSHN

SEQ ID NO: 58715 - protein, 370 aa, Zea Mays
MVKFSREYEASIIPEWKAAFVDYKGLKKLVKRIKIARRDRAARSTSNDHDDATTTTYGFSVLDPVRALASHFNNATPPASPEGGSDDALRSLESDSGELVRATDKHEQEFVERADEELEKVNKFYAAQEADMLARGDALIEQLRILADVKRILADHAAASSRRGRARLARTGGNSSPPSVDGSNSGRHLLSSPFVASSPQSMSDGSVQLQQARVAEGAAVAEEVMAALERNGVSFVGGGLGKAKKDGSGKQLMGARRAAAAAGHGAHRHPAHQPRPGRAQGVGGARQRAPQGRRRPRRRLRPPQEGPARREEHPRRLPRPLPRPRPPQEVQLPQREGFHQNTEEIRQGVGAASERRPVFREGEEVAVQQL

SEQ ID NO: 58716 - protein, 276 aa, Zea Mays
MGFGSGFEGGSVPPASNSRMSALPHEPAGFYNDRGATVDIPLDSTKDLSKKEKELQAKEAELNKRERELKRKEEAAARAGIVIEDKNWPPFMPIIHHDISNEIPIHLQRMQYLAFSSLLGLTACLFWNIIATTAAWIKSEGVMIWLLAIIYFISGVPGAYVLWYRPLYNAMRTESALKFGWFFLFYLLHILFCVWSAVAPPFPFKGKSLAGILPAIDIIGRSAIVGIFYFIGFGMFCLESLLSIVVIQQVYMYFRGSGKAAEMKREAARGAMRNAF

SEQ ID NO: 58717 - protein, 59 aa, Zea Mays
MTWCSTQLLHPDNTLWQYHVVHANFSFPCIALLTIDMLSRGVLYLFVVALPQMSIGQLG

SEQ ID NO: 58718 - protein, 898 aa, Zea Mays
MPLQLEIKRKLAQRSERVKSVDLHPTEPWIMSSLYSGSVCIWNYQTQTMVKSFEVSELPVRSAKFIAQKQWVVAGADDMFIRVYNYNTMDKVKLFEAHTDYIRCVAVHPTLPYVLSSSDDMLIKLWDWDKGWMCTQIFEGHSHYVMQVTFNPKDTNTFASASLDRTVKIWSLGSPDPNFTLDGHSKGVNCVDYFTGGDRPYLITGSDDQTAKVWDYQTKSCVQTLEGHAHNVSAVCFHPELPIIMTGSEDGTVRLWHSTTYRLENTLNYGLERVWALGYMKGSRRVVIGYDEGTIMIKIGREAPVASMDSSGKIIWAKHNEVQTVNIKAVGADAEIADGERLPLAVKELGSCDLYPQSLRHNPNGRFVAVCGDGEYIIYTALAWRNRSFGSALEIVWSTEGEYAARESTSKIKIYSKNFQERKSIRPAFSGERIYGGVLLAICTNDFICFYDWAECRLIRRIDVNVKNVYWADSGDLVTIASDSSFYILKYNRDLVSSHLDGGASVGEEGVEDAFELLHEINERVRTGLWVGDCFIYNNSSWRLNYCVGGEVTTMFHLDRPMYLLGYLANQSRVYLIDKEFNVVGYTLLLSLIEYKTLVMRGDLEHANIILPSIPKEQHNSVAHFLESRGMLEEALDIATDPNYRFDLAVQLGSLEVAKEIAIEAHSESKWKQLGELAMSTGKLEMAEECLLQATDFSGLLLLYSSLGDAEGITKLASMSKELGKNNVAFLCLFMLGKLEECLQLLVDSNRIPEAALMARSYLPSKVSDIVSIWKKDLQKVNSKAAESLADPAEYPNLFEDWQIALNVEATVAPKRGVYPPAEEYMTYAERSNDSLVEVFKSMNVEEVPSDNGDPVHEVTEDDGVEGSMDDVVEVEPDDSTDGGVLVNGNDVLTPDQQ

SEQ ID NO: 58719 - protein, 339 aa, Zea Mays
MYVKESSESRTIADIEESETRARNQAEYLRSNLEEHSLELRVKAANEAEAACQQRLSFAEVELEELRTKVDASERDVVELKEAIRIKEAEGDAYISDIETVGQAYEDMQTQNQHLLQQLTDRDDFNIKLVSDSVKMKQACSSLLSDKLMLEKQLQQVNTSLESSKLKIARGEEQMKTCVAQAIKTSAENRHLTISLERIALELSNTDKELKWLRSSVGSSEKEYEQTQQKISELRALLEHERSERRRLEEQYEEVKNEVMELTSETEETTVRKLEDEIKECKGILKCGVCFDRPKEVVITKCFHLFCSLCIQRNLEIRHRKCPGCGTPFGQNDVREVKI

SEQ ID NO: 58720 - protein, 644 aa, Zea Mays
MDLEGTDGRERGEDDTAFEKQSALFALAVSDIVLINMWCHDIGREQAANKPLLKTVFQVMMRLFSPRKTTLLFVIRDKSRTPLENLEPILREDIQKIWDAVPKPHAHKETPISEFFDVQVVALSSYEEKEELFKQQVSDLRDRFQHSIAPGGLAGDRRGVVPASGFSFSSQQFWKVIKENKDLDLPAHKVMVATVRCEEIGNEKVTSFIADEEWQQFEEAVQHDFVTGFGKKLSSLLDRCLSEYDMEAIYFDEGVRSSKRQQLESKLLQLVNPAYQSLLGHLHTRTLEAFKEYFGKALEKEGFAVAACNCTETFLEKFDRGSEDAAIQQVNWDTSKVRDKLRRDIEAHVASVRAAKLSELCAKYEAQLTKALVEPVESLLDSASEDTWPAIRKLLQRETKTAVLGLESAVSAFELDEATEKELLAKLEKHGRSVVESKAKEEAGRVLIRMKDRFSTLFSRDADSMPRVWTGKEDIKAITKTARSASVKLLSTMAAIRLEEDGDNIENTLSLALVDTSRHGTTDRSIQLSDPLASSSWERVAEEKTLITPVQCKNLWRQFKAETEYTVTQAIAAQEANKRNNNWLPPPWALAAMAILGFNEFMTLLSPLGAIRNWQGIPTWISSCHPFTVDEICSHCNEHPEEIS

SEQ ID NO: 58721 - protein, 243 aa, Zea Mays
MATAAAAAAMEEPDVVNGRDVVSWVASGVVLWSTAFLLVRALFPKRSYDFCNRAVSTMHAVAAVCLACLSVDDWSCPVCPLAAASSPRQMKALAVTLAYMVYDAACCHLNGDTRLDNAVHHLVSIVGIGAGLAYQRCGTEMVASMLVTEMSSPLLHLREMLKELGVRDTELNLLVDVLFAATFSAARMGVGPYLTYVTVTADNPILIKLVSAYWFLRILRMVRYKLAGKKKPTPAKLAAAAAN

SEQ ID NO: 58722 - protein, 101 aa, Zea Mays
MSLVETIMVVTLATFRRSSSAPSRRRWRSSDNSRRCRWHRGPPGALPSSLLGYEALTGSLDDSRFEDYLHRLNQDCEHIVLLRQFCRTTELVIWRRSSVEC

SEQ ID NO: 58723 - protein, 90 aa, Zea Mays
MGRRGREGGAASREALGALRERELSRENAWSSRGQGVTPVSQGRGAENRRARSHEKNRGWARREEGEAEREGGSSAAAGSFCRRAGFLTA

SEQ ID NO: 58724 - protein, 720 aa, Zea Mays
MDLEGTDGRERGEDDTAFEKQSALFALAVSDIVLINMWCHDIGREQAANKPLLKTVFQATFEVMMRLFSPRKTTLLFVIRDKSRTPLENLEPILREDIQKIWDAVPKPHAHKETPISEFFDVQVVALSSYEEKEELFKQQVSDLRDRFQHSIAPGGLAGDRRGVVPASGFSFSSQQFWKVIKENKDLDLPAHKVMVATVRCEEIGNEKVTSFIADEEWQQFEEAVQHDFVTGFGKKLSSLLDRCLSEYDMEAIYFDEGVRSSKRQQLESKLLQLVNPAYQSLLGHLHTRTLEAFKEYFGKALEKEGFAVAACNCTETFLEKFDRGSEDAAIQQVNWDTSKVRDKLRRDIEAHVASVRAAKLSELCAKYEAQLTKALVEPVESLLDSASEDTWPAIRKLLQRETKTAVLGLESAVSAFELDEATEKELLAKLEKHGRSVVESKAKEEAGRVLIRMKDRFSTLFSRDADSMPRVWTGKEDIKAITKTARSASVKLLSTMAAIRLEEDGDNIENTLSLALVDTSRHGTTDRSIQLSDPLASSSWERVAEEKTLITPVQCKNLWRQFKAETEYTVTQAIAAQEANKRNNNWLPPPWALAAMAILGFNEFMTLLRNPLYLFAIFVIYLVGKALWVQSEIGREFQHGFLPAILSLSTKFVPTVMNILKRLADAGQEPAAAPERQREMELQPKSTRNGSLYSNVTSAGSSSVTTSEIGPEYSSPVVQ

SEQ ID NO: 58725 - protein, 565 aa, Zea Mays
MAGGDRERDADEETRNQMMQNLFGDQSEDEDDADDDDVAEMVDEDDGHQPQSPPQSPPQRHQELDDDAYDDEEEDARSHAPARASGYHSEEVDGEAENGGEGEGESEGQVVIEEESEGEAHGADLDQGESDGDKVQSSPERELDDQRMEPDARGMDSEDEGYQQRTVSGRRRGVIASESEGSEDSYYAAGAQEDEEPRQTRKQSSPLEEERDHEVVRDVFGDSDEDEPAPYRVRHEIDEDSHRSHMEDEGHYEKDMQPDDVVADEDMRYESDDNRELKPKEKPVGPPLDLVVPFKQPPARPDKMNVIKVSNIMGIDPKPFDPKTYVEEDVFVTDESGTKKRIRLEDNIVRWRTIRNADGTTSCESNARFVKWKDGTMQLLIGNEVLDISVHEAHHDQSHLFLRHGKGILQSQGRLLHKMRFMPSSLSSKSHRLLTALVDSQNKKTVKMQKWFETKDPEKAKMEKERVLGQNIRAHSILQRKREKVNRKYTQPARPRRQLSPGFLEDALDEDDEPGYDSRRMPGRRRFEDELEAEALAERRIINAKKKCSPQTTVPSCPSTETSSG

SEQ ID NO: 58726 - protein, 205 aa, Zea Mays
MDRKNQTPQGQIAQVVVEFLEVAISCIVFLKGFYPPRAFERRRYMNVVVQKALHPELTSYIHSVTFGLLPFIQKGLVERVVVIFYDKGHVPTEKFVFKLAVNQSYRSKLEEANLEFALRAFLIKLTVAEPVTRPLPPDGSWEVTAYFRSLPGDGDREAQLWIPTDAELWMQPPQITPIKSVSCDPLTMQLYLEHPSVTEPKEPPA

SEQ ID NO: 58727 - protein, 754 aa, Zea Mays
MPPFRMPSHFLALPLLLLLLLQAPSPEAAESTPGTRTRKIGSSGASSVFSLFNLKDKSKFWTESIIRKEFDDLEGSASRDSSKNGLLNFTRAGNIANYLSLAEVDSIYLPIPVNFIFIGFDGNGRHEFKLGPEELERWFTKIDHIFEHTRIPPVGEVLTPFYKTTVKKLQHYDLPLVSHVNHNFSVHAIHMGEDVLSVFEHAIKVLSCKDDLVDSRENEEIFLQVDSAQMEHIFSTLVDHLQIQEAYNIFVLNPKPIGKRINYGYRKGFSESEINLLRENKTLQARILQSKSDNKLFLDIEKGVNRRPLYESHPLSSFSWTRTDSMDMGDWSKKCKEALSKFELLKEGKSKEDIVYEKAVQILHGTKDEVHDIVQSALKSSDLKGLHAQCLTDIWIGRERFAFVDLSAGPFAWGPSVGGDGVRTELSLPNVAKTVGAVAEVTEEEAEEKLQDTIRERFSSFGEDYHAVDILLAEIDVYELFAFKHCVGRRIQLALCKELDERMHDLKKELEGYNTGDFDETNKKKALDALKRMESWNLFRDTSVEHHSYTVAHDSFLAQLGSMLWGSMRHVIAPSASHRVYHYYEKLSFQLYFVTREKVRSIKQLPVNVKSIRESLNSVLLHHQNSMFSQNMLSLSEDPSLMMAFSMARRAAAVPLLLVNGTYKSTVSTYLDSAILQHQLQKLNEHNSLKGRHSNHRSTLEVPIFWFIHNEPILLDKHYQAKALSNMVVVVQSDDDSWESHLQCNGRPILWDLR

SEQ ID NO: 58728 - protein, 1018 aa, Zea Mays
MRLRNTDRAPRSSGRRNNVLSWISEVKDTSNVGVRKKRGRRAPPSAKRLRDKRVDKAIESDGAVDSDSDDTDGQVDKNQPSAHIEEHVDGRTGDDLATAGHSGNSSNGPSSASEEQDHSTNSKDKLQKASSQNTKKVFGNSTNGKQGASNLEQECANEDGSHVLVAAVYKDIDNERSSQKIRDDVSDAQLDTASSDDKSSEEVEDVKVCDICGDVGEEEKLAVCSRCNDGAEHTYCMRVMMEEVPDSEWLCEDCQTAVESENENRLQKSQVKAGTSKELSLEGEINKPAIAAKGRSSSDCELKAGNIENKESNTTNERNGTVKTRTEEDAVTTSSTRDIFSETGGLYMGADSRKRMEPSHETFVSDADKGKQPSHQVSTSLVVNALKNQAPQSRGQLSKSTSFNNSKVPKVKQLLNEVPQKPKFLKESWSSIINKKEGPISMTTKSATFKKPKPCEPTNKAKSSVLSPVEEPRVPNQLASHNVTNGQCSILGPPSATSSMVAPVLRTDSTTQLLSTRNNTVDSNNLGSVHLQGNSELKKPRLAKVPGSMMLSNAERSAGGILGSGAHREVIQNSDPSHRDAKIKDQTGFRQGASSSNRTIRCQRCNEYGHSTHFCEVEKLRLSSGKPLSERNLKDASAKRNKTSEVSTLASSEKTPSREPEHVVKCAINQNLINGPNDGIPAPFSHVKKHSLSPRANVSIPGSGVDCSKPKFKNNDPSLSGTAGIFVHNGRIMPNDHRDEPAQGFSAGDEPTSSTVPELGWIWQGGFELQRTGSSPELCDGFQAHLSCSASQLVLDAVKKFPSKVQLEEVPRKNSWPTQFQKNGPTYDNIGLFFFARDVQSYENHYSKLVENMLKNDLVLRGSVGTVELLIFPSNILSKNFQRWNMLYFLWGLFRVSKKDSSNLPSYLSTSRVERNFNDDLQAMDWMPSTHSFSQNRSDLAEPDPDLLKSTNFEPSLEASREVCLDGENSLNQLVRRRALDDHLDSDAKACSTISNGAMGSSAMSMQRKHQESRVSVH

SEQ ID NO: 58729 - protein, 487 aa, Zea Mays
MAMRKENPVLNACQASNGRITRAQAAANRRSFGTFPSVPLPAKTERKQTAQGKAKRGSSYDNTSASVALSGPQPKRRTVLRDVTNLSNANSNKSFAAAPKLQTKPSLRTGRTVSKSKPCAKKIPKKPPPAGNGSALTNVLNIAEETQAEKILAERVEPVLLLENRGPLSLQNVERNRDSACHEVFFEERNLRDKCEPSVSKNGDSYVLDIVDIDKDNGNPQMCASYVVEIYSNLMASELMRRPSPNYMEGLQRDITKGMREILIDWLVEVSEEYKLVPDTLYLTVYLIDRFLSRNYIERQRLQLVGITSMLVASKYEEICAPRVEEFCFITDNTYTKAEVLKMESQLLNDLGFNLSVPTTKTFLRRFLRAAQASRKTPSMTLGFLANYLAELTLTEYEFLKFLPSLVAASAVFLARWTLDQSDLPWTLEHYTSYKCSDIQLCVCALRELQHNTSNCPLNAIREKYRHQKFECVANLTSPEFPRSFFS

SEQ ID NO: 58730 - protein, 72 aa, Zea Mays
MESVADLAGAAEPLRVVGRPLLRLLHAREAQPEAVEEDSQSPLKISDGESSRHEGCCRLRPHLAVCCGVLCT

SEQ ID NO: 58731 - protein, 592 aa, Zea Mays
MSWGRFSFTPQQGPTLTRRTRVFPAHKPAPRNVVVIDEDDDGDVIIMERAAARGSPSAAAAPGSEARKGGGFSGDVINIDDDEDEKDGTRGDKAGPSMSCASGSPVAMTPGRGSPRNRYGFDCSYDSSESNLTKGWDSDTDDGSDCEILDDTAGTAREMWETAASRKKPPHGVDECEDGGATAFASCAGLETQPGKYSEHLFGAERHPDESMSWFYSAASKYGSQNSSDSTKESPGHAQSSSGTEKGVHGPSVPNTEECSNGDFSSINGRESAQNRNGSGKDIPTECHLNDNISQSFSDARKEGLQNNTGRSKDHHDQFSAPNVKECSMVGSEKASRGVQLPRPDESSAYNFAPANRFFSGIWSVDRNDGSPPIFVSTPEKVDETIPDDVYSQKYPSPPEASYNTIFYSAQDNGLAKGKDLLQDPEELGRFASVIGEREKHKESVEYKRAAEEEWASRHRQLQIQAEEAKKLRKRKKAEAQRLLDMEKRQKQRLQEVRESQRKNEEAIQLKERYRATVGKELEDIERRHCDMTSILHALGISVEGGEVKAFKQALLKFHPDRVSRNDIYQQVKAEETFKFISRLKEKLPRLS

SEQ ID NO: 58732 - protein, 816 aa, Zea Mays
MAEEDRQRRWRRRRFANLRSVRWRIDLGILPASPGASVDELRRAAADSRRRYVSLRRRLMVDPHLPKEEDRSSNLVVDNPLSQNPDSSWGRFFRGAELEKTVDQDLSRLYPEDGSYFQTPSCQAMLRRILLMWCLQHPECGYRQGMHELLAPLVYVLQVDIDKLSQVRKLHEDCFNDDFDGVAFPDTDMLFSYKPRKDSNWHSRADNGDDSESASRVNTLDELDLDTKEIISLSDAYGAEGELGIVLSERFMEHDAYSMFDGLMDGGSGVVCMAEFFSTSKVGSSSSLAPVIEASASLFHLLSIVEPSLHSHFIELDVEPQYFALRWLRVLFGREFCLDDLLVVWDEVFACSNDMLLRENEECNFKILCSSRGAFIAAMAVSMILHLRSSLLATEINTLCLQRLLNFPNNVDVHKLIEKAKSLQSTAIDANTLSPSLLSKKDSCDYDRVYSNLATSTPPRTPLHPLAESYWEEQWRNLHNDGTALKESDNKGLSYKRSLKQSLSQRLGLSRTESDPSPVKVVSVNNDARNSVRRCLLNSYSDKVVQSNEVIGKFEQDKFPIVSIHKETILSSERSSQLKLKAASENLTVSPPPSVAKFNPLIDSPVKPADESSAKRTEDCSSGENSPVFYTARAGNEHENCHDNDSEKSSITSNSCAGDDYRDEVLPDESSSCNCEDKTVSEAIESGANVGQTRPLEKTMVPNERKPFINKLQWLLRFGRPSAEGNVVEKGSGQASSDGKHDAVPPCPSPADASSDNSCSGINLAYGDNKKVMGTLKNIGQNMLENIQVLYLNPFCRPWASLFARLLLLLAESIYR

SEQ ID NO: 58733 - protein, 507 aa, Zea Mays
MQSSSQHYVKSELLPCIGATNRAIRSTVGTVISVLFQIVRVAGWIELFQALHKCLESNDLDHMEGAMDAIYKICEDVPEELDVDVPGLSERPINVFMPRILQFFQSPHASLRKLSLGIINQYIVVMPSALYMSMDQYIQGLFNLAKDSSADVRKLVCSAWVQLIEVRPSILEPHLKNVTELILQANKDSDDEVALEACEFWSAYCDVSMPPEGLQEFLPHLIPTLLSNMVYADGDESLDDAEEDESFPDRDQDLKPRFHDSRLHGSETGDDDDDADAVNVWNLRKCSAAGLDVLSNVFGDSILPTLMPLIEQNLARTDDDSWKERETAVLCLGAIAEGCISGLYPHLPQIVAFLIPLLDDKFPLIRSITCWTLSRYSKFIVQSLDHPNGRGQFDKILMGVLRRILDTNKRVQEAACSAFAILEEEASEELVPHLEVILQHLMCAYRKYQRRNLRILYDALGTLADAVGAELNQAKYLDIFMPPLITKWQQLSNYDKDLFPLLECFTS

SEQ ID NO: 58734 - protein, 141 aa, Zea Mays
MPLGKYYCDYCDKQFQDTPAARKRHLQGVQHQRARALWYDSIRHQDQHGGASSLLLPDGTLAKGICHHFVRTGACKYGDSCRYFHPKPNGVNPALAAPGLGSGPAPMVQQSDIIGNQPNFVVYQGVDINSSSERIVIYDKL

SEQ ID NO: 58735 - protein, 102 aa, Zea Mays
MVCLFSAAALAACRSRAAMVPVMVGDLLALALLYSAVGAAAEFGILGERGNSHVRWPKVCNVYGRFCERAMAAVIVSLIAAFANLVLLMLNILTIHKSSSYY

SEQ ID NO: 58736 - protein, 327 aa, Zea Mays
MAANVALVLLSSCSPSTSAAAASLLPRRRFLPSRRRRASSRATTIKGKATQIKGIRSIGGGCINSAQRYDTDAGPFFVKTNSRIGPEMFEGEALGLKAMYDTKSIRVPLPYKVGSLPTGGSFIIMEFIEFGRSRGDQSDLGRKLAEMHKAAKSDKGYGFPVDNTIGSTPQINTWTDDWIEFYSKHRLGYQLELASRRYGDSAILEKGQRLIKNIRPLFDGAVIEPCLLHGDLWSGNISSDSNGDPVILDPACYYGHNEAEFGMSWCAGFGGDFYNAYFQVMPKQPGFEKRRDLYLLYHYLNHYNLFGSGYRSSAMSIIEDYLYVLAI

SEQ ID NO: 58737 - protein, 82 aa, Zea Mays
MLLYCIRFIYLWTAFLWLRTKTAKLRMTSLTQTQKTRRTSKARQDLPCQIRGKGITRMMPMDTSKTVRESSIFLNFGNVPVH

SEQ ID NO: 58738 - protein, 265 aa, Zea Mays
MKKQELAKRYSKRDDATKDLTEAVEVGDKDAIEKLSKRTVKAPSEAEAECAALCINDKVFAVASEDMDSLTFGAPRFLRHLMDPSSKKIPVMEFDVAKVLEELELTMDQFIDLCILCGCDYCDSIKGIGGQTALKLIRQHGSIESILENLNKDRYQIPEDWPYQEARRLFKEPNVTLDIPELKWTAPDEEGLISFLVKDNGFNEDRVTKAIEKIKSAKNKSSQGRLESFFKPTATTSAPLKRKETSDKTSKAAANKKTKAGGKKK

SEQ ID NO: 58739 - protein, 150 aa, Zea Mays
MGVGAEQAIDYTAEDTEAAIKGKFDAVLDTIGVPETERIGINVLRRGGHYMTLQGEAAALADRYGLAVGLPAATAVLLKKQMQYRYSHGIEYWWTYMRADAEGLHEIQRLSGAGKLQIPVEKTFPISHVREAHAAKEKKLAPGKVVLEFD

SEQ ID NO: 58740 - protein, 415 aa, Zea Mays
MPFQREGIRFVLQHGGRALIADEMGLGKTLQAIAVASCLRDAWPVLVISPSSLRLHWASAIQSWLNIPVEDILVVLPHTGGSHKAGFRVAYSNSKGDFHLDGVFNVISYDVVPKIQSTLLDLDFKIVIADESHFMKNGQAKRTVASLPVLQKAQYVVLLSGTPALSRPIELFTQIQALYPTVYKSVSEYGNIYCKGGFFGLYQGASNHEELHNLMKATVMIRRLKKDVLSQLPVKRRQQVFLDLSEKDVKNVRALFIELETLKVKIESSDSKEMIDSLRFAYQNIVNKIYTDSAVAKIPAVLDFLGTMIEEGCKFLIFAHHQPMIDAIEKHLLKKKVKCIKIDGKTPLTTRQTLVTDFQNNDDVKAAVMLDGQEKTLEVSQRDCRPSPSKKQKTLVGFLKRPSASTSAEEGMPST

SEQ ID NO: 58741 - protein, 456 aa, Zea Mays
MRYEDAFNRFVDEINTLAAYQWWEGSIYSILCILAYPVAWSWQQWRRRKKLQRLREFVRSEYDHSCLRSCRSRALYEGLKVTATPDLMLGYLDFFLGGDEKRPDLPPRLRQRFPMSLIFGGDGSYMTPFLLNSDSVLTSLMSQAVPSWIWHRLVAGLNAQLRLVRCGNLKVTCLPVINWLETHANPSLAENGIRVDLAWFQATALGYCQFGLLVYAVEGDAALTEPDGSPRIKTEQQTPTQNMLVETQLSQSRIKDALMRRRITGGVLDSNSLRTLNDRRDLFYPFSLILHNSKPVGHQDLVGLVISILLLADFSLVLLTFLQLYSYSMVDVLLVLFILPLGILSPFPAGINALFSHGPRRSAGLARVYALWNITSLVNVVVAFICGFVHYKSSTKTHPSVQPWNLGTDESSWWLFPTGLMVLKCIQARLVDWHVANLEIQDRAVYSNDPNIFWQS

SEQ ID NO: 58742 - protein, 339 aa, Zea Mays
MALVKSDAEEEWSDSDFDDASDSEVAEALDWLDAVEGPDGSARPHVAFSASGGGAAARRPNAHGGVLSRPLQPLSNRTQKLASHISATPLEEWEGRMNVAMSNSVTTAIRDSIRDTAIGKIRNTEKADRATVEQAIDPRTRMVLFKMLNRGVFNNINGCISTGKEANVYHATKTDGQELAIKVYKTSVLVFKDRDRYVQGDYRFRHGYCKHNPRKMVKTWAEKEMRNLLRVRAAGIRCPAPLLLRLHVLVMEFIGKGGWAAPRLKDAALSDDKLHESYFEIITTMRTLYQTCKLVHGDLSEYNILYFEGHLYIIDVSQSVDLDHPSALDFLKEDCLHVS

SEQ ID NO: 58743 - protein, 340 aa, Zea Mays
MLDSGSSCQTWSPSPRDERSKIDDHNSKFDLGVPDDLDVSIELRNWLFALEGTEEVGYLFSPRGGDGISREEKCWHSTFRNLHISGKSSDRLKLGGRRKVSPEKAFPVERFTAGIEGLQAIKPRLRDQCTKKGPSNNHEMGRDFNSSSSVGDHGVDVEATMVIGEDEIEGAKWTMDNVKFSVKEPIEAVATKEELEHLVMLCRSEADAMGRITAGILRLLKLDKSLGQGTIEQLRNLGSGGMDNIFSPRRLSRQNSFGSIGTPRTPTMQAIADVMGSKTTLEATISSLQGEISESKAKCMALISQASSTEDQNRAEDIRQLSEKLESMQSLVTRLRTLII

SEQ ID NO: 58744 - protein, 209 aa, Zea Mays
MADPDVIEVTFGNDVINTTVTSSGQAVERWIAEILALHRPGSNGYSIIVGLDVEWRPSFGPHQNPVATLQLCVGHSCLIFQLLYADYVPGALAEFLGDRGIRFVGVGVEADAERLSDDHEPLGRVLPQLRADQVRLHRRLRLFRGRPQAAWRRVLIDATICASVLRLQIWLLLHFGLQGCRGFCDRGELFRQSCTAFLVCRCFWRTESH

SEQ ID NO: 58745 - protein, 683 aa, Zea Mays
MCASVIMLGVTEKAEKDEIVKAAMELKNAGIEDGYTAEVSTFRQALLVDVRDKLLFEQDYAGNIKEKVPPRSSLHIPWSWLPAALCILQEVGEEKLVLEIGQAALRRPDSKPYVHDVLLAMALAECSIAKASFEKSKVSLGFEALARAQYLLRRKPSLEKMPILEQIEESLEELAPACTLELLSLPQTLENSERRRGAIAALCELLRQGLDVESSCRVHDWPCFLGQAMDKLLANEIVDLLTWDTLATTRKNKRSLESQSQRVVVDFNCFYMAMLAHLAFGFTTRQTELIKKAKTICECLVASESTDLKFEESFCSYLLGEETGTTVFEKLQQLQSTGSSNSKNYGLDKKKDSSGKVTVNQSLELWLKDVALSRFADTKDCPPSLTNFFGAPKRVLNTSKQKLGSPRSVLLSSQPSSSASLCNRTSTEQSPRLSPNSHLGEAVKQLAPANLGLQSSMDRQVNGSGTASVPLKRNPGSHIRTLELWGLSGDVMGKLACSALLGFVVFSTLKLTRFQFGHVRYTDPSRESASMLSLNEASAKEGSFITSRVRKHFENISKFLWLSDRPNSNSKGSDKHPAVNDITAAVCKQKMDIQEAETLVKQWQDIKSEALGPDYQTDMLPEILDGSMLSKVCLCIKYLFACAIALPLCILCVINSNFFGAVGRLSVISKGPVLLLEICAAKS

SEQ ID NO: 58746 - protein, 144 aa, Zea Mays
MAPGALISAGSSGQFEYVQKLASGGCDNTVKVWKLNNGSWRMDCFPALQMHKDWVRDVAWAPNLGLPKSTIASASQDGTVVIWTAAKEGEQWEGRLLYDFRTPVWRLSWSLTGNILAVSDGNNNVTLWKEAVDGEWQQVTTVEP

SEQ ID NO: 58747 - protein, 652 aa, Zea Mays
MAFILAFVILGIYIFRTTTPQQEASGLGRATLAYITVASFLLGALCSGIAGFVGMWVSVRANVRVSSAARRSARESLQIAVRAGGFSAIVVVCMAVFGVAILYSTFYVWLGVDSPGSMKVTDLPLLLVGYGFGASFVALFAQLGGGIYTKAADVGADLVGKVEQGIPEDDPRNPAVIADLVGDNVGDCAARGADLFESIAAEIISAMILGGTMAQRCKIEDPSGFILFPLVVHSFDLVVSSVGILSIRGTRDSGLISPIEDPMAIMQKGYSVTIMLAVLTFGVSTRWLLYTEQAPSAWLNFALCGLVGIITAYAFVWISKYYTDYKHEPVRLLALSSSTGHGTNIIAGTSGLVDESGNPTGGLFGTAVATMGMLSTAGYVLTMDMFGPIADNAGGIVEMSQQHESVREITDVLDAVGNTTKATTKGFAIGSAALASFLLFSAYMDEVASFAQMPFKEVDIAVPEIFVGGLLGSMLIFLFSAWACSAVGKTAQEVVNEVRRQFIERPGIMDYKEKPDYGRCVAIVASASLREMIKPGALAIISPMAVGVVFRILGHSTGQPLLGAKVVASMLMFATVAGILMALFLNTAGGAWDNAKKYIETGALGGKGSESHKAAVTGDTVGDPFKDTAGPSLHVLIKMLATITLVMAPIFL

SEQ ID NO: 58748 - protein, 207 aa, Zea Mays
MDGARVLIAAGATAVCCFVCAFWVFRSSSSSSPASPKKHQSPSTNCCGCASCGCRDAKPANGEMAVGGENKKKAPEPDPPEAPSMMEQLVPEITTHALSYLDYTSLCRLSMTNSAMRRAANDDGAWKALYHKDFTVEQGTINPPNGWKAYYAATKAIINLNAEFYNIIREGSLPAMSRFWLNADYVKCIHATGEFCPGPYWCECAHP

SEQ ID NO: 58749 - protein, 527 aa, Zea Mays
MQGQRNSVEHFADVFGFDIASSSGNPVMDQQSYWNNVLGSVESQNLQGYQMNHSDAAMPYGNETQQDGTFLGFWESGEASASGSSNNAKTEHLSIGGGLRIGERRLVADNGISLDVDINLNANVNDLCGQSSNVNCTSQGPEHYGGGDRSVVNSQPTDLRLHPYRTFLLDAEQADSFTLNPSENPLCDFSLMQESIDQRPGSSLDGRRLACKRKNVEGPNGQSSAGASTSFSHRNDNAFHNIASSSYNPAPIRNPSSPNCLPVPSSIDDQLPRYGTNAGLSAGTYDLNGGVNNAGNSQRSFRARITTSQQIAPCSVWPSSNAIRLPNSWNHQPPHFQSAFDDTQEVIPVVSSLNLQYQHPVNVSSVPPAANRFTGHGASSSRAGSLENRILGSQEAPTRNVVPANYSDLVPPSVVDPRRLLPEPSNWSSDVRGTAISGSIPPVSRANNSATVNPPAGFSHQNLTRRHPRNLSEEIGRLSGALRGHQPPRLRPGFLLERQGDGVWGVPLSTRGREGRRLMEPCLFLLA

SEQ ID NO: 58750 - protein, 273 aa, Zea Mays
MQIEGGSEGVIVGGTTGEGHLMSWDEHIMLIGHTVNCFGTRIKVIGNTGSNSTREAVHATEQGFAVGMHAALHINPYYGKVSTEGLISHFEAVLPMGPTIIYNVPSRSGQDIPPQVIETLSGYPNMAGVKECVGHERVKCYTDKGITVWSGNDDECHDSRWKYGATGVISVASNLVPGLMRSLMYEGENALLNEKLLPLTKWLFCLPNPIALNTALAQLGVARPVFRLPYVPLPLEKRIEFVRIVEAIGRGNFVGQQEARVLDDDDFVLISRY

SEQ ID NO: 58751 - protein, 825 aa, Zea Mays
MAMEDVAGASSSSVAAAASDPTHGWQTVSYPKRHRKQAHQPPRAMAPDLALQANGKGSGVFDAVEKRSQERHRALQQQLASRAADLDDARIAPVTGGAYSDDSDSDEATAPRQVGEVKKPKKPKKPKVTVAEAAALIDAENLAAHLVEISSSYENQQDIQLMRFADYFGRAFVAVSASQFAWAKMFKESTVSKMVDIPLCHIPEAVIKTASDWISQRSYDALGDFVLWCIDSIMSELSGPSAGPKGSKKVAQQSPRAQVAIFVVLAMTLRRKPDVLVNVMPKIMGNNKYLGQEKLPIIVWFIAQASQGDLVTGMFCWAHFLFPTLCAKPSGNPLARDLVLQLLERILSVTKARSILLNGAVRKGERLVPPVSFDLFMRATFPVSGARVKATERFEVAYRTIKELALAGSPGSKTVKQASQQLLPLCAKAMQENNAELTREAVDVFIWCLTQNAESYKQWERIYPENTEASVAVLSKIVIDWKDVSPKLSSEALKATVKNLKAKNEAALESATDAGKQASIKKQTSTARLEQGSEQLLGGRPGPALGVLATVAECSVEPAAQTTKGPDSNGSSSPLPPVLPSVCFPPRPRAMAPCASPSALALSASTRVSSFPLTLRPRPRPEARVPRAPGGAQLRPATACSWPRPLLPELAPAFPRAGARSAGRPQPLFRPRAMMTTSQIASCAFTVGTVAVLPFYTLMVVAPNADITKRTVESSAPYVALGLLYAYLLYLSWTPDTLRAMFASKYWLPELPGIVRMFASEMTVASAWIHLLAVDLFAARQVYHDGLKNNIETRHSVSLCLLFCPVGILAHVVTKVLAGAAGRSH

SEQ ID NO: 58752 - protein, 2269 aa, Zea Mays
MKGDSMEMNGNILGLKMESNGIRVIEPFDMVVKYSNASGKTNLHLLVSEIYMNFSFSILRLFLAVEEEISAFLRMSSKKISLVCYQFDKVATMQGNANDQVLSFWRPRAPSGYAIFGDYLTPMNEPPTKGVLALNTNIVRVKRPLSYKLVWQSGSPRTNIFHQKDLEDKISNIDQLCSVWLPVAPAGYVAMGCVASSGTAEPPLSSAFCLTASLVSSCNLRDCIALRDNTNMIFWRVDNAFGSFLPGDPASMSVDGNAYDLRHMLFDSADSSSKTVSRRQDSRNDFSQLERSELTSGRLFDAVASFKLIWSNSGTSSPKKLSIWRPMLSEGMFYFGDIAVNGYEPPNSTVVLRDTGEDTFLRAPEGFDLVGRIKKHRGTEGVSFWFPKAPSGFVALGCVASKSSPTKEDFSLLRCIRNDMVAGGQFSEESLWDSSNARTSEPFSLWTVDNDAGTFLVRSGYRKPPKRLALKLAGPPTSSSSDSIIVDAKIKTFSAVSFDDYGGMMVPLFGVSFDSVGLSYHGGPHHLNATVSLSFVARSYNDKYSSWEPFIEPTDAFLRYQFDMNTPGSPRQLRITSTQDLNLNISVSNTNMLSQAYASWNNISCGDELYKKETFSSTERPVLDVHQRRSYYVVPQNKLGQDIYVRTTENRGSLVTLLPSGDDRSIKVPALRDLSDSHLNGRSVKPYRLMITAILADAEVKDDEGLETGEYMTAVRLFSENHSISVQQQSARTCAAIGEHLSQNTRKVNWNEMFFFKVERVDSYTLELLVLDAGKGQPVGIYSAPLEQVVQKLPPTSNPDSVKFDLALGDLMSTKTVEQETVKPSGKIRFAVLVSGRASVQQGNRASPESKTGYIQISPSKEGPWTSMKLNYAVPAACWRFGNCVIASEATVKEGNRYVSIRSLVSVTNTTNFIVDLRLKGRISQSARADEQGDSFGKEDQILIGTLEPNSTIPVPLSGLSHPLMPYMLQLRPAKHHDHENYSWSDVQERRSQTEFRKEEILDLCISDLYESENLLFCSQVDGTSNSCHGLWFCLSIEGKEIGKDVQMEPIYDWCIIIKSPLCLTYYLPIAAHYTVSSSHLDNEDSSCSLGTLSPGEAVKVHNVDPRNPLYLSLVPHGGWELMHEPVVISHPTQAPSKFINLRSSLSGRLPTLTLRLIDISGRKEKRRLLSRSHLERGEKQLYDIKHDELVEGYTIASGLNFKGLGLLSSVGHGGRFGSVKELSPLGDMDGAVDLSAYDDDGKCMHILLCSKPSSYQAVPTKVIHVRPYITFTNRAGQDLYLKLSIEDEPKVLHAYDWRVSFMYSKGTTDKLQVRLVDTEWCQPLEIVKEDTIVIAMRKQGGTQKFVKAEIRGYEEGSRFLIVFRLGPAYGPIRIENRTSHTTISTCQSGLGEESWIQVKPHATRKYSWDDPYGQKVIDVSIDKGDDTCVLCVDLENPIGSSTSFREHGLMFTVDTSDIKILKFADYIRKEEVYGLPGSELTDHQGSSLKENETEPGAGPLELIVELGVVGISLIDHKPRELLYLHLQKVFVSYLTGYDFGTTSRFKLILGELQLDNQLPLSTMPVVLSTESRPDSNRSVFKANVAVSNVTSNGIQVYPHVYIRVTDQTWRLNIHEPIIWALFDFYSNLRFVTTINSTTVTEVDPEIRIELIDISEIRLKISLETAPSQRPRGVLGIWSPILSAVGNALKIQVHLRKVMHRSRFMRKSSIIPAITNRIKRDLIHNPLHLIFSVDFLGVTKSTLSSLSKGFAELSTDGQFLQLRSKQVWSRRITGVGDGLVQGTEAFAQGLAFGVSGVLRKPVESARQYGVIGIAPGIGRAFVGFIVQPLSGALDFFSLTVDGISASFMRCVNILSNKSVPQRIRDPRAIHRDGIVRDYDKFEAAGQMALYLAEASRYFACTDLFREPSKYAWSDYYEDHFILPSQRIALVTNKRVMLLQCLDLDKMDKKPSKILWDVPWEEVLSLELAKAGYQRPSHVIIHLKNFRRSENFVRLIKCNIDNEREPQALSLCCSIRKMWRSHQAAMKVIPLKVPSGQRHVYFVSDDDKKESHSLSRPLLSSGGTSTDVEQQFINNTVHFQKMWSSEPEIQSRCKLVAKQIADDGRVFSIWRPLCPNGYVSIGDIAHVGIHPPHFAAVYKNINGNFALPLGYDLVWRNCAEDYKSPVSIWLPRPPGGYVALGCVAVPSFKEPTLDCAFCVDERLAEDAAYEEQIIWASSDAYPWGCYIYQVQSASMQFMALRVPKEQSELRPKKILESFLQQASETQTSRA

SEQ ID NO: 58753 - protein, 388 aa, Zea Mays
MRAGICDMVTIARHLNLTLVVPELDKRSFWADPSDFGDIFDVDHFINSLRDELMIVKELPLKLQLRTKKRLYSMPPVSWSNETYYLKRILPLARKHKVIHFDKSDARLANNGLPIQLQMLRCRVNFEALRFTPQIEALGRKLISTLQRRSGQFVVLHLRYEMDMLSFSGCTHGCSGKETEELTKMRYAYPWWKEKEIDSEVKRLQGLCPLTPEEITLVLKALGFTKDTLIYIASGEIYGGERRLAVLKAAYPKLVRKEKILSPDELRPFQNHSTQMAALDYMVSLASDIFIPSYDGNMARVVEGHRRYMDFRKTIVLDRKKLVELLDLFQGGALSWDEFSDAVKEAHRSRTGQPAERKVVPGQPKEEDYFYANPLECLGSNGGLRDVS

SEQ ID NO: 58754 - protein, 508 aa, Zea Mays
MAVAPMDCGAGSISLGHKVLCRFGVPNSSRLRWVGYDRKQRTDQLIARAVSVDRTQLDFSNPDWKTQFQEDFDKRFSLPHLTDVIDVEPRPTTFSLKSRAPLENANGTMQGSWNGYVNDDDRALLKVIKFASPTSAGADCIDPDCSWVEQWVHRAGPRKQIYFEPQYVKAGIVSCGGLCPGLNDVIRQHGFRGFFEDHLSEVPLSRHVVQNINLAGGSFLGVSRGGANISDIVDSIQARRLDMLFVLGGNGTHAGANAIHDECRKRKLQVSIVCVPKTIDNDILLMDKTFGFDTAVEAAQRAINSAYIEAHSAFHGIGLVKLMGRSSGFITMHASLSSGQVDICLIPEVPFTVDGPNGVLRHLEHLIETKGFALVCVAEGAGQEYFQKSNATDASGNMVLSDIGVHLQQKIKSHFKDIGVHSDVKYIDPTYMLRAVRANASDAILCTVLGQNAVHGAFAGFSGITTGVCNTHNVYLPIPEVIKSTRFIDPNSRMWHRCLTSTGQPDFH

SEQ ID NO: 58755 - protein, 605 aa, Zea Mays
MMSHQQQIAPPSRGSVNGFPHLKLDRVGSGRHESKIVRSSSGGFTNSGNDIKLGHGSHSRDRLIYVLTQLIGHHVNVHVKNGSIISGIFHATNSDKDFGVVLKMAQVIKDGSARGQRFASDVVKKPETMIIPARELVQVFAKDVALGGDELPKGPGHDKRKDLLIDSAISRSHYLEERELERWAPDEGDSECIELEKYDRKGNRSWDQFETNAALFGVKSTFNEEIYTTKLERGPHMRELEKHASRIAREIEGEDTKDIHLAEERGLFLGDDLDHDEEIKYSAVRRDTDNSKYKPPFTNVPSSTYQVDLFNRTVNIVPKDLLGCSSTMDEESSSHIFDDIDASATIQTNSVRQPTSDYLPDRLSSNDENRLDRKLSKGSNENMDKRKLQPENNLSDGARPLISEGSDGPPSSSYAYEPSSSGQGFKSPETPDLTVSVKHPSKTEHVINSQRPGSSTSSTSERIAANSAASALGLSPSSSIGSLTSEKSTLNPNAKEFKLNPNAKSFTPSASLRPPHPASSDASYYYTNNIPAAPLGPGLPVGMGFPPAYGTQPVMYNAQPGASQQGYMHPVGLQQYGQQMMMGGGQNRPVYYYAPEMQQYRGRNF

SEQ ID NO: 58756 - protein, 1904 aa, Zea Mays
MTGLIQRLCDEVDPKELPLMYTCLCEEINCCLEDGCLEHLKCLIVFLAFALQKKQNNAFDKVKMIKLVELLVSRYVFPGSNITGSSSIEVLGSILDFMLSVLDVPTILGNLSIISPFYAPVFKLKNPRVIVFIKKLLVKGPQVAQHFESQILSAMDNFIVSSPEDVIFILLNFFKGSKKQIFLCSTDGNHLDSVEKTCKFFESKFSLWIELLDDTAGTGNRSSNQLVFLNGINSKDLHAGNMNGLPMTTWRGLLGAALSSYHKLLLVNTSRNSEFSFFLSLAKSHSTCPQVLSAVAEYLDSLQGVSSMEVTKEFDPQNLLELFSIFAFNLSSPTKDVRILTLRILSYFVKMDQRLITDEERPHKRQRTEVSGEEAVAKYANVVDILLIIESMPISVSTSRKIAIFISRIQMSLSSKMVHDDYIPPLLHGIIGILYNRFSDLWPQTLDCLAVLIRKHKELVWGQFVPFIAIHQSKGLTVKNQEKLEAATQPQSIFDCFNLYLAMDFDCTPAVTVATLLLQSLQRIPDVAESRSRQLIPLFLNFMGYDDSSIFSADSYMPEKCKGKQWKAILKEWLNLLRLMHNARSLYQGNFLQEVLTKRVLDDSDPEIQAKALDCLLNWKDEFLIPYSQNLKNLIDVKTLREELTTWAVSHDSLSILKDHRSRVVPLVIRVLAPKVRKLKLLGSRKHTGASHRKAILRFLLQFDSNELELFFSLLLRSLIPGSLQLKMFGSQPDNLLGSFSDIVGTSTEICVENFTWKKANGFIHLVEEIFGTFDMPHISPFLNVLLIIVARLLESCMRNLRNESDGKYPCNQTNDHGNGCSINSEVGNSVNVDECFKEMHLEGHMETSVSIKQLKDLRSSCIRVVSSALSHYESHEFGENFWGVFFSSVKPLIDCFTQEASSSEKPSSLFACFMAMSRSPKLAPLLGSNNLVPAIFSILTVKTASGSITTYALEFIENLLRLDIDLQQQDEHLVKKVLLQHMDVLIHSLHDFVNHRKELNRRSGTWLGQRELRLFKLLLNYITDPSAADNFIDLILPFFSKKDLNSDDCLEALCVVRGIIQNLRCKVSEKVLNALNPLLAIVGLELRLCICDIYAGLSLNDPSMLFLAGLIGDLNAVSASELGELDYDTRLNTYDKVRPQLFLGLTEEHVGAILSHCVYDMSSEELILRQSASRALQSFLDFSASVMNNDVSKYSIDDKFRENNTRSICTMGCIQKILEKTYLHNMGVAMTKDVSIQKEWIILLREMVSNFNHLASLSSFRPLCKVDIEEDFFHNITHLQAGKRSKALLLFRQGIKENNFSEDITMKVFVPLFFNMFSDVKAGKGEQVRDICLDTLSAVAAKVQWEHYRTILKRCFRELNLRPDKQKIILRLICSILDAFHFMKPANDASGNSDALSEDIDSSLTFSLVTVSSDKQQYMQKVVFPQVQKLLGSDPEKVNVNINLVALKILKLLPVDYFESQLSSIIHRICNFLKNRLESIRDEARSALAASVKELGIGYLQFVVKILRAILKRGFELHVLGYTLHYLLSKNITADMYGRLDYCLEDLLAVVDSDLLGDVAEQKEVEKLASKMKETKKRMSFETLKLIAQSITFKTDLLKKIISPVSLHLQKQLTPKLKTRLEMMLHNIALGIECNSSTETSNLFIFVYCLIEDTITGSRSECKENTQSSPDQDSTVRKTFLGLGESGSQNSYILTKFALDLLRNRLKSIKLDKEDEQLVKMLDPFVDLLRKCMSSKHASVLSATFRCFALLVKLPLPSLRDNAITIKNVLMEILQRAGNSNGHLVTSCFKLLADLLRGFRISLSDNELQMLVHTPMFVDLQTNPSPVALSLLKTIVRLKLVSHEIYDIVVKIGELMVTTLTESIQQQCIQIMLQFFLNYPLSEKRLQQHIDFFLANLRYDEYP

SEQ ID NO: 58757 - protein, 398 aa, Zea Mays
MDAELLELQRQLEAAQSARSSVRLSERNVVELVRKLQERGIIDFDLLHTVSGKEYITSDHLKHEIKMEIKKRGRASLVDLSDTLGVDLYHVERQSQKVVSDDPTLMLINGEIMSQSYWDTVTEEINEKLQERSQIALAEIAAQLHIGSELVISILEPRLGTIVKGRLEGGQLYTPAYVSRITAMVRGAARGITVPTNLPSVWNSLQQQLHEMHGASGVSVEGSFFQSIFNGLLKEGAVLGSVRAGGQWTPAVFAHAQKESVDAFFSQTLTLGTTCFRNLQFLNLNSSWRPDIQMVLHWMLSLFILLWLICSILRLVMQLRMDTGLILFQFFHHILVDQMQPKFYLSVHLCRRLSSLLKQWYLESHVSSVTCLLRVFLTDLRKIWTRLVLDLVLVKEDL

SEQ ID NO: 58758 - protein, 1856 aa, Zea Mays
MSSGAIGASDPGGGETKPVAGGDVTTSEAAGEVPAFAADVKVEGKATLATDVDREGGDTAVSDPLYANESAGMVGAEGHGDEPAEGLEAVNGEEEMLEAGARDLLTETEKNPVLVVHVPAAAAGGGSAIPEHAEAESNKVEDHVNVEPGTKNNESDNGIAHFDKEIQNNVPDDIEESSKEHEGDGAPVVDQTNNASEMLPQTGEQFPDVENSTDSNLEAASLGSVDQGARYCLPPHDKGGFQVADLVWGKVKSHPWWPGEIFDPSDASELALKHQKKGSHLVAYFGDNTFAWCDESQLKPFVTNYSQMEKQSSSDAFVGSVNNALEELSRRILSGMSCSCLPEELADNGMSYTVDNAGLKDGVTCSAVNRPEILNCFSPENLLHYIKELALFPGQGGDLLELVIACSQLTSFYRSKGCPELASFQTGDAWVEDGLDCTDTLSTQNVMVEEPVINEVHPTQDKPKRGRGRPRKQKPGGDQVVMEKRSISNQVNDTSYNEKQVGMDFDNYGNLQNKNKRNFESFEDSEKSSAPTGGSSFKIGECIRRAASQLTGSPSIMKAQNAAEGENGEFDIFSDDAGDELTVEKRAKRRSLHRNHTADPKELLSQLCLVATEPMNGYNFSVMIISYFSDYRNYIVSTTTEANIVDKGTSRRGRKRKEVLPSPDVETTDHMQDSYWSGLSLHNHPIHDLRKESPTTRPRRRRRSSSHAYVPLSELGEPVPKKQIQVMERSIIHVDEKMIDELKPTALVLSFARSASIPSELDLVKMFSRFGPLKEREAEVHRETNTVKVVFKKRADAERAFSAAGKYGTFGPSLRSYRLVSMPFSLETQSANNPVKHPENHGMEIPGSNQSEAPKDSMEVDLVQKTDEVEVAGEPSSEEVETVRQISQVQAADSTFVSQDRFDEAGNIDAELIDHVNQIGKAAQAASVSEESRDVEQVYTQKEVSANDLPTETEILNSDAITKELPQNAPDNVETDIVEDPKQSHNSRDNAVFEAVIEAPSTAQDHTEEDTGNAVPEEPMVSPELQSQTPGDLPTETETLHSDAILKKLPQNAPDNMQTDIAEDPKQSHNSGDNAVFEAVTEAPSTAQDHTEDDTGNEVPEEHMVSLELQSQTPGDLPTETETLHSDAIVKELPHNAPDNMQTDIAEDPKQSHNPGGNAVFDAVTEARSTTQDHTEDDTGNEVPEEDMVSLELQSQTPGDLPTETETLYSDAIVKELPHNAPDNLQTDIARDPKQSHNLGDNAVFEAVTEAPSTAQDHTEDDTGNEVPEEHMVSPELQSQTPGDLPTETETLHSDAMIKELPQNAPNSMQTDIAEDPKQSHNPGDNAVFEAVTEAPSTAQDHTEDDTGNKVPEEHMVSLELQSQTPGDPPTETETLHSDAIVKELPHNAPDNMQTDIAEDPKQSHNPGDAVFEAVTEAPSTAQDHTEDDTGNEVPEEHMVSPELQSQTPGDLPTETETLHSDAIMKELPQIAPDNMQVDIAEHPNQSHNSGDNAVFEAVAEAPSTAHDHTEDDTGNEVPEEDMVSSELQGQTPGEKLVGQSATEQMVGSEDPKPQAENFVAEPVVLGAVGQVEIELESKTTVEVSGEQGYSIEQTVQVEALIEASGGQLEVGRQIPEDESIACATTEHSMVVDETVEAKVVLLDESIENNAAVIGVVEETAEGETKEEASDEKGKIENNEDADKLAPAGKGKIENNEIIIDAPDEKTENKADADTPAGETKEGEITVEETDEKIESKVTAEPVIGETTEGQTAAGEPVEEARTAEDMVEDVKVLDDKSTAAEKPVENATVVAHENSTTVENTLKDAIVAPPDANTTNAEKTAIGATIETQNEDAPAERTIEDTSVEAPDVQAGASE

SEQ ID NO: 58759 - protein, 58 aa, Zea Mays
MDAVQRFLMYISLTFFFVIPEMPTITSACTCIYTYNKGWGIFTTCWSLCMTPLVPSNF

SEQ ID NO: 58760 - protein, 61 aa, Zea Mays
MLSFLLDHFYFQNRFAYLMNMNLLPGGSIYHVFAAEYKELLGVWLMIYLICTYLYYRAFSL

SEQ ID NO: 58761 - protein, 161 aa, Zea Mays
MAPQISRLDHLPTPQNFDYKTALLPWSSKKKGTKERDLDPHTSRLSSSRPKDNENIKQENQRKQSKSIALEAKRAPRRRRPATSHVRRTRTHRCIYGAPEPAVGRHGGRAAPGLRPRQAPQRRRPGERAGRRSCAGKPGWAAAAVTTPPARRGAPPCTTGW

SEQ ID NO: 58762 - protein, 439 aa, Zea Mays
MAAAAVASSSTPRPLRLAQRGAVSAHASHHVSAPPHRSRRPRLSVSASAGVEGTSGSERFYFNFTGFPFPLGPFLNRRTIRTEAVKGSIWLFEQEQALGFSSVSTNIRMTVIKLKSGGLWVHAPIAPTKECIQMLKELDAPVEHIVLPTFAYEHKIFVGPFSRKFPKAQIWVAPRQWSWPINLPLEFFGIFRAKPLKDEDDATPWVAEIEQKVLSSPEVGIGPYVEVAFYHKPSRTLLVTDAVIFVPQQPPECISKESLLASAKNGLAVKLLSKGKEVPDEPVVDNKLNRQKGWERMVLQILFLGPSNLLEPNASFAQMSQKLIVSPIVKTLVFSKVPEKVRDWVDRIAADWRFRRIIPCHFAAPINASRSDFLAAFAFLDEFLPERAAAAPGLSLLLASFMGKAASYFPPDDMKTLSSLDEFLVSVGAVKKTVSGRKR

SEQ ID NO: 58763 - protein, 921 aa, Zea Mays
MTTEILRNMLYQSVGMTASEGRLFQVDVIVLDEVHYLSDISRGTVWEETVIYCPKEVQLICLSATVANPDELAGWISQIHGKTELVTSNKRPVPLTWHFSKKYSLQPLLDGKGKKMNRKLRMSNSQNLASPKSEFYYVKGKRRFRTNKIEQGNSRPLDISKQVQLSKHELSNMRRSQVPLIRDTLSQLWENGMLPAIWFIFSRRGCDAAVEYLEDCRLLHDCEASEVELELRRFKMQYPDAIRESAVKGLMRGVAAHHAGCLPLWKSFIEELFQRGLVKVVFATETLAAGINMPARTAVISSLSKRIDAGRQLLTPNELFQMAGRAGRRGIDTVGHAVLVQTPYEGPEECCDIIFAGLEPLVSQFTASYGMVLNLLAGSKVTHKQKESDDVKDKHSGRTLEEARKLVEQSFGNYVGSNVMVAAKEETERIRQEIQYLSSEITDESIDRKCREELSEEDYAEISLLQKRLKEEKQIRNELKKKMELERMAAWKNRLEEFESGHLPFMCLQYKDKDSIQHTIPAVFIGNLNSFADQKIMNMVEDDSLVSGKPKRDSGEQLYRPSYYVALSSDNSWYLFTEKWIKTVYKTGLPAVPSVEGGTLPRETLKQLLLREELVWDKVEKSEYGSLLSMEGSLDTWSWSLNVPVLNSLSEDNEVERFSQEHQDAVECYKQQRRKVSHLKKTIKATRGFKEFQKIIDMRNFTKEKIERLEARSRRLTRRIRQIEPTGWKEFLQISKVIQEARALDINTQVIYPLGETAAAIRGENELWLAMVLRNKVLLDLKPSQLAAVCGSLVSEGIKLRPWKNSSYVYEPSSVVTGVISYLEEQRNSLIDLQERHSVKIPCEIDAQFAGMVEAWASGLTWREIMMDSAMDDGDLARLLRRSIDLLAQIPKLPDIDPVLQKNAQIACSVMDRVPISELAG

SEQ ID NO: 58764 - protein, 749 aa, Zea Mays
MVVLIQTGCLKFFVMLRSEELACATREQADSANGVGNSAPSGSRGSGVALPFSATHNVSTYGDEFDTTIITFNMAVILYHLHDYESALSVLDPLYRNIEPMDETTALHVCFLLLDITLALQDATKAADIIQYMERAFGVANITSPNENPSIAQQQLAQPKPPVKISVPPDSELNAYAGGYENLSAGILPDDQIEFESLYSSFDGHQNLGRRIFNDFSRASADLAATAADLKVRLQIYKVRLLLLTRNLKVAKRELKVLMNMARGRDSSTELLLKSQLEYARGNYRKAVKLLSTPHNRAEPAMLAIFYNNLGCILHRQRSYHTSIWCFSKALKYTLSLRSEKPMKLSTLSQDKSCLISYNCGVQHLMCGKPLLAASCFREAMPLFYKRPLFWLRFSECSLLALEKGLLCAKGASSCNDEIEVIVVGSGQWRQLIVNHVSLRSNLGCAGVTSGEHKKLVSLGFARQCLLNALLLLNATEQENWVTTSNAEDYIQGTLQGYKNSGQKNTTSTDSKTPSAPTLANVNGEQKGTSLNATLQSSLAFYNEICRKENLKMRQAILGNLAFVELCLENPLKALSYAKSVMQVKDCSRMYIFLSHVYAAEALCTLNRPTDAAEKLSVYIRDGNDIELPYNMENSEKALVEKDSDSEDLAAATVTKVATEESEYSEGLRPEEARGVLYINLAMTAAVQGKVEQANYMVSRGLAMLPNNPRAVLASVYIDLLQGKSQEAVVKLRHCRNVRFRPGSIAASS

SEQ ID NO: 58765 - protein, 228 aa, Zea Mays
MHAMWKPRKFKYIYLLATLYVFTLTLPSAAAMYWAFGDQLLTHSNAFSLLPRTPWRDAAVVLMLVHQFITFGFACTPLYFVWEKAVGMHVTRSVFLRALVRLPIVVPVWFLAIIFPFFGPINSAVGALLVSFTVYVIPALAHMLTYRSASARLNAAEKPPSFLPSWSGMFVLNAFVVAWMLVVGFGLGGWASVTNFIKQIDTFGLFAKCYQCPTKPHPGSPLPAPPHH

SEQ ID NO: 58766 - protein, 330 aa, Zea Mays
MPLPLPPLGGNRAVSNTEERRGHGPQQGRRDEGKLSALKAYRKAKGLCFKCGNKWGYEHRCSTNVPLYLVEEMWELVVNEEEKLEDCIGDSKETNEDSVLALSAAAAEGGEGSRTIRLWASVYCQQLLVLVDSGSSASFLGSHLMNVLPGIQLLTKPMQVKVADGGILWSQHWLPNCKWLCGGTTFTTDFKFIPLGGYDMILGMDWLERHCPMSVHWAAKWMEFDYDKKRVHVQGVLPKVQTCYSLNGEQLGFMIKQEAVQHWLELQTVTELIVKNTPEAVQKLLEQYQHLFLRPDSLPPKRQVDHAIELLPGAQPFRLRPYRYTCNTQK

SEQ ID NO: 58767 - protein, 237 aa, Zea Mays
MLTLKSSNFKSRSATLDQKAHHLFEEIFPSIERLLSAISLKAELGTAGYQSVTVSGNPVHSSLALPVALDAVNEILSNYKNNTFFTEGNHFPRGNRVCSGSVLASREQLPIGIATAAFDGIHSSKWEEPDGAKGCWLIYTMQDGKSCELESYDLMSANDAPERDPMDWVLEGSADGGSTWNILDARNSEMFESRFLRKTFTVDKRYKANAFRFLRVRDSHSNPRFQIGSIDLYGKTI

SEQ ID NO: 58768 - protein, 620 aa, Zea Mays
MGYGYVEPFLPPQQQQQQGGYGQLQAQLAPRPPACPYSSSASAPPVSASYHSSPPPTSPPPLSSPPPASPLPEPSPPSSPPPALLPPPPDAPPPSLPPSPLPHPTPSPPQAPPPPLPTDQPRVQPRVYPSPPPPSLPPPPPPPPTVSPPSPGPSNSPSPSPSPAPATQAPAPAPARVAAYSPPPPKIAPPPPPHYRGKSHYTPHSPVKSHSNSTHAASGSGNNIEISREAATTIVALAGLAMLSFIGATIWFVKKKRRRIEPPATLPTQQPAPPPPPNYIPSSAGSSLASDGFYLRSPGYPFMRYSTGSRGFPYSPADSGIGYSHMLFTPENLAAITDDFAEENLLGEGGFGCVFKGILQDGRPVAVKKLKIGNGQGELSEASLDWQTRVKIAAGAARGIGYLHEDCHPRIIHRDIKSSNILLDNNFEAQVSDFGLARLAADSNTHVTTRVMGTFGYLAPEYALSGKLTAKSDVYSFGVVLLELITGRKPVDASQPLGDESLVEWARPLLMKAIELREFGDLPDPRMGNRFDENEMFHMIGAAAACIRHSAAMRPRMGQVVRALDSLADSNLNNGLQPGRSEVFLEPQTEEIRLFQLREFGSRDCSDELSQASWRSRRDL

SEQ ID NO: 58769 - protein, 321 aa, Zea Mays
MDPLRPWLPAATASSSPPAPLRVSVHAPIDQSHLFAAAHASAASALMKDKMKDFVKKITSSGSGTPSSFKGTSHVLGSGPSPSSSSSHPASRPSNPSANPRPAPMRPSPPPPPTSTTDFAPLTPLVSSSSCRPDANGTAAAAVACPSCGDAFPSEVAVSEHLDGCLASAGGARACASAYLAADPPPPAASVEVVKRLLGNLLREPENDKFRRVRLSNPRIKEAVADREGGMELLEAVGFRVRDEGGEPFAVMNEVPRDARLNGIRRAVLLLEGAHPSAPPVKAEVEAKESCSNVADLQDGAKNIDRQCVVNFTGSGIFLCS

SEQ ID NO: 58770 - protein, 509 aa, Zea Mays
MSGASAATLLSLWSGTVNLAPLLGAFLSDTYMGRYATIAFASMASFLGMIVLTLTAAVPSLHPAANSSTTGGPSSLQMAVLLASFALLAVGAGGIRPCNLAFGADQFDPRTPAGRRGINSFFNWYYFTFTIAMMVSATVIIYLQSDVSWALGLAVPATLMGLSCALFFMGTRLYVRVPPEGSPFTSFAQVLVAAARKRRLPAPRADLYDPPHRSSLISKIAYTDQFLCLDKAAVRTPEDGPAPNPWRLCTLQQVEEVKCLARLLPVWSSGIVYYIVLTNLGNYNVLQAMQTDRRVGRGGFHIPAGSFVVFNMLALTLWLPFYDGVLVPAMQRLTGREGGITQLQRIGTGIVLSIVTMLVAAAVERHRRRLGDSASCFLLVPQQMLAGLSEAFGIIGQVDFYYKQFPENMRSVAGAMLFLAFAIASYASGLMVSVVHRTTGGPDGRPDWLAQDLNQGHVDLYYLLIAAMAAVNLVYFVACARWYRFKNPAAADVEQLELELEGKAAAPPV

SEQ ID NO: 58771 - protein, 392 aa, Zea Mays
MWLPHASDLRAFLAAAAVAHLSSSRASRASPCATPPPPRFRAFASSRASPPPSPSQTGSIASAAAAACEHVAEKPATCTADELHYAPVPGTEWRLALWRYLPPPEAPKRNHPLMLLSGVATNAIGFDLSPGASFARHMSMQGFDTWIVEVRGAGLSTRESELAATNTKSDITPDPNFDESSTTKASIAVPAENMSSSQPQISEVPVITDKNMVGTSISEEPQLVTKLSNALAQLGETFSGYVKDSRLKNIADSFFDRVSELAPAASVASLEEVSQRILGLLELPQTSVISDQISNLSQRLVKILGENQRSVSPKLFGWQERLSATIEDLQKQLELIISYDWDFDHYLEEDVPAAMDYIRKQSVPKDGKLLAIGHSMGGILLYAMVSKCGMFC

SEQ ID NO: 58772 - protein, 876 aa, Zea Mays
MAGCAPSRVASCGPWGGRAALESELSWDGSHYSISSGILPSLGARSNRRVKLRPFIVSPYDRRYRCWETFLIILVVYSAWVSPFEFGFIQKPTGALAAVDNVVNAFFAVDIILTFFVAYLDRMTYLLEDDPKRIAWRYTTSWFVLDVASTIPSEFARKILPPDLRSYGFFNMLRLWRLRRVSSLFARLEKDRHFNYFWVRCAKLICVTLFAVHCSACFYYLLADMYPTPTDTWIGNSMPDFHQRGLWIRYVVSVYWSITTLTTVGYGDLHAENTREMIFNIFYMLFNLGLTAYLIGNMTNLVVHGTSRTRKYRDTIQAATSFALRNQLPSRLQDQMISHLCLKFRTDSEGLQQQETLDVLPKAIRSSISQYLFFNLVQKVYLFEGVSNDLIFQLVSEMKAEYFPPREDVILQNEAPTDFYILVTGSAMVGVAKAGDVVGEIGVLCYRPQLFTVRTKSLCQLLRMNRTAFLSLVQSNVADGTIIMNNLIRLLKQQNDNSVMMGVLKEIENMLARGRLDLPVTLCFAVNKGDDFMLHQLLKRGLDPNESDNNGHTALHIAASKGDEQCVKLLLEHGADPNARDSEGKVPLWEALCEKQNPVVELLVQSGAGLSSGDVALYACVAVEENDPELLENIIRYGGNVNSSMKDGTTPLHRAVCDGNVQMVELLLEHGADIDKQDNNGWSARALADQQGHDDIQSLFRSRKAHRQQHASKGRVAPVPIWRFNSEPTMPKMKHEEDAELRGKVVPQKLLRKRVSFQNSLFGVISSSHARQDTGRLLSKGLAGTGSPGCSHGSLVRVTIGCPEKGNAAGKLVLLPRSMTELLELGARKFGFKPTKVLTTGGAEIDEVELIRDGDHVVLVSDDWAPDVAQLRPNDK

SEQ ID NO: 58773 - protein, 1384 aa, Zea Mays
MAPKKKQPDSKQRQKPKSSSSSSAATAAPRLQISSENERRLRRLLLNSSAPSPSPANVSEVRGESREQKARRLRGVYDKLALEGFSSAQIEQALSAIPDSATFESALDWLCFNLPGDELPLKFSSAGDSTMSSLTGAEGSVKVLSTAKDNWVPQSREPEEVKVSTEGLEVRIGGRRDENVSLDDGRLSQAAWIRQYMEQQEEEEDANSNDSSTWEDHCLQSFEVVEAKPSRRKSKAAKKNSKHGNLKEQISYPTNSVSSNSETANVEGVQNDLEASEERSESLGNIDEGSDLKKEIPKDIDKTCAKEVDEEVIELDNMFFEDSSAWEAVAPEILKQQQIEKLSHDGYGHLIGNIDDIWKKGDSGKMPKAVLQKFCQKLGWEAPKYNKISERDGKFVYSVNVLRGATGRGKSRKAGGLTIIQLPKLHEEYGSVQEAQSRVAAFALYQFFADLPLRQLLTEPYSSLILRWQEGELSSTSRVLVTEDRRRSGFVDMLLNIDADTIPSSEIENSDTDVISMDSGNTEGSKSVNEKRQTTMTSCMGLKSAERAESAILKKQLEDKRKLPNYLKMLEARASLPIARQRQHFLQLLKENDVVVVSGETGCGKTTQVPQFILDDMIESELGGSCNIVCTQPRRIAAISVAERVSDERCEPSPGSNDSLVGYQVRLDSARNERTKLLFCTTGILLRKLSGNRDLSDVTHVVVDEVHERTILSDFLLIVLKNLVEKRSNQQGRKLKVILMSATVDSSLFARYFGECPVISVEGRTHPVSTHFLEDVYEKMEYCLALDSPASGAYFAQHGEKWKHASSSVNNRRGKKNLVLSSWGDESTLSEGYVNPHYISDYYRSYNERTNQNLKRLNEDVIDFDLLEDLICYIDENCPQGAILVFLPGVAEIDLLIDRLSALVRFGGASSDWILPLHSLLGPSDQRKVFQSPPDNFRKVIIATDIAETSITIDDVVYVVDTGKHKENRYNPHKKMSSIVEDWISRANAKQRRGRAGRVKPGLCFCLYTRHRFENVMRPFQVPEMLRMPLTELCLQIKSLHLDDIKSFLLKAVEPPNEEAISSAVDLLYKVGAFEGHEELSPLGYHLAKLPVDVLIGKMMLYGAIFGCLSPILSVAAFLSYKSPFLSPKDEKQNVEKAKATLLNENLDGSSSVTDNKQSDHLLMVIAYDKWSRILLQNGDKSARQFCHSFYLNSTVMHMIRDMRLQFGTLLADIGLIDLPKDTLRHKVGSRKNNLESWFSNMSLPFNAYARCTSVIKSVMCAGLYPNVAASLEGVDPGALGGRKPSDVLFSKDRPRWYDGRREVHIHPSSVNHSLKAVQYPFLVFLEKVETTKVFLRDTSVVSPYSLLLFGGSMVIQHQCLSMTPCDFSGDSRGWWKPFNVNLF

SEQ ID NO: 58774 - protein, 1543 aa, Zea Mays
MITDSLDPSNGSGIWEDPGILRLNHDDVRTRRYAPYFLSNDTSLPFRFKVYRGAVNSDDIGSFSVIDENSVPAGYAVPIYVEETPDEFFFQHREARSSDHLIEKRMSALSHYMISIEFDGTSGPSKPMSMDLVGIYFFEVNFSSSKKPILGEESLGAFSSNAKGNDGLIVPVVLDVSLQNYSKRIRVYSTVILYNATSMPLELRFDIPFGLASKVIGPIPPNKEIPLPVHLSEAGQIRWHPVGRTYLWSETRSLSSLLSRENRVGFMKSSVCYPSHPSNDPFRCCVSVEEYNVPSSVSTKKKQLCSERLNTQVSGSSTPNTFKQNLTRTHFIRHVKLNTPLLIKNYLPVYISLAIDNGGSARVISLKEVGSASILFVDPSNDLGITIDIQDYRSLNIKFPRAESFSTTAKLNGFKFSITESITFYSNLSNFPLNVMLEKSMDARSGARELYLSVPFLLYNCTDLLLTVTESSSERSGPTLVIPPSFELDGYARHMLEKGGLSLVNPSVQCFTGKMPQIYLMDGHCSSSDISCTRNSESVKKDLDNSVKAYMFAPDGHTPATELSVKLNASPPNNGTETTRRNWSNPFLLVPASGSTNVTIPQSSTSGAFLVAVASIPVSTELFGRTRAIAFRPRYVICNACSNDLFFRQKGTRFSKHLSSGQHSFLHWSDTARDLLVSIRIDGPGWQWSGSFFPDHLGDAQLKMRNSASGLSYMVRVEVQNADLDLNSNRFSGKNNINTGTVLILLSDDKTGFVPYRIDNFSMEKLRIYQQRCESIETIVYPYTSCQYAWDEPCYPHRLTVEIPGERSLGTFNLDILNDDVHVSLPSTSEKAARQFCISIHAEGAIKVLSVLDSNCHNKETNEKDFLGSKEPKVVDHKLELDMNFAEVIKLHLPFIGISLISSCPQELLFASAKEMTVVAMQSLDQQRFTVQIQSMQIDNQFPDSPHPVMLSFEGSHKGKSMNFFKSKDTKLKSANDILSSTSEPVLQFAAAKWRTKDVSFVSYQYINISLAPLRLELEERLVLSMIEFFRSVSSRINIGHLEKSIELSIGGATDMLREYEKISKNISDKLLVQDSELLPSVVPVGAPWQQIHLLARKQKKVYIELFQLTPVKLTFSFTSTPWLNRNEGGSDPSVGFNNATAIQRGLMALLDVEGVPVYLGEIIVENLMASWQSVQDILMRHYSRQILHELYKVLGSAGVIGNPMGFARNVGFGLKDFISASRKGKLQSPVELLNGIAQGSKTLIGSTVYAVSSATSHFSKTAYKGLVAFTYDEQAASKMEERERQLGLHGEGVLNGFLEGLTGLLQSPIRGAEKHGLPGVISGLAMGTAGLVARPMASILEATGRTAQSIRNRSNPHESNYLRVRFPRPVARDRPLFPYSWEEAIGESLLAQADSGRLKEETFVMCKTLKGAGKFLVLTEKLLLLVSSPYLVDLGSPRFIGVPPDPQWSIDTEMHLKSVVHLDRSQEVVNIVGSNGQTSPRDKRGGTRNRVMSSAFVPLFHLSIELPNEEDAEGTVQVLQALIEKGKARRWDKNILHRSNIS

SEQ ID NO: 58775 - protein, 79 aa, Zea Mays
MRCTVSVEKANMVVLKDNNEIGKHSFCFIFFYWNNYSVHILHLIVQNNSWTHNSKLSCSICVLLEKKTVGLLFFRVAIS

SEQ ID NO: 58776 - protein, 364 aa, Zea Mays
MDSNDRDEQQQQTHGLQTSDDNVSDHHQQQQQTQSPQTSNGNGNASDEHEKQQNPALEKARSLVLLLATLAAAITYQAGLNPPGGLWQSNGRLYKIGDPILLTTNPRRYKAFYYCNSVAFVASLVAVMLVRKKTLHHHNALEAAMVLDLFGLIGAYAAGSCRDVSTSIYAMALAGAVLVYVVIHVVFLTLDEKDGSSARRNDDASFEEREKKEAGLVEKRRKRLLLFAILAATITYQAGLTPPGGFLVQDDNRTGRHAGDAVLLNNYPRRYTAFFYCNSVSFMLSIALIILLVNPNLYRPAIRSNALSVCTAAGLIGIMGGYAAGCTQHLKTSIYIFVLAAVVLSTVVFLAAVFLVIHLRKKRR

SEQ ID NO: 58777 - protein, 1524 aa, Zea Mays
MNFYNGRHCLRFGRVSQFALRGCMCSYQHHLDNSIPLSPQWLYAKPADGKISLPHGSSLELAEKEVRMLEGTVDRKERRRNAFDADSGLRWLEEERETSLLGRRERKKDVDRDVDNRKIDRRSDNVSARDITDPRAAPASERWHDGSTRGLGNEGRRDGKWSSRWGPDDKEKDSRSDKKVDAEKDETHADKLTFTGRLLSESDSRDKWRPRHRQESHSVGTATHRAAPGFGSEKGRVKDSTNVGFAAGRGRGNPNSVASFNRPSSAGSIGAPAVHGKFAKTAVSFCYPRGKLLDIYRQKNMMSSFDDVHMKLDEIPSVTLSTAAKPLAFVAPDTVEEALLEDIRKGKVISSEGINGIGNKKERAKELEEPASGIDDDMGKASFAIAGLGQEGSSGLISVNDASYVEGTLPSGVSTSLLKISLEENAISNQHGITDTQEGLKTAEIKENADHALGTKLPDDSNTLFEVPSFEHLQEPTRPYQSNNMDIKVGGHANYPEELTLYYLDPQGGVQGPFLGADIISWYEDGYFGLELPVRLSQFPDDVPFRPLVEVMPHLAQKTQSRIPLPCDGNSESLESSQSKFESSVPSTSSGRTDQFSIWDSESNAVDPKRGDHEASIPSRSGWLSSPETGKDISNTSNRQQHIPESVNQDAEEVLYTGRPNSSMGQSLRDLENDRADFQSTPHDPHSVAGEANLLQHNVPRDSDLSPLGLLWSELEGRPKQPLSSNVLSVNERRNPKPTTPKDIPPVNMRQGPLSRMNEVSSVRDEWPANFGRLDNMNDANISGRIHQVEAEHHLNFDGHLLLQQIRREQQQQRQEQLMAHNNLEFSGAFPGQVFDPLNQHRQPMNQQIPDVEHLLRIQFELEQQQQRQLQQEQHQRQLQQQRQAQLLQRQQQQQQQQQQQMILEQLLQQQLQGSNFGPTSMVDQVLLREHVLNELHQQPHHLQRQHDAAIEQLIQAKFGHGLHREHHNDMLDVLSRSNQRQMLPLEQQLLLGLQHEQQLKSQQLANALRQHSGQEEERHLSGVWPMDAAAQFIRSGTSPNQIHSRFDLLENLQRSSSFDHHEHLDRSLSLHEQLHMGGQGIRSLERTGSLPGGGPGPNPDVINALTRHHGLSQLETHGDVYPLVQMPMLPSGVHPQQLRHQDQLPGSHIGRLERHWSDANGQLQNSLMESSHINQLQIEAEKERRNVEMNLSVDNPHAWGALMNKDRNTEQDLTDMIHKKLVLQSQQSRGFPDVSVPASFRRKDHFVQPVVESPLRSVDMSFEESLSERSLYAKSGQLAQEGSSNLGTLPNSIENTGKFNLRSGSGSMLEQKHFLGIDDVQSDFLETTGGRTSANQLVGSVNELTRGKRQGSSASLAGDDPNLADEGVSKWSDSGMSKGSSHSLLKRSTNQHTTTSQSVPTDLSAIRLKKAGLASSDENKMEAGFASVAQGMEGCVPSNKETGAYGMPSATNNPDASGQSFSEALKSSRKPPLQYDASESADCGPGGKGAKKKTKKGKQIDPSLLGFKVHSNRIMMGEIVRDD

SEQ ID NO: 58778 - protein, 364 aa, Zea Mays
MLETSAEKHTTIMGHDHMSRIKMHMAEGSFGDRNRCQQPGCNEVVDGRVVYCKTHSGELSCQQFSHLQSGLESSVPCTEQELHVKHEGDDRGMFCKNDSCSKQAHENSIYCKLHSGVSKGCMVRGCTRGAHGGTPLCIGHGGGKRCVIPGCPNAACGQGLSDRCVRHGGGRRCRFEGCAKGAQGNTDYCIRHGGGRRCKFEGCTKSAQGRTDFCIKHGGGSRCKFQGCGTSAKWGTDFCSIHRKALLGGDNAAVPEALPAASEKRRRAKKPKKAAKLSEASQENATAAAAIAGNSTQHMGGLLIAIPVANRDMLTKAVAATGQAAIASAQIVAPLSMKSPTPSGAAAATLTGREAGASREMLGL

SEQ ID NO: 58779 - protein, 252 aa, Zea Mays
MMLVYEYVNNGNLEQWLHGAMRQHGVLTWEARMKIILGIAKALAYLHEAIEPKVVHRDIKSSNILVDEEFNGKLSDFGLAKLLGAGKSHITTRVMGTFGYVAPEYANTGLLNERSDVYSFGVLLLESVTGRDPVDYGRPANEVHLVEWLKMMVGTRRAEEVVDPDMELKPATRALKRALLVALRCVDPDSEKRPTMGQVVRMLEAEDVPSREDRRSRRGHSGNADSESKASSSEFEISSDRRELGPSARFQS

SEQ ID NO: 58780 - protein, 207 aa, Zea Mays
MKAGIAAGAVEAVFCTPFELFKLRNQHPWMLTGSGKPPLPSDVHLPSRVILLEGWGALWRGLRSGIARDCVFGGMFFSTWQFLHTVMLTWKAVNMSPKPRNLEAAGPVPPFASSVAAGFAGAIAAAASHTFDTAKSRSECTVVPKYIAMERKFLKWKAPGTWIERKTGISPADRNVLFRGIGLRTARSGIASFVLVGSYYLAVNHLS

SEQ ID NO: 58781 - protein, 217 aa, Zea Mays
MEMGGGSWDKDKVQRALRAAYNNPERAVEYLYSGIPVTAEIAVPIGGQGANTTDRAPTGEAGLSGIPNTAPLDLFPQQGASNAGGGAGGGPLDFLRNNPQFQAVREMVHTNPQILQPMLVELSKQNPQILRLIEENHDEFLQLLNEPFEGGEGDFLDQPEEDEMPHAISVTPEEQEAIGRLESMGFDRARVIEAFLACDRNEELAANYLLEHAGEED

SEQ ID NO: 58782 - protein, 408 aa, Zea Mays
MVVAAMRDEGEEGRRRAVVAIRDYDPKTDRDGTEAVERECEVGPAAAAGGMSLHADLLGDPVARIRHSPHYLMLVAETSGPDGRIVALVRGTVKSVASGKSRPGAPAFARVGYILGLRVAPSHRRMGIARQLVHRLEQWFELMGAEYAYMATDRSNEASLRLFTGRCGYSKFRTPSLLVHPVHSHRLRPPPRATVVRLGARDAERLYRSRLAHVEFFPADIGAVLGNALSRGTFLATVGGYEWGGVDRFLACPPASWAVASAWDCGGVFRLQVRGASRLRRAAAAATRALDRAAKWLRVPSVPDFFRPFAGWFVYGLAGSGGRDAAMAAEAVFASIVNMARGRAAAVAVEVAAMDPLRGRIPHWRRLSCTEDLWCMKRLGAGGGGHADGWDWARSAPGRSIFVDPREV

SEQ ID NO: 58783 - protein, 217 aa, Zea Mays
MEFWGLEVKPGSTVKCEPGHGFILHVSQAALGESKKSDSALMYVKVDDKKLAIGTLSIDKYPQIQFDLVFNKEFELSHTSKTTSVFFSGYKVEQPIEGDEMDLDSEDEEEELNIPVIKENADGKEEQKNQEKAVAATASKSSLGLEKKSKDDSDDSDEDESDDSDEDDSDDSDEGEGLSPDEGDDDSSDEDDTSDDDEEETPTPKKRQARREVLKML

SEQ ID NO: 58784 - protein, 853 aa, Zea Mays
MSTCLHVQDPRNIAMSRPLDFAVLKYKNQKLAEQLEVHKFEFCALESRFNDLKEKQRTHNKTLVLVKSYWERLIADLGIVSVCKNESSRSSCSTGNNNIRKETDFLNGLLEAGATESSGSPNCQLGNDVSSEQSTTIDILQKLFLPSSGPWHVNNEFVSAALMKLPENEHSRQLHNATSDVLSKLHVVMRTVDNLHLKHRQLAANYQKQRDSSAWNRAEQKRLKEELTSVVAKLEGSKQKLAVLKAQGDNKQATPILVPTLGNKNMTAEKVRDKQTELQDLEATHKELMELISKRLEEIRRLHTERIEILNKLATFQNILTDFKSIHSSKAFQLVNDQLQKSQAELDDHQTLLEKLQVEMDTFVWRERQFNQKVDLAEIPQKVSAYCVSRIADLEKDVQKLCNEKNMLVLKLEEASREPGRNQVISEFKALVSSLPREMGAVQSELSKHKDASLQLHSLRAEVHSLSSIQTRKEQEIEEMSFRSAHAGSDISQLQSLVRELRENTQELKLFVELYKHESTDSRQLMESRDRELAEWARVHILKYSLSESKLEQRVISANEAEAISQQRLATAEAEIAELGQKLETSRRDLVKQSDILKSKHEECEAYVVEIESIGHAYEDIMSQNQQLLQQIIERDDHNTKLFMEGVKSKQSHDALHLEVRSLQRNLQHASTLMDLCNQKTIRLEDQLRGWSERLRRLSEDGMQQSISLGNYQKKLSGMHGEAPKLRQSMDVLQAKAGSNRLEIAELLIELENERFGKKRLEDDLDLMSSKANSLREKTDNSAVLQKLLHEAKEYRGILKCGICHDRQKEVVIAKCYHLFCSQCIQKPLGSRQKRCPSCGLSFGVNDVKPIYI

SEQ ID NO: 58785 - protein, 93 aa, Zea Mays
MSCCNGGRGPEISICTETSSHFHGNACPGSEATSRGNSLTGHHARAAAFRAHEIVSRHPDVCRPCRLDFIVVIWKASKIVHPFLIVLCYTSAC

SEQ ID NO: 58786 - protein, 657 aa, Zea Mays
MDDYCSQDELRQKKEEEMDDYCSQVPVGHLVFMVHGIGQRLEKANLVDDVVDFRRVTANLAERYLTSYQRSTQRVLFIPCQWRKGLKLSGESTVEKLTLDGVKGLRVALGATVHDVLYYMSPIYCQHIIDSVSNQLNKLYMKFLKRNPGYSGKVSLYGHSLGSVLSYDILCHQESLWAPFPTEYLNMETSDRNQGAKSANEADLHDSGAKDHDTSSLGYSCADNENSVIDEDSTRTDVSCMDSILPSCVLEDSPNNHDTVVPRGAVVADQNGEEKKVENYQSVYAEEGTTSGVITKKAEGSSISRSAKEVHEEVLDKEKLMVLAKDKLILSLEEEVKCLKAKLDQLEQHNHLVTENTSGVEYHEGQNYNHALNSGKLFVAQESTNQSYSPQIKYTKLNFKVDTFFAVGSPLGVFLSLRNVRIGIGKGQDYWQDKNVIEEMPCCRQMFNIFHPFDPVAYRIEPLVCEDYLKKRPVIVPYHRGGKRIHVGVQEFREDISARSQAIARQLKSLKVKAVAAILALSRNDTEEDGESANEKEKSYGSIMMERLTSSPNGRIDHVLQEKTFQHPYLSALGAHTNYWRDHDTALFILKHLYRDIPEDPPSDVIERMPIKLFYERDPVEEETPVTFSDHAAIKEFCRKVKAYSRKMEDDANCQAS

SEQ ID NO: 58787 - protein, 589 aa, Zea Mays
MECQFGSAMSSIGEYLASHVLRSLTNHDGGSNIRRCECAVVGSKRRRVSSGGDATDSISASIGGAGEGGGKKALYHCNYCNKDISGKIRIKCSKCPDFDLCVECFSVGAEVTPHRSNHPYKVMDNLSFPLICPDWNADEEILLLEGIEMYGLGNWLEVAEHVGTKSKLQCIDHYTSAYMNSPCYPLPDMSHVNGKNRKELLAMAKVQGESKKGTLLLPGELTPKVESQFSPSRVKVEDALGEGPAGRSPSHMAVGANKKASNVGHIKDGATVSKVEDVHVDRSVGVKKPRYSADEGPSLTELSGYNAKRHEFDPEYDNDAEQALAEMEFKETDSETDRELKLRVLRIYLSRLDERKRRKEFILERNLLFPNPLEKDLTSEDRELYHRYKVFMRFLSKEEHEALVRSVIEERKIRRRIQELQECRSAGCRTLAEAKIHIEQKRKKEYELNAQKAKDSSQLNANNKSVQKMNRPMKIESDGNLDPKKGGAGLDSPKTTGPTSVKQWDDWDIVGLPGAELLSASEKLLCCQNRLLPSHYLRMQEVLMQEIFKGSVLKKEDAHVLFKVDPTKVDSVYDMVSKKLGNHEEAPTV

SEQ ID NO: 58788 - protein, 380 aa, Zea Mays
MRVDLMSAYAQHLRDIIKQRVAHPTHYDTPLRGFKVVVNAGNGCGGFFTWDVLEKLGADTTGSLHLEPDGRFPNHIPNPEDATAMSLTRGAVLAQGADLGVVFDTDVDRSGVVDAGGAAINGDRLIALMSAIVLGEHPGTMVVTDARASDGLTRFVESRGGRHCLYRVGYRNVIDKGVQLNADGVETHLMMETTGHGALKENYFLDDGAYMVVKIIIEMVRMKLAGVEGGVGSLIRDLQEPAESVLLRMDVMGEPKDAKERATHAVEAFKNYIQEDKLFGWVLDDCGDCSVAEGCLMDTNNDPIDVDAHMYRAKLYDENQRAVGMVHIRQSVHNPNIALNMQSYAPGGCKSMAKDLLERFLLASGLNGFLDISQVEKFVQ

SEQ ID NO: 58789 - protein, 69 aa, Zea Mays
MAVAGFLASVGYMHYFHTFGFIEETWYMALSFLVVSVAAALVESHPISTELDDNLTVPLTSFLVGSLIF

SEQ ID NO: 58790 - protein, 271 aa, Zea Mays
MEQREQAQKVALEALRNASATDNVARIYKLFSEVSKTARPEAPATCFDSFLSFHQEAVQAVTDIEAIQAATSMAAAVASDEQQLEDAPPVLQEIAQNRTVVRRRGIGLGSVSKSVSFAPGTLDPKQDDGGGKAIRSSSASRKCLATDKIGEDGGDEKRSSSSGPSSATTTTAHSALGSSLKLAKKIQAEAGSWFMDFLEAALETGLKKSKASSMGDGRKQSSCCCPQSLMLRVINWVEMEQSSGDSSGRKTAHPRAAAVARKLRIKAKNPS

SEQ ID NO: 58791 - protein, 369 aa, Zea Mays
MVVVGPEAPLVAGLANDLVKVGIPTFGPSSEAAALEGSKDFMKKLCDKYNIPTAKYHTFTDAVEAKKYVKNEGAPIVVKADGLAAGKGVVVAMTLDEALEAIDSMLVEGSFGSAGSRVIIEEFLEGEEASFFALVDGENALPLESAQDHKRVGDGDVGPNTGGMGAYSPAPIVTDELKRIVMESIIIPTVKGMAAEGCKFVGVLYAGLMIEKKSGLPKLIEYNVRFGDPECQVLMMRLESDLAQVLLSACKGELSNVSLTWSPEMAMVVVMASQGYPGSYKKGTVIKNVDKAERVSPAVKIFHAGTAVDGDGNLVAVGGRVLGFTAKGKDIEEARARAYGAVDAIEWVEGFCRRDIGWRALRQKQVANQ

SEQ ID NO: 58792 - protein, 571 aa, Zea Mays
MAETNDASPSSKLHTRLRLWEFPDCYVFEPIDGLADLYLSVSRTSGTMNLVQDLPSRGSTTKHKVQTVYGVIGVLKLAVGSYFVVITDRDCVGSYFGHAIFKVTGLKILPCNNAHNTTSTDQKKMETKFSELLDSAERTIGLHFSYDINLTLSAQRLHDLGDEYRALPLWRQAEPRFLWNGYLLEPLIENKLNQYLLPVIQGSFQNIQAEVGSEMVNVTLIARRCTRRIGTRMWRRGADAEGYAANFVESEQIMQSKGFTASYVQVRGSMPFLWEQIVDLTYKPSFDIVRQEEAPRVLERHFHDLQKKYGAVLAVDLVNTGGGEGRLRERYAKSIEPILSEDLRYVHFDFHRICGHIHFERLSQLYDQIKDYLQKHKYFLINDKGEKIEEQTGTTRTNCIDCLDRTNVTQSMIGRKILESQLQRIGVLGAGDTISKHPTFDTNYKILWANHGDAISIQYSGTPALKGDFVRYGKRTTQGILNDLRNALGRYYLNNFVDGTKQDAMDLLQGHYMTSVSRDMAVPSKAGLLQSYASFRLAFALVMGALMFMLMSLRQGSKHLLSVFLSNIIYG

SEQ ID NO: 58793 - protein, 95 aa, Zea Mays
MSSVAGEGEGEGGGRRRREEPRSQQHEDGVEVADGKLDLGDLYGAAAGWVEARTSCPHLGTMPPAGAELLMTLLACLRPTLRAPDVMTLLKTDYA

SEQ ID NO: 58794 - protein, 254 aa, Zea Mays
MQAPKPTAPSKTSPSEPQLPPKERERRVPMPRLRKRIANRLKDSQNTFAMLSTFNEVDMTNLMKLRSDYKDEFVTKHGVKLGLMSCFVKAAVSALQNQPIVNAVIDGDDIIYRDYVDISVAVGTSKGLVVPVIRDADTMNFADIEKGINNLAKKATEGALSIDDMAGGTFTISNGGVYGSLLSTPIINPPQSSILGMHSIVQRPVVVNGDILARPMMYLALTYDHRLIDGREAVFFLRRIKDVVEDPRRLLLDI

SEQ ID NO: 58795 - protein, 57 aa, Zea Mays
MNRRRWLAAAAAACMRGGGARSESQESEGNEQHPHGVDRVLLRSGVDKANGLKTQWW

SEQ ID NO: 58796 - protein, 130 aa, Zea Mays
MAQFYLQISQSNLKKCFSMQICDARVSIYIVGACNQQTIRWRHSRPRTSIYGGQPELESTYTYAAGGLGGFAMKPTHIDQQSPVPGKSAGARWTSDPDAPPRAHRSAGLDATFDGEGTTMRRPSVSPRDS

SEQ ID NO: 58797 - protein, 643 aa, Zea Mays
MGVIGIVSSCPCHQDTLFTPASFCLGIMVMKMELEDDGALGGTAGTWTEEDRGLGAAVLGADAFAYLTKGGGAISEGLVSASLPDDLQNKLQELVESESPGTGWNYAIFWQLSRTKSGDLVLGWGDGCCREPRVGEVGAAASAGSDDTKQRMRKRVLQRLHIAFGVADEEDYAHGIDQVTDTEMFFLASMYFAFPRCAGGPGQAFAAGIPLWVPNSERKVFPANYCYRGFLANAAGFRTIVLVPFESGVLELGSMQHIAESSDTIQTIRSVFAGTRGNKAAVQRHEGNGPAPPERSPSLAKIFGKDLNLGRPSVGVPKVDERIWEQRSAGGGTSLLPSVQKGLQNFTWSQARGLNSHQQKFGNGVLIVSNEAGHRNNGAVDSPSTAQFQLQKVPQLQKLQLQKLPVVQKTPQLGNQQPMQTQVPRQIDFSAGSSSKPGVLVTRAAVLDGESAEVDGLCKEEGAPPVIEDRRPRKRGRKPANGREEPLNHVEAERQRREKLNQRFYALRAVVPNISKMDKASLLGDAITYITDLQKKLKEMETERERLLESGMVDPRERAPRPEVDIQVVQDEVLVRVMSPMENHPVKKVFQAFEEAEVRLGESKVTGNNNNGTVVHSFIIKCPGTEQQTREKVIAAMSRAMSS

SEQ ID NO: 58798 - protein, 1129 aa, Zea Mays
MWAAEAAFSRSGSWREAEDEREALRWAALQRLPTVTRARRGLLRSPAPDGAAAVEGDDVLCEVDVAGLSSGDRTALVDRLVADSGDSEHFFRRIRSRFDAVQIEFPKIEVRYEDVTVDAYVHVGSRALPTIPNFICNMTEAFLRHLRIYRGGRVKLPILDNISGVIRPSRMTLLLGPPSSGKTTLLLALAGRLGPGLKMSGNITYNGHHLNEFVPQRTSAYVSQQDWHASEMTVRETLEFAGRCQGVGIKYDMLVELLRREKNAGIKPDEDLDVFMKALALEGKQTSLVAEYIMKILGLDVCADTIVGDEMIKGISGGQKKRLTTGELLVGSARVLFMDEISTGLDSATTYQIIKYLRNSTHALDGTTIISLLQPAPETYELFDDVILIAEGQIVYQGPREYAVDFFGAMGFRCPERKNVADFLQEVHTSSLLNSIPTGISRGFTFLSSQVLSKKDQQQYWCHYDYPYQFVSVSKFAEAFKTFIIGKRLHQELTVPYNRHHNHPAALCTSSYGVKRLELLKSNYQWQRLLMKRNSFIYVFKFIQLLLVALITMTVFFRSTMHHDSVDDGIIYLGALYFAIVMILFNGFTEVSMLVTKLPVLYKHRDLHFYPPWAYTLPSWLLSIPTSLYESGMWVLVTYYVVGYDPQFTRFLGQFLLLFFLHQTSLALFRVMASLGRNMIVANTFGSFALLVVMILGGFIITKESIPVWWIWGYWVSPMMYAQNAISVNEFHGHSWNKQFANQNITMGEAILTGYGLFKEKYWFWIGVGALFGYAIILNILFTMFLTLLNPIGNLQAVVAKDQVRHRDSRRKNDRVALELRSYLHSNSLSVLPPAGNLKEQKGMVLPFQPLSMCFRNINYYVDVPVELKKQGVAEDRLQLLVDVTGAFRPGILTALVGVSGAGKTTLMDVLAGRKTGGLIEGSITISGYPKNQETFTRISGYCEQNDVHSPCLTVIESLLYSACLRLPSHVDADTQRAFVEEVMELVELNPLSGALVGLPGVNGLSTEQRKRLTIAVELVANPSIVFMDEPTSGLDARSAAIVMRTVRNIVNTGRTIVCTIHQPSIDIFESFDEVKGVNRSHYLSYRFYKHESLLVQTNIFHTCDESPLVSYAYGLPVSLRSKTVRCYI

SEQ ID NO: 58799 - protein, 166 aa, Zea Mays
MPGYAGTTQPKEMPAGCKGRRGPGEKARLLGHTVPCRAGEQRIMERRAMLLLPAGLSPRGPPLRAGALHPGARFLAKVFYFYFDREKFLRRFWANGISFVDHVPGRHPASVRDVLASQLTWTQDSWCWRTVWGMTFDCITLESSIALKSLLISRPLPFSFVVCQIN

SEQ ID NO: 58800 - protein, 363 aa, Zea Mays
MAQGTQLNNANTAQALQGMQHMGVMGTMGMNQMRPNGTIPYGAQQRFAHAQMRPQASQQPALSPQKVPGQGLSRTASIAALNSQLSGSSQNGQMVAMSMPQQQQWLKQIQSSMGSPVSPQQQYQQQRLLFMQQLQQKTGLSQQQLLQIQQQHPHLTAQQLIQQQQILQQFQQQQLLQSPRVSASGSQKSANLTGSQPGTPLSGGTMTGGSASQGAEGTSQLLGKRKIQDLVAQVDPLGKVDPEVEDLLLEIADDFIDSVTAFACTLAKHRKSSVVEAKDVLLHLERNWHLSVPGFSREDKNPQRNSVKPLVDPQQSESDVTGIRGTSNKLGANNSVGNHQIRPPMAETSAVPTVGSLSKAPRF

SEQ ID NO: 58801 - protein, 337 aa, Zea Mays
MSGDRSPTVERRRGIRRLLLHPRGEASSSSPPPPAPAPEEGRRKGFATAALRGLGCTSASASQAYAPGEAAAAAAVRSSADWQGRRRRRGRDRRKERGGGGGGGFVTGGIGADVWCAPGIPFAAEASSVNCVVARHQMVGRGGRGAEGDRSHRERPCLSRRVTVQEQISSSFMDSPPPPHLDAPLFGADLIPSGRLRRMRGWRHSPGGLEEEIRMFQTRVLLGGMNMYDRYQDWRLDVDNMTYEELLELGDKIGYVNTGLRDDEITRNLRKVKHPSFSSLRFATEMERKCSICQEEFETNEEMGRLDCGHSYHVYCIKQWLSQKNICPVCKTAVSKN

SEQ ID NO: 58802 - protein, 654 aa, Zea Mays
MRLWRRIQYEERKCANQRKLLSDAETVRWLNYAVEKIWPVCMERVASQQFLLPIFPWFLEKFKPWTARKAVIQSLYLGRNPPMFTDIRVVNQSTDDDHLTVKQLKFTCQVLEIGMNFLSADDMDARMAVQLRKRLGFGITTNMHITGMHVEGKVLVGVRFLRQWPFIGRVRVCFVEPPYFQMTVKPLFGHGLDVTELPGISGWLDRMLDVAFGQTLVEPNMLVIDLEKFASESTGPFSFIHLAKSLMLRHAAVQGKHLLAADNWFSVDEKPPIAYARVEILEGADMKPSDPNGLADPYVKGQLGPYRFRTKIHKKTLDPKWLEEFKIPITSWEALNLLHLQVRDKDPIFDDALGDCSISINKLRGGIRHDIWIALKNIKTGRIHVAVTVLEEENEKVSNDEEEQCGIHKVDKASTPRSSFSSRTNHESECSDEFRKMSDEFEPVDIEGSEKPDVWVHRPGSYVTSTWEPRKGRARCQDSRIHRENDSCSDSPRSSVSGSHRSDSSTEEPTSSKSHRHLQKVKKGLGKLAGAVLHRSPKENDDEASPCVTPHQNIRPVGESRVSVTYVVDQDPAGVDGSGSRRDDHQQSPEREELDSPSKRHLRKKAVHMVKHAGKTAHNLKSMFSKKGLDKSKEEHRSDEECDEEGDVVAARRV

SEQ ID NO: 58803 - protein, 164 aa, Zea Mays
MFEGTLRTNIDPLGEYSDEKIWEALDSCHLGDEVRKNELKLDSTVTEKGKNWSTGQRQLVCLGRVILKRRKILVLDEATSSVDPITDSLIQKTLKQQFLKCTMITIAHRITSVLDSDKVLLLDNGEIAEHDAPAKLLEDSSSLFSKLVSEYTMGSDKWRMQESS

SEQ ID NO: 58804 - protein, 478 aa, Zea Mays
MPGGKRRRARNPTAGGPQRSAGAGRRRPVPELPSFVSPASVAAAFSPASGGRSRGRCARRCGAYSDGESSHAVPFSYPSLRSCSAYPERDQAQALEVTIDTAPCADPAASVPMYSYGPAVLGETGLVLSADEEEACDRGLHLGLGFRDGGHDEMELKLKELTEEDVSFKTPKRKQEQRAKANPGFLLIGGVRIYTEDISSSESDRMSSSDVDLEPNSGDGERFENDDGDSDEEDRQGEERDSISDSESLGSESDEDLSTGDSSSVDNEVVADYMEGIGGSDELLSSKWITSMNLGDADTIEQMYTNDNDGFVKKGKEKLEGYALMTASEQYGMKRRNSLEQRKGKGMVCDRDLSSMQVMDQEDMFMVNNVWMPNRSRKGMKTGSSSSQLSQSWPKDDRKSKNYQSRPGEKKQHRKELIAKKRQQRALSRGVDLGQINSKLRKMVVDQVDMLCFHPMHSRDCSQVQGCAWYDKSNNNTS

SEQ ID NO: 58805 - protein, 891 aa, Zea Mays
MSDLASTSKDKLAYFRIKELKDILNQLGLPKHGKKQDLVDRVLAELSDEQGQRHHGWGRKNALTREAVAKVVDDTYSRKMQVCAPDLPSRSHSGSDFNHFRPKEEATDFYYVETKVRCLCNSTMLNDKIIKCEDGKCQLWQHFTCVLIPDTPTEGAGPDIPPHFYCELCRLNRADPFWVTTANPLLPVKFISSGVGNDGASAPQIVEKTFQLSRAERETVQRPEYDLQVWCILVNDKVQFRMQWPQYAELQVNGIPVRVMTRPGSQLLGINGRDDGPLVTTCSREGINKISLSRVDARTFCFGVRIVRRRTVPQVLSLIPKEGEGESFEDALARVRRCLGGGGATDNADSDSDLEVVTESVTVNLRCPNSGSRMRIAGRFKPCVHMGCFDLETFVELNQRSRKWQCPICLNNYSLENLMIDPYFNRITSLLHNCSEDVNELDVKPDGSWRVMGDAATRDLSQWHMPDGTLCDSKEDTNPGVASVNEFKREGASDEHRTLKLGIKKNPIGLWQVSSKADDMKPVVRNHIQNNTGFSTPNIVPMISSPTGSYRDGEDVSVNQEGGGIQFDISLNQEFDSFAHNFGQTYNTEDRPQHPHHNAADVIVLSDSDEENDPTVQPPAVYENTPTNDDSFPFVTDAAGSGYPERYQEDASVGTSGLGLLRQNTGEFEINNWQMLSYPQPEQGFQFFVTDTDVGNPFVAPHNSFTIAPEDYSLGCNVGIEDPSAAHDVSICRNSNDVHGSLVDNPLALTGDDPSLQIFLPSQPSTVPLQQELSERSDTPNGVHPNDWRISLTLAAGGGGNEESTSVGGLKSQPKVSSKEAGVEPLLDAACQAFPGSSRLTFEASALGSMNNDRCTGSNLNPKRIENIFSHPRQPRSVRPRLCLSLDTDSE

SEQ ID NO: 58806 - protein, 139 aa, Zea Mays
MSSYSAQIVCLYNLFLYYTVYVCSCFLRFGPVEGCKLIRKEKTNPHVQSYKKIKLGCGCSCVASSCWTEEREGRSSWRADFYSGGLLFSMGLLGYIFSRSTISLVLGITPGLATLLLGTLSLKFWRSDRSSFLLILAQR

SEQ ID NO: 58807 - protein, 520 aa, Zea Mays
MSLDNETGLDKPGIRVRSVTGLVAADYFVPGYFVWAVLIANLARIGYEEKTMYMAAYDWRLSFQNTEVRDQTLSRIKSNIELMVATNGGNRVVVIPHSMGVLYFLHFMKWVEAPPPMGGGGGPNWCEKHIKAVMNIGGPFLGVPKAVAGLFSSEAKDVAVARAIAPDVLDSDFLGLQTLRHLMRMTRTWDSTMSMLPKGGDTIWGNLDWSPEDGLECKAKKHKTNDTEVSKDSNGENIEVQPEPINYGRLVSFGKDVAEAPSSEIEQIEFRDAVKGNDIVHSNASCREIWTEYHELGWGGIKAVADYKVYTASSVIDLLHFVAPRMMQRGNVHFSYGIADNLDDPKYQHYKYWSNPLETKLPNAPDMEIISMYGVGIPTERAYVYKLAPQAECYIPFRIDASADGGEENKCLKGGVYLADGDETVPVLSAGYMCAKGWRGKTRFNPAGSKTYVREYSHSPPSTLLEGRGTQSGAHVDIMGNFALIEDIIRIAAGATGEEIGGDQVYSDIFKWSEKIKLKL

SEQ ID NO: 58808 - protein, 157 aa, Zea Mays
MGKWASASDAEVHQELEKGTPYTYRFHVPKEGSLKVNDLIRGEVSWNLDTLGDFVIMRSNGQPVYNFCVTVDDATMQISHVIRAEEHLPNTLRQALIYKALGFAMPSFAHVSLILAPDTSKLSKRHGATSVGQYKEMVNYLALLGWVMVLKMSSSLS

SEQ ID NO: 58809 - protein, 280 aa, Zea Mays
MGTPPPFQESGHCDVCRCTFNTFRRRALPQYGIYTDVRVCYGCFNKSSSQGHADNPVSAGSISGAADSFSGLSLGKEDDSSPMKNSTVQSTAALIECKCGMPLCICEAPKPEPSPTPVKNINTVPPTTQSNPRPKKPANTQQKASATSSSNSSPFLNIGLMNNDSNDKGIVDYEVSGEGLREAIKGGDVKGVKKLLTQGVDSNYCDKQGFTLLHLAALFNQTEIALILMDHGANVESKNGQGETPLDCAPAMLQYKMRQRVEELAASASKGPLGRGLADE

SEQ ID NO: 58810 - protein, 283 aa, Zea Mays
MIALNDHGKAVESLTNSIREMKKKLSNLELVMEELDNVKNLMKAAMVEIEENKKSTAAALKLMENELQKLKGSTKVKPRNMAQCFLLLALIGCVMFHVPCHFLESTVVLLLSVESDVDFGRTHGRRACHFHEDPRAEPRVTFMRYSVGFLIRVAFGYIELCSSNLCWVSGFHVDFWEDPRSEARVTFRSLQRCVLNASVMFHVPCHFLESTVALLLSVESDGRMLILGGPTGEGCVPFMRYSVGFLISVAFLQGVEFQGPMLIFGRTHGPKPVSLSGVYSVAL

SEQ ID NO: 58811 - protein, 53 aa, Zea Mays
MVYWCIDIHAAREIQSYPIKMRNNSPFCWVREIQRLIKTKYLHNNLLGNSFNS

SEQ ID NO: 58812 - protein, 103 aa, Zea Mays
MPRPPNSLSLSRRFAQSPNSSRPCSSRLAARPSSYRARPARISSCRRSSLPWPHPPSARLPHARHAPPCSAMEATLSTPLCWGSSAFEGSQKHDLTMFLEYNK

SEQ ID NO: 58813 - protein, 231 aa, Zea Mays
MMDELGVPASRLRELAIDGYAGSLQRGPSNGGVAAIVDELPYVELFLSTNCQFRTVGQEFTKSGWGFAFQRDSPLAVDLSTAILTLSENGDLQRIHDKWLSPGTCASQSTDGVGADRLNLGSFWGLFLICGVACFVALLIYFARILCQFCKYHGHGTTDGAGPFPVPERSLRRPARLTSIRDLMSFVDMKEAEVKRAIRSRSDRRLDGSMGGRSYTSEGPSLSRPSSMSPV

SEQ ID NO: 58814 - protein, 131 aa, Zea Mays
MALVLGREEELLAQLRALLTFLPPPASPPAPAAPVKVESIMGTSGGGRRLGSKRDRDDDSEAEAEQHGDEPAAAQPHYCPHPPPPCKRTRRRKNKKKRQQSKCLVTTVPDFDGYQWRKYGQKQIEGAMYPS

SEQ ID NO: 58815 - protein, 57 aa, Zea Mays
MNCGHIIYRCMLACGYYDNHFHNRLWCEALPNQTKESVTVAAGYSWINLLLLMTYIK

SEQ ID NO: 58816 - protein, 153 aa, Zea Mays
MRESRSRTSMLRWHGGTAGNKFWMSLGLPLIATMNCAGNTGAKNLYIISVKGIKGALTGVLLPVLVTMENGKPNLRKKKQDKYKDAEPSAIDLFKEMHCSKKKGFSKNVQKAIVDMEETVATSVQDGQQPKYPTEVVYSVQLGSSVFLCNLGL

SEQ ID NO: 58817 - protein, 272 aa, Zea Mays
MQGADKSFLVECETLRSIQHRNLLPIITACSSIDTTGNSFKALIYELMPNGNLDKWIHHKDNEALPKRLSLAQRIAVVVNVADALDYLHHDCGRPTIHCDLKPSNILLGDDMNAVLADFGIAHLYSDSQSTWTSSFSSIGVKGSIGYIPPEYGGGGSVSTSGDVYSFGVVCLEILIGKRPIDPVFIGGLDIISFVKNSFPDQIFHIMDSHLVEECEHLIQDNKVTNEEMYQCLVDLLQVALSCTCSLPSERSNMKQVASKLHAIKTSQIGYK

SEQ ID NO: 58818 - protein, 122 aa, Zea Mays
MVALNKPSGLQVLPKGLFQQRTVLAQLQLKDWKMASSCRFKRKDVQSHPVPVHRLGRGTSGLLLCAKTKVAKVRLASYFAEGAINAAKKRDKSEFSEERKISKFYRALVTGILDDDEVLSLI

SEQ ID NO: 58819 - protein, 490 aa, Zea Mays
MARAALRLGDRALALLVLVSVALLPLVSSDDGHKHCEGVVRGWADSSTGRVKDGDKLSLKDLLFFLHIPRTGGRTYFHCFLKKLYTNAQECPRSYDKLRFDPSHPDCKLVVSHDDYSLTSKLPRERTSVVTILRNPVDRVFSTYEFSVEVAARFLVHPNLTSAKLMTTRVLKKSRAVSTLDIWPWKYLVPWMREDLFSRRDARGIDKVHSSKKVNAYDVEDMVMPLHQYINDPVAHEIIHNGATFQITGLTNNSYFDGAHEVRHCARKHPDLGRIVLEVAKNRLDQMLYVGLTEDHEESARLFAHMVGAQVLLQSGTLSLDLKEDLHSETDSHPSMVEPGDEEASEHLMTVGKLMEAYETCIAKLRKSQSSRRKISLKKVEEANFSKEARKLVPEAILKQIISLNSLDMELYDHAKKIFTQEHLMLKAQQSMAGQHRQLAEQEEGWIGTMCSDGTCSPWVVVLLGLGITTILVLATLAVTTRKRTSKLKV

SEQ ID NO: 58820 - protein, 502 aa, Zea Mays
MEQSAGDESRETEAENAVEYNKKVDQEDTINRQGTAKEDSGVEPQEENVVDPDQGVDDFSVLDEGNVVAQCTSDQLRTTMEDNAAEMQEVVEQEGAIFEKGVTSDGITVEDQDKEMEQSAGDESRVTKGENAVKDKKVYQEDAIDKQGAAEDGSGVKSQEDNMVVPGQCTDGLPVLDEGNVVPQYTSDQLRTTTDNNAAVDPELVEQEGVDSIVGAAKVGIAVEESREDIMVEKQVEGVLLQDQDEAVEQCTSDQLRTITDGNDVEDQEVHREKVGLSEGYPQKPGKLNCRFYMSTGRCSYGSSCHFNHPRLKAKLEVSSFPSEQRNHEAEFLELNRVGLPIREGARKCIYYMRNGTCRYGKKCCFNHPEQVLDVQRHTATGWDDTNLQSSPHSKKSPEHKTMDDISSGSEVLPPNILRMLLPPQNVPPSTKEKEIRIKKGVIDGTDYGHDFATKSRNVLQELAIYPERPDELECSHYMKHGYCKYKMNCKFHHPRDRLPKK

SEQ ID NO: 58821 - protein, 99 aa, Zea Mays
MEVAAASAASYGFKADDDVDSLRATELRLGLPGTEEKEEAEEPQHKAAPPPPSTPRGKKRDVVASSGPEDAPKKRDCETDADADAAPPPAANKQSSVQL

SEQ ID NO: 58822 - protein, 590 aa, Zea Mays
MAKPLNLTPAFLSLMATSCRFSSGGHAHRFASSLPCGRTTPTPRTTSSSTRPAAQVSPDRSKQRDDEAASETTIRQQLQQVDVLENTGISRHFAGEIKCILDRTYRCWLERHEEIMQDTTTCAMAFRILRMNGYDVSCDLLYHVVETSGIHDPLRGHLNDTRTLLELHKASTVSISEDESILDSIGLRSSTLLREQMESSGALQNPPLFREVEHALYHPFYATLDRLTHRWNIENFNTTEHQMLDTPYLSSRYTSRDILALGIRDFNSSQLTYQQELQHLKSWVKECRLDQLPFVRQNLAYFLLSAAGCMYSPELSEARTLCAKNGALITVVDDFFDVGGSKEELENLVMLVELWDEHRKIEFYSEHVEIIFSSIYNSVNQYGAKASLLQDRNVTKHLVQIWLDLLKSMMTEVEWRLNKYVPTEEEYMTNASLTFALGPIVLPALYFVGPKIPESIVKDPEYDELFKLMSTCGRLLNDVQSFEREYKEGKLNIVSLLVLHGGSMSISDARRKLQKPIDTCRRDLLRLVLREESVVPRPCKELFWKMCKVCYFFYSTTDGFSSQVERAKEVDAVINEPLKLQGSHTLVSDV

SEQ ID NO: 58823 - protein, 1093 aa, Zea Mays
MVGCWLAMKEVSLLFGTIIRKIPLPGCSHSASSQNGLPDSIEETSISEEILDVGQLKMMGDHFLQVLLKMKHNGAIDKTRAGFTALCNRLLCSNDSRLCKMTESWMVLLMDRTIAKGQTVDDLIRRSAGIPAAFIALFLAEPEGTPKKLLPRALEWLIEFAKNSLANFQKDSNQRSGVMKELLESQSETTSVYSNGNLSKGRDEGVVPTVHVFNVLKAAFNDANLATDTSGFSAEATIVAIRAFSSPYWEVRNAACLAYTALVRRMVGFLNVQKRESARRSLTGLEFFHRYPALHPFLSSELQTTTEQLADGVSSNLESHITKAIHPSLCPILILLSRLKPSPISCGTDDSLDPFLLLPFIQRCATQSNYRVRILASRALTCLVSNERLQYVISDILDNLPRGSHKAMAHSVQHTDPAISANMGKANVLLLSKSFNSIHGLLLQLASLLDNNFRGLTDGSMKDQIIGLLLEVLSRCSWLGCTKLCSCPIVITSYLRVLDLMLDVARTGKSRHTEVIQALLLELTSQCLSNTASTQYAFHDPTRIELKQQATESFLSCVGLSKKTDETNDDDVQLQILGEPTLEMPRVDYSLHEVHKEILSCLTDPSYDVRITVLKRILWLTKSIRHGYADNILHQWAGVNLQPALMERLFVEEHPKCLYYNLKIIFSWNMEFPFNNGEDSSTLLSLWDRLVHLNSTMSHAKTREIVLCCMGMCMKLFTKQSRGGISMDCLKTSEISASFVRINEGDGLSDAMLRLNLFVTLVKNQSEPSESMNARRAAAEAIVASGLLEEASYVASSVSNMYSPSEFDEDHTKEKCMEDSVFEFVSLYTCKILDLWFVCIQLLEDEDAYLRQKLAKDIQKIIAKGSANTFCDDSTPLQVDRVIELSLDYLTSLFGLWLKYVEFLLRIVLGTGNALNSRGDLVRQIFDKEIDNHHEEKLLICQICCSNIQKLLNSKCQMEAGAETKLFLQNWREIFLKQLTSLTGGYIEKEGKNDWIGGIGNHKDVFISVYAVLLGLYALTQSGSLDQLEDHCAVYLQEFANLERSITPFLKNPLISNLYALVKLSHERFISSDKPEDQVGDSGSSFDPYFLIR

SEQ ID NO: 58824 - protein, 266 aa, Zea Mays
MLEVYGMDAVEKMLENLIPVEHKKTEPGGKLKEPIEQIPLKESAGGKESSQEPLDEDEFELEDGKPNGHGDPSKNGASDPVSETRTLQAGRIPGDTVLKVLMQKVQSLDVSFSVLERYLVELNNRYGQIFKDFDSDIDSKDALLEKIKTELKNLESSKDSIMNEIEGIISWKVVASSQLNQLVLDNALLRSEFETFRQKQADMENRSLAVIFLSFVFACLALAKLSIGIMSRFCRFYDFEKFHNVRSGWLVLLLSSCIISTILIIQ

SEQ ID NO: 58825 - protein, 353 aa, Zea Mays
MVLGKIAIVIGSGVIGSVLTGGESGLPDFKDAISGAFKFLTKSSKQGKDGPSTSRPHTSELLTQVNYLREELQMLSKSNHVAIVTVDGRPGPGAYGITAVIIGAIGYLFIRWKGWKLSDMMFVTKRGLSDACNVVGKQVDQVSESVNVARRHLAGRIDRVDCSLDECHEITEATREQVTIIHGDLSAFQKEMETVHLVVRSLEAKLGRLAYTQDRTTRGIYDLCEFTKRLDQSPKAETHQVTSSTPRPAIESSERIARAGSLPPALEPESPRIEAPKVVRSSTIMSASGLSLLAGTTTPPKRDQPGAFSRTSSMKEGSSELPSGVRSSAEPSPRRSGGSTLFGGLGFLRSYTS

SEQ ID NO: 58826 - protein, 689 aa, Zea Mays
MARLGRAGCRSGPARAFFSGIPEDTLRNFMSNVLPAVLILEFLSGTNLIVQTFALEVVAPAMPPFQDLSRPPVQHTRHLATAAPAHVDADPPDAASNSSAAPLGLVQPPVSPHSGCCAPNMVQKRGTRDCHCVYPVRIELFLRNVSLTSNWSNKFLQELASQLNLRVNQFEIVNFYVVGASGLNITMDIAPYTGISFAADQVKAMNYSLTLHTVRIDPVLVGDYNLLNLTWFRSLAPAPAPAFTMAPRASPSTASTFPRQSEGPSKNRHASLITVVIICVGSLIGVLLIVLTICFCTFRKGKKRVPHVETPKQRTADAVSTVESLPRPTSTRFLSYEELKVATNNFEPSSVLGEGGFGRVFKGVLGDGTAVAIKKLTNGGHQGDKEFLVEVEMLSRLHHRNLVKLIGYYSSRESSQNLLCYELVPNGSLEAWLHGTQGASRPLDWDARMRIALDAARGLAYLHEDSQPCVIHRDFKASNILLENDFHAKVSDFGLAKQAPEGRTNYLSTRVMGTFGYVAPEYAMTGHLLVKSDVYSYGVVLLELLTGRRPVDMSQPSGQENLVTWARPILRDQDRLGELADPRLGGQYPKDDFVRVCTIAAACVSPEANQRPTMGEVVQSLKMVQRSVEFQESVPTPPARPNVRQSSTTYESDGTSSMFSSGPFSGLSPFETETIPRTAVFSEDLHEGR

SEQ ID NO: 58827 - protein, 101 aa, Zea Mays
MSFPQNYPNSPPSVRFTSEMWHPNVYPDGRVCISILHPPGEDPNGYELASERWTPVHTVESIVLSIISMLSSPNDESPANIEAAEALASYISAREASAYIC

SEQ ID NO: 58828 - protein, 77 aa, Zea Mays
MSHMQQDSMTCGARLGCLGYMRSHVIWIEEQLCAEPLWHFHTAGKHRVDALGYKPALKLVLLFVHLLVLVQNVSVYA

SEQ ID NO: 58829 - protein, 366 aa, Zea Mays
MSVSHAEDIEISLCDGNSEDERRRRKIGSLRRKAIHALKKRGRRRVDFRFPPAAISIEDVRDAEEERAVASFRDRLAAHGFLPDKHDDYHMMLRFLKARKFEADKAMQMWSEMLKWRKEFGTDTILEDFDFAELDDVLRYYPQGYHGVDREGRPVYIERLGKVDPNKLMQITSVDRYIKYHVQEFERAFRERFPACTLAAKRHIDSTTTILDVQGVGFKNFSKTARELVHRMQKIDSDYYPETLHQMFVVNAGSGFKWIWNSVKGFLDPKTSSKIHVLGSNYQSRLLEVMDSSELPEFLGGSCTCSDKGGCLGSNKGPWNDPYILKLIHNLEAGCAREIKPVSEGEERNSSSFRLEQMKVTFGRAC

SEQ ID NO: 58830 - protein, 1094 aa, Zea Mays
MCDLDMAMRVENNGRPRQVPIMVRKKRTGPGGSGETSGESSGASGQGSSQRPERTQQPGAGRGWVPQQGGRGGGQHQGRGGHYQGRGGPGPHHPGGLPEYHQREYQGRGGEYQGQYQGRGGARSRGGISQPYYGGHRGGSVGRNVPPGPSRTVPELHQAPYVQYQAPVISPSPSGPGSSSQPMAEVSSGQVQQQFEQLAIHGQSSMSQEVQVAPASSKSVRFPLRPGKGTYGDRCIVKANHFFAELPDKDLHQYDVTITPEVTSRGVNRAVMGELVTLYRQSHLGGRLPAYDGRKSLYTAGPLPFTSMTFEITLQDEEDSVGGGQGGQRRERVFRVVIKFAARADLHHLAMFLAGRQADAPQEALQVLDIVLRELPTARYSPVGRSFYSPNLGRRQQLGEGLESWRGFYQSIRPTQMGLSLNIDMSSTAFIEPLPVIDFVAQLLNRDISVRPLSDSDRVKIKKALRGVKVEVTHRGNMRRKYRISGLTSQATRELSFPVDDRGTVKTVVQYFMETYGFSIQHTTLPCLQVGNQQRPNYLPMEVCKIVEGQRYSKRLNEKQITALLKVTCQRPQERELDILQTVHHNAYYEDPYAQEFGIRIDERLAAVEARVLPPPRLKYHDSGREKDVLPRVGQWNMMNKKMVNGGRVSNWACINFSRNVQDSAARGFCHELAIMCQISGMDFSLEPVLPPVTARPEHVERALKARYQDAMNILRPQGRELDLLIVILPDINGSLYGDLKRICETDLGLVSQCCLTKHVFKMSKQYLANVALKINVKVGGRNTVLVDALTRRIPLVSDRPTIIFGADVTHPHPGEDSSPSIAAVVASQDWPEVTKYAGLVSAQAHRQELIQDLFKVWQDPQRRTVTGGMIKELLISFKRATGQKPQRIIFYRDGVSEGQFYQVLLYELDAIRKACASLEPNYQPPVTFVVVQKRHHTRLFANNHNDQRTVDRSGNILPGTVVDSKICHPTEFDFYLCSHAGIQGTSRPAHYHVLWDENKFTADELQTLTNNLCYTYARCTRSVSIVPPAYYAHLAAFRARFYMEPDTSDSGSMASGARGPPPGAARSMRGAGSVAVRPLPALKENVKRVMFYC

SEQ ID NO: 58831 - protein, 978 aa, Zea Mays
MFSSMDAQILLKGATREELKKIKRVLHFTVFAAYHLILETSFFADQKLFTTDKTTTGKEKCFKTNQQLLGSCYDNSKNSDTMNNTPTCDDQYPNQEKLIHTEKSVPLHLHDSKTMASEDSAGEEHIDSKGIQSYSSLPVSDPSTNFMQDMPSPDCAESKISGGFDGSTFTDTSKEVQKKELSSDNFQGTFDVICAESGAALNTQDILVSMSSQHIRNQAVCEQSHLSRITYYGYFDTSLGRYLQDTLLNEKHSCLSCGESPESHMYSYTHHNGTLTVLVKRLPLELTLSGETQGRIWMWTRCLRCNAKPTHRVIISSSARNLSFGKFLELSFSTHSATKKLPTCGHLLHRDCLRFFGFGSRVAMFIYSSVEIYSACKPPLSLEFNNRNKNDWLDIEVKNVLLKWKQLFTTIENVIQDLRSRYSSQAMGEDTNVSVDEDEGLLLEVSRMLTQEKNKVEVSLREFSRIAIPESFAHGILGLNWLYQQLLLGFYIWDLRLLHILQYTKVNTASSDNSIHESTAKNEPKSSAKKLNTIPFMNDEQPAASNVLHHVVIPSDDEGKWFWNQFNQLEMEYKKELEGGSLYKFYLINKYTPCSSPLAQLKHQMDLGHFIAGHGGNIFSISEEEASSIIAYALIISEQQGFYYEAASSNLDKNASMLPSMSSPNESFENNHKFSRFAPTEELTSGFYDSFLSALKDLHHEIDLNNEKIALRSKYTVICIYAKQFHDLRKMCCPSELAYISSISRCKNWNAQGGKSKVFFAKSMDDRFIIKQIKKTEFDSFLKFGLEYFKHFGASQVSSNPTCLAKILGIYQVKETRNGKETRVNFMVMENLLFGHNILRRYDLKGALFSRYIPDSENSEKVLLDQNFIEDMRTMPIYIQGKTKNLMERAIWNDTSFLSNMNVMDYSLLVGVDKEKKELVFGIIDYLRQYTWDKQLESWVKTSLVVPKNLSPTVILPREYKMRFRAFMSQYFLSVPDA

SEQ ID NO: 58832 - protein, 352 aa, Zea Mays
MEPTSSASIARQTWELENNIPAAASDPDAMDAIYRYDDASQARAQQEKPWANDPHHFRRTKISALALLKMVVHARAGGTIEVMGLMQGKCEGDAIIVMDAFALPVEGTETRVNAQADAYEYMVDYSTINKQAGRLENVVGWYHSHPGYGCWLSGIDVSTQMLNQQFTEPFLAVVIDPTRTVSAGKVEIGAFRTYPKDYKPPDEPVSEYQTIPLNKIEDFGVHCKSSSLDSHLLDLLWNKYWVNTLSSSSLLGNRDYVAGQIFDLADKLEQAEGQLAHSRFGGMIMPSQRKKEQEESPLAKVTRDSSKITAEQVHGLMSQVIKDILFNSVHPSSKASTSAPPDSSGPEPMVEA

SEQ ID NO: 58833 - protein, 158 aa, Zea Mays
MMLTRASMGVMDAAAVDEVVRRLVEGGRGGRQVQMSEAEIRQLCVEAKQVLLSQPNLLRIHAPVKICDKLVEFLEKNDLDLVCRAHQVVEDGYEFFAERRLVTIFSAPNYCGEFDNAGALLSIDESLMCSFQILKPNETGAPHSRKPLPSKAPKGENV

SEQ ID NO: 58834 - protein, 1720 aa, Zea Mays
MSAGRGDPNTPANRPLFLSAGVPNLGCHNVAAPAAAGNSGSIASQVLFSPCSTSVLNTIQEVPAPQSALLSPINRATEQGDVPCIQPSWNMPGGCTQVPINIIVFHRELTRRGSRPQLSPSATALPDVSEGASIRLAGSNFLSHGRTPSIVAGDMTTNSSQLATADKYNSEHRMNCLHDEASKTENGKGSTQLPQLATAIFRDSYNDLESVVPAATWETRVQHSQESTTCLAESTTDDNIHMYQSMQKRLKTQINKSEHTPLSAPTVPKEKTLTQIETQLASAEKTEMFRNEETPALKMKARKKKHRPKVIRENKPAKVQKPDSTPDGKSPNQKVKRSYVRKKRNLSSLENCSGPVSDQSISGATGVAARSRTSSVRRSLQFESKEQGLQGGHSSMANIHHHNYEKPGHAQSSFYSESEVQTGRVMQEGMENSPGELAFDMSRRLNKFLDEYIHLPDMLKPTQEVSAATSASFSTELAREEDNVGRTCKPDGKSKCSLFADERVVNPTIEGNKKDLELNYSDADGLVSSARSLPQMDPTRSQMGKVSEVENPTHHSNGSLPGTRDSVVLRAAAEMFAFFQAGAIKKKRSARLRRNSPFYTMDLKNNTLQASTRLPQPCMDALHRSSCIKFLTKKRSEKARPHCSSVIQPNDELKDRLSAGSTFYGATNGCKISEESSPNFSSQTLDNKRINVDTHCEVAEGRSTNTSTGPYMDYVQGVASKLKHLDLNTEQVQRTEMHLSLTTPAVISFEGTSGPSNALVPYGGVVMVPNERPLQLVKKQRPRAKVDLDFETTRVWNLLMGKSAESYGTDVEKERWWQQEREVFQSRANSFIARMRLVQGDRRFSPWKGSVVDSVVGVFLTQNVADHLSSSAYMALAASFPSRPVNNNCKDDGTTEDNKQTTRMSELVGEKSVFDLFYNGVRPDLEVGCEEVSMTCKKTHMEPTDNTRDSEFIEGETYSFDYKSTDESVCNHKGIGIEHKEQQLPDFSSAELTVSTELVQQIQIQKISSSQILTSETIQSRLSLSSEIPRNFVCGGSAAAYQQLGSNFDQGSSLTENDATASEIECHRLQMAAINDYGFDWSSDKITYTTLNTPKISTELPVKLHHDKSSSFEAPNLKEHESVFATHEMTVEATRKEDEHTSKSSFTSYNGVPDTAAQASKPKKTRTTTAKNTENFDWEKLRRQACSEGQMKQRSFERRDSIDWEAVRCADVRRISHAIRERGMNNVLAERIQNFLNRLVRDHGSIDLEWLRYIPPDSAKDYLLSIRGLGLKSVECVRLLTLHHLAFPVDTNVGRICVRLGWVPIQPLPESLQLHLLELYPILETIQKYLWPRLCKLDQQTLYELHYQMITFGKVFCTKRQPNCNACPMRSECKHFASAFASARLALPAPQEESLVKLSNPFAFQNSSMHAMNSTHLPRLEGSIHSREFLPKNSEPIIEEPASPREERPPETMENDIEDFYEDGEIPTIKLNMEAFAQNLENCIKESNNELQSDDIAKALVAISTEAASIPVPKLKNVLRLRTEHYVYELPDAHPLLQQLGLDQREHDDPTPYLLAIWTPDGIKEITKTPKPCCDPQMGGDLCNNEMCHNCTAEKENQSRYVRGTILVPCRTAMRGSFPLNGTYFQVNEVFADHRSSHNPIHVEREMLWNLQRRMVFFGTSVPTIFKGLRTEEIQQCFWRGFVCVRGFDMETRAPRPLCPHLHIIARPKARKTAATEQVL

SEQ ID NO: 58835 - protein, 617 aa, Zea Mays
MAAAGRWWAVVLAVAVLLWPGRVVANTEGDALYSLRQSLIDTNNVLQSWDSTLVNPCTWFHVTCNSDNSVIRVDLGNAQLSGVLVPQLGQLKNLQYLELYSNKISGAIPPELGNLTNLVSLDLYMNNFSGNIPDRLGNLLKLRFLLVGPIPVALTNISTLQVLDLSSNNLSGPVSSNGSFSLFTPISFNNNPNLCGPVTTKPCPGDPPFSPPPPFNPPSPPTQSTGASGPGAIAGGVAAGAALVFAVPAIAFAMWRRRKPEEHFFDVPAEEDPEVHLGQLKKFSLRELQVATDTFSNKHILGRGGFGKVYKGRLADGSLVAVKRLKEERTPGGELQFQTEVEMISMAVHRNLLRLRGFCMTPTERLLVYPYMANGSVASRLRERQASEPPLKWETRRRIALGSARGLSYLHDHCDPKIIHRDVKAANILLDEEFEAVVGDFGLAKLMDYKDTHVTTAVRGTIGHIAPEYLSTGKSSEKTDVFGYGIMLLELITGQRAFDLARLANDDDVMLLDWVKGLLKEKKVEMLVDPDLQNAYEEIEVENLIQVALLCTQGSPLERPKMSEVVRMLEGDGLAERWDEWQKVEVVRQEAESAPLRNDWIVDSTYNLRAVELSGPR

SEQ ID NO: 58836 - protein, 157 aa, Zea Mays
MLHTIGYIYVRQAARELGKSKLYMGVPFIAEWVRDKGHHVKSQVNAAAGAISLIQLQEGIKKIEEGDKEEQLIKSIEEKKDAMLNSLWKINVVDIESTLSRVCQAVLRENDIPRDVLKLRARGLKKLGTIFQGAKSNYRRENSLRVEDDAAEATPSH

SEQ ID NO: 58837 - protein, 628 aa, Zea Mays
MHILIICCVQSSYENQQDIQLMRFADYFGRAFVAVSASQFAWAKMFKESTVSKMVDIPLCHIPEAVIKTASDWISQRSYDALGDFVLWCIDSIMSELSGPSAGPKGSKKVAQQSPRAQVAIFVVLAMTLRRKPDVLVNVMPKIMGNNKYLGQEKLPIIVWFIAQASQGDLVTGMFCWAHFLFPTLCAKPSGNPLARDLVLQLLERILSVTKARSILLNGAVRKGERLVPPVSFDLFMRATFPVSGARVKATERFEVAYRTIKELALAGSPGSKTVKQASQQLLPLCAKAMQENNAELTREAVDVFIWCLTQNAESYKQWERIYPENTEASVAVLSKIVIDWKDVSPKLSSEALKATVKNLKAKNEAALESATDAGKQASIKKQTSTARLEQGSEQLLGGRPGPALGVLATVAECSVEPAAQTTKGPDSNGSSSPLPPVLPSVCFPPRPRAMAPCASPSALALSASTRVSSFPLTLRPRPRPEARVPRAPGGAQLRPATACSWPRPLLPELAPAFPRAGARSAGRPQPLFRPRAMMTTSQIASCAFTVGTVAVLPFYTLMVVAPNADITKRTVESSAPYVALGLLYAYLLYLSWTPDTLRAMFASKYWLPEEWDALCSCRASSGCSRAR

SEQ ID NO: 58838 - protein, 75 aa, Zea Mays
MTRPPSPASRPLIRTSAPSEASASSTTSRRRWRRCARASSPAPTSSPSPPATPSSRWEGLRGGCFSGGGTRRRRA

SEQ ID NO: 58839 - protein, 85 aa, Zea Mays
MRERNMRALPGDFRPCMHSGLRVWPGACARNQCSCGSPQFEMRTPGVSGISRRSSGSRTPPWPRTTAAILGKVSPNELALIPSTF

SEQ ID NO: 58840 - protein, 761 aa, Zea Mays
MTYLLEDDPKRIAWRYTTSWFILDVASTIPSEFARKILPPNLRSYGFFNMLRLWRLRRVSSLFARLEKDRHFNYFWVRCAKLICVTLFAVHCSACFYYLLADRYPDPTDTWIGNSMPDFHQRGLWIRYVVSVYWSITTLTTVGYGDLHAENTREMIFNIFYMLFNLGLTAYLIGNMTNLVVHGTSRTRKYRDTIQAATSFALRNQLPSRLQDQMISHLSLKFRTDSEGLQQQETLDALPKAIRSGISQYLFFNLVQKVYLFEGVSNDLIFQLVSEMKAEYFPPREDVILQNEAPTDFYILVTGSAELIELRNGGEQMAGVAKAGDVVGEIGVLCYRPQLFTVRTKSLCQLLRMNRTAFLSLVQSNVADGTIIMNNLMQLLKQQKDNSVMVGVLKEIENMLARGRLDLPITLCFAVNKGDDLMLHQLLKRGLDPNESDNNGHTALHIAASKGDEQCVKLLLDYGADPNARDSEGKVPLWEALCEKHNAVIELLVESGAELSSGDTALYACIAVEENDAELLENVIRYGGNINNPTKDGTTPLHRAVCDGNVQMVELLLEHGADVDKQDSNGWSPRDLADQQGHDDIQALFKSRKAHRKHASNGRVAPMLIGRFNSEPSMPDMSHENARVRSEVVPQKLLRKRVSFQNSLFGVISSSHAHQDTGRLLSKGLAGTEGPNCRHDSLIRVTISCPEKGGNAAGKLVRLPRSMAELLELGAKKFGIKPGKVLTVGGAEIDEVELIRDGDHILLVSDEWVPDVEQIRP

SEQ ID NO: 58841 - protein, 315 aa, Zea Mays
MTVAYLKEKPAGQGSTPSTPSAGSGMRSAAARLLGTGNGSRTLSFGSNGTSRAVSGSSRMGGGIGVSTSASGSQGMANYDGKGSYIIFNTADTLFISDLNSHDKDPIKSIHFSSSNPLCHAFDPEAKDGHDLLIGVFSGDVYSMSLRHQLQDPGKKPVSYQHFVNKDKDKDKDPSQGGAASSQCTCVAWVPEREGIFVVSHADGNLYVYDKFKDGNTDWTFPTVKDQSQVLISHAKSSKGNPIARWHICQGAINGISFSPDGAYLATVGRDGYLRVFDFTKEQLIFGGKSYYGALLCCSWRLYTFLTCVVLMTDE

SEQ ID NO: 58842 - protein, 529 aa, Zea Mays
MGGGDADAGGEPADAQATLHIRCTNGSKFTVRTDLGATVGAFKAIVAHSCDVPAPQQRLIYKGRILKDEQTLASYDHTIHMVRGAVLSPTSTAPAANQEPTTAAPASSPATGLGGLLQSLGTTGAAANSEGLFGSAPPGLDQMQQQLAENPNLMREMMNMPLMQNLMNNPELIRSIIMNNPQMRELIDRNPDLAHVLNDPSIMRQTFEAVRNPELMREMMRNTDRAMSNIESSPEGFNMLRRMYETVQEPFLNATTMGSEGDRNSNPFSALLGNQGSNQARDSAANGTTRASDPTSGSPAPNTNPLPNPWGSNAGSAQGAARSSPASNVRSTTASGLGGLGSADLGSTHGASGGGSDATLLTQVLQNPTMMQMMQNIMSNPQSMNQLLNMNPNVRNMMESNTQMREMIENPEFLRQLTSPETLQQLISFQQSLMSQLGQQQAGQERTQSGSGAGNVNLNTLMNMFSGLGAGGGLGVPNAPNAPPEELYATQLAQLQEMGFFDTQENIRALAATAGNVHAAVERLLGNMG

SEQ ID NO: 58843 - protein, 81 aa, Zea Mays
MLNRVGYTPEINHGVLMEMAEHKKDLERKTKPIADTLRSYQDLPPDKALAALAIEDKKRQYAAAEKYLEDVLQSALTTSGL

SEQ ID NO: 58844 - protein, 124 aa, Zea Mays
MRGSSRRPVAVVMAWVRRQPPKVKAFLAVVAGMAALVFIRFIVHDHDNLFVAAEAAHALGIAVLIYKLTKEKTCADIALCSASATCSSFNIAQHSEQNLLGLLCLFGSSFSAAPVAPDAKYQDC

SEQ ID NO: 58845 - protein, 459 aa, Zea Mays
MMRLKLPNGVTTSEQTRYLASVIEAYGADGCADVTTRQNWQIRGVTLPDVPAILDGLRAVGLTSLQSGMDNVRNPVGNPLAGVDPHEIVDTRPYTNLLSSYITSNSQGNPAITNLPRKWNVCVIGSHDLYEHPHINDLAYMPAVKDGKFGFNLLVGGFISPKRWAEALPLDAWVAGDDVVPACKAILEAYRDLGFRGNRQKTRMMWLIDELGMEVFRSEVEKRMPNGVLERAAAEDLVDKKWERRDYLGVHPQKQEGLSYVGLHVPVGRLQAADMFELARLADEYGTGELRLTVEQNVVLPNVSNRRLDALLAEPLLQRQRLSPQPSLLLRGLVACTGNQFCGQAIIETKARALQVAREVEKRVAVPRPVRMHWTGCPNSCAQVQVADIGFMGCLTKDRDGKVVEAADIFVGGRVGSDSHLADVYRKSVPCKDLVPIVADLLVERFGAVPREREEEDEE

SEQ ID NO: 58846 - protein, 321 aa, Zea Mays
MGGRARSFLRWLRHRSRRVSSSSSCSFHLTSTTANNNDSTDTSEDLRARSLPHQHRAGEEREVEAEEEREVGEEIAAEGPEPASEVCIVLGDPEPGAGPRAPLRTEPPRMDPSKKESEFFTEYGEASRYQVSEVIGKGSYGVVAAAVDTQTGERVAIKKIVDVFDHVSDATRILREIKLLRLLRHPDLVEIKHIMLPPSRREFRDIYVIFELMESDLHQVIKANDDLTAEHHQFFLYQLLRGMKYIHAASVFHRDLKPKNILANADCKLKICDFGLARVSFNDTPSAIFWTDYVATRWYRAPELCGSFFSKGRMLCISWIL

SEQ ID NO: 58847 - protein, 266 aa, Zea Mays
MHPLSSLLLFRSAAPPSALPLRRRRRSHTPVRASWQELAGVLVFSAIPFTAVKALANSPLGARLRRRLEDRKAAAAAEADALRAASRGARNNSFEILHCRWAMLAALGVVVPELLDLFGLVHFVEPVWWKVGYAKLQGDNLDYLGIPGFRIAGGQGVVVIAICQALLMVGPEYARYCGIEALEPLGIYLPGDINYPGGPLFDPLGLSKDPVAFEDLKVKEIKNGRLAMVAWFGFYIQAAVTGKGPVQNLVEHLSDPLNNNILSSFH

SEQ ID NO: 58848 - protein, 365 aa, Zea Mays
MHGYGYYLQIRCFAGRERAGSEAPVHVRQAVREAQDAHARLHCLRLGLQGGPHPGEAHQARRVAAGGHVPGRGRGAAPRQGGEEVAGGERRWRRRQHGAEGHEGAGPPAGAALRVVQHVRVHQGHGGGRAGPAAPGRRRPRGGDAAQHHHQRPARPAARVDAGHPHHRQHHHRLRQAEPVLLPRRPPPRHGRHPRGHGGQRHDGGRGGALGGVRAAAAAGGGVPRHLVAAQPGHLRRALPVRTPPFLREPARRQGRQGHPHQGDVLLHQHRQILHLVNLLLCGLLSRLYNDLNRKYKFVMHLVDVYGPFAFFKGCFDDINLERLRLAMAMKTPEDQMFNFDPKTIDWDDYFTRIHIPGILKYVCK

SEQ ID NO: 58849 - protein, 693 aa, Zea Mays
MGSDLKEMKYRRRIGVEERPQCSDPRGGADWAALQQDPVELLRKLDELRDQITRSCNVVVGQPREHRRVSRRAVSMLPEHLEPPPLPGYHRSRYGGRYGHGLPPPSPYAPPRPEHGERYARQSSGHYRQYPPRHCENGGMGPGTYHHHGCACPHCLHGQRTFPQEENIPMARYFAGQHESYRLERSPSVSSDYDRGSVASSLYSHRSVSKMRAEYFRKKAEHICRPVDGAAPFSVCSSCYKLLLMPMEKCVGRKQNRFQCGSCCQIISLKHQEENGIPFALAPSSSLHAPEMEQSTSDQMRQDSVHQRHEDFNFMFNNSNDHCDMQNNMDFTDDNSLPSTASNDRIEIDKECGSTRSIQSKAEGLSFSPSRSVDIGSPKDILCERDKDSNVEPSSDGPLSPRSPTLEDKLVDPLCAQEKGNDEDDQGTAYRSNLTCKGEYDANDEYDGDVSTRSKPESNVNDKDTTEGETSCRNYKEDNCCNIEDSSKTYEQNSGEDDTSSLVDGNEKYESMNTKDDDSSPGGEDTCNRYEPKVEDDENCVLGAESISNNCDENNKDAIKTGSISERHEELIIEEENEKLQQAFIEDANSQAGSGSSINERTNSGFSRGSSEAGLDEDQSSTEPLRRQRRKLVLLTQVHIGTTTVLVFGVSWDENVSALSLHLLENLIIRWPEIVPVGILVFLSMAENCIKEI

SEQ ID NO: 58850 - protein, 1090 aa, Zea Mays
MELSKIQDGFLVDDVLEIIAQVQVIREKVDRPFRCLDRPYRRELIRIYMTNVEQIYRRFVEERRSKLSKLIEDKMKWSSFRAFWSAIDPNTRHHMSREKTETILKILVKQFFVEKEVTSTLVMDSLYTSLKALEYRMKSKKCKTKLADLEELPAPMVHVDMDMFVLADDVIALLERAALEPLPCQPVAPKDDKTSQSRMKDGSSGEVYKVSMEREERRLTELAQKILETFVLSHIFSGIEVAYQEAVALKRQEELIREEEEEAGLLEHQMKGKRGGGANEKDKRAKKKQTKQKKNNRKAKDKERDVKCEVKILERLHDETVIDNSDGLPAKVEVIAKVDALEEGSSDGSDMPNSVTGGSGRNSSGCCTAPKLDQDTVLLTLRDKLRKLGQRLQEKNIEGQKLLKAHFEARDTKVKVEESSDSSNSLDRPPDVPESSMHSSEDTVDLKVNGTPNKDASVVNPVLEESVSGIPVTAKNESLPSARTKEGPVSNKDNASSLKMKTMASCLKLHPADVDKDAPFPSKSPRINRAAPVPSKLPSADKATPVLPKSSLSVNKAALVRPKSPAVDKATPVCPESPAVDKVTPVRPRSPAVDKATPVRSQSPAVDKATHVCPQSPSVDKATPSIDKATPVRPKSPAIDKVTPIPPKSPPVDKASPAPPKSLSGAKDVPVPSRSLQIDRFIPAPPRLSQVDKAALPSSEQPHISPATNSEAQGATTSRKVTASSVLEVAAASRPSSAPVLPTPRSTAPVASHIQTSTLLSRSMSEAAGRRSVNDPSFSAPSYTPQTYRNAIIGKTGLATTSANLAYQSYSLGQDTAPSQPLSAYASSTAVMMPPAGRSDQSSARHGFKSGSGKLEAHDSWQQWKGDNNVDMHLWRDHTTYQQMTRGQAYDQSRRDDTYQQTCSRGTEKFSRHAGLQARQFQTETPASHVWHQQQGQVAEEFPHLDIINDLLEEDQINGSIPESFHQDYNVFGLPFSPRGNVSDMGMASVRSPARFNSTKYEYDGGFSGAYDINAVNGLRERQFPSLDSYSNGLSDVSASKPWLNGSPSPSVMSLGVNTNGYHPQVADYPSLGNGVNGVSLWRRHANGRW

SEQ ID NO: 58851 - protein, 1718 aa, Zea Mays
MAFFSNSGSKADSEGYNLNEKADDDGIHESIRDGNDGLNSRQWNLNEKAEDAYHSEAEQYESGQSGLYASRQHVQRGGRSSGGPWGTNFLKDSRSKQTAKEVASNSGRGMDAANSHDDMDGSREDDELNRANGEVPAEEMLSDDYYEQDGEDQIESLHRGGMKQSSCSTSGGAAKSGSRQMKKMSKYNAYDNDEYNDENDDDSDADEDDPADMDFEPDGETDKATDKDKFMDSENSDGDDDDDLELSDDEDDFVENRRQPKRLKIVATKTSKGGQLPMPVQPKRGVSHSDEEYFSGKDSDVPSDSDFKHIPKKPDRLHQKPVGRSDVAPISSHNELRTSGRRRTVKKISYAESEESDDSEEKSNKRQKLIKEEPEEEDGETIEKVLWHQPKGVAEEAIRNHRSAQPTVASLTSDFDQQWDELEFYIKWKGQSYLHCQWKILSELQSVSGFKKVINYTKRVSEEQRYKRALSREEVEVHDVGKEMELDLIKQYSQVERIFADRVSKADGDDLVPEYLVKWQGLPYAESTWEKDTDIDFAQDAIDEYKAREAASAILGKTVDFQRKKSKASLRRLDGQPEWLKAGKLRDYQLEGLNFLVNGWRNDTNVILADEMGLGKTIQSVSMLGFLHNAQEINGPFLVVVPLSTLSNWAKEFRKWLPNMNVVVYVGNRASREMCQQHEFFSDKKGGRHVKFHTLITTYEVILKDKAVLSKIKWNYLMVDEAHRLKNCEASLYTTLLEFSTKNKLLITGTPLQNSVEELWALLHFLDPVKFNSKDSFVERYKNLSSFNETELANLHKELRPHILRRVIKDVEKSLPPKIERILRVEMSPLQKQYYKWILERNFQNLNKGVRGNQVSLLNIVVELKKCCNHPFLFESADHGYGGDSIGDRNKVERIVMSSGKLVLLDKLLVRLRETNHRVLIFSQMVKMLDILAEYLSLRGFQFQRLDGSTRADLRHQAMEHFNAPGSDDFCFLLSTRAGGLGINLATADTVIIFDSDWNPQNDLQAMSRAHRIGQQETVNIYRFVTCKSVEEDILERAKKKMVLDHLVIQKLNAEGRLEKKESKKGGPIFDKNELSAILRFGAEELFKEDKTDEETKRNLESLDIDEILERAEKVETKGGEGEEGNELLSAFKVANFSSVEDDATFWSRLIQPDPADIVQETLAPRAARNKKSYIEDPQLDKNNNRKRRAVETQEKPRRLSGRTVETVNSLPLVDGAVAQVREWSFGNVPKKDASRFVRAVKKFGNATQIGLIVDDVGGVLAKVPHEAQIELFDLLVDGCQEAVKENTDIKGTVLDFFGVAVKAYELLARVEELQFLAKRIARYKDPIKQYRIQLPYKKPQWSASCGWTETDDARLMVGIHWYGYGNWEKIRLDPKLGLTTKIAPATLGERETFLPRAPNLDNRASALLQKEYAKFSGKSLKVKGNTRQTVNNDSNSGVRSMRGRQKDVPEKDDNKPNKDDIQKRRVIVEAEAREEGEISESEAETRYRQDKEEKWLEWCSEVLDEEQETLKRLDRLQNTSVNLPKEKVLSRIRKYLLIIGDKIGEVVRQHSESYRQSRMVMRLWNYVATFSNMSGEQLHDLYMKLSQDQLEGGVGPSHGGNFTSIPPNKGGNSNQLHPSRNQRPTRSLQYNSESFHNESSGSSEAWKRRRRADTDNQFDTQPLCQPPIMTNGNRLQESSSSAGILGWGPVEIRRYGNERPKRAVHPSHFPTGHGPLL

SEQ ID NO: 58852 - protein, 283 aa, Zea Mays
MDAAAKKMTRSISRQLSSGAARLWRQLSLDPHTPRRGGPGPVPAAGAGQTRFAIARQSSLDPTPRGGPDGSSAHQQLAVPENLDATMRLLFAACQGDAAGVEELLRSGVDVDSIDLDGRTALHIAACEGQGEVVRLLLDWKANINARDRWGSTPAADAKHYGHFEVYNTLRARGAKVPKTRKTPMAVSNPKQVPEYELNPLELEFRRGEEVTKGTYLAKWYGSKVFVKILDKDSFSDAESINAFKHELTLLEKARHPNLVQFVGAVTQNVPMMIVSEYHQKLY

SEQ ID NO: 58853 - protein, 488 aa, Zea Mays
MMNIAVSHLQNLPFIENMEKRIQGATKLLDGSLERCFVDGLEHRDAKVIYNCLRAYAAIDNTSSAEELFRTTVVSPLIQKIVPQNYARAVAGASSDELEEDYQQIKACVEKDCKFILEISSSGYCFSKSAVTKLRYEPAYTDFMRQWNVGVYFSLRFQEIAGGLDSTLTNTFSPTGLNEAQQKPLLLKQSIKLLESLDSCWSDEVLVFSHCDKFLRLSLQLISRYTTWLSCGLSARKASDRSPNSPADAEWALSIPIEDFIYIMHDVHAVIGELSESGSFIGHVNQSLGSCPIEVFNLVKGSILQAAEPLKELLPAIMDVMIGIIVKKSNEDLKHLKGITATYRMTSKLPVRHSPYVSGILHPLKVFLEGDRMHYLSEDDKTKLCRGSANKITATYYDLVSEVVTVARKTESSLQRLRQGAQRRVGASTDASDSIISDTDKICMQLFLDIQEYARNLRAIGIDAREIDSYRALWQCVAPKDRHENIQF

SEQ ID NO: 58854 - protein, 428 aa, Zea Mays
MATTTPAEDGYSWRKYGQKQVKHSEYPRSYFKCTHPNCLVKKKVERSHEGHITEIIYKGAHNHPKPTQSRRPGVQPVHPFGDSAQADAADNLGSQANALDANQPRRAGVQDGMDATSSPSVPIERCDSPASMQVDSATRFGSPEGADVTSVSDEVGGDDRVTRGSMSQGGADAEGDELECKRRKLESYAIDMSTASRAVREPRVVIQTTSEVDILDDGYRWRKYGQKVVKGNPNPRSYYKCTYPGCVVRKHVERASHDLKSVITTYEGRHNHEVPAARNSGHPGTAAATGAGGPRRLEHPSLRDGLMGHLGGCGVPFGLPPPRDPLAPMGNYPTYASSIPLGGAGPTSLPSLPVPAGTLSAVDGLKLPMLAPSSLQQHPLLRHRQAMQAAGLVAPKDDVKVEGNVAGGAAPSVYQQMMCSGLRLRQQM

SEQ ID NO: 58855 - protein, 564 aa, Zea Mays
MKIKKMKADIRKVSHDAWRKDREAEEKWLENCGEDEEFLKREGKRLNRDLLRIAPVYIGGSSENEKSYRGWESVAGLSDVIQSMKEVVMLPLLYPEFFSSLGLTPPRGVLLHGHPGTGKTLVVRALIGACSQGNRRIAYFARKGADCLGKYVGDAERQLRLLFQVAERCQPSIIFFDEIDGLAPCRSRQQDQTHNSVVATLLSLLDGLKSRGSVVVIGATNRPDAIDPALRRPGRFDREIYFPLPTFEDRSAILSLHTKKWPSPISGAFLSFVASQTVGYAGADLQAICTQAAINALKRTCPLHQILQYAEKGVPHGRVPLPTVLVEDKDWLAALAAAPPPCSKREAGIASNDLVSTPLDSCFVPSLFKPLVHLLISMYLDERVWLPPSLLKACCSIKEVVFSSMEKNTVPHTLWPTYLSSLIQQKDIADRIGTILSSCGLISAQLGNRGSMLLSDVKTQENFCGSRLNPTGLHMKGGLPHKLSGFRVLVAGAPRSGQQHLIRCVLHGFMGQIVIHKLDLATMVQEGNGDILSGLTHILWSCGSCTLALQWFWYAATYMFPTLT

SEQ ID NO: 58856 - protein, 134 aa, Zea Mays
MYLLQNGFGNYDMFEKNCEDFALYCKTGLLPVEEPGIGTSGQASSAIGVPLAALLSTPFKLLAAGPLGMATVTAGMYCAGRYITDIGVRKDVAKVEVEKLSSHPGFHLVEDEESVNKRSEKPKTLLPMKRKRER

SEQ ID NO: 58857 - protein, 648 aa, Zea Mays
MLTDAMKQLQDPSLFRTKCEIPLQEPANVSAVEEGLEHEGLYAANGNEEMPQECDGLEASSSVVWNENVSVPGSPVKKYPVHTFFSGDYVTVDRRGSVLITYVPVLPQKIAFSKDIKSAVWNNKDQNKAKPYRSAAGVCRTTVEFVLGTNTDKHLFVDNLSTVAMHSPECSWHGDNVDDNHVLTTVPSKTLTSPREKMDTPCNVKLPESTYSYQEDMELNSRLTVYMEEGIVPESPVVEVSHLRLEMDEAADFGAVPKRGSPKSRDERAHANVAGSHKGPLNFEKNDQLLCGENEFDGSSRLYMLDQTRAKTEEPMHPSNVKMATTTRHTPGNMLCDSFSGDYQLRSGGDASGSVQQAPKYRRLCKYGDKIKRVSSISLDGCDDRFEECNIANKDRPNQIKHAMGTKRKTKRRLDAYIDEEVGVSEDAYVSEDEDDNQSEDKYEDSFIDDQATPTEFTQTEQGDRHNGDMMGFYRQSLFTQSPVVLPSRYLDVSYNSASRTGNSSYSSEARHNYTETPKEIQTQHHTINPSPSYSFVQDRCERGIANCESSTKLDCRKRRLSFQQPLAIPVINLEPEPAPEPSPHVASRVADHLYFDDGFFENLDLDAIEAQATEQWRQKTTQSTQKPVEIKNASDMSFAPPSFDLGL

SEQ ID NO: 58858 - protein, 263 aa, Zea Mays
MNEPNPSISSVTKSGTEELPRSSQVPYKIQPRLASPTLGLAVAATMGRSPCCEKAHTNKGAWTKEEDDRLVAYIKAHGEGCWRSLPKAAGLVRCGKSCRLRWINYLRPDLKRGNFTEEEDELIIKLHSLLGNKWSLIAGRLPGRTDNEIKNYWNTHIRRKLLSRGIDPVTHRPINEHTSNITISFEDWGQGKALKCPDLNLDLCISPPCQEEEEAMLLRPVKREEAGLCFSCSLGLPKSADCKCSNFLGLRTAMLDFRRLEMK

SEQ ID NO: 58859 - protein, 166 aa, Zea Mays
MSIETGPYYFHYIIEGRVCYLTMCDRSYPKKLAFQYLEDLKNEFERVNGNQIETAARPYAFIKFDTFIQKTRKLYLDTRTQRNLAKLNDELYEVHQIMTRNVQEVLGVGEKLDQVSEMSSRLTSDTRIYADKAKDLNRQALIRKYAPVAIVIGVVLMLFWLKNKIW

SEQ ID NO: 58860 - protein, 410 aa, Zea Mays
MKRRLYSNFERLKSSGDHVATQIQKSLRLIVAGGDGTASWLLGVVSDLKLSHPPPVATVPLGTGNNLPFSFGWGKKNPATDQAAVKSFLDQVKGAREMNIDSWHIIMRMRIPQEGPCDPIAPLDLPHSLHAFHRVSACDSLNLEGYHTFRGGFWNYFSLGMDAQVSYEFHSERKRNPEKFRHQLRNQGTYAKLGFKHSLNHLSSRNISQLAKVKIMKRPGSQWEELKIPRSIQSVICLNLPSFSGGLNPWGTPGTRKAQDRDLTAPYVDDGLIEVVGFRDAWHGLILLAPNGHGTRLAQAHRIRFEFHKGAAEHTFMRIDGEPWKQPLPKEDDTVVVEISNLRQVAMLANDPCRSKSVNEPSSPSCHGHEDDDSNSLEDEDEDEWEDGRKKFGAAATFKIPDEVDIAHLS

SEQ ID NO: 58861 - protein, 106 aa, Zea Mays
MPASPSLSLFHPLLTPPQRHCSFGLVEERYIHPGLDWLVLVLLLNGRICSMDFHSKATNYLVTASDDESIRLYDTQDAVAYCARKGGLQFRTTPRAWYLLSPMVAA

SEQ ID NO: 58862 - protein, 157 aa, Zea Mays
MGSFTMAEEGRRRTGGLSVSLAGPDGRVVGGVVAGMLRAASPIQVIVGSFLPNSLKQHQRRRMSMQQPSPVPALPAPVAPPPPVLTAATPISQAGPGNGFHAPPPPHSAAPPQPHANAMNLNATTTGFTMVGWPASSPQPMAYRASPDINVSLTPQE

SEQ ID NO: 58863 - protein, 522 aa, Zea Mays
MAPVDPHSYTDGAHPVVSRAALAFYLDFAASTIHASAVLTLSAPHSGDLLLDTRALAVHSASTDADPPEPIPFSLAAAPDPVLGTALTLALPRDTASFRLTFSTSPAASALQWLAPPQTASAQPFVFSQCQSIHARSVFPCHDTPAARITFSLLLNVPEQLSAVAAARHVARRDPLPSDHRGACDDGLWCAPGRIVEEFQMDQSVPPYLFAFAAGSIGFRDLGPRTRVYAEGGDTVLDEAAREFAGVEEMVKVGEGLFGPYEWERFDLLVLPPSFPYGGMENPRMVFLTPTVIKGDAAGAQVVAHELAHSWTGNLITNKTNEDFWLNEGFTTYAERRIVEVVQGEERAALNMGIGWRGLNRMMERFKDNMEFTKLKPKMAGIDPDDVYSEVPYEKGFQFLWRIEREIGRPAFDEFLKKYIATFKFQSIDTETFLEFLKTNVPGIENKIDLHLWVEGTGIPPDAMEPDSATYKKICSLAAEFKSGKLPSEDEVAKWSGQEWELYLENLPADVEASQLEQAQPR

SEQ ID NO: 58864 - protein, 384 aa, Zea Mays
MGWAHPAVTMEEVLRLVRGFVDVLVLAGGRTSSGAAATWSADEIKKALRWALFFEEIFKDLLDSGQYEDSARELDAALLELTSSPEFPKGLAAVRSDLLSMARVLVMRHFLKPNTMSVENFCALLEAVAGMDIDGICASGAHNACQEYAESILNMNTSCFAQTMNACDGGLPTSSYDLRAESTGHSWIIVKEFQKTLDSASCGRLADRGLETFLNSVKRNILENGSNKPCVPAIPKTSQMIDEFLMWKQWRAKCLSYLLDQRTIRVLSGASLIFKAPKEQWMKVFEPLKSIEETCHSGLVETMELCLLGSITRRWNTLIEGFMSHTFCSIPISKKHADLHQCLHRTFQDKFQDEYLNLEVFHILVLYHVHSLRSILYVRNFNSV

SEQ ID NO: 58865 - protein, 608 aa, Zea Mays
MSIDFLTDIVEDAHKPSVAAIDGIALGGGLEVAMVCHARISTPSAQLGLPELQLGIIPGMGGTQRLPRLVGLPKALEMMLTSKTIKGKMAHELGLVDAVTSANKLVNTACSWALEIFEKKKPWFKSLHRTDRLPDLEEVKDILKFARVQAEMKAANVQHPIVCIDVIKEGIISGPRAGLMKIPNITNIGLTARKIKKAAIVGGGLMGSGIATILILNNFNVVLKEVNEQFLSAGINRIKVNLQSLVRKGQLTEEDYEKKLSLLCGALDYEQFRDTDVVIEAVIEDMVLKQQIFSDLEKYCHHNCIFATNTSTIDLNIIGQKTASQDRIVGAHFFSPAHVMSLLEIVCTHHTSSQVIVDLIDLAKKIQKTPIVVGNCTGFAVNRMFFPYAQAASFLVDYGLDVYHIDHVITQFGMPMGPFRLADLVGFGVAIATRKQYYQSYPERSYKSMLLQILVEDNRTGESSCKGFYVYDDKRKASRDPDFGKYIEKSRNMAGVMQDPKLMKLTDNDIVEMIFFPVVNEACRVLDEGIALKASDLDVASIMGMGFPSYRGGVMFWADSLGAKYVYDKLDAWSKDYGEFFRPCEYLAVRARQGASLAAKVDGVKSRL

SEQ ID NO: 58866 - protein, 474 aa, Zea Mays
MASTVLEATRAAHEDLERLERLAVSELQREPANPRDRLFQSHRVRHMLDLVVSTSGKLVEIYEDKDNARKDEINTHLTAPTQSGLFSKYYERLKEIREYHRRNPSARFVSTTDDYEELLKEEPVIEFTGEETFGRYLDLHELYNEFINSKFGTLMEYSAYVGCFSQTDKISHSHKATRKYREYLEHILEYLTSFLYRTEPLQDIDKIFLKLESEFEEQWANEGILGWGNKGTEKESEIDLDYYSTVEELVELGPEKLKQALAARGLKSGGTVQQRADRLFLLKVTPLEQLDRKHFAKVPHTKDGSNTAPNGNAFKEDMKKEIALMEVKMKRLCELLDEAFVRTKENAEKKLTLTYEEMEAEREEEEVQVDTESDDEEQQIYNPLKLPMGWDGKPIPYWLYKLHGLGQEFKCEICGNHSYWGRRAYERHFKEWRHQHGMRCLGIPNTKNFNEITSIEKKRPEKTLVFSVGHDSVT

SEQ ID NO: 58867 - protein, 318 aa, Zea Mays
MLVLQKAVRMVRELPDVMRIAYAFVLVMLCWMALWSFGISGIVAFGIPNGGQWWLLLIFSVSLFWTGAVLSNTVHVIVSGMVFLVLIHGGPAAATMPPKPLLKSLQYAVTTSFGSICYGSLFTAAIRTLRWEIRGIRSKIGSNECLLCCIDFLFHIVETLVRFFNKYAYVQIAVNGQSFNRSARDAWELFQSTGIESLVAYDCSGAILLMSTILGGLITGTCMGVWTYFKQSDKAVMVGSTSMLMGMILVGLTVVVVESAVTSIYICYAEDPLLIQRWDPEFFEQMSEALHQRLQYRSARARQILNGRLDHLPHTSSI

SEQ ID NO: 58868 - protein, 292 aa, Zea Mays
MALRPQLLRLLLPSPPHRNPPPPPSSPSVAPIGRRTAAAAVLLLAAGVSAPPPRAARAEPDGEDVDEARIVRLFQEASPSVVFIKDLVVAGPQGRRVGEDEDGDEEGGGAKVEGTGSGFVWDSTGHIVTNYHVVAKLAGDGSASHRCKVFLEGSGGKSYSKEARLIGCDPAYDLAVLKIDADRDQLRPALIGTSRSLRVGQSCFAIGNPYGYEHTLTTGVISGLGREIPSPNGRAIRGAIQTDTAINAGNSGGPLIDSYGHVIGVNTATFTRKGSGISSGVNFAIPIDTVPT

SEQ ID NO: 58869 - protein, 287 aa, Zea Mays
MSASRSGRRRTGSVALGDLLQREASAERAALGCGERPSVAAGQACRAKKGEDFALLKPACERRPGAPSTSFSAFALFDGHNGSAAAVYAKEHLLGNVLSCVPTDLAWDDWLAALPRALVAGFVKTDKDFQTKAHSSGTTVTLAIIDGSVVTVASVGDSRCVLEAEGSIYYLSADHRFDANEEEVGRVTECGGEVGRLNVVGGAEIGPLRCWPGGLCLSRSIGDQDVGEFIIPVPYVKQIKLSNAGGRLIISSDGVWDALTAEMAFKCARGLPPEAAAEQIVKLKQKD

SEQ ID NO: 58870 - protein, 745 aa, Zea Mays
MIGASDVKLDIREMALAGLNLMNDGRQSSAGSVDFSYPDIKEMINYICCQRPQLLHSDEQTNGKLLFPSKTFVSMIKFLMKCFESSDNLKLLQEDPSHSAVAKMCVILEHAMSYEGSSELHALALKSLVDLSSREPKLVSLRYAERINWLRSLLGHVDSDAREAVSRLLGIASSALSTSSALNLLSELTSTLSQNRPSRFENYHGVLCAIGYLTAGALKQSCITEDMVKNVVDILVKVVTSEGSALASVAMESLGHIGLRCALPSINQNSSTGTLLSVLRERLTKLLSENDTKAQQKILVSLGHISWNEMSFPHLNDALDLIFSLSRSKVEDVLFAAGEALSFIWGEVPVTADVILETNFVSLSQATNYLTGDASLVSSNSYEKSGCEEAHSIAREEIIKKLFETLIYSSRKEERCAGTVWLVSLTMYCGRHKKILELLPQIQEALSHLLGDPNELTQDLASQGMSIVYELGDASMKEELVHALVNTLTGAARKKKAIKLMEDSEVFQEGTIGNNPTGGKLSTYKELCSLANEMGQPDLIYKFMDLANYQAALNSKRGAAFGFSKIAKQAGEALQPYLNTLIPRLVRYQHDPDKNIQACYGRFMLLGLPKVCKHLRNIWTTTFRAMDDIKETVRTAGDSLCRAVSSLTIRLCDISLTSTSEANETMNIVLPYLLSEGILSKVSSVQKAAISLVMKLAKGAGPALRPHLPELVSCMLECLSSLEDQRLNYVEGMLASKQISLKLCA

SEQ ID NO: 58871 - protein, 62 aa, Zea Mays
MLRLTTTRPSMSRAADTISSVSASVDTTSTAQGEHVAGGLCGMVQEIEYTWRSSKTSQMTDS

SEQ ID NO: 58872 - protein, 831 aa, Zea Mays
MDYQGDNLRDFFQTNGRKVLQRAENNYSLKYFTENEIRNITDGYKSVLGRGAFGEVYKGTLEDQSSVAVKRYIHGTHKEVFAKEVIVHSQINHKNVVRLLGCCTEENALMIVMEFISNGNLDSILHGNRGNGRVPFPLKKRIEIAIEVAEVLWCMHSMYSPVLHGDIKPANILLDENFQPKISDFGIARLLSANGPQQATTVIGSIGYLDPAYCESGILTPKSDVYSFGVVLLEIITRNKAVDGTVTLAQSFNEALTKGEDVQHMFDEEISVAENKKFLRRIGQLAAKCLQRDVKTRPEMVEVANSLRMIRKAMQRDQDEDVLLAAYQFGDLKIFNETEMKEMTKNYSMAFRKSMCECLYNGVIGMNRPIIVRLLETSSETGREIFLNTMSILSQKNHKNVVNIVGFHIGKSSLECVYESCCDLSKTMLGSISLSNRNLYDTICSMKKLHLQQRLSIAVQCAEGLVHIHSLAAESPESCGTSLLGNFRSANIFLDENFVPKIFNVNLSTFLGLSGAQKHTVFSIHYNGPEKYYSDPRDVSGQLLNKKSDVYSFGVVLLELITWKTVRYMYNLRARVLTTDFLDSYRRDRDAIGMFGKVCDEHEGYFVHEALSIAIDCLQLDIQMRPEMEHVLFRLRIIVARSKLAAGSNNKPSQHIGRALVNNIDKLHPTLISTISMEELNEATGNFSNDVLIGQGPYAECFLGVLKDGQNLAVKRLRTSEEIQVEVPTILRMCYHDNVVQFLGCFLEGGTRVLAYEYAPRGSLHDILHGKMGIKGARPGPPLSWLQRVKIAVSAAKGIEFLHEKVTLVFQYMMPIAGFIIGPSTILSGNI

SEQ ID NO: 58873 - protein, 297 aa, Zea Mays
MRIQARHRSRAGGVDHHQQQAADDDDALLLRRGRELFAAAAAVHEQQQASNKRWDSSIFSKEEMSAMTRSKEEAALKRVRALQYASLHNEKLGLRRPPSPSMSRDDEADALNNQRWSWLEEWVGSQPFDKDVPVAHQSPYTRSASRGEHDDVVDRLGCSARRSFARPTRTPPRGDCYGDAAQFPGYMASTASAKAKFRSMSTPKERSAAGYDAYSEHCFPFADRLLSPIPSMSPIPSVASDMGFARPPVAQRSPRVPAKSPMTPARARTRRSHGGHHSFGSEAALHQLQMEHYTPVR

SEQ ID NO: 58874 - protein, 237 aa, Zea Mays
MASVGVARSSLGFQNGTSSSSDPDRLPNELGSMSIRDDKDVEDIVVNGNGAEPGHIIVTSIDGRNGQAKQTISYMAERVVGHGSFGTVFQAKCLETGETVAIKKVLQDKRYKNRELQTMRVLDHPNVVALKHCFFSKTEKEELYLNLVLEYVPETAHRVIKHYNKMNQRMPLIYAKLYMYQICRALAYIHNSIGVCHRDIKPQNLLVNPHTHQLKLCDFGSAKVLVLQSSRAHIWCY

SEQ ID NO: 58875 - protein, 323 aa, Zea Mays
MLKATSGNQTAKTADQNKQALESADIGALDQSKPIKRNNRRPLKNLDSVAAGELGVLQRCEGRGKARRKSKDAVKDEVEEIVELKSKNARKTSGRGAAKNSKKRKLDNVESGPSSPVSTDDDIELTVEDLVSIAEEFVNADKQKQCELQTVEVTRHKEHHLCPKISTEVDRGQSVVNAQSVKGSMQCATATSNTGAIKYTEDESTSHQEVQFSSFKTTEDVAQDMINLLFGHLLSKPVANTEKSDPVESTTRTVNQVPEGRGWHSEVPRQEEPVKKPEPVVESMPTTINHVPEKKDWRSELTKLGEPVAKKKSSLRDKVALFL

SEQ ID NO: 58876 - protein, 1335 aa, Zea Mays
MSWGLGWKRSSEIFHLTLDYGDYDDNDDHQPSSPSPPASSSPSASASSTPVSSSSPTATRNGDVGFRIELEWSAGDDEDQVALRLQSQLMVALPPPHDAVSVDLIPRDDGEEEVVQIEMRVVRRREALRSVRVSRAPGSALGSGDGAGVLARLIRSNLAPAPAVDGPTAAAGVPVLADHWRPVAMLSLCNCGMSVLPVELTRLPLLEKLYLDNNKLSVLPPEVGALKNMEVLSVNNNMLVSVPVELRQCVMLEELSLEHNKLVRPLLDFRSMPKLRILRLFGNPLEFLPEILPLHNLRHLTLANIRIEAVESLKSVNVQIETENSSYFIAARHKLGAFFSLVFRFSSCHHPLLASALAKIMEDRSNHIAISKEENAVRQLISMISSDNRHVVEQACLAISSLASDISSAMQLIKCDIMKPIEAVLKSSDEEELVSVLQVVVTLTFVSDHVAQKMLTKDVLKSLKALCGHKNSEVQRLSLFAVGNLAFCLETRRTLMHSESLRDLLIRLTISQERRVSKAAARALAILGENENLRRAIRGRPVAKKGLRILSMDGGGMKGLATVQMLKQIEQGTGKRIHEMFDLICGTSTGGMLAMALGIKQMTLDQCEEIYTKLGKLVFAEPIPKDEAATWKEKLDQLFKSSSQSFRVVVHGSKHSADQFERLLKEMCADEDGDLLIESAVKGIPKVFAVSTLVSVMPAQPYIFRNYQYPPGTLEVSPGMAESPSISAIGTAVSGAPVGIKRGAFMGSCKHRVWEAIRASSAAPYYLDDFSVDANRWQDGAIVANNPTIFAIREAQLLWPDTRIDCLVSIGCGSVPTKSRRGGWRYLDTGQVLIESACSVERVEETLDTLIPMLPEMQYFRFNPVDERCGMELDETDPAIWLKLEAATDEYIQKNFLAFKNLCELLVPRYQEEEKSSDIYKSLSFSRLTSLNQGFSESNPTLGWRRVVLLVEASFSPDFGKKINHARSLESFCSQNGIRLALMNSASGFGKPATALPTPITSPLFTGSFPSSPLLYSPDGTQRIGRIDLVPPLSLDGHPTTKSSPPTSPLKSRQPSAHVRSLYDKLQNMPQVGVIHLALQNDSTGSVLSWQNDVFVVAEPGELADRFLQSVKTSLSTLLRGRNRKGAYSLSKISCLSELVAECPSFEIGGIHHRYIGRQTQVMEDNQEIGAYMFRRTVPAVHMAPEDVRWMVGAWRERIIVCSGKYGLAHGLVKAFMDCGAKAVISSSIEPPDSQTIVYHGMDVNGSLENGKFVIGDEEADESEPEPVSPVSDWEDSDVEKGGNHDMDDEEYLAQFMCLMYDKLFREGVTVDTALQQALRSHPKLKYSCHLPHVL

SEQ ID NO: 58877 - protein, 306 aa, Zea Mays
MDLSYQGSKECNIRTTDNSLGAIKLWSKRVFAQQETTRITRSKKNIAQPDATLTPRHNIDYHTQANGHAHLDENTNMTNEGHVAPFDGKNPTGNEDNVDVLADNNMTIGGQVDDTNQMSNGDLELGQNDRWERGINMGHGLHRINRGLRGKLQVVIPEGKIRPMAPLVAAKFATECNIVVRNHVPVFKHWKDYKNHSGLFNLFTGKLSAKFDINTSDAPVQKACSQMMKSAVRQQRYRLKKKYFDPFPLHLVAKKSPIRSMTDEEWNELVEYWKSPKKWRHLKKTKRIDPKLNSIKQLALVATWFM

SEQ ID NO: 58878 - protein, 899 aa, Zea Mays
MAPKLNCEDESCPMEIFHPPEDCNLNSSLPFTLQICRVEDIDVSGLVQGTVVNFNRARSVTVQTSGTISATGLGCRGGIGRGKMLSSGFSGGGGHGGKGGDGIYNGGHVEGGSAYGHADLPCELGSGSGNVSGSSTAGGGIIVMGSLEQSLPNLSLSGSIEANGGNFTGLMSHATIGGPGGGSGGTILLFVRTLLLKKDSVLSSVGGVGGNGSGGGGGGRIHFHWFDIPTGDDYIPFATIKGTILARGGVSEGQGFSGENGTITGKDCPKGLYGTFCKECPSGTYKNITGSSKSMCSPCPPNELPRRAVYISVRGGVAEPPCPYKCVSDRYSMPHCFTALEELIYTFGGPWLFGLLLSGLLVLLALVLSIARMKFVGTDELPGPAPTQQSSQIDHSFPFLESLNEVLETNRAEESHCHVHRMYFMGPNTFSEPWHLPHTPPEQISEIVYEDAFNKFVDEINALAAYQWWEGSVFSILCILSFPLAWSWQQWRRRKKLQKLREFVRSEYDHSCLRSCRSRALYEGLKVAATPDLMLGYLDFFLGGDEKRTDLPPRLHQRFPMSLIFGGDGSYMAPFSLHSDRVVTTLISQAVPSSIWHRLVAGLNAQLRLVRRGNLNTSLLPVLKWLESHANPELNTYRVRVDLAWFQTTALGYLQFGLVLHAVGGVVAAELQDGCTSKTDQHSVNQNTCTDSQMGHSRTNDVLRKRITGTILNVDNLRMLGGRRGFFYLLSLILHNTKPVGHQDLVGLVISILLLADFSLVLLTFLQLYSYSMVDVLLVLFILPLGILAPFPAGINALFSHEQRRSAGLARVYALWNITSLVNVVVAFVCGFLHYKSSSKKHPSMQPWSFGGEETSWSLFPIGLVLCKCIQARLVDWHVSILEIQDRAVYSNDPTIFWQ

SEQ ID NO: 58879 - protein, 281 aa, Zea Mays
MSQRDGDLAAGAHPEEGDRHAVRMDGSDDELDQPTSKATEHITAMDVRKGKDMQGIPWNVMPTTRDKYRQSRLQGYANFENVPNSGRLSEKECMPAEKGQLYYEFQHSTRSVKPTIRHFQLRNLVWATTRHDVYLMSNFSVLHWSAMTYKKQEVINLQGHVTPCEKHHRNHYEGFYQTPVSTLAVKHNLLVTGGFHGEIICKFLDRQGVSYCCKTTNDDDGITNSLEIFEKPSGSLHFLASNNDCGLRDFDMEKFRICNHFHFAWPVNVSLQCLLNFQFSI

SEQ ID NO: 58880 - protein, 923 aa, Zea Mays
MGFLSAKLLPSCESVCVCCPALRPSSRRPVKRYKKLLAEIFPKTPDGAPNERKIVKLCEYAAKNPLRIPKIAKFLEQRSHKELRSAHVNFVRIITEAYSKLLFICKEQMAYFAISLVNVLTELLESKQENVHILGCQTLANFINSQVDNTYARNIESLVHKVCALSRRQGEDHRLLRAASLQCLSAMIWFMKEHSYIFADFDEIVHSVLENYRTEESNGGGDDRHALQHNWVDEIARSEGRPGVGGGNDVNINTTTIRLRPARNSSALTRDERDSPEVWSHICVQKLAELARESTTMRRILDPMLSYFDMKKQWAPRHGLALLVLSDMAYLEKSSGNEQLILTTIIRHLDHKNVLHDPQTKSDIIQTATSLARQLRSRGFAVELVVAGDLCKHLRKTLEAVESGNVEDQNLNEPLQIVLEDCLMEVVRGINDVRPLYDMMAITLENLPSMPTVARATLGSLLIISHIISLTSVSSNNLMVFPEALLQQILKSMLHTDIDTRVGAHHMFSAIIVRGPSHLRSESEYLYETKKQSRNTSVFASATALLEKLRREKESLSSDKPRNIMHDDVKEMNMHEEDKRKNPAYFSKLVSSFIERCATRSSVEETNIAMLTEDQTNQLLSSFWIQANQTDNTPFNYEAIGHSYSLTVLSSRLKNSSNGNIIQFFQLPLSLRSVALTPSEVLPAYCQRSIFTLAMSMLAFAGKVCHVAELSDLLRCFSSSKIDPYLRIGEDLQLYVRLQSDLGSYGSESDQEIAKSMLSDCRTKMGKDVIVKELTELFTPEEMPLFGSNSALDWANFNAQAFSDESLSFDEECSRTSSVDCGLHESPITNTASSISKITLPQSVPHVLGVGQLLESALHVAGQVAGASVSTSPLPYGTMTSQCEALGLGTRKKLSSWLVNGHESTPDNPMPSLPTAHHSIIPK

SEQ ID NO: 58881 - protein, 208 aa, Zea Mays
MPAAAAAQRLLAASTKIIGVGRNYIAHSKELGNPVPKEPVLFLKPTSSFLHAGVATAAVEIPEPLESLHHEVAANGWSGSGPGLRLARRLCTYDERDDRALEEEVEKKFGWILKIIFLGTAGLVGYQFFPYMGDNLLQQSISLLRVKDPLFKRMGASRLARFAVDDQRRMKVVEIGGAQELLNVLEGAKDDKTRKETLKALAALSKSG

SEQ ID NO: 58882 - protein, 128 aa, Zea Mays
MNASWLQRLVTSTLRGYPNNAHLKELEKAPENLYLFKADEPDHDTLTAAVEGCEGIFHLATPAVPEDKIVDPERGSLTCQKLMDLAGNQGNGLGHSVERSEKGMASPGCGRASLPPSPSLPSICHVTI

SEQ ID NO: 58883 - protein, 1711 aa, Zea Mays
MVPLSCWRSSISSSRSSSVITDYVGYLSKGQIPPKHISLVNLTVTLNIEGSKYTIETVRGGPRSYKLRMNGSEIETEIHSLRDGGLLMQLDGNSHVIYAETEAAGTRLLINGRTCLLQKEHDPSKLLADTPCKLLRFLVADGSHVDADTPYAEVEVMKMCMPLLLPASGVIHFVMPEGQAMKANDLIARLDLDDPSSVRRAEPFHGSFPKLGPPTAISGKVHQKFAASVNSAHMILAGYEHNINEVVQDLLNCLDNPELPFLQWQELMSVLATRLPKDLRNELDGKYKEYELNPDFCKSKDFPARLLRGVIEANLAYCSEKDRVTNERLVEPLMSLVKSYEGGRESHARVVVKSLFEEYLSVEELFNDNLQSDVIERLRLQHAKDLEKVVYIVFSHQGVRSKNKLILRLMEALVYPNPSAYRDQLIRFSALNHTSYSELALKASQLLEHTKLSELRTSIARSLSELEMFTEEGERLSTPRRKMAINERMEDLVCAPLAAEDALVALFDHSDPTLQRRVVETYIRRLYQPYLVSGSIRMQWHRAGLIALWEFSEEHLKQRSGQDVPLQQVENPIEKSWGVMVVIKSLQFVATAIDVALKETSQYGIGVRSVSNSNHVHSNQSNMLHIALVGINNQMSTLQDSGDEDQTQERVNKLFKILKDNTITSHLNGASVKVVSCIIQRDEGRPPMRHSFQWSVDKLYYEEDPMLRHVEPPLSTFLELEKVNLEGYNEVKYTPSRDRQWHIYTLIKNKKDQRLNDQRMFLRTIVRQPSATNSFLTGNIDNEVGHTQASSSFTSNSILRSLMGALEEIELHAHSETVRSGHSHMYLCLLREQQLHELIPFSRMTGKIDKDEGTVCTLLKHMVLNLYEHVGVRMHRLSVCQWEVKLWLVCDGQASGAWRVVVTNVTGHTCTIDIYREVEDPTTHQLLYHSATTSAGPLHGVALNEPYKPLDAIDLKRYAARKNETTYCYDFPLAFETALKRSWKSSSYGVSEANEHNRFYAEVKELIFADSVGAWGTPLVSVERPPGINDIGIVAWNMKLSTPEFPRGREIIVVANDVTFKAGSFGPREDAFFDAVTNLACERKLPLIYLAATAGARLGVAEEIKSCFHVGWSDYESPERGFQYIYLTTQDYSRLSSSVIAHELQLKNGETRWVVDTIVGKEDGLGCENLHGSGAIASAYSKAYKETFTLTFVTGRAVGIGAYLARLGMRCIQRLDQPIILTGFSALNKLLGREVYSSHMQLGGPKIMATNGVVHQTVSDDLEGVSAILKWLSYVPPYVGGPLPIMKPLDPPERPVTYLPENACDALAAICGIQDGEGRWLGGMFDRESFVETLEGWAKTVITGRAKLGGIPVGVIAVETQTVMQVIPADPGQLDSAERVVPQAGQVWFPDSATKTAQALLDFNREELPLFILANWRGFSGGQRDLFEGILQAGSTIVENLRTYKQPAFVYIPMGGELRGGAWVVVDSKINPDHIEMYAERTAKGNVLEPEGLVEIKFRPKELEDCMLRLDPELIGLNTRLKEMKKQNASISEMETIRRSMTIRMKQLMPIYTQVATRFAELHDTSARMAAKGVIGKVVDWKESRAFFYRRLRRRVAEDALAKEVKEAAGEQLSHRSALDCIKKWYLASKGTEGDGEMWNDDESFFAWKDDPKNYENYLEELKAERVSNWFSHLAESSDVKALPNGLSLLLNKMNPLKREQVIDGLRQLLG

SEQ ID NO: 58884 - protein, 72 aa, Zea Mays
MQNLYETVKKAQMVVQVEAVRVQKELAALHFLETSNLLELKSQKLQWSWVLKNFRSWSMMHTRMRINGASRP

SEQ ID NO: 58885 - protein, 129 aa, Zea Mays
MAAFNKLGGLLRHSALVSGITGGSSPAVFNAARLMSTKLFIGGLDWGVDDVKLREAFSSFGEVTEARVITDRETGRSRGFGFVNYSDSDAAKEAISAMDGKEIDGRQVRVNMANERPAGNRGGSQSYDA

SEQ ID NO: 58886 - protein, 550 aa, Zea Mays
MSVIIGCPDKSVKLFVKGADSSMFGVIDKTANSDVVQATEKHLHSYSSLGLRTLVIGMRELSQEEFQEWQMAYEKASTALLGRGNQLRNVAANIERNLRLLGATGIDDKLQDGVPEAIEKLREAGIKVWVLTGDKQETAISIGYSCKLLTRDMTQIVINSRSRESCRKSLEDAIAMVNKYQSFSTDPQLRVPLALIIDGNSLVYIFDTDWEEKLFEIAIACDVVLCCRVAPLQKAGIVDLIKKRTSDMTLAIGDGANDVSMIQMADVGIGISGQEGRQAVMASDFAMGQFRFLVPLLLVHGHWNYQRMAYMILYNFYRNATFVFVLFWYVLYTGFTLTTAITEWSSVLYSVIYTAVPTIVVAILDKDLSRRTLLKYPQLYGPGQRDENYNLRLFIFIMIDSVWQSLACFFIPYLAYRKSIIDGSSLGDLWTLSVVILVNIHLAMDVIRWNWITHAAIWGSIAATWICVMIIDSIPIMPGFWAIYKVMGTGLFWALLLAVTVVGMIPHFAAKAFSEYFIPSDIQIAREMEKSQDFHDVTHPEVQMSTVSRA

SEQ ID NO: 58887 - protein, 126 aa, Zea Mays
MRGCDLYIVKDHLDVVNAILDTDDSCIRIVRKNGKTSLHTAARIGYHRIVKALIERDPGIVPIKDRKGQTALHMAVKGKNTDVVEELLMADVSILNVRDKKGNTALHIATRKWRPQVWFFSGVFYK

SEQ ID NO: 58888 - protein, 334 aa, Zea Mays
MEGALKLDSFLGNLPKKIDLDSVAAMNVTVVNDPIFKSSSVEFDIDGLFIPSDETAPRDMHLGDTQFALPLGSSSKMLWISLDEDVFNSVSALYFKAGLLQRMVDKIPDQFFLNTASWRFLVPRLYREFPDDNMLLNISAVSPPSVRINVGRIDATVDLDITVNVLDFGEIVPVACLSVSVDVYGAAAVSENNLVGRVELDYFSFTLKWSKVGKLHTILVQTVLRILLKKLFVPYVNSYLKHGFRLPIIKGFSVTDAYILTSYSRMIVSCDVAFIEPEVLSPVQESNTNEDLSYEVLSPVQESKTNEELTNEDLSFEVLSSLLLGSAKTSQPTA

SEQ ID NO: 58889 - protein, 355 aa, Zea Mays
MAEGEELSKKQAAQEATIRKLRAQIREFEEEKQRLNSKIQVEEAKVESIKRDKAATEKLLQETIERNQTELAAQKEFYTNALNAAKEAEALAEARVNSEAKIELENLLGEAGEKENMLIKTIEELRHFLTRQEQEAAFREKRLKGDYDDLQKRYQASELRYNELVTQVPESTRPLLRQIEAMQETTARREDAWAGVERTLNSRLQEAEAKAASSEEKERSVNERLSQSLSRITVLETQITILRTEQTQLSRSLEKERQRASESRQEYLAIKEEAAIQEGRAKQFEEEMKELRARHKEELQEAAEHRDLLEKGSRPCVQNVVLASGRGRAHLVLGWVFSPPRPAVSAPLGVSTVIR

SEQ ID NO: 58890 - protein, 86 aa, Zea Mays
MSILWEKSAGWRWLVRRTRDSKPFFFTFAALCGVVPGVIGYGVMQLTGSRNEQLEAHLRSTARPETTMFTFVTIPWSPPTDETRGK

SEQ ID NO: 58891 - protein, 352 aa, Zea Mays
MFWRMTGLSAASPVDTILDKENFTLEELLDEDEIIQECKALNTRLINFLRDKAQVSQLLRYIVEEVPEDSEKKQSFKFPFIACEIFACEIDIILRTLVEDVELMDLLFSFIKPDHPHSTLLAGYFSKVVICLMLRKTAPLMNYVQEHPDIVVQLVDLIGITSIMEVLVRLIGADETIYLNFADTLHWLENTYVLEMIVDKFSSSDSPEVHANAAEILSAVTRCAPPALAAKICSPSFVGRLFHHALDESRPKSVLVHSLSVCISLLDPKRLASVSYQAFRSNLTHGTLVTASPETVDGILESLGDLLKLLDITSSQNVFPTTYGCLCPPLGKHRLKKSSPTTQQRTDQQQPE

SEQ ID NO: 58892 - protein, 138 aa, Zea Mays
MAKLLPKEKLVPQKDLAELAFKEKKKQEQCSFNVIAYKDKPRLRTALEMLRTTQEIERRLEEVSLPLIILHGEADMVTDPAVSKALYEKAKSQDKKLCLYKGAYHAILEGEPDQTIFQVLDDIISWLDQHSTKEGISL

SEQ ID NO: 58893 - protein, 401 aa, Zea Mays
MELDLNVAEVAPEKPSAALEASDSGSSGSSVLNAEAASAGGGGPAPGEEGSSSTPAVLEFSILRSDSDAAGADADDGDATPSPPRHHQQQLVTRELFPAPQHWAELGFFRAGPQQQPDIRVLPHPHPYPPPPPPAQPQQAKKSRRGPRSRSSQYRGVTFYRRTGRWESHIWDCGKQVYLGGFDTAHAAARAYDKAAIKCNGREAVTNFEPSTYDGELLLTAEASAEVADDVDLNLSISQPASSQSPKRDKNCLGPQLHHHHGRPFDGSAVLKKTKIDAPSELSSAGRPHRSFLPHLVAAEHLPPRSHPFFITHHESDASRRDPSWAAAAAWKVTAAAPPPPTTTLLPLPLPSTSSAAASSGFSNTATTAAAAPSAASSRRFDPPPPSSSSSSSHHHHHHRR

SEQ ID NO: 58894 - protein, 191 aa, Zea Mays
MERGEDIIEEKQAGGAATSDERSSSQKVADGKGAEPPAAGVSNRLKPSDDAEKLVAFMEDHYDDVVARVQSFDEFYHAIFELIEMFCEERGQLQYRLAEKKALEEAYNKHHRSDGKVTKEEFEAMSREVVKAGSFRVGKASLELGALLFGAPACALLAKRILPGLGWLSDDVVVPLATSGSVAYLIKSKRL

SEQ ID NO: 58895 - protein, 165 aa, Zea Mays
MQGKLRQAPGELPTLNDWENHLTTIFPEVRLKRYLEMRGADGGPWRRLCALPAFWVGLLYDEESLQSILDMTFDWTQEEREMLRHKVPLTGLKTPFRDGYVRDLAEEVLKLAKNGLERRGYKEVGFLREVDEVVRTGVTPAERLLHLYETKWQRNVDHVFEHLLY

SEQ ID NO: 58896 - protein, 410 aa, Zea Mays
MEVAGRGIGLWKPPARGRGGGGRRRWGLEEAAVGGGMEEAAVGLENEDRGSILCFCKCLCVNPICSSLAAATGVHRKAGRRNTHAKTRGRSDTQDQEKTRGPLRFAAPHPHLPLLLEPSAVAFDMGDPPALKRPKLEKGDNDSTYCPRSASNGAGANGPPPRDDVEEDDISEEAVIALIAHRERDVERCKLKLLHYQSLLDAAEMKLEEAHSRLARFRDRKPPPTRSEPKLPTPPIQREPKPSPPPIRRDLKPSPQPPEKKAPSPAPQPSASPQLVIPGTNNRPAPRPQPMPGLKKAAAPSSSSSRAPLERSRKEEKPPKRKIEQKEHRNLIPSVRKSSATVLKFQGGNLVSSQHRRKLRCLELCPANDQLVVTSALDGLVTLWQVETRGFMPTGALGNALFLKSYSQNQ

SEQ ID NO: 58897 - protein, 50 aa, Zea Mays
MVEECNEAFLKFDLDFDQVVVLETKTAKAATQDILTTHCIPSAASEELKS

SEQ ID NO: 58898 - protein, 104 aa, Zea Mays
MGRGKIVIRRIDNSTSRQVTFSKRRNGIFKKAKELAILCDAEVGLVIFSSTGRLYEYSSTSMKSVIDRYGKAKEEQQVVANPNSELKPYLIYTLSSATVRNTFT

SEQ ID NO: 58899 - protein, 208 aa, Zea Mays
MLRAVARCCGHWPPGAAAADGMLWQTELRPHAAGEFSMAAAQANLTMEDQAQVLASPSATLVGVYDGHGGVDASRFLRLREGAGGHQRGGDPERVRRGRGGVPQAGEAGVGEAPTPGCRGLVLPARGHLRGYAIRGQPRGLPRRARPSSGRRRRRGGRRRASVRRAQRGVRGGAAGARGAQPGRRADRGTRQGSVEGEGDNSGIKIHW

SEQ ID NO: 58900 - protein, 592 aa, Zea Mays
MVISVCLIAFSLTYAIRFPLRQRNGSNGDCDTIEITVYDYYAKKGIDLKYSGDFPCINTGKAKRPTYFPIELCSLVPLQRYTKALSTLQRSSLVEKSRQKPEERMTVLNDALQRSNYDSDPMLRACGVSVAPKFTQVEGRILQAPKLKAGNGDDIFSRNGRWNFTNRKFYETCSVNKWAVVNFSARCDVRNLIRDLMRNASAKGIQMEEPFDVFEESPSMRRAPVSRRVDDMFGQIKSKLPGAPRFLLCLLPERKNCEIYGPWKRKCLAEFGIVTQCLAPLRVNDPYLLNLLMKINAKLGGLNSLLQVEASSSIPHVSQVPTIILGMDVSHGHPGQDRPSVAAVVSSRQWPLISRYRASVHTQSARLEMMSSLFKPRGTDDDGLIRESLIDFYTSSGKRKPEHIIIFRDGVSESQFTQVINIELDQIIEACKFLDEKWSPKFTVIVAQKNHHTKFFQTASPDNVLPGTVVDSKVCHPKNFDFYMCAHAGMIGTTRPTHYHVLHDEIGFSADEMQEFVHSLSYVYQRSTTAISVVAPVCYAHLAAAQVSTFLRLEEMSDASSSQGGGHTSAGSAPVPELPRLHDKVRSSMFFC

SEQ ID NO: 58901 - protein, 82 aa, Zea Mays
MAYMFVHDGLVHRRFPVGPIENVPYFRRVAAAHQIHHMDKFQGVPYGLFLGPKELKEVGGTEELEKEIKKRIRRREALDAIQ

SEQ ID NO: 58902 - protein, 366 aa, Zea Mays
MLPCFHAERKEVSRHDNATIQRNALESVSSYEGSMSSEKVPPTPHRIPPSPSRFAPSPQIARVGSVNLSIQQILRATQNFSPSFKLGEGGFGMVYRAVLPDGNVVAVKRAKKDQFAGPRDEFSNEVDLLAKIDHRNLVRLLGFTDKGNERIIITEYVPNGTLREHLDGQHGRVLDFNQRLEIAIDVAHALTYLHLYAEKTIIHRDVKSSNILLTDSYRAKVSDFGFARSGPSDTEKTHISTKVKGTAGYLDPEYLRTYQLTPKSDVFSFGILLVEILSARRPVELKRTPEERITIRWTFKKFNEGNTREILDPLLEDHVDDEVLEKLLSLAFQCAAPTRDDRPTMKEVGEQLWEIRKEYGKSVRKV

SEQ ID NO: 58903 - protein, 326 aa, Zea Mays
MSGSSAAGEDIVQHLSSNSNPSSSKLAKLEARMAGKAVSAPSSPPHHPMAAPASAPAISFMDQEELPETSSSDDDNCEEFLIQKNTLKRPRSPDGDNISALGNFEGSSNEAAKILDVTDTRPSLDNSNRKKQGRGRGRAGTGRGRGSKTVDQPRLTLISSAVVTNGQLDKLTNKEPQSSVQLGHDDRAALQEELSMLHGKVAFLEEELSKSRQDATNYHQLSDRVAKELKDLKDHDQQMRSKQMKVLSDLLIAVSKAERQEARMRIRQESFRLGNVGVMRAGTIISEIWEDGQAIKDLNSHLKSLLETKETIERHRKSLKKRQSGF

SEQ ID NO: 58904 - protein, 105 aa, Zea Mays
MKRNTEHDPPYWRGAIWINMNYMVLSALHHYAHKDGPYSGRAKELYDKLRSNLIRNIVQNYDATGFFWENYDQKDKGKGKGARSFTGWTSLIVLIMAESYPTLHR

SEQ ID NO: 58905 - protein, 1331 aa, Zea Mays
MSAGRGDPNTPANRPLFLSAGVPNLGCHNVAAPAAAGNSGSIASQVLFSPCSTSVLNTIQEVPAPQSALLSPINRATEQGDVPCIQPSWNMPGGCTQVPINIIVFHRELTRRGSRPQLSPSATALPDVSEGASIRLAGSNFLSHGRTPSIVAGDMTTNSSQLATADKYNSEHRMNCLHDEASKTENGKGSTQLPQLATAIFRDSYNDLESVVPAATWETRVQHSQESTTCLAESTTDDNIHMYQSMQKRLKTQINKSEHTPLSAPTVPKEKTLTQIETQLASAEKTEMFRNEETPALKMKARKKKHRPKVIRENKPAKVQKPDSTPDGKSPNQKVKRSYVRKKRNLSSLENCSGPVSDQSISGATGVAARSRTSSVRRSLQFESKEQGLQGGHSSMANIHHHNYEKPGHAQSSFYSESEVQTGRVMQEGMENSPGELAFDMSRRLNKFLDEYIHLPDMLKPTQEVSAATSASFSTELAREEDNVGRTCKPDGKSKCSLFADERVVNPTIEGNKKDLELNYSDADGLVSSARSLPQMDPTRSQMGKVSEVENPTHHSNGSLPGTRDSVVLRAAAEMFAFFQAGAIKKKRSARLRRNSPFYTMDLKNNTLQASTRLPQPCMDALHRSSCIKFLTKKRSEKARPHCSSVIQPNDELKDRLSAGSTFYGATNGCKISEESSPNFSSQTLDNKRINVDTHCEVAEGRSTNTSTGPYMDYVQGVASKLKHLDLNTEQVQRTEMHLSLTTPAVISFEGTSGPSNALVPYGGVVMVPNERPLQLVKKQRPRAKVDLDFETTRVWNLLMGKSAESYGTDVEKERWWQQEREVFQSRANSFIARMRLVQGDRRFSPWKGSVVDSVVGVFLTQNVADHLSSSAYMALAASFPSRPVNNNCKDDGTTEDNKQTTRMSELVGEKSVFDLFYNGVRPDLEVGCEEVSMTCKKTHMEPTDNTRDSEFIEGETYSFDYKSTDESVCNHKGIGIEHKEQQLPDFSSAELTVSTELVQQIQIQKISSSQILTSETIQSRLSLSSEIPRNFVCGGSAAAYQQLGSNFDQGSSLTENDATASEIECHRLQMAAINDYGFGKPEIPSSSSMPFFLAVDPQQLKLRNETNVSSTSSNIPSDSASPNLKNGTDPLLMPFNSYMADWSSDKITYTTLNTPKISTELPVKLHHDKSSSFEAPNLKEHESVFATHEMTVEATRKEDEHTSKSSFTSYNGVPDTAAQASKPKKTRTTTAKNTENFDWEKLRRQACSEGQMKQRSFERRDSIDWEAVRCADVRRISHAIRERGMNNVLAERIQNFLNRLVRDHGSIDLEWLRYIPPDSAKLTPMLVVYV

SEQ ID NO: 58906 - protein, 843 aa, Zea Mays
MFLRDTFSRPPCTLIQPSMQAVSQEPPPVPDFGQNFCPPIYPFGNQLLDFAAGVPLFSLYCLQTTPSPSPPKFASKTVITCQSIMVTLQEQSCLRIASFLADGVVPNRGAILPESSINSLTFSLKEFDLSVPLDTDEIARCSGTKNTNPQSSFSGARLHVEDLYFCQSPSTKCPLLNLDRDPACFLLWEYQPVDASQMKWATWSSHLSLSLETSSTSNGQRAVSDSNLWKCIELDDIRFEVAMVTADGGPLLDVPPPEGVVRIGVAFQQFKSNTSVEQLFFVLGFYTYFGQVAERISKVSNANKSESVKSSADKSENKLPSDTAVSLTMNNLQLNFLESLSASDVHMPLVQFGGGDLFLKVSHRTLGGAFAVTTNLMWTTVSVNCLEGESAIVCEHGTAVTGEHSILVHGNGHPKMRAVFWVDHRSKHQVKEPQFLDINITHVMPYDIQDMECHSLNVSAKVSGVRLGGGISYTESLLHRFGILGPDGGPGEGLLRGLKDLSSGPLAKLFKSSHLTEKEDERSKIDDHNSKFDLGVPDDLDVSIELRNWLFALEGTEEVGYLFSPRGGDGISREEKCWHSTFRNLHISGKSSDRLKLGGRRKVSPEKAFPVERFTAGIEGLQAIKPRLRDQCTKKGPSNNHEMGRDFNSSSSVGDHGVDVEATMVIGEDEIEGAKWTMDNVKFSVKEPIEAVATKEELEHLVMLCRSEADAMGRITAGILRLLKLDKSLGQGTIEQLRNLGSGGMDNIFSPRRLSRQNSFGSIGTPRTPTMQAIADVMGSKTTLEATISSLQGEISESKAKCMALISQASSTEDQNRAEDIRQLSEKLESMQSLVTRLRTLII

SEQ ID NO: 58907 - protein, 144 aa, Zea Mays
MFATYSLLSIIQSMVFRPNLRITVYITEKDIGKKRVKKKETNSFSYLLFDLLPHLGLVVLFFHSTPPGACLTGTFTNLGLGYIKARGVIPLHLSGFIGEAWLLSHLQRHGSADQARATIASKKMKHTQLNKELPYSMGSKNEDD

SEQ ID NO: 58908 - protein, 216 aa, Zea Mays
MSRRSVNPSRRVADGGLPSFGGPFHPKSRSPPVLTIALVVLGVIFLIAYFNSSPGVTVTSKETVTRSEGSCTSEVMRALPYLKKAYGNAMQKVLHVGPDSCTVVSNLLKEGKVEAWGVEPYDLEDTDSTCKRLVRKGFVRMSDIKFPLPYRPDSFNLVIVSDALDYLTPRYLNKTLPGLARVSTDGLVIFAGMCFFLKYLSPSLFMGNPHWTYRYQ

SEQ ID NO: 58909 - protein, 1155 aa, Zea Mays
MPMDTDERPLVELASAAAATTLAASSTSSAPFPAPATPGFSRAVRCNAPASSLPADGGAGAQPAYPENAISTTKYTPASFVPKSLFEQFRRAANCFFLVVACVSFSPLAPYRAVSVLLPLVVVVSAAMAKEAVEDWRRKQQDIEVNNRKVEVYDGIQSFHETEWKKLRVGDIIKVKKDEFFPADLIFLSSSSCDGLCYVETMNLDGETNLKRKQALEVTMGLNDDHFHSFKAFIRCEDPNEKLYSFLGTLYYNGQQYSLSPEQVLLRDSKLRNTMYIYGTIIFTGHDTKVMQNAMEPPSKRSSVERRMDKIIYLLFVILFVIATFGSIVFGMRTKHEISPGSYAWYLRPDQANIFFDPNNASFAAFCHFLTSLMLYVCLVPISLYISIEIVKVLQSTFINQDQNMYCAESDKPARARTSNLNEELGQVHTILSDKTGTLTCNSMEFLKCSIAGVAYGSRPTEVETCYGEIVETNGSFGRKDTTEFKRSVKGFNFTDSHLMNGRWAKECSRDAIEMFFRVLAVCHTAIPVADGNSAGMPYEAESPDEAALVTAAREFGFEFYHRTQTTISVHEYDPVVGGKVDRTYKLLNILEFSSARKRMSVIVRTEEGRLFLFCKGADSVIFERLSKDNGTAHLTKTKCHIDEYSEAGLRTLALAYCELTEEQYVVWNQDYSSAKNSVHTDHVAAVEKVSEDIEKDLVLLGATAVEDRLQNGVPECIYKLAQAGIKIWILTGDKLETAVNIGYACNLLRKEMEEIFITLENSSTSASEGSSGEGNKIATFEEIDRKLKDARGKISQKGTSTSFALIIDGNALTHALTGSLKNSFLDLAVNCASVLCCRVSPKQKALVTRLVKIRTSKTTLAIGDGANDVGMLQEADIGVGISGAEGMQAVMASDFAIAQFRFLERLLLVHGHWCYRRIAAMICYFFFKNITFGFTLFWFEAHAMFSAQPAYNDWFISFYNVAFTSLPVIALGVFDKDVSSHVCLEVPSLHQDGVNNVFFSWSRILSWMLNGMCCSIIIYFGSLNAILVQAVRQDGRVAGFDILGVTMYTCVVWTVNCQLALYISYFTWIQHFVIWGSILIWYTFLVIYGLFSPAISTTAYHVFVEACAPSPLYWLSTLMIVVTALIPFFVYKISRTLYYPQYHDQVQRANSKNW

SEQ ID NO: 58910 - protein, 684 aa, Zea Mays
MLLVMGNPGRSRQLSALVASAAILLSLSALPICRPYTYEQDVFAINGLYTALGAPQLPNWTSNGGDPCNEGWQGVSCVASNITSIILSGANLGGQLGNTLGNFTSLITLDLSNNNIGGTIPDGLPLTMQRFFLSANQLSGSLPSTLSSLTLLTSMSLNSNHLTGAIPDVFSALTGLANLDFSDNNLTGPLPPSMGNLTSLTSLHIQNNQISGTLNVLQDLPFQDLNVENNLFSGPVPVKLLNLPNFKKDGNPFNTSIAPSAQPPIAPTPLPSIPPSSGHVPSKEPAHSSSVPEKRSRDDIYMKNKIGRVPQKLGEPKIKEPPLKLKNDAEKAPNVVSDGREEHKLKVPTSETSNVVYDPSPRDGAELRFITDSFSEENIIRDSRFGKVYLAKLPDGELLEILKIDSSNSKVPVDAFLELVVRISELRHPNILGLVGYCAEFEQRLLVYEYCSKMTLHDELRHVDDSSKPLSWNARLQVASEAAKALQHLHDGCQPPVVHQNFEPSVVLLNSTLVVHISECGLASLASKSVSQLSGHTLFHYEAPEVHESGSVSDRSDVYSFGVVMLELLTGRKPYDSSYPRAEQHLVRWATSQLYDIDAITKMVDPSIRGQCSDKALSRFADIISRCIQHEPEFRPPMSEVVQDLTRMMPLTTIDAVVGYFGQCKMGGTQWQDAETAPRFVHCQ

SEQ ID NO: 58911 - protein, 534 aa, Zea Mays
MTGAKKAYKKFKHFTDETVDQGCRTVTYRCCLCGASSNSFKLLNTECEQNKGKADNKSILDLDDEECTTAFVFFKTRYAALIASEILQTSNPMKWVANLAPEPEDVYWSNLWLPYKQLWARRIATLLGSIFFMFIFLIPVTFIQGLSQLEQLQQRLPFLRGILKKKYYMTQLVTGYLPSVILQIFLYIVAPIMMLFSTLEGPTSHSERKRSACCKVLYFTVWNIFFANVLSGTVISQLNVLSSPKDIPVQLAKAVPGQATFFITYVLTSGWASLSSEVMQLFGLIWNFIIKYVLRMREDTEFVPSFPYHTEVPKVLLFGLLGFTFSVLAPLILPFLLVYFCLGYVVYRNQLLNVYRTRYDTGGLYWPIAYNTVIFSLVLTQIICLGVFGLKESPVAAGFTVPLIILTLLFNQYCRNRLLPLFKTFPAQDLIDMDREDERSGRMDEIHHGLHSAYCQFADTVDVPLDKIEIVGGDEEQGSSSGQSSVKETCEDPKKHLAHPTLKGLPVNRLRHAVRSVTFLIRLQRRGLSEQKIG

SEQ ID NO: 58912 - protein, 216 aa, Zea Mays
MFSSAGKVRVPKQLFVNTDPSSIPAAVRRAGLSLPLVAKPLVAKSHELSLAYDPTSLTKLEPPLVLQEFVNHGGVMFKVYIVGDAIRVVRRFSLPNVDEGDLSNNAGVFRFPRVSCAAASADDADLDPRVAELPPRPLLEILARELRRRLGLRLFNIDMIREHGTRDRFYVIDMNYFPGYGKMPGYEHVFTDFLLSLAKKEYKRRQSYSSLSSGEW

SEQ ID NO: 58913 - protein, 332 aa, Zea Mays
MQEGCKGLLYMVLHARVVMDLREKHEQEISFEQVEGDFYTFKGKWRLEQLGDQHTLLKYMVETKMHRDTFLSESILEEVIYEDLPSNLCAIRDYIEKAGAKSSNSTGHSNVPTDPDPDVDHDESRQSEQTCVSCSSSTMKQRPKVPGLQKDIEVLKSELDNFIAEYGQYGFMPKRKHLRSHGRVDIEKAITRMGGFRKIASIMNLSLSYKNRKPRGYWDNLENLQEEISRFQKIWGLDPSYMPSRKSFERAGRYDIARALEKWGGVQEVSRLLSLELRYPRRQADPDDERQSESPSGMMKKHGVKPDEGNVSPNAQKWLLKLKDLDVNWVEY

SEQ ID NO: 58914 - protein, 510 aa, Zea Mays
MSRSFFPTCSSQKAEIEEMGKELDDLRAKVEALTAQLRANSDLADGLKRAGADQAAWLRDARAEAERNAVEAAASSEEAAATGDRCGVLESRLAKNGQALRHLYAAHEALKGTLREKIEGLEGDKRGLLTALEDAEGRRVEHEAALRACDNEIARLRGLLSEKDWRGSEAEKRVLTPREVVMRDDMLVKPEEEKATVEGKLNWKAEQFRHLEEALNKLHDGFRAVKKEWGLDRSTSVDRIGTLEDDLDSKTRVTEDFPSRLDMCSQALAHEEGCRKRVEAELSELRLMYGYVVSEYEGAKSMMESLSSKTDGGIAYLRRALAEKVTLLKEIGYSKAHLEQENEDLRSSLKEYQEAQIGGTYAVVSLKSLWEKFRALEQTHRSCTKKLRDKEEEWRIQMTKLVNDLVECISDLESKDILIGQLQNELRGSYRSLELQTVESWEALIFLTVVLGKFHESCSFVDTAKLNMQHHCQEIEKEIGFAKRQLEEQSCIIVQSQAEQKQQSKVIAKL

SEQ ID NO: 58915 - protein, 309 aa, Zea Mays
MWMERTGQVQRGGVDGSDPRRGRVDQSARCVGLCSSSCRRHYLSTASSTPAYSPSTAELSSSLSLSFSRSLCFLVEVQVPALMATEVAETPAPLAEAVPETPAEAPAAPAAEAKPTKAKKASAPKKRANPTHPPYAEMISEAVTSLKERTGSSQYAIAKFVEDKHKDKLPPNFRKLLLGQLKKLVAGGKLTKVKNSYKLPARAPAAAKPKPKSKTAVKKPKAGAKKPKAATKPKPKPKAKSPAKAAKTSAKDTPGKKAAPAKKPAAAAKKAPAKKAAPAKKAATPSRKAPATMTNQCVLLLLEDNVVFL

SEQ ID NO: 58916 - protein, 885 aa, Zea Mays
MGGEVAGLRRGSMARPVSVQAPTPLPARSRDVRVLHEVLPSLRSARPVPSSVADGVPDARKEELAAPDCTEEGSPEAKHCTSVEVKKGDSVHPDGDWGTVEFNVVEHGVEVASDDPQRLKHVETSNAAGQEEDSGFKIDEEGSFKPLQVSGDVAEDQTVGVKTEVVAVSDVAVQRENMEDKQDGIVKAASLPTAALEAEGQFGADAELEDLECILNELSVAEPEEFESPVVEDKHSRRLSCTGVTDSYMSASRKGRSRSMDASTDSVANEFLDMLGIEHSPVGQPSDSDSESPRERLWKQFEKEALASGNAILGLDFDDGIEGPICGNVVEDFDLSAMIHEAELELQNGSQPIDTKFRAKSLEDEETEALMRQFGLNEKSFQSSPPESRSGFGSPISLPPEQPLELPPLAEGLGPFIQTKDGGFLRSMNPALFKNAKNNCSLVMQASSPIVLPAEMGSGIMDVLHGLASVGIEKLSMQANKLMPLEDVNGKMMQQIAWEAAPALESAERYDALDYHGIDALVGGGGNAPSGKKTGRCADLSSLGGENASEYVSLEDLAPLAMEKIEALSIEGLRIQSGMSEEDAPSNISAKPIGEFSSLQGKCAENTWSLGLEGTAGLQLMDVKQSGEVDGLMGLSITLDEWMRLDSGVVDEEEQYSDRTSKILAAHHAKSMGLVAENRNGDRKSRRSGRWGLLGNNFTVALMVQLRDPLRNYEPVGTPMFALIQVERVFVPPKPKIYSTVSDKGNSEQDDEEPKAEEVPDKALVTEEKAEELEDPVPQFKVTEVHVAGFKSEPEKTKPWGNQTQQQSGSRWLLAAGMGKGNKHPLMKSKAVVKPTKEAAGQAGDTLWSISSRVHGAGTRWSELAGNKSHSRNPNIMLQKDKRFR

SEQ ID NO: 58917 - protein, 359 aa, Zea Mays
MCMSSTNLLDTTNVQRTTYNSLVSVVPDIQPQPGIFTFNLTWSDINSNVLKPKISSPVSGYFLVRNPRYTNQGKFLKLSDFLAIAMDKDLSGVMIIIENAAFLVNSLGIDIVDSLTTALSAAGFDNHPTKEVLIKSKDSDVLVKLKQQKTKCKLVYTLPSGIGDASNSSLKDIKKFAEYVAVDSKSVFTLSSDFIIRQNSLVQDLQSAGLALYAEVFQNEFVAQPLDFFGDETVEINYYIQSFNLSGIITDFPKTVRRYKRNTCTVLGKDMPSYMQPPQAGSLAQFLQTFKTQPPSLPPMSTLNSSSVEEPPLPTVALRSVSDGSASGATKTPGTPSDAPTATVNAGMLLVMVFTALLI

SEQ ID NO: 58918 - protein, 387 aa, Zea Mays
MKAEALLMLRRYEEVIQLCQESVNLTERNSVLFKDNGEPKNSRVSERMQFSGRYWRPYLICKSYFLSGKLDEALELLKKHEQVTPVKESEVNTYEEKFSSLSATIRELLSLKAAGNESFQAGRYSDAVKQYSAALAWNSESRPFSAVCFCNRAAAYQALGQVTDAISDCSLAMVLDTNYPKAISRRATLYKMIRDYDQAANDVRKLISLLEKKVNVSGVSPKAFNKHNDLKQAHVRLSSIEDEAKNDTPLNLYLILGVEPSCSSEDIKKAYRKAALRHHPDKATQLLIRNENAEDGFWRDVVKEVYADADHLFKTIGEAYNVLSDPAKREEYNFEEDLRNARRRVSSSRSMHRSPEQNYSNRGFNPRQRQSSRASRSRWYSNSDDYW

SEQ ID NO: 58919 - protein, 707 aa, Zea Mays
MEQEEYTKEEINWSYIEFIDNQDVLDLIEKKPGGIIALLDEACMLPRSTHETFAQKLYQTYKNHKRFAKPKLSRSDFTICHYAGDVTYQTELFLDKNKDYVVAEHQALLSASKCAFVSGLFPFLSEDSSKSSKFSSIGSRFKQQLQSLLETLSATEPHYIRCVKPNNLLKPAIFENQNVLQQLRCGGVMEAIRISCAGYPTRRTFYEFIDRFGILAPDVLSGSSDEVSAVRRLLDKIDLQGYQIGKTKVFLRAGQMAELDARRNEVLGRSASMIQRKVRSFLAQKNFIALRRSALQIQTVCRGELARRVYHNLQREAASLKIQTLYRMYTARKAYNELSASAVTIQSGLRGMCARKELHFRRQTRAAIIIQSRCRQFLARLHYSRTKKAAITTQCAWRGKAARKELRKLKMAARETGALQAAKNKLEKQVEELTWRLQLEKRMRADLEETKSQENAKLQAALQEVQQQYKETKEILVQEREAAKKAAEIAPVIKEVPVIDTELMNKLRDENDKLKTMVSSLEKKIDDTEKKYQETSKISEDRLKQAMDAETKIVDLNMAMLRLQEKISTMESEEKVQRQALLSTPVKSMSEHLSIPIAPKAHHLENGFHEVEGLKEPQSAPPAIKEYGNGDPKMKKSIVDRQLENVDALIECVGTNLGYCAGKPVAAITIYKCLLHWKSFEADKTSVFDRLIQLIGSAIEVIWHWRF

SEQ ID NO: 58920 - protein, 158 aa, Zea Mays
MHKAARQHLIFYSHCFYFVNSLTHVSVLVYSGDRSPRLELQEDQAWLWLLLCCLLLLDRREGGEKQLACRLLLRWSFILYGDSRIHLLQKHHKSCLGHYTRASHSATWHSQSEVLEERQIHLPAYLGSEVMLMCKHLHLEFCLARMNQVYFPILLHLR

SEQ ID NO: 58921 - protein, 1122 aa, Zea Mays
MSIVGDIQSLLLTIMCAAVKIILSRKLSCSGTSYQVDHLECSCLIDAAIAFCKLQHLDPTISIKTQVDLIVAVHDLLAEYGLCCAGRDGEGEEGMFLKFAIKHLMALDVKLKSQLNSNGMEEDAVPKDVRAEDSVADEPSVSDNKQNSDDEEESELDEIQSCLDSALDQAFFCLYGLKINPDSCSEDDLAVHKNTSRGDYQTKEQCADVFQYVLPYAKALSKTGLVKLRRVLRAIRKHFPQPPYDLFVNNPIDNFLDGPDSCEKILSEICESNESREAILNVLFPGERGYEAFKKLSTASSEPYSDVYENLYYFIAQAEDISATDKHTGFVLKKEGEEFVEQSANIFKYDLLYNPLRFESWQKLSNLYDEVEVDLLLNDGSKHISILDWRTNTDLIRRVEMGRRHSRRCLLMSSLLAKTAPEQSEAHELLALVYYDSLQNVVPFYDQRATLPVKDSSWETFCKNSMKHFEKAFEIKEQWLHAFYLGKLCEKLGHSFSKALSYYNKAMMLNPTAVDPVYRIHASRLKLLYTQGKQNLEAIQVVADYTYNQSTKENVLSMLGSMTKVLQSSSDKTSLDTKEENKFFESDILDKVWHILYDDCLYALGTCVEGELKHFHKARYKLAQGYYRRGEAGDLERAKEELSFCFKSSRSSFTVNMWEIDGTVRKGRRKNPNVGGSRKNLEVSLSESSRKFITCIRKYMILYLNLLEKNTDLWTLEKAYTYLRTDKRFALCLGDIVPVGLGKYILVLTAAIHNPEIRRASGDASVEQLLEKMFTVFMDHANMWADISNIPEVNSPELSESNLYSYIHQYIHLLESDVRLDVLEGLNEKIRKRFKTPKLSNSNFAKICKHASLAWCRCILIKLASITPLPESADATNQPAPLSNGLLLYVDLQPDELLISSPDGPAQFKGLDMNWFETLNRIKNIPVKQTSEDNLETAVTLMKSTYNFYRESPCGTFPSGINLYTVTPSQAPIEGLPPTAAVVETLDLSIPRKLLLWVYTLVHGRYSNISSVVKYCDEMKLRSKRGTPAASASSQVVQPVSHSTVSSQVVSKEKSSQVEPAEAAQNPSDLAATCVPAYQEVGGASASQSAIEAQKATAAASQLTRSGSSRAMENAQDGGERK

SEQ ID NO: 58922 - protein, 491 aa, Zea Mays
MAAGATHKMQMPCPPSESLSDLNVSSSAGGPILTNQPAAGVPYVSVETTKSSMTSKHLQSHPQSLSPPEHMPSSNMIQLPGQPSFATSEFPQMQFHHKVVAPANEFLQNQMRSYPPQDVSHPRPFDFHHHTLPPAVPSNQQPSTIPVENAPVPHHNRWPEYSGGVGLSYSSHRPPYGQHQPPGNLDSGSNLVYPSFQRYPSNLPVSNNIGPLSDADLTKSSIKPHYNPFASTFDKTDPSLDIGPPVSPNAVGSVSTTAEHMNTLSPFGRSRAHAHGNSAEPVPNRQKLLHQEFASGAPYDPLVDSIEPSSSSINKVDLRKEKNWSAADRRDASKFMNLEVDSENMHGLGVVAESEVEGLGEVAADTETGVVENASPEFLGGKDWNSDIPVDFDNDQTLDKNKKGKDSRSMKLFKSAIADFVKEVLKPSWRQGNMSKEAFKTIVRKTVDKVSGSVPSSHIPKTPAKIKHYVQSSQRKVTKLVMGYVDKYVKP

SEQ ID NO: 58923 - protein, 394 aa, Zea Mays
MEGGNILFKGEHFPPGERFPTWDGISTRWLLYTEQAPSAWLNFALCGLVGIVTAYAFVWISKYYTDYKHEPVRLLALSSSTGHGTNIIAGTSGLVDESGNPTGGLFGTAVATMGMLSTAGYVLTMDMFGPIADNAGGIVEMSQQPESVREITDVLDAVGNTTKATTKGFAIGSAALASFLLFSAYMDEVASFAQLPFKEVDIAVPEIFVGGLLGSMLIFLFSAWACSAVGKTAQEVVKEVRRQFIERPGIMDYKEKPDYGRCVAIVASASLREMIKPGALAIISPMAVGVVFRILGHYTGQPLLGAKVVASMLMFATVAGILMALFLNTAGGAWDNAKKYIETGALGGKGSESHKAAVTGDTVGDPFKDTAGPSLHVLIKMLATITLVMAPIFL

SEQ ID NO: 58924 - protein, 217 aa, Zea Mays
MSGLLNSNLNSSASNLSDSAGRPFTASFSGQSGSIPGFHHSGLHNTHGSYNLPSMPGSLAQRNAAMSGLPSSGVQQPGGSIPGRFPSNNLPVGMPQIPHAHSGVSGRGMNFGAGPAFSSSMNIGGNIQGLSSGLGSGGNRNSVHGMPVSSSIGNSGQRISSVGNMVSASNIGRNIGTGGLSVPSIASRINLNGSGGSGSLNVQGSSRMMNGLLHQQG

SEQ ID NO: 58925 - protein, 667 aa, Zea Mays
MGQSLRVRDMSPKSPINHISDNNRSEYHLKQRYSYSTKECPGERNLDGPSKVRGLEKDRAEILRMLDELRDQVQQSCNATNGASGIAPSTAAADSNSSHGTSDRLSQLRQVAPQLHQNGSHHSPSLNVGSPSVSRVYAPLPAQQDCVRYAEPISHARASSYPASLYPWRNFDNYFFGQHDPDPLLSCRHDGFYHQAACSCLHCCHQEFLPIQGNHIGFHDQRAPYLLNNYGAYPVDSPLLGQQRYSARVTNTTLQQNHMRVNVSKKAAQTCEPVAGGAPFTICCNCYEVLQIPRKQSLSGNEYKLRCGSCSHAIIVKLDGNRLNVSEFALCTRLSDGQENDMGTDGQTQDNRSIPAYHLSVGSPASQERDLHSNLSESENNHTPLGTDSEGTSLSRDLPAEDSAVSHVPNLPHHSHSGSSPTEHFGVGSRSTHSEPEKVILLTESSKQTSVRGICVTNKMQSPNNEFDVPEYTDDTLNDQQDTDHPRTTKASDSFLTNLIKRSFKINNGLRNRRARVYVNGFPISDHVVRKAEKLAGSICPGNYWYDYHAGFWGVMGHPCLGMIPPYIPEFNFPMPKNCAGGNTSIFVNGRELHQKDLDLLVTRGLSDSPGRSYVVENSGKVSDEVSGEELYGLGKLAPTVEKMGRGFGMRIPRFIKRQANLVQLDF

SEQ ID NO: 58926 - protein, 426 aa, Zea Mays
MYAVLRRAAPLRRRAVSALAAALLQQQPAALGAVAPRAPTPLPAAAWFHSSPAWLGFRDTTELAARAEFAAEEGLFYEDDSRAPAGGPAAEGLEIAKLGISSKIVERLASKGITKLFPIQRAVLEPVMQGRDMVGRAKTGTGKTLAFGIPIMDAIIRHNEKYKPGKFPLAIVLAPTRELAKQVEREFLDSSPLETLCVYGGTPIMQQIKQLNYGVDVVIGTPGRVIDLLKRGALSLAEIRFVVLDEADQMLSVGFDKDVETILERVPPQHQTLMFSATMPTWIRKLTQKFLNSPVTVDLVGEDDQKLAEGISLLSVSSENREKPAVLGKLIKEHAKGGKCIVFTQTKRDADRLSHNMSRSFQCEALHGDISQSERERTLAGFRDGRFNILIATDVASRGLDIPNVDLIWPNWPCWEEGHCNCDVQL

SEQ ID NO: 58927 - protein, 1841 aa, Zea Mays
MIPVSADIPVELRFLLECATGSNFDSIRLELCQLVDSGLDGCILVLRVCLNQMLLNAGEVKNLQLQQKLLSDVFRYCLHKTCFTTSFCEALATIALTDDFLESLTNLLELSVAEKIGVGLALSDSEDSEMKQKGSHFCMVIDIASSVPGQWFSIAQIEKLCTSHIQSLSNGQIHEIVMFLHQSDGLSKHMDTFNNIISLLKVTERPFFVPVTNGDFDSQANPSRHLEMYFGSTNDDFESLLSEIGKEISMADIVAELGYGFTVDSTHCKEILSIVEPLDDIAISKLLGAVVGTHIGLGEAHNTYATFVSAIRNSHTNDSPQPTKWNTDVLVDSINELAPSTNWVRVIEYLDHEGFNIPDEASFYLLMSIYECACKDPFPLHAVCGSLWENTEGQISFLKHAVCAPSDKFTFAHSSRHLAFQDLAGPSQGNHAWFCLDLLEVLCQLAEVGYTASVRSMLEYPLGHCPELLLVGVSHISTVYNLLQNEVLSCVFPALLKDPTKRNVVNYLWHTNSYLTLQGFVDAHNDPDCLLRIVDVCHDLKILSTVLDSTPFAFSIKLAAASLRKDYSNLEKWLTEKLSLYGKGFVEECVNFLKATMSNTDYVLEGTTQPQSIVRNIYWESSYAFIKVLQSHSGQLLSDAILDEIRKLCVSFESRNPSSAVRELANSDGGSDDIEVEANAYFQHMFSGQISVDSMIQMLGRFKESTDKREVSIFNCMISNLFKEYTFFPKYPDKQLKIAAVLFGSLIKHQLVAHSELGIALRGVRDALRKPVDSKMFMFGTSALEQFMDRVIEWPRYCNYILQISHLRGTHLEMVSVIERALAKISSSQNEPNVGNLLSAEQHVSGSSSMEGIEASESSWLMGTIPSQLGRPLSSPLQHRQQGLLSERSEVSMNSLNKSNLSSQPPLASSSADLTINSKTTAPPSLLASPHQSISVSTSVHVGFLRSRSTPGLPRQPSYTTGFGTALNIETLVAAAEQRDIPIETPPPEVQDKILFMINNISISNMEAKAKEFNEVIQEQHYPWFAQYMVMKRASIEPNFHDLYLKFFDKLNSKSLNKEMLKATYENCKVLLRSDLIKSSSEERSLLKNLGSWLGKFTIGRNQALRAKEIDPKSLIVEAYEKGLMIAVIPFTSKILEPCQSSIAYRPPNPWTIGILSLLAEIYNLPNLKMNLKFDIEVLFKNLTVDMKDVKPTSLLKDRLREVEGNPDFSNKDVTTSQTPVVPEVLPGTIPSSTHVELQPEINITSRAMSLPNILNQYVAPVRLPTNSTVEADKVALMMPEQVSSLTQVLPAQTQSPSPSPFSVNQLMAAIPRDEICFKINPKLGSIGPQLQYSKIMDLALDKANREIILPVIQRSVTIASRTTKELILKDYALESDNNMITRSAHLMVGTLAGSLAHVTCKEPLRVALYSNLRNLIQNLMSGSETIEQIIHMLVNDNLDLGCAIIEAVATRQAVELIDAEIAQSFSQQRKQREGGGPTYHETFAYAQGPFARVPEALSSKPGHLSASQQRVYEDFVHVWHPHNQNVGATGSGLSGVATVSSTLGVLRAYSPNSTSASSSNLSTVHMGGLTCITQPTELGSEDTVIAQFLSNPAQVGPSESPVLFSGTVGAASTFSPLASNDLPEISAMVPPPSTSADRLGSILPEPLNTGDALERYKQVAQKLEALIANDGKHVEIQSVIAEVPDMLRRCVSRDEAALVVAQKVFKSLYDNASNSAYVSWLLATLIAIRDVCKLVVKELTSWVIYSDEEKKFNIEIIFGLIHSKLLNLGEYNVHLTKLIDGGRNKVATEFAMSLVQTLITQDPVSISELHNVVDAISKVLAAQVNKEESIANETTLIDPN

SEQ ID NO: 58928 - protein, 59 aa, Zea Mays
MRCKSAPMGRSRWRWSIRRESTTSLTWYDFHDSAVLARICRNGAPLESGKARVLKHSII

SEQ ID NO: 58929 - protein, 191 aa, Zea Mays
MRRNQSVGSFAAAGAQSGRQPPRRMAENESKPEGIPPSQGGKYVGFGSSPAPSANRNGGAAQGDVLQVVSQGFGRLSLVAASAAQSAASVVQVGTKEIQSKMRDGGYDQKVNETVSVVANKTAEIGSKTWGIMRGVMAMASQKVEEYAKEGGMSGWGEDWQRSEQNGEPYQRFEHATDSNSLNSSQNSSWK

SEQ ID NO: 58930 - protein, 229 aa, Zea Mays
MAAGTVTARSNGEGHGHGGAGSWYPQRRPHYGYGGGSASFRGCCCCLFLLLTFLALLALAIALVVVLVVKPRKPQFDLDQVSVQYLLVASPTSPAGLPPATPGAAYISLNITLLFTAQNPNKVGIRYGATKFDVMYHGVPLGVAAVPGFEQPAHSTRLLQTRVIVDRFNVLQADAQDLIRDAAINDRVELRITGDVGAKILVLGFSSPKVQEPVAEIQAVWRGRDKRVV

SEQ ID NO: 58931 - protein, 550 aa, Zea Mays
MKVTTCSREGINKISLSRVDARTFCFGVRIVRRRTVPQVLNLIPKEGEGESFEDALARVRRCLGGGGATDNADSDSDLEVVTESVTVNLRCPNSGSRMRIAGRFKPCVHMGCFDLETFVELNQRSRKWQCPICLKNYSLENLMIDPYFNRITSLLHNCSEDVNELDVKPDGSWRVKGDAATRDLSQWHMPDGTLCDSKEDTNPGVVSVNEFKREGTSDGHRTLKLGIKKTPNGLWQVSSKPDDKKPVVRNHIQNNTGYSIPNIVPMISSPTGSCRDGEDVSVNQEGGGIQFDISLNQEFDSFAHNFGQTYNTEDRQQEPQHNAADVIVLSDSDEENDPIVRLPAVYANTPTNGDSFPFVTDAAVSGYPEGYQEDAGVGTSGLGLLSNNTGDFEINNWQMHSYPQPEQGFQFFGTDTDVGNPFVGPHNSFSITPEDYSLDCNVGIEDPSAAHDVSICRNSNDVHGSLVDNPLALAGDDPSLQIFLPSQPSTVPLQEELSERANTPNGVHPDDWRISLTLAAGGGGNEEPTSVDGLKSQPKVPSKELLLSQA

SEQ ID NO: 58932 - protein, 313 aa, Zea Mays
MATAATAMVVPEQPRRRKPAPGRGGVALPAGLSEEEARVRAIAEIVSAMGELSRRGEDVDLNALKSAACRRYGLARAPKLVEMIAAVPEADRAALLPRLRAKPVRTASGIAVVAVMSKPHRCPHIATTGNICVYCPGGPDSDFEYSTQSYTGYEPTSMRAIRARYNPYVQARSRIDQLKRLGHSVDKVEFILMGGTFMSLPADYRDYFIRNLHDALSGHTSANVEEAICYSEHSAVKCIGMTIETRPDYCLGPHLRQMLSYGCTRLEIGVQSTYEDVARDTNRGHTVAAVADCFCLAKDAGFKIYLMLELKET

SEQ ID NO: 58933 - protein, 205 aa, Zea Mays
MAAANAPIAMREALTLTSLGIAPQFVTFTHVTMESEKYICVRETSPQNSVVIIDMAMPMQPLRRPITADSALMNPNTRILALKAQIPGTTQDHLQIFNIEAKTKVKSHQMPEQVVFWKWITPKLLGLVTQTSVYHWSIEGDSEPLKMFDRTANLANNQIINYRCDPAEKWLVLIGIAPGAPEGNLVFLRNKPTSSSPQISRMIFL

SEQ ID NO: 58934 - protein, 112 aa, Zea Mays
MTPLEPSSIDVAIFCLSLMGINYPSYLEEANRVLKPSGWLVIAEVRSRLDPSNGGADPEKFSKAIIQLGFSLVSKDVKNRMFILFYFRKKEKSKVAKSIDWPQLKPCLYKRR

SEQ ID NO: 58935 - protein, 101 aa, Zea Mays
MATRESSTPKPSMAPFPLRLLRTATLPRRREASGQASRLQCPPASPLGWEEDPVAMEGAQDLPRLVASRILPAYHYHFQVQPAIRCDVIVSDLSPCRITSA

SEQ ID NO: 58936 - protein, 154 aa, Zea Mays
MADAAADRERDKGKDDRRRWAARCGFAVLGIMSTLLVYGVLQEKIMRVPYGADKEFFRYSLFLVFCNRITTSMVSAMVLLASKKSLDPVAPLHKYGVVSISNILTTTCQYEVGLVSALLVLLPLCCFVLLCKVPFSRPSSMSASLSKHLLNVPR

SEQ ID NO: 58937 - protein, 1067 aa, Zea Mays
MAAADGDALIAAFAVSKGGIVLKHIFLNAPPPEAMCGSGGREVESDEEDPPVMVGRHPDCHVLVDHPSVSRFHLELRCRRRQSLITVTDLHSVHGTWVSGRRIPPNTPVDLATGDTLRLGASKREYKLLWLSLREAFEMDDLMYMPSLPEEDKEEPYVKEPSSKLLPGHRDSVNMETHQDTSEQIVSEDIAFPAKVAPSAPPLSEFLQPFFVEEHSLSQFHEKRNGVTEEKLVDKNQISESFGSLIIQEMPGTLTNAGKSIQSGEQEDASNKVSKRSKLKSVKSLRVDTGRSSERSSTLSHSFQKGDQNDIVVCSQSCGTECAVCIALFGISEIEKAEEKEELIAEDNVDMNPPASMIMEGNMNERKPDNYIPQDPIGAKLQKKLGLLDSALPLHFKDDVFADKEIPQWNVASVHTESELLSEYLIIPEVKHDDLNHLNLEEGLSKSENINPNKITEGPGNCQLEGTIRGNLFDNLDTDGIEEGEEICPLDKDEITPNGSDHGDFSENENSMLNTGDQMKLNEPVSENLNPLIPTDEKYLKSQTEECMPISYLEFKDDILLDRENSVLAPRKYEAMSPVRQENLFSDKENVTPASKVKTVVRGVLGTRMDNSVSAANASNKNKVLGSRVDNSVSTENSSNKKQCELSSKSKKVHTVDFDVFYSDKENLTPISSGGMKARKCFPKDLSVDLDQDQEAFCSDKENLTPLSSAARKTRDMSGNLTRVESAVTKKRVVGRLPFQTLVSNSPLRPASSHDCTCAVARPAGVAAGDLAIKLEDKLNDLSCNGHESGSAGEGMKTWTMVANTDSLLDDESRKAIMLLKGLKGTRLFIPRIVIRELDSMKQREGLFRRSTKATSILQWIEECMARESWWIHVQSSADMFPVAPTPPATPSAQRIDEEIEISSGSFNPMMALFGPRSSAALADMISPRPEDRVLDCALLVSRVRSNEKVVVLSNSVTLKIKAMAEGLPCEGAKEFRESLVDPSSRRFMWAASAPRGSAWSCLDASALAENYYNSRHHAMKRRVLVAARPSESEAAKGLKLILRHNSLYAQATDAVNKTPLVSLAAV

SEQ ID NO: 58938 - protein, 558 aa, Zea Mays
MCTFSNHESMVYCEMCGVFRETFVKSAKDGLLKAVAVSSEPRTSAASKNDSAKAPVKTRAVNSDGDSMRKHASMSYDKANSTQLPSAGSSLGAEKKKKTPVLSEEVPVERIALLASDGFQSKGNQNSGASSSSQNDNVIQKLSSDVGQLNVNKNNVNVTKSCLPDEYKPEKWMLADLESRALSQLNLAIVGHVDSGKSTLSGRLLHLLGRISKKYMHKNEKESKEKGKGSFAFAWAMDESSEERERGVTMTVAVAYLETKKFRVVLLDSPGHKDFVPNMISGATQADAAILVVDASTGSFEAGMDGEGGKSVGQTKEHAQLVRSFGVEQLVVAVNKMDAVDYAKESAVENQNLIKAPSDARLTSWYQGFCLLDAIDFLQLPSRDVSKPLIIPICDVIKSQSTGQLAAYGKLETGAIQIGSKVLVLPSGQEATVKAIERDSNSCTVARAANHLELKVLVLDITTPILVGSQVEFHIHHVKEAARVTKIVALLDKTGKPSKSAPRFLKSKQNSVIQVTLDGAVCVQEFSKSRALGRAYLRSAGRTIAVGVVNRIIGQDQN

SEQ ID NO: 58939 - protein, 506 aa, Zea Mays
MQSMESLAQLEVLCEKLYNSRDSAERAHAESTLKCFSENSEYISQCQYILDNASTPYALMLASSSLLKQVSDRSLSLMLRLDIRNYVINYLGTRGPKLQNFVIVSLIQLVCRITKFGWFDDDRFRETVKEATDFLGLASQDHYFIGLKILNNLVTEMNQPNPAMPLTLHRKIAGSFKDQFLLQIFQISLTSLNQLKSEAPDDFGHIPLDLALKCLSFDFVGSPVDESSEEFGTVQLPASWRPLLQDPSTLQIFFDYYKVNDIRVSKEALECLVRLASVRRSIFVEDPARSQFLSHLMLGTKEILLTGQGLADHDNYHEFCRLLGRFKVNYQLAELLNVEFYGEWIGLVAEFTTRSLLSWQWASNSVYYLLSLWSRLVTSVPYLKGETPSLLDETVPKITEGFITSRINSVQAILADNSLENPLDSVEVLQDQLEFLPFLCRFQYQSSSLYIINIMEPLLQAYTERSRLPAPGDADELSVIEGQIAWMVHIIAAIVKVRQSRNTRVD

SEQ ID NO: 58940 - protein, 1517 aa, Zea Mays
MGRKKRTSAPNPTPPPLDASRRSPAAAEKPAGIGREDAAVRAEVDKALACLQRGSHARAQRLTRDAIARHGEASPLLLRAHGTVHARAASVLDDHASRARHQRTALQAAQRAVQLAPDSIELAHFHAMLLFDAATDSRAYDEVVAECERGLSIEAPSDPAPHSLRLPGPDVDQVQSELRNLIQKANLASISSWVKNMGGAGDDKLRLIPVRRLADEPMEARLVPTAPSPRRPNEIKKATKTTEERRQEIEVRLAAMRLLQQQKEQSNDVVSATPASSRSHGDDAPSSSESSVGGHRADRRKGGSRKATGSSASERTDQVRAYWGSIPVEQRLAFLNTSISELKSHYASAMHKEKDAASAASDVLNEVIQFANKHDKWEFMVCGRCREQFTHVEAHRWHVMVEHVGLLSSELQEMVPQEIDADWAEMLSGCNWRPLDATAALKLFEEDQHNNLGPDREDESNSLDSWSNKAMDMSESSAWSHNEESSGFGVVVREGDTKWPFSDDDERAKILERIHSSFKILVKNHNLSVHNLNRVIRFAVEELRGLPSGSLLLNHSLDESPLCIRFLEASSLQKVDNFLQDLMQASGLNRNLQKAEGLGDGDSFIQNHDVLEKVTLNSDSSELIIDGHTFGGKFDSESVDTDALLSWLYAGSSIGEQLLAWNRMIDERSNQCVDLIRALGREFNNLQNSCERKLEQLRNEDAFTSVEGLFCEEQTRREQVGRYGFQTFEELLRKRQEFLEHNTEEQSDSNRSEIDAISAILKELHTSHFGYDEALTGMAPRFSDFDGGEEDEWRLHDFIHPNDSMVHMVVSKMKEHVTMEISKIDAKIMRTLSVMRQLEHKLGPVSALDYRMILLPLMRSFLQSHLEELVDKDARERSDAAREAFLAELALDAKKNASKGGDMKQSHEKSKDKKKFKDSRRAKEFKDSSWSDQSLIHQDSADEETTETFQILADCDDLDCKFSTSDDYFNEQEEELRHKVQLEAEERKLEETLEYQRRIEEEAKQKHLAEQCRSTYASSVIGTARLSSTGNQDNHESAINHSSRTYLEGIKFGDFRYTENNFSQKLNGLDSSDAHALTSSDMNAPRWTSTCKIAPYANHSYQTGKQNRLHVLPSDDLQFAHRDHAAGTEKPNFEKVGSGAIPSADLCIKDDFDKRFQEDLDEAVRQSLGYDAYPAGTISTSNETEVYGTGLKNAAGEYNCFLNVIIQSLWHIRRFRDEFLKTSSLHKHVEDPCAVCALYGIFIDLSKAAKGHGEAVAPTSLRIALSKSYPNSKFFQEGQMNDASEVLGVIFECLHKSYTSRTVCHGKPHEKNSIGSWDCANISCIAHSLFGMDVYERMNCHNCKMESRRLKYTSFFHNINASSLRTAKMMCPDSSFDELLKVVIMNDQLACDQDVGGCGKPNHIHHILSTPPHVFTVVLGWQNNKENVDDISATLAGISTEIDISIFYRGLDQGSKHTLVSVVCYYGQHYHCFAFKDGRWVMYDDQTVKVVGSWGDVLVMCEKGHLQPQVLFFESAN

SEQ ID NO: 58941 - protein, 109 aa, Zea Mays
MWTIFRQISLDCMFLESQSIIDYSMLLGIHFRAPHHLKTSSSHQSSLERCGIPDSDLLQYEEKSSWKGFLLVAHEPGATVGGSHIRGSMVRASEAGYEEVDLVLPGTGR

SEQ ID NO: 58942 - protein, 135 aa, Zea Mays
MKGGYRRVLQRPIDFEWDLMTYTDDNTPLVPTDLDVLSETQLSETNEPLSDGTCSCPSSDSRLQVLLDTSGPTIEASSVETKSIGISDLSPEKLAVKLEFTLPASSYATMAIRELTKTSTSVTSCSILFFGFVNT

SEQ ID NO: 58943 - protein, 424 aa, Zea Mays
MDEEYDVIVLGTGLKECILSGLLSVDGLKVLHMDRNDYYGGDSTSLNLNQLWKRFRGEDKPPAHLGASRDYNVDMVPKFMMANGTLVRTLIHTDVTKYLSFKAVDGSYVFSKGKIYKVPATDMEALKSPLMGLFEKRRARNFFIYVQDYNEADPRTHQGLDLTRVTTRELIAKYGLSDDTVDFIGHALALHRDDRYLDEPALDTVKRMKLYSESLARFQGGSPYIYPLYGLGELPQVEFDMEGKVCGVTSEGETAKCKKVVCDPSYLPNKVRKIGRVVRAIAIMSHPIPNTNESHSVQIILPQKQLGRRSDMYVFCCSYTHNVAPRGKFIAFVSAEAETDNPQSELKPGIDLLGSVDEILYDIYDRYEPVNEPSLDNCFVTTSYDATTHFETTVTDVLNMYTMITGKTVDLSVDLSAASAAEEY

SEQ ID NO: 58944 - protein, 318 aa, Zea Mays
MEAHASRGRRTLEEIRQKRAAERMQHALPIAASHVDSHGNQRAGAELLARVQELENGNTELIDEKGVEKDALVNRLNDLERNVVPSLQKNLNDISLEKDAAVVAKEDALAQLRSMKKRLKEAEEEQYKAEEDSASLRAQLNTLQQQVMGHSYSGYTMGISTEESVAMEKEIQDLQAQLKQESLLRQQEQQKLAEESQLRQQEQEKLAKEQIHIASLEAEKQQLEDQITMLTKKATEDASEFAAHKAFSMQDREKLENQLHDMALMIERLEGSRQKLLMEIDSQSSEIEKLFEENSALSTSYQEAIAITVQWENQKIPG

SEQ ID NO: 58945 - protein, 380 aa, Zea Mays
MRDPVVLASGQTYDRRFIQEWLSAGNRTCPQTQQVLSNTIITPNHLVRSMISQWCTDNGITLPPVENQDEDLVTNNERETFRKLFERIVSSSSDLSEQREAIKELRLRTKCNSSLRAAIGERPDSISQMISVASSPELENSAEVVEDTVTAILNLSIHESNKKIIGDDPLAVPFLIKALQSGTMEARSNAAAAIFSLSALDGNKARIGELGAMRPLVELLEHGSTAARKDAASAIFNLCTLHENKSRATKSGAVDVTLRAVACAGDGSGSGSLVDESLAVLALLSGDHEAVEEVGETGGVASMLHVVKDDPCKRNKENAAAVLFAVCVYDRTRLREVAEHEKLNGSLGWLARNGTSRARRKAAGILDKMKRSMHHPHYSC

SEQ ID NO: 58946 - protein, 854 aa, Zea Mays
MPPWWGKSSSKEVKKSAKENLIDTFQRLISSNEQKGSRKSRSSRRHGKDTAGDKGCWSTAQSRSTSPSKEVSRCQSFAADRPHAQPLPLPKSRAKVTRTSSDITNSKSTLEKHGKGQLLPLPPIQPKKRPEATEPVTEVATASVSSNCSIDSDDPGDSQLQSPVGNEAENATRITATSSSSVVRKECSSAITRKNTKEVAKPNSAFLSNQILSTSPRGTFADGYQSNLQSPRQIALESAPNSLMSSPSRSPRNICPVQIPTSAFWAIKPHTDVTFLGSGQCSSPGSGQTSGHNSVGGDMLGPIFWQPSRGSPECSPIPSPRMTSPGPSSRVHSGSVSPLHPRAGGVTPESPTNRHAEGNKKQTHRLPLPPLSIANSSTFLPNSSNPTSPISRSPGRTENPPSPGSRWKKGKLIGRGTFGHVYAGFNSDRGEMCAMKEVTLFSDDPKSKESAKQLCQEISLLSRLQHPNIVRYYGSETVDDKLYIYLEYVSGGSIHKLLQEYGQFGEQAICSYTKQILLGLAYLHAKNTVHRDIKGANILVDPNGRVKLADFGMAKHINGQQCPFSFKGSPYWMAPEVIKNASGCNLAVDIWSLGCTVLEMATSKPPWSQYEGIAAMFKIGNSKELPPIPDHLSEEGKDFIRQCLQRDPSSRPTAVDLLQHPFVQNAPPLEKSSASHPLEQLTAISCRTNSKVVEHARNMSSLGLEGQSILQRRAAKFSLPNSPRTTSGASTPLTGGSGAVPLNHVRQPAYRNEGFTVTSRGFDDHMPSRPVDPVHGRFIRVQQFSVGRQERVVSEVDILSSQYGKMRHANVWDPHDRPLPSERSSQQCFGNHAKLKPSLDLRSGPRQPGRNHGH

SEQ ID NO: 58947 - protein, 507 aa, Zea Mays
MDTPQAYVWRLQNFVIGEHVLTPSSSTVTPIKACVISACGNFTILGTEGGWIEKFNLQSGFSRGSYIDTSLAMQCAHDGEVVGLACDARNGFLISAGYQGDIKAWDFKTCKLKSRLDVGKSVTKIAFHRPNGLLATVAGDMVLILFDTVSMKMVRRFEGHTDRITDLCFSEDGKWLISSSMDGTLRIWDISLARQIDAMHVDVSITSISMSPNMDVLATTHVDQNGVYLWVNQSLFSVSTNTENYASGKHVRNVCLPAVSSTERSEEEQVQNLGESYKSSIKPFVITDHQIPNLVTLSLLPKSQWQSLTNLDIIKVRNKPIEPPKKPEKAPFFLPSVPSLSGEILFEPPASSKDTDISTTKNTNHKMSELSSHFSQQLQFCGETKNYSAFTDYLKGLSPSSLDMELRMLQILDDEESEDLEQRPELQSISSLLDYFIHELSFRNNFEFVQAVLKLFLKIHGETIRRHSMLQSKVKKLLEVQSLVWQKIDKIFQGARCMVTFLSNSQF

SEQ ID NO: 58948 - protein, 246 aa, Zea Mays
MYLSGKDTSLITYLTGLYSSTLKSVPTTSLFNNQVQEWLELDHQLTEQTKPPWDKRPGTDSRVLLRHSPEEIQALVAMEIIPGTKALQIPLAHPTKQLPTQRKRTSCPGEGARRKCPRLRPAGRPPRGTAVTRTTGGFLAVVAAAGGRPQCRGTTTRQAPRTAGRPRAPPWPGTRPREEAPARGTARRSGASSASPSPPAGGSELPRTTPTISVSERRLLGRHLLRDRCSLQLKQIGKWMDGIAAQ

SEQ ID NO: 58949 - protein, 86 aa, Zea Mays
MEVDDGSRATPPLDAVAAAFKSQVMELQDLVLARSMFPATALPDLANVDALVTAMESQVETISRRLQEELDAIPKAKAIQGDIKGV

SEQ ID NO: 58950 - protein, 50 aa, Zea Mays
MATHVFYPCNVCNYSSWCESNQLLNANVGRTSSSVSVYSLPEFGPLPSAG

SEQ ID NO: 58951 - protein, 1110 aa, Zea Mays
MAASVDAAAALAVTPPAVEEAGGAVEQARTLIGALNLLSRNLPLPPDVLRAVSSIYHDGGAGDDEEEEGGEREAEKEGNMEMTAAEEGYPVDVATKGSSLIEELEDAIYKNKKTPISYSELAALKEGRFNASIQHRLAELEGLPSTRGEDLQMKCLLEMYGLKLLDLQKKVRSDISAEYWLQKKCAYPERQLFDWGLMRIRYPLSMYGIGDILSMDADDVHRKKRFTERMSRLEEEEKNQADIRKRKFFAEILNASREHQVQLGTTFKQRKQRNDGVQAWHVRARQRISRQEKNRLNLLKIGDQVAYMKMVEESKNERLKMLLDKTNELLEGIGKAVQRQKDAEHVSQHEGSEVPKGSESEDCSQISGVKSESPGESPSDDDADFAGSADESKFNAGRRLDFTVHSIEEKVTEQPSALEGGELRPYQLEGLQWMLSLFNNNLNGILADEMGLGKTIQTIALIAYLLENKEVAGPHLIIAPKAVLPNWSNEFKTWAPSIGTILYDGRPEERKLLREKNFDGLQFNVLLTHYDLILKDKKFLKKVHWHYLIVDEGHRLKNHECALARTLVSGYQIRRRLLLTGTPIQNSLQELWSLLNFILPNIFNSSQNFEEWFNAPFACDVSLNDEEQLLIIHRLHQVLRPFLLRRKKDEVEKYLPVKTQVILKCDMSAWQKAYYEQVTSREKVALGFGLRSKALQNLSMQLRKCCNHPYLFVEHYNMYQREEIVRASGKFELLDRLLPKLQRAGHRVLLFSQMTKLLDVLEIYLQMYNFKYMRLDGSTKTEERGRLLADFNKKDSEYFMFLLSTRAGGLGLNLQTADTVIIFDSDWNPQMDQQAEDRAHRIGQKNEVRVFVLVSVGSIEEEILDRAKQKMGIDAKVIQAGLFNTTSTAQDRRALLQEILRRGTSSLGTDIPSEREINRLAARTDEEFWLFEKMDEERRLRENYKSRLMDGNEVPDWVFANNDLPKRTVADEFQNIMVGAKRRRKEVVYSDSFGDQWMKSDEGFEDIPKATQRSKKTAYSSDIQVEFSERRKRPRSVENSADGVSNPTWTPDKGRAGVSSYSKDETEDDGEDEVITSGLQKGNSFTWNTLGRRRSSHFSSSSDSRGRPTF

SEQ ID NO: 58952 - protein, 137 aa, Zea Mays
MTPQKLPDLVEHNPHIAVEVLSKLINSPDMDAYFDAIVHMDMSLHSMEVVNRLTTAVVLPPGFVHDYISNCIRSCEDIKDKYMQNRLVRLVCVFLQSLIRNRIIDVQDLFVEVQAFCIAFSRIREAVGLFRLLKSLE

SEQ ID NO: 58953 - protein, 311 aa, Zea Mays
MTQPGNIYNPNLQQVTLSRNEPSPSYNLDSNRNTLQQYAQGPSDRHMDQMYHGSNFQQDTGGTTPSNYFEGDRRVDGDSQLYQPDGDALPGIEGFQIAGEPRPGFQLTACGFPTNGTTLCNFQWVRHLENGTRQSIEGATMYDYVVTADDVGTFLAVDCTPMDDNGRQGDLVTEFANNGNKITCDPEMQSHIDAYISNGRAEFEVFVLAYSPEEWELATLVLTRPNYQIKFKKTGEAIIDEKYSQSLQMKIPNGRTTQFVLVTAGATLPFNTQGISEPNNEDYDVRLRDLIVLVMRTFQKKALDAKRKVNT

SEQ ID NO: 58954 - protein, 327 aa, Zea Mays
MGASSTPAAAAAAAPSRRKVTLYLVLLTLQYGAQPLISKRFVRQDTIVTSLVLATEAAKVICAIILLIADGSLKKQFSNWTLIGSLTASGLPAAIYALQNSLLQVSFKNLDSLTFSILNQTKLLWTSFFTFLILGQKQSSKQILALALLISAAVLLSVGESTSKGSNGGGSDYILLYGIIPVTVASMLSGLASSLCQWASQVKKHTSYMMTIEMSFIGSVCLLASTYRSPDGEAIRKYGVFHEWTFWTMVPVLMNAVGGILVGLVTTYAGGIRKGFVIVSALLVTALLQFVYDGKPPSLYCLMALPLVATSIFIYQKYPYVDKKKKV

SEQ ID NO: 58955 - protein, 455 aa, Zea Mays
MVVVPKYGDYEEPQEIGEPRSYHVAGQDMEVKYYHAYIDGVDFVFIDNPVFHYVQSEIYGGDQTDIWKRMVLLCKAAVEVQWYVPCGGFCYGDGNLVFIANDWHTALLPVYLKAYYRDNGFMPYARSVLVIHNIAHQGRGPIDDFRYLDLPGHYMDQFKLYDPFGGDHLNIFAAGIRAADRLLTVSHGYAWELKTPDGGWGLHSIINENDWKFQGIVNGIDTADWNPRHDVHLQSDGYTNYSLETVQTGKAQCKEALQKELGLPVRGDVPVIAFIGRLDHQKGVDLIAEAMPWIAGQDVQLIMLGTGRQDLEDTLRRLESQHYDRVRGWVGFSVRLAHRMTAGADILLMPSRFEPCGLNQLYAMMYGTVPVVHAVGGLRDTVQHYNPYEEVGVGWTFEKAEANRMIDALGHCLNTYRNYWSSWEGIQRRGMMQDLSWDNAAKLYEEVLLAAKYQW

SEQ ID NO: 58956 - protein, 161 aa, Zea Mays
MEGSRPRWQMNLGKPLPSSSAWWQRPPLSSSSSPSSVGPGLPEAKAKSLQDGHHLARIGSIGMSERRSLCRHVQSKDSIRYQLLVKPRCAMQDIFSQKKRYMWFLPIIYILIYNVLIMEHDSALCKFMCPIGVTSYNCCRCRRLLFLLLLVLLSSSLITYP

SEQ ID NO: 58957 - protein, 398 aa, Zea Mays
MLGAAPLPVLDMTKKRSRSSAIRIVKRDSRSVKLRLGIGGTAERIISALHTVLSEQADEDDDLEKCKTSMRHVGKMEKDVDSACSKAEDPRREVLCTELKDEEANMKKCIEKLKAVEKNRAAIVFELKEALQEQESELEKVRTQLQLAEAMVHEASNMQRRLKNEPTIPLPRSASLVEPGKVVSNGQVKEQHKTAAAILADKIAASSNSQQILQSALSKFAAEEAKNSSETRSDKRQKAEQLSQVPSVANAAAFVPMPQVVATTAQQQPQAILVQQAPMQSQATASQPQYNIYQAPPQQFVPQPGGVMMGMPYNMSSMTPPPPPPPQMMSLGRPSPSAPQPQMAVMPQTQPPAPPMLQQQMPMNLGPQMQFTLQPPGVPPFRPMQPPPGMQYFHPQSQ

SEQ ID NO: 58958 - protein, 68 aa, Zea Mays
MISRVNMVIVGAHAIMANGGVIAPVGMNMVALAAQRHAVPFVVVAGSHKIVHPSQEISLTSIFHGCHA

SEQ ID NO: 58959 - protein, 196 aa, Zea Mays
MNTADIKVRRSNSRYWSENDEVPRIEAYGRVFKTWSDWLNDNIDPARTSVFFMTISPPHLSPQNWGNPDGIKCVGETLPYQNYSQPLDLYHDMRLYDLVVKVASSMEKVPVTVIDITRMSDYRKDAHTSLYTIRQGKLLTPKQKADPEKFADCIHWCLPGVPDVWNQILYTRILSKSSWHSNFSPPLFQSLPLPPQ

SEQ ID NO: 58960 - protein, 625 aa, Zea Mays
MRRMIEAEPPIDEAALAKLVPEVGMEFVSEEKAYEFYNKYAGHVGFSVRKSTSHKSSENITKVRTFVCSREGYNRDKKSLEAKKPRLDTRIGCPARLIIKVTPECKYRVTDFKADHNHQLAPPSTMHMLRSQRILTELQPGEAELSDDSVVTPTTKATGDLVVRQVSFLRSLSLLPADYKNYLRSKRMKAMQPGDGGAILKYLQTMQMDNPSFFYTMQIDEDDKLTNFFWADQKSRDDFNYFGDVLCLDTTYKINGYGRPLALFLGVNHHKQTIIFGAAMLYDESFDSYKWLFDSFKIAMHGKQPAVALIDQSIPLSSAMAAAWPSTTQRICAWHVYQNSLKHLNHVFQGSKTFAKDFGKCVFGYEDEDEFVFSWRSMLEKYDLRHNEWLSKVFAEKEQWALAYDRHIFCADIISALQAESFSSILKKFLSPQLELLSFFKHYERAVDEHRYAELQADFQASQSYPRIPPAKMLKQTAHTYTPVVFEIFRKEFELFMDSVLFSCGEAGTTSEYKVASSEKPKEHFVRFDSSDCSCLCTCRKFEFMGIPCCHMLKVLDYRNIKELPQKYLLKRWRRTAKSANEDNEGNATNANNGSLLIVPAPPTNHHGLQSFSAMIQDASVSSMH

SEQ ID NO: 58961 - protein, 305 aa, Zea Mays
MGGELLLALLLVSAAAAPQVLGVGNGDNHMRIIQEDIIETVNNHPSAGWTASRNPYFSNYTIAQFKHILGVKPAPQNALSNVPVKTYSRSLELPKEFDARSAWSRCSTIGNILDQGHCGSCWAFGAVECLQDRFCIHLNMSILLSVNDLLACCGFMCGDGCDGGYPIEAWRYFVQNGVVTDECDPYFDPVGCKHPGCEPAYPTPKCEKKCKEQNQVWQEKKHFSIDAYRINSDPHDIMAEVYKNGPVEVAFTVYEVSKDMTKAEQEKHKPKNKSGFRTLQIWSVQAHHRWHYGWPCRQVDWMGNQ

SEQ ID NO: 58962 - protein, 621 aa, Zea Mays
MSVVGFDVGNDTLVAAAARQRGIDVLLNAESKRESPAAIAFSRNARLIGCHAASASSAHAPFSSVKRLLMGATGRHPDSSLLRDLSRLPFPAAVGGGAVVHADHIGRRIALSPTHLLSMLLAYLKQLAEADLGGAPVADCVISVPCYFTQAQRRAYLDAAAIAGLRPLRLMHDLAATALGYGLYRSDLGGSGGPTCVAFVDVGQCDTQVAVVSFDMSGMKVLSHGFDADLGGRDFDEVLFEHFAEEFKDRYMIDVTGNVKASMRLRAACEKAKKVLSANAEAVVNIECLIEEKDVRGVIRREDFEKLCARLLERVVEPCNRAVTDSRIGLERLHSVELVGSGSRVPAIAKVLKEFFRKEPSRTLNSSECVARGCALQCAMLSPTFRVREYEVHDAIPASIGFYTSDGPVSTLSSDALFRRGLPFPSVKIITLQKNDSFSFDAYYVDANELPPGTSTDIGSFQIGPFQAHMEASKVKVKIRLNLHGLVSVESAALIDDYQRNATSADHMEVDTSGDDMGHKSRSERSIQRQELPITEYICCAMSKQELLEAQEQEHQLAYQDKLMERTKDRKNALESYVYDTRNKTEDWLYEEGDDETEVVYSSKLEELKKIQLKIVVMMTK

SEQ ID NO: 58963 - protein, 513 aa, Zea Mays
MGPIQVNSKDLSKELYKKYSSVHRRKVRVWQMICVLSHYVEDDIVGEVTSSIHICLYRNNLPAVRQYLETFAILLYLKFPTLAEEQLIPIFHDKGMRQQALSSYVFIAANVILHSRQSVQIYHLNQLLPPILPFLTSHHHSLRGFTQLLVHSVLSRLWPTLHPETSEDAVFERRCFQELKDYLAENSDCVRLRVSIEGFLDVFDPNASGTPPGIFSARPEVSDFECVPVSVMERVIEFLNDVREDLRQAIANDTVTIKNEDLAVGEHHKSDESVSEMVKTGQEVLDFQKKITPHRGDSEQALNLNTRGHSGVGDEYISRIISEMEEDDQVFDLALEARLHAAETIKQSRQELIVVASLVERIPNLAGLTRTCEVFRAAGLVVADKSVLQDKQFRLISVTAEKWLPVTEVPVDSVKAYLERKRGDGYSVIGLEQTANSMPLDRFGFPDRTVLVLGREKEGIPVDIIHILDACVEIPQLGRGEVAQCPCQRRHSRLGVHASTTQSALACCLFLLH

SEQ ID NO: 58964 - protein, 210 aa, Zea Mays
MYSRSCSRIYRLHSSPVTCLMITDDQLIVGGSTFGNVAIADQTSGQKLGVLKSDHGPLAIRSLSSCTNSHMIFAGSSAGYAHCWDLRTLRPLWEKRVSPNVIYSTRHLPGDTATLAVGGIDGVLRVICQRTGDIIRSLVVDADLPAEATSRSRQQIEKKRVRRIDPDAQLDGIPRRLRPQITSLSVGMKKIVTTHGENYIRVWKFRMKSS

SEQ ID NO: 58965 - protein, 187 aa, Zea Mays
MADASSRTDTSTVVDMDDKNQRLENGQSGAMVPASNSSDRSDRSDKPMDQKVLRRLAQNREAARKSRLRKKAYVQQLESSKLKLASLEQELQKARQQGIFISSSGDQTHTMSGNGAMTFDLEYSRWQEEQNKQINELRTAVNAHASDSDLRLIVDGIMAHYDEIFRLKGIAAKADVFHILSAPCESA

SEQ ID NO: 58966 - protein, 136 aa, Zea Mays
MGIVEEAHNLRVVGEGKRGVIVLAHGFGTDQSVWKHLVPHLVADYRVVLFDTMGAGPTNPDYFDFSRYSTLEGYALDLLAILQELGVQSCIYVGHSVSAIIGALASISRPDLFTKLVLLSASPRQGKCKCVHFLVR

SEQ ID NO: 58967 - protein, 340 aa, Zea Mays
MVCSTSVDEALMKEEFDKLSAALVQGAATCSPPLPLTTIVVQDHKGISNAAPTDCPLIPLLVPKGDKLDGTSEDKTRIHDHISNLKFSISPTAFFQVNTLAAERLYALAGDWANLNSDTLLFDVCCGTGTIGLTLAQRVGMVVGIEMNESAVSDAHRNALINGIKNCRFVCGKAEDVMGPLLTEYLGSPQQQAAASKSNSEIDDTSKTEDMIGCASYDGENIDSSKQRHDNAEGQQPMDTSVDHPTCASEVDGMDVVDCNHDENNVASGEQNCGEASLINGKPIETSSDNSLEQGKTCKDGSSSPNNNVLAANACQFKNVVAIVDPPRVGLHPTVHFLQP

SEQ ID NO: 58968 - protein, 135 aa, Zea Mays
MKRYGGGKADTALAKSLNKEYGPVIKQHIQYVLDHSQELDKTLKVQAQVSEVKNIMLNNIEKTLDRGEKLSELQDKTSDLHSQAQEFKKQGVKIRRKTWLQNVKIKLVILGILLLLVIIVWVSVCQGFDCTKHET

SEQ ID NO: 58969 - protein, 238 aa, Zea Mays
MTIGVALLLDLTSRLPRAGASAASAAVRSHPGLSTTAFAATAAAALSSSGVPLSARHLFGFHGFTVAHCDAGTPAGWNDGSDDLVNEINTKIIDSLQYARKDYFQNTTKEYPSELKPLFSAFGLKNFTITTLRSFLLYYLPLIQPKPHTGSDDEDDDLLHDTQEKTMDLVTPFYNSVKQIVRETSIVTTRRVFERIVVRHVSQRTAWKLLKGKLQGGCQLHSTHTVLPEQLSEHMHWE

SEQ ID NO: 58970 - protein, 104 aa, Zea Mays
MFAMKNKLDITLGVAIGSSTQISMFVIPFCVVIGWMMGQEMDLNFQLFETATLFITVLVVAFMLQEGTSNYFKGLMLILCYLIVAASFFVHVDPDAKHKLNRLN

SEQ ID NO: 58971 - protein, 366 aa, Zea Mays
MYGMWGYLTFLKLEFLICLHDLQIKWDGATKYSHQNRVSPWDIEGVGSSVSVTHRLSSSVSKRTKLCFPPSDLDTPILDGNGRPDSVETERFHRVLQGQELVHSSIHGTACSHSSDSPRCQGSYGRRFSADAWNCKMNDVMSGPRHLNATGFAYQPLGFSESVKFSEVLQGQEMSQAVPSFMRSAFNSGTQNGRVRPFDYVQRSDATQGYALQQFNLPATEVHSPSSVLMFNQTMVPHAELDGATNREEVHGSRYLSSNAIGREAEPWPSMQQQRASVNGSEPLDTTEASAPARNAESGSVGRGAGRSNCKLFGFSLTEKILGTDGGGVKEGNYEVDRQTPRVLDLFGHGSTPGALHALCAAPLGI

SEQ ID NO: 58972 - protein, 303 aa, Zea Mays
MGEPSADFSAEDVSSISDDLAVEEIGIALTEVTTIDLLAVDEGSGLHEDSDDDYIDDPILSLESDSTDDLVNVDFISPAFPIGGVTESSISNSVAGNSSINGTPRLVSAMKGTRAKKGIKTKLSVSWATDVYDPPITSDSHTVKGHRKSSTKGNYKYKCSKSSSSSNHSTTGSKKDKKHSRHRSSSGGGSKRDRKHSYCSSASSNSSRVVTNGSLYGNTCSGGGISSSSRTTTCVPESAKVSTLMVAENATPQERVPVLKTPEPIKCTTSYGKEKPFALLSRQFPPARYKGMFSFWSQNQLAS

SEQ ID NO: 58973 - protein, 665 aa, Zea Mays
MAQKWGNIYIVNPKWVDQSVARRATSVDDSVSMSQHLPASFGDASRISSTDIVGAPSVQETDDMQVDSHIAEDSEPENDDLYLSNCRISLVGFEEKELLRLVMLIRNGGGSRHILLSEKLTHIVIGTPSDEEKKEVRRLAAWGVINIVKVTWLEDCNKAKKEVKVSSMHIATELLLKGFSQVSMENSADTRETKVAKSSGGIFHVPTVNDLHEKHHEKGVSSERKPKRGKHENSISKTRSAARTEKSSQQNGLANVSEYQLQYKVTSIMNSGSSRSNIFKGRTFSFSNSFSHDKRPEVVDWVRDGGGVMVDDIHSTAADFIIECHGQNSLPCDFSHSLVSTQWIRSCLEENCLQDVGSHPIFSPLRCRIPFPGFESFRFCISLSQYGEKERHLLKNLCFLLGAKFTDKAYKGVTHLICKFASGLKYEVYSKRGTPTITSEWLYECVKQDKLLPVDHFQPKPLTSQDKDAYPCTASQYSTQATRFDSSELLSGCQVTKNNATHNSVNEETTMPAVSRKRRISVPGKVNGICGNIEKTEKQLDNSSVPDVADAIEVLSSKIQDVQSPRSIFQPDNSVVQEQKDTHSFDISRSWLNMQQKQDSTSVTKVQNLNSVPVPSPAPTTYYPFSETQTESQVVGYEEDLTGRQKIIDRVRSQSINVTPSSEIL

SEQ ID NO: 58974 - protein, 73 aa, Zea Mays
MLGQILTGIHIRNPVGSRGSAPVRRAQGHATATNIRWRTGLGTLDASEFSILCKRIRVVLIFALQTPNVMVAG

SEQ ID NO: 58975 - protein, 707 aa, Zea Mays
MQALAVLDLSYNQLSGPIPSILGNLTYTEKLYMQGNRLTGSIPPELGNMSTLHYLELNDNQLTGSIPPELGRLTGLFDLNLANNHLEGPIPDNLSSCVNLNSFNAYGNKLNGTIPRSLRKLESMTYLNLSSNFISGSIPIELSRINNLDTLDLSCNMMTGPIPSSIGNLEHLLRLNLSKNDLVGFIPAEFGNLRSVMEIDLSYNHLGGLIPQELGMLQNLMLLKLENNNITGDVSSLMNCFSLNILNVSYNNLAGAVPTDNNFTRFSHDSFLGNPGLCGYWLGSSCRSTGHRDKPPISKAAIIGVAVGGLVILLMILVAVCRPHHPPAFKDATVSKPVSNGPPKLVILHMNMALHVFDDIMRMTENLSEKYIIGYGASSTVYKCVLKNCKPVAIKKLYAHYPQSLKEFETELETVGSIKHRNLVSLQGYSLSPVGNLLFYDYMESGSLWDVLHEGSSKKNKLDWVTRLRIALGAAQGLAYLHHDCSPRIIHRDVKSKNILLDKDYEAHLTDFGIAKSLCVSKTHTSTYVMGTIGYIDPEYARTSRLNEKSDVYSYGIVLLELLTGKKPVDNECNLHHLILSKTASNEVMETVDPDVGDTCKDLGEVKKLFQLALLCTKRQPSDRPTMHEVVRVLDCLVNPEPPPQPQQQQQKAHAHHQLPPQPSPPAYVDEYVSLRGTGALSCANSSSTSDAELFLKFGEAISQNMV

SEQ ID NO: 58976 - protein, 212 aa, Zea Mays
MTAGRRRRIFWDCGSANGRYTSARMRAIKEELGDNDDEEDDVAALERKMQNAGMPANIWKLAQREMRRLRKMQPQQPGYSSSRAYLELLADLPWQKVSEERKLDLRAAKESLDQDHYGLTKVKQRIIEYLVVRKLKPDARGPVLCFVGPPGVGKTSLASSIAKALNRKFLRISLGGVKDEADIRGHQRTYIGSMPGRLIDGLKRSQKDLLGP

SEQ ID NO: 58977 - protein, 173 aa, Zea Mays
MASRLQGLPLFWHGELSWFFNLMVWSSSRSFFGVEDFVDEDNSRPYTYKKEKRSKNPHKHISFKQRTIAHMEPFTLDVFISKRFVSASLTHRSTCRQVAVAGTNSKDIKAALRSRSDVPACLAVGRFLAERAKEADVYTCTYTPRERDKFEGKIRAVVQSLIDNGINVKLYLD

SEQ ID NO: 58978 - protein, 1448 aa, Zea Mays
MRKAGAKEGSIGSKGAIDVNSLSVSTEIAGRPSDLMIKSCTCTGRLSSSSAHNLTDTYISMTCKSCTGESTEDRGGPSCSGKLNNMGLELPRPIDLEVKWMTVKKRQRDTRRARASFGEDTSRDGIGSFCLSGCATNQEMAQDAPVSESEKFGVSILGRRFSDPMENVPIKKRRFHMDFSPSPPFTPLLVDPYEKIPGSSSKAVRSYEKHYKLKTQQIEYKVGNKGRFGDDDFSGIDILASAACESEMSGGILDGECSTLAHLPEERKLENTTGSSKLSLLHNMEDTLNIPGTSHCIYDMPLGSSRSAPDMKSLFVATPTILENLVESASAPKVNCSLYSALNNANEIEIVSDAKSTSVAIANSSDNPEKTIGCLKDTVVQTNHANATNAKSTSVAIANSSDNPEKTIGCSQDTVVQTNHANATRDSRLHWDLNVAMEAWGTDCGAVEDPLVATVSDHDDARNDMNKPGTSHHFESRDGSVVDHSVDTHMDDALKHVSANTKDTCDSPADSPSHPSRNLQLLESGYVGSDALAETMDLPDQKNSRFASAMDSHIRSDPEPALIMEHFASASHVEKINGSHPEPVQCDGLSNMSSVNVHIGSNSLQTSELGTTLKPLASILVSEESKNLPTVGTSHKKVTDFGWSDNKLEEASEQSISESKNQELLDVDSETSKKGEHDTGIFYANERTKYAENLIHPEDNHGSSNCDMAHVHEENGAVAMINSKDSLITCANSSTVETYYISDAAPQVPVPSSECHKLECFTDAGSTVDSKSAAHSYQNGCENELGKVISNVRSDQCYETDTSHISKNLAGVEKVYVEEDDSQYEDGELRESGDCYWVDDGYEDVKHANWHYQVSDYKNEEATPGLTSLHTDSVANNVVIPVANDNGPQSRKEDIAVSPVSSKCSWLTNCLDGGSIADGKSQSIHLRGDTNMYGSNPSRVAVRSATTVSQSERCNDALGDMLNIRMKNTGWDMMPEDQKHSQHDARDVTDSSNRCVLSSDAARDDDSLQKKGLLNRDLQGVERQKSFDRPQRNELSRSDDGYGSGSKSGRAMDSHGSHDMYGTSRHVQTSARVEWVESSKRPRSTRHKSPEYYNYGTSGPRNAAEAAVAKMQSSGFVVARDGTLVRAVDAANAGQMPRRMRNPLSSSCHLISGWGSPVDRDEACGMSRGPVHARKASPERHFGANSNRSSRYGSEMEKNHTTDANLSSVHCSLSSRQRGTPTSRASLNLSRAHSRSPSGSRSRSPHDWAPRNRGKIMANGGSTLWKHSRSPPNHMTKGEIGRMASPRRQPGYDDRAMCYSPLSRNNTYSKNASTWVDGRNGSAVDISDDHNKRYSRRSSPLRITSRNDRFDVMDSQGRPRSGEFYRPTQGRLLYGYNRENKHGRNGEDGRECTDRYANNSVKRYDRSGAVKQFRNDTGDKFRTRISAPRSPDLQRGVSPRRFDRSFER

SEQ ID NO: 58979 - protein, 687 aa, Zea Mays
MDTLVTLYHGGSVEQDVYGNVSFYAMKNVTVMFDERPSFGQIFARACEEISCNLNDPSISIEGLLSHVTSGTVVRRLISIASEDDWVKYVKIVKTIVPPYLDVVVRKLSFSHCDAPVGLSPQMPNACRIEAPLPELPEEVVVVPDAQSASNEFKISRPVRGVCGSSNPVVPPQEIPLIQDPIQDHPRSPQLDNGAYLHVPLSFNMEHICSASNSVDVQIEDEEEPYEAARALDSDDDRPVQEMTEQEIELIRRLCPERDPAVHESSSLSHCNGAYAEGRDDELLEASDNADNIDIKVGLLFKDLSTLRQWLLEYSVNRKRPFKVRHSYAQRRYTVVCEVSECNWRVCARRQKETGKFKITKIVGPHTCAQTELSSKHRHLTSTLIAKRLLGTLKGQPNLKVKSIMTMTWELFGYKIKYGKAWRAKQRAWKMIYGDWEEGYEKLPALFNAMKAKNPGMHYEYIPKPNEWRNGREIFFRAFWCFSQCVEAFRHCRPVLSIDGTFLLGKYKGTLLVAISCDADNTLVPLAFALVERENRESWAWFLRLVRIHVVGPGREVGVISDRHQGILNAVQEQIPGYAPMHHRWCTRHLAENLLRKDRSKANFPLFEEICQQLEVSFFEDKLKKLKDATNAEGKNWIAGLLREPQKWTSAYDEGGWRFEFQTSNMAELFNSVLKGIRGMPVNAIVT

SEQ ID NO: 58980 - protein, 188 aa, Zea Mays
MNCFCIDLLLAGCVGDLHQRRRRSFQCHPRIRHHGRHLEEHDERWHVLSREKNQRGDTRTSRREPLRRYGGLDGGEDEAVPGHRERRGHVLPRQGGGGEHAGRGQRDAVPPVHGGGGLRLLRAADPGGLLQRRRPRRGDGEGPPRALTAPGHRRGRAPRRSRVARRRGHGVPEQTRTMQINTRLWPSR

SEQ ID NO: 58981 - protein, 802 aa, Zea Mays
MNAKSGHPNAGFRDIVKDCINRDSGGLTVKTSVHEARRNGQHKDSPRPLLLSKSMDGTCIIGIDRTTNVPANVNGSRRCLQEQSRFSCDDRRLLRPTETQESKRSSSRPKELPRLSLDSRKESLSPGSRQKDLGYKRTDDILLDTLRPQDSPSHSRANSVIAKLMGLEEATNATGVLTADSCEPTRSPRPAQTTQYGHPSRSPRGTCQDSCSMQLKNESSVLKTKPSPRILTEAAPWRQQERSVTNICREAEGRPRIASVYADIERRVGGFDFLECNNKDFRALRILGALNVRDAKNKNDSSGRPMATHRTGYDLTTSGSFQAPIVVMKPAGTTEKHGVSLASVAPIAGLRSLRKLPARYSSFTGTNEASTNENIHLQMSRAQLKSEETVSSASSPRPTSSSNPRNVLKKAEPERRSRPPVSPKSPSKKSNEAVSPKGRTRSKPSQVKSHRDEVLHSTGNRISLAKQVDVSVIDCPKPPGGNSTFVPPSNAAATASHKAPSILDSDQNIHSLDNIPSPVSVLDTSFYHKRISDSFKDGETHSSEECWNPNSLPDTPQSKASSEANQIKPENLEVLIQKLEQLQSMNEEDASIKEVMASVTANKDHQYIYEILLASGLLHKEHSITALPAQLQTSNYPINPELFLILEQTKPDLVFAFQAVSGTKKTCKPYTGKLHRRLVFDLVNETIAQKMIICRSGSQPAKFLQSRKLSGWQLFKDLCTEVDRQIKCTGEEENGNMILDEDTVNGTKDWMSFDTMLHGIVWEIERSIFKGLIDEVIGGETIEKMQFGQRKLQRQLSFSSIN

SEQ ID NO: 58982 - protein, 99 aa, Zea Mays
MKSRRWATEEEIFNPQLGRTQDLHWMRDFGGGCNWRSASLRCCESQAATAAGGRGRGRRVAAPGGWSEFGALNSRGVSNPPMPSMTMLGARCPLYFGDH

SEQ ID NO: 58983 - protein, 403 aa, Zea Mays
MCARMWLSVGFCRSCNSKLFWLLFFEPLSIAFDTLQSIMVHGFQLFDIWQRHLMESGADFLDFQKSYKQAAGSFSEWRGKLTRDFGFAIDLISMLMSFGHYSMIFWLRGMAFHLVDAVLLWNLRALIVSFLKRIKTYIKLRKALSSLDGALPDATYDEICAYDDECAICRGPMGRAKKLSCNHLFHLACLRSWLDQGLMEGYSCPTCRRPLVLSSEGQTRSPIVEAANVQRIAEQLTMGMNQQRVSGNEHPVEQQNPSDAVWRGAGLDASWIPPWSSPVIDNPSSSSAVRSVGLSGVQMMMRQLASVTDSYGHADGTWNLWPEPMAGSSLVPSTSSMVPGSASASGLRLRGSAGTGNGSLSEVLTMVDRVREVLPHIPDELIIEDLMRTNNINATVNNLLLMQ

SEQ ID NO: 58984 - protein, 386 aa, Zea Mays
MVWFGPSPARTSVVMPLAEPPQWRRKATDFFSTSSVKLKQAGQSAGDNIADVAGKVGSAVKSRWVVFQEARQQQQQQRPPHETVQERIITAAATTGLLFRKGISETKEKVAVGKVKVEEAAKKTADKSKSILNNIERWQKGVASTDVFGVPIEATVQREQSGKAVPLVLVRCADYLVISGLNNEYLFKSEGDKKVLQQLVSLYNEDSGASLPEGVNPIDVGALVKCYLASIPEPLTTFSLYDELRAARVSIPDLRDILKKLPNVNYMTIEFVTALLLRVSHKSSLNKMDSRSLAVEFAPLIMWRQGDAGTDLRNHLKLTLKPPPKIVDTTSNTATWDLFDEDGEDASSQIPLDDASPPDYNSIEVIQCLIEHHNAIFTDANETVWR

SEQ ID NO: 58985 - protein, 827 aa, Zea Mays
MRKTPPMGEEAEGSPRKKAPRLDDAARTTAPVASAPSPTRKTPPEGEETEGNPRNKSPRPDDAARTTVPVASAPSPTRKTPPNGEEAEGSPRKKSPRLDDAARTTVPVASAPSPTRKTPPNGEETGGSPRKKSPRPAEALPVAMVPVEAAVGASDEKLCKCNHAITDSDIWELVHSLTTKDAWICCACRRKDEKRDLLICVGCYSHLCCGVGSIAYPFGHSRSHALKKKHWFAVLYSDPERGYCFKCNAEVPMLRKCGEDGNEGGLELIRDIVSQLPDQPSVDFPSPGNTPPKGKETERLDDAARTTVPVASAPRPTVQTPPKGEEAGFRNKAPRLDDAALITVPVASAPTLTGKTPPKGEEAQGSPRNKASRLDDAALATPRPTGTAPPKGEEAEGSPRNKSPLLQDKRPSEALPVAKVESTDEKRCKCNHVIDVLDIHGLVGSLTTKDAWICCDCRSEDEKLIFKARPEKSDLLICVRCYRHLCCGVGSIAYPFGHSRAHALKKEHWFAVLYSDPERRYCFKCNAEVPMPVKSGEDGNEVDIEVIRDIVRQLPSHPSSVVISPVISQTEPEVINPGEEEVAESAPSGFVVAVDPADRWPCYESKSSDAQGYAIKGIPNLGNTCYLSAVLQCLFVLGKLRERMLTLDGPKSLITEVLEELFLEASAAGGVLNPIKLLNCLNLRDPSGFQIGTMEDSHDLLTALRAIWNESDKNNNKQSDAPTMMDSIFRFEMARTLSCKKCGHSSAAVRYPFEDLLLGFPSKGHPTKSAALPQTSESPGWAGSRKRVIARQLFPEDVQGSVDSEVFDVETLEVGEFMIDHALIKMP

SEQ ID NO: 58986 - protein, 78 aa, Zea Mays
MLGSSAAYSGGSGARRAKAQGGSRVAIQPTPSRTHAGSLRVYLYSGGRGDLECDFAALLQRCKNLSFRIVAQECACAG

SEQ ID NO: 58987 - protein, 155 aa, Zea Mays
MAFAAVLRARLLPVPTPLSSSSPPPFFAPSAYVRVPRLTAAAARTVRYRRRGGRPHRAAAAITASLDLTEDNVRVALDEAKSELGQLFDTSVGITGQVDLAELDGPFVKLRLKGKFWHTRATVVARIGNYLKNRIPEMGRVLFNQGVTWGPPIVI

SEQ ID NO: 58988 - protein, 1269 aa, Zea Mays
MTTGDIDPAVLASLPPSMQLDLLVQMRERVMAENRQKYQKIKKEPAKFSELQIQSYLKTVAFRREIDQVQKSSSGKGSGGVQTSKIASEANREFIFSSSFTGDKQMLAQRGEKEHNVENTRSKKEIHSSVFASNPTSSLGTMKPPNSKTLSDFGPDVETYRDERGRIRVSRVRAMGIRMTRDIQRNLDFIKENEQVKSKGQTQTNFHNGSTGNEEPPDFPEHLFESNKLQSSCSPDVDLSETDRDNHQTSSQIGTDIISESSCYGNKEAIEISFSVDQTEVKDGDEDIFLQLVSGMAPNNIFSGNNCLVKKMEESVDSECIWEDGVIEAGTSPVKIDMKDHKSSLPENCSDDEMEWEEGDSFVPGVASSSEHNPCNAPKGDLEEAALVQEAIRRSLEDFEKKASENVSTGDIQASVEDRSLQFSNNVPKISESLGENDSHSGVPVVDEINNETRTEINYDKDDMVQGTGLLGTERQESESQPPLVNNDWHADMHRAHPLGSVPPCTTFTSDLAEKPSVSAETNGEDVMIFTTKIPGTALGDCDKTSNLNIMNSDQSKCSKDIASTGESLSHQKNLLIDELLAVTAEQKENATQVDLKFATSEVDYTQICGNDDNHTISASYVDAELSRLRQEQIYLGHERRKLESHAESVSSEMFAECQELLQMFGLPYIIAPMEAEAQCAYMEINNLVDGVVTDDSDVFLFGARNVYKNIFDDRKYVETYFMKDIESELGLSREQLIRMALLLGSDYTEGVSGIGIVNAIEVVHAFPEEDGLQKFKEWIESPDPSIFGKLHMEISGRSKKRKLDENDSDGKGKGLEPECIQGSDDKQSSNEDEHVKEIFMSKHRNVSKNWHVPATFPSEKVVNAYISPQVDSSTEPFSWGRPDLGLLRRLCWERFGWGKEKADELLLPVLREYNKHETQLRMEAFYSFNERFAKIRSKRIKKAIKGITGKSFLDADESEQDNPSTSKTIKKKEASSSSHARGREKRKNDYGVMGSQEDNIIDNTNSLAETVENTRENNNTTKIKRGSSCGRPKGRGRSRTTAGSDATINQEDYEIEYSTSASDEDSCKRHSNSYGSEGRALRRSSRKRKQVTYMEDGHEAYGNDVPMHQNDENNPGQPAAAADVAGEDTGFNIYHQDTSELNSSQMHTGAGITEDINEDSQRFELREDNQVDSTPKDYLFNGGGFCMEGEGDEQEPACDQSGAEVEPGPSGPCGAMDEVSESASISTAMECTENARMEARGASSSQQRRKASRGLSAMPTLIKRRRKS

SEQ ID NO: 58989 - protein, 1170 aa, Zea Mays
MTTMSDDGDRTCPLCAEEMDTTDQQLKPCKCGYDICVWCWHHIIDMAEKEETVGRCPACRTCYDKDRIVKMAATCDRTVADKNVEKKHKTQKVKPKAAPTAAATSTVESKKHLASVRVIQRNLVYIIGLPAHLCNESVLECREYFGQYGKVLKVSVSRPTGPPSQQASATSNISVYITYAKEEEAIRCIQAVHNFVLEGKVLRACFGTTKYCHAWLRNMACGNPDCLYLHDVGSQEDSFTKDEIISAYTRTRVPQMASSVSQRRTGTVLPPPGDDFSHSAVVSAKHTFKNGTLNTTSQPRLSPPNSSSGRSTLPPAASWGQRDLNARITATGATSSQSHTKPKSESQSNPFSSSSAISSTKTPSSWNDDTSTAAKMPEGQQVSEKESKTLQPYKPGISKETQALSSLESSLDIDFSTIPSAWNDDDIVVSDGMPKGSDENQVPNKNGELTHPASKSLVLSKKDIEMNITSKNPSDFLSSLAISKLDVSTSDGDHSDTNITPKSLTSNAVECQSCHAAGEKMLEDIGSKDIDMEKISSQISSVTLGGNDKIQSMAGNQQPDVMPCTSIDVPMDQNFGRDRSHLNLNELLLPSENKDSSLSCQYSSDKRLAWSLKMQNCSVTPLNDTIDSAMLTDKPYSILLEGSEKPSYPPFVEFPSTWDTSLWNDTKNNAASTIDTITSSQMQTGFSSIDNTYALLNGGQDGLGTVYTHDNVSVYTRGRGNVSGHPGMGSHQHRAMGSVRTDSIGSFDKTISVNKDESRIISDTLSEFNPWDDSYSTANNFVRMLRESENNDVQCTAPSWKSGTGSKQSRFSFARQDNQGNLLDSSLRNCGIGTEQNFSLLPQNSRRNIYQNGLAFQSLENEFSNSNFPGLLDMATTGTSMSKISAPPGFSAPTRVPPPGFSTAFPSQDSLNPTPGFPSGILSHDGSIPLSRFPSFSSGVSAQEVSKLPTRLPSPFSSRFSSQDGPDPPSRFPFSSGFTSQDGSNQLYGSTNPENLLGGTVLGVDGNHYQSQFGRHSSDMEFDDPAILAVGKGLMPGIGDSGLEMKNTRASQLQPASSDPRFQLHVQPNVQSHQNMRFTDPVQDGLNHMNDNYLASRFLAQNHGPLSPYVQIPQQPRNSQVTNGHWDGWSESRQGNNIPMSDMSRILYPSEVNKLHMLGSNDIHNRAFGM

SEQ ID NO: 58990 - protein, 55 aa, Zea Mays
MNSKHLGFPEKKKGHAPSSHGTKTNSSFSLQSGAQQLTPLALASQCGMAEIMGEI

SEQ ID NO: 58991 - protein, 1151 aa, Zea Mays
MASGSSRPQIDQFFPAKKRRPSSRKGESPRPGTQHESPGGAKGSLEGYLVRSPCNRAVAAASVVPVGSPRGGDPGARRSLSAAMDVDVGSSASVAAAAGDGADFDLRRSTADFLSHSCSAILPLRGDCDYSEQCQMKQKRSASQSFLVPCDNDYVKKQRVAHCGGFEALKELDDNVASMKQCINHHGGSEAVEESVEGEHVSCVGFSALQRCSFTPSTAQIKVGFSLAPVETLKSVSRNSLTSPGEEFWNAAIELADGISAQADKVRGRPEFDAAEDKSSCAVAAFFKTLPRSGRDELDCQNTVGSNDTHHIEKLSNKVESLAVNCQHIISSPLPVKQLDFFHEDDIKVSGSKFETKGSYETCNAQADRVPLKGSGRLEKENLMDPVDVLKRSAINLHTDSAAMRCQGVFKSTTEGKVHPTQEAERDSNLIRRDLNQPTHNENKSLAAYSNNRKTWIDSKSKVASQEVEASTPTSSIPLKDHSKISSWLPPDLCAIYMKKGISELYPWQVECLLVEGVLGKRNLVYCASTSAGKSFVAEVLMLRQILSTGNMAILVLPYVSICAEKAEHLEQLLEPLGRHVRSFYGNQGGGSLPKDTAVAVCTIEKANSLVNKLLEDGRLSELGVIVIDELHMVGDQHRGYLLELMLTKLRYAAGEGTLQSCSGEVSSSSSGKIASHGLQIIGMSATMPNIAAVADWLQAALYQTDFRPVPLEEFIKVGNQIFDKDMNVVRVLPKVADHGGKDPDHIVELCNEVVLQGHSVLLFCSSRKGCESTARHVAKFLKLPSVGTTDVSSEFSDAAAAIEALRRCPAGLDPILGETLPFGVAYHHAGLTVEEREIVESCYRKGLVRVLTATSTLAAGVNLPARRVIFRQPKIGRDFIDGTRYRQMAGRAGRTGIDTKGESILVCRPEEVKRVTGIIRSNCPPLESCLSEDKNGMTHAIMEVVAGGIVQTANDIHRYVRCTLLNSTRPFDDVVKSAQDSLRWLCHKSFLEWNHETKIYSATPLGRAAFGSSLNPEESLVVLDDLSRAREGFVLASDLHLVYLVTPINVDLEPDWELYYEKFMQLSSLEQSVGNRVGVIEPFLMHMAHGASIPFRARPERNTGLSNKSAQAAGNTLVSEHTIRVSKRFYVALMLSRLAQNTQESYVSFH

SEQ ID NO: 58992 - protein, 453 aa, Zea Mays
MGARGGGGGGRKARNFATFRLFPRAGAADPNDRVFVRVDNNDYTVPGFADEDSFDPSRSDPSAGNGNFGSASGPLPEHVRREILELGLPDDGYNYLSHLRELRPAAAAASSFVPSSTGRPEPLPLDVKAYDASRVRIGLSEGELDEGKTMCKVAAKTAPVRRIEKAVDPDIARLLDESDVSHVGSEDEGLEEDFVIIANQAEEEEEDEDGDMEEKQEWNGVFSDVEEEEFDFEEDEPKPRVRRLLDEQFDLLALEEYGDSDDDDMGVKGGEYELPNEAIDELKLFQNQNVCVDEEYRTPADFVRQKLDSSMADEVDESARVIKKCAEYAEIYLNETAEEEVVVLVSESSDESEVWDCETIVSTFSNLDNHPGTIETPGISRARFPRVFPGETTTTNGIIKLHGKEKLPVEYLPQRRRNGEKEKKVKPVEASVTDKFKKGAEKETKEEKKARKQ

SEQ ID NO: 58993 - protein, 142 aa, Zea Mays
MPTSEVWSLSDFEISKYIAEGRFGKVYLAREKQSGYVVALKVIFKAKLKKHRFHAHLRREIEIQQSLDHPNVLRLFTWFHDEERVVLVLEYAARGELYKVLRAAGRFTERTSATVKNPPFSFCFTFISRLCLRLDCHSSYCY

SEQ ID NO: 58994 - protein, 276 aa, Zea Mays
MYPYFAAVLNFSQYWALYCLVAWYTATKDELAPIKPLAKFLSFKSIVFLTWWQGVVIAIMYALGLLRSPLAQSLELKSSIQDFIICIEMGIASVVHLYVFPAKPYALLTNQSHGNISVLGDYVSSEPVDPFEIKESNRPTKMKLPQLEPDERSVTNIKESVRDFVVGSGEYVIKDFKFTVNQAVRPVEKRIDKLMKKNDKSKKSQDDNWVSAATPERPVRGIDDPLLSGSASDSGVTKGRKYRRVVSSVTAVDSWGGGDQASDGYEIRGRRWAVKS

SEQ ID NO: 58995 - protein, 714 aa, Zea Mays
MQVPLLPQGLAVAGSCNFFFGNEIWSLASFHPLFLPAQICPCRRTRTPARQLLFFNGCCSELIVRGISFLPQTVAVEDWVRERDVSAGLSRNPEFTSVARMSVSHAQDIEISLCDGNSEDERRRRKIGSLRRKAIHALKKRGRRRVDSRFPPPAISIEDVRDAEEERAVASFRERLAAHGLLPEKHDDYHMMLRFLKARKFEAEKAMQMWSEMLKWRKEFGTDTILEDFDFEELDDVLRYYPQGYHGVDRQGRPVYIERLGKVDPNNLMQITSVDRYIKYHVQEFERAFRERFPACTLAAKRHIDSTTTILDVQGVGFKNFSRTARELVNRMQKIDSDYYPETLHQMFVVNAGSGFKWIWNSVKGFLDPKTSSKIHVLGSNYQSRLLEVIDSSELPEFLGGSCTCSDKGGCLGSNKGPWNDPYILKLIHNLEAGCMRETTKPVSEGGERSSSSFRLEQMKWQGMLSDTSNAESGSDVDDFGPSFVHKVSGYGCLTPVREEVKGTDCATYLSCDDQSHPDMVPEFYHGVQRTTEMVQKQMADFRQYSTNRRPRELGNGSLNANGTAAAQRGWEDVAKLVVTALIKLFSFIRLFLSRAAESRLEKVRRTAPPPAAEKPKPPRAVSEEEVRACLQRLDSLESLCGHLATRPAQIPEDKERVLLSSFERIRSVEADLERTKRVLNATVAKQKALVEEVALESVQELPRAKSQPNSLLP

SEQ ID NO: 58996 - protein, 444 aa, Zea Mays
MDLERSPPASSAEAPGDGGGGGAAACSICLDAVLARSAGRSVAKLQCGHEFHLDCIGSAFNAKGAMQCPNCRKIEKGRWLYASGHRASVDIDMGGWVTSDNYDITSELPFGFQWCPFSGFTRLASMFEEREAELTYHTTGDRSSAASSSLVCPYLALRGFLHPVHVPSTSNPGAESTSFRRHATGLEGHATLDLNNAQLFHAIESINHDSEHRHLSNLPVSGIPEYSMTPFGIGLPRYDSGSQQRFRSYAHHHPLIHRPAPRSGSNLVAPPLGSVPAVVAAAETARGSHMYQRSSVHGSPFPPTTTRRVRPRALTITSFIAATSSDPLTGRTMHGAGRASLRSPGSPLKASLTGGAPSTLCRTMRMEALAEGLLGSGCRRRAKATRRTAIRLCRRHRGCRRSCDSTRLFLRPIAVYKMKYSVRGLREHIERRSTALQSPALGPV

SEQ ID NO: 58997 - protein, 105 aa, Zea Mays
MLVRDYLTLKGKQGGVAASIGRFSDRIVCDSFSDEGFLYPPLPKTAVGFLELVELCKGLVVNHCQLTLEVFKGLYNPGEKGTQLMGKNAQSLQSVKLVYQPCSWS

SEQ ID NO: 58998 - protein, 463 aa, Zea Mays
MDDGSSNKVVEDVAEEDPGRRGGPWRTDEADANEKAPRPSRRVASLDVFRGLTVALMILVDGAGGEWPVIGHAPWNGCNLADFVMPFFLFIVGMAVPLALKRIPDRGRAVRRVVVRTLKLLFWGILLQGGYSHAPDELAYGVDMRHVRWGGILQRIALAYLVVAVLEMVTKDGAKVHQDQPPGSSGRFSRVFRMYLSQWIVACCILVVYLSLAYGVYVPDWEFRVRNADSPDYGKVLTVRCGTRGALDPPCNAVGYIDRRVLGINHMYQKPAWRRHRACTDDSPHEGPFREDAPAWCVAPFEPEGILSSLSAVLSTVVGVHYGHVLVHMKSHTDRLRQWVTMGVALLVLGIILHFSHAIPLNKQLYTFSYICVTAGAAGVVFSALYFLVDVVSLRYAFAPLRWVGMNAMLVYVMAAEGVFEGFLNGWYYESTNNTLVYWVRKHVFVKVWHSTRMADNMTTLAK

SEQ ID NO: 58999 - protein, 218 aa, Zea Mays
MKSHTAFWHWRWSAGQGAQRLRWNGVHCVPPVPMLRDTPPTELGAVQAAAFKSSSSSLEFKASREARLRERERELYKARRRPHCRGTLSLFTAVACRLTSTASMADTARLFMLVAVATAALAGRSDGAWCVCRSDLADSALQKTLDYACGGGADCKPILQSGACFAPDTVKAHCSYAANSFYQRNGQNPQACVFSGTAALSNVDPSANGCTYPATPRR

SEQ ID NO: 59000 - protein, 334 aa, Zea Mays
MIRKRYMHLTEEFLSENPSMCAYMAPSLDARQDVVVTEVPKLGKAAAQKAIKEWGQPKSRITHLVFCTTSGVDMPGADYQLTKALGLRPSVNRLMMYQQGCFAGGTVLRVAKDLAENNRGARVLVVCSEITAVTFRGPSESHLDSLVGQALFGDGAAAVVVGADPDGRVERPLFQLVSAAQTILPDSEGAIDGHLREVGLTFHLLKDVPGLISKNIERALEDAFEPLGISDWNSIFWVAHPGGPAILDQVEARVGLDKARMRATRHVLSEYGNMSSACVLFILDEMRKRSAEDGQATTGEGLDWGVLFGFGPGLTVETVVLHSVPITTGAPTAA

SEQ ID NO: 59001 - protein, 602 aa, Zea Mays
MAQSNWEADKMLDVYIYDYLLKRNLQTTAKAFMTEGKVAADPVGLNQGVSGLPLKGWPLTGIDQLRPNLGAQMQKPFLSTQSQFQLMSPQQQQQYLAQAQAQGNLGNSTNYGDIDPRRLTALTRGSLNGKDSQPAGTDGCISSPMQSSSPKVRPDQEYLMKMQQTSSQQPQEQLQQQQQNQQQQQSQQQMQQNNRKRKQPTSSGPANSTGTGNTVGPANSPPSTPSTHTPGDGLGMGGNMRHVPKNLMIYGADGTGLASSSNQMDDLEQFGDVGSLDDNVESFLSNDDGDPRDIFAALKRSPAEPSPAVSKGFTFSEVNCWRTSNSKIVCCHFSSDGKILASAGHEKKAVLWNMENFQTQYTPEEHALIITDVRFRPNSSQLATSSFDRTIKLWNAADPGFSLHTFTGHNGQVTSLDFHPKKTDLLCSCDGSGEIRYWNVTQFACLRAIKGGSAQVRFQPHVGQFLAAAAENVVSIFDIETHGKKYTLQGHNTDVQSVCWDNNGEYIASVSQDLVKVWSMSTGDCIYELSSNGNKFHSCVFHPSYSNLLVIGGYQSLEVWNMVKNQSLTVQAHEGLIAALAQSPVTGMIASASHDNSVKVWK

SEQ ID NO: 59002 - protein, 215 aa, Zea Mays
MEVAWNQVKLHDFLQSPEDLERLYCEIHLLKTLKHRNIMKFYTSWVDVSRRNINFITEMFTSGTLRQYRQKHRRVNMWAVKHWCRQILSGLLYLHSHNPPIIHRDLKCDNIFVNGNQGEVKIGDLGLAAILRKSHAVHCVGTPEFMAPEVYEEEYNELVDIYSFGMCVLEMVTFEYPYSECTHPVQIYKKVISVRRSLDPMSHLAAIVILVCSLK

SEQ ID NO: 59003 - protein, 107 aa, Zea Mays
MVRRLLCPRDGAALRPILAMTTNYAHHGRIPSSPMAPTPSTSTSEPLSPLGSSTDSTGGELICSGTHFPFFSMATPSLPLFFAPGTTRMHGFLRAGAWGPFLLRMRG

SEQ ID NO: 59004 - protein, 840 aa, Zea Mays
MQRPDCGGALSQAKVKLLVNHFIVNYQKVSTIFHYDINIKLDEASSKASGKELSKAEFLSVKDELFRESSLRRLSSCVAYDGGRNLFTSAELPAGLFRVRVRSKAYIVSVDLKKQLPLSQLSDLPVPREVLQGLDVVVREASRWRKVILGRGFYSPSSSIDIGQGVVAMKGTQQTLKYTQQGLNLCVDYSVMPFYKAGPVMDLVHKIVGYLDYRTTLNKRQMENLVDELKGRRVTVIHRRTNQKYTVQGLTPLPASQMTFVDAESGQTKCLVEYYAQKHGIVIEYQMLPCLDLSKSKDKPNHVPIELCTLLEGQRFPKANLDKNSGRILKGKALIPASNRRKEILDLVNASDGPCRGEIAQRFGISLDLRMTEVTGRILPPPNLKLGASNGQTSKFSIDQNCQWNLVKKRLVEGRDLQCWGIVDFSAEPSDPQQEPLNGRMFIEKIVRKCCELGIRMNSNPCFVHKSKMAVLSDPHRLQEELNKAKQAAVSKKQRLQLLFCPMSEQHPGYKTLKLICDTQLGIMTQCFLGDRANKPNGQDQYMTNLALKINGKLGGSNVQLFDSLPRVGGAPFMFIGADVNHPSPGNVESPSIAAVVASINSGVSKYVTRIRAQPHRCEVIQQLGEICLELIGVFEKRNRVKPQKIIYFRDGVSDGQFDMVLNEELADLEKAIKVGGYAPTVTVIVAKKRHHTRLFPKDPSQPQTKNGNVPPGTVVDTGVVDPSAYDFYLCSHAGILGTSRPTHYYSLVDEHGFRSDDLQKLVYNLCFVFARCTKPVSLATPVYYADLAAYRGRLYYEAAMMPSHQRGTGSASSGSSAGTFGVTNFPRLHKDVENNMFFI

SEQ ID NO: 59005 - protein, 127 aa, Zea Mays
MKLLAQQRDLQAKIPDIEKCLDIVSTLQAKNDLADFELSEGIYSCAKIEDTDSVCLWLGANVMLEYSCDEANALLKKNLENAKASLEVLVADLQFLRDQQTITQVTIARVFNWDVHHRRSKQAVKEP

SEQ ID NO: 59006 - protein, 1744 aa, Zea Mays
MFDEKLMPEHLFRVCLEYQRSCAKTHQDCSGYNAYKDPNPPVLFKMVESLTTLQERVNSYLDEWPDHPGLLKILDLIASLLAMPLSTPISKVLLGLQLLAGKAQTLQENDSKFFVKDHLASIFLLVYSWQRLELDCWPILLEEVQTKYELNAAKLWFPLRALLTQTSGIPVDDDLSIIRSVEEFVQTSSLGEYKRRLHILFAFHGEISAGASLGSYSSNAVKKIQNILYSVFGYYMQFLSLVHGKIEEGKKNIEKELKDHVKLYSWEQAPYSSASIENFKRTRQKIFKLLQRFNDILKSPVIFLLNEEATSRKIPCWLDPQRPESHLPVDSEKFNKRFLWYHKWASETSLSLQTLQQSNGSTVGVPTAKEYADMVYDVKHWQNEIELNDRLQFFWISLERICGAANFGSTVKHGKKNQKKTALSNLFKTLEECGLSKHRPMSHEWGDELAAPSPLFLEQSYDSAHLLQQINSQKMLEDVSINHSTLLNTDNWKHANQQYFKCLAMMQQLRQVSLKFNKDLGLEEVNKAMSFMSHLLTVLSEQRHLAYNLFDQRNQFKHAIFLLGSGGKSKSLSSSQNVLLSSMWQQKKLFDAVITLITDSNLLLRSFKDCHYNSCNNFIEVEGISSLLGKFILNFSESKELLDECLLGSTNIFAGAYKSMPHSATEMEQLFTDNCQHIDSLLDGYLPGSNNIFPDAYKSIPLATTEMEQLFADNCQLIDSLREDMKVLCHRDLSVGSVKKVLISRLEELLEKGKMAMENRRHVEENHKLCLKLEASYIEILKETFMLVVGAVRKLTDHEVCSNGTEKSPVGNVASWKDTLQTCIMNLKLDDICVAGEKIRILVRLLVDYKPDIRTSIELHLMHLHAWLSVILSSAEGILSELLEAHITTSEMTLALGDLFIHLFTDGFGSTEDTAEDADELQQDAVGSGTGMGEGDGQKSVSSDIDDESQLGDSKDLTCKADPAPKNDDKAVEMQDGFNAQLSDVSEDLEGKDSGGEDEDTLDNQMGDTGDASEVVGKKSWDKDEDDDPKTSIEKYESGSSAKGTQQDDREMRAKDDGSIEEEDPMEMDSEEGKNNNLEHDPSTHDETELNTDEVMDKADAYDDRTGPELPEPENDSIDVDMVEQEQTDEINADNEDIGTEEAEQADQRLDASDDMEEGDMAQHSDGVVDNEGEHVEDANTDAGEMDSHQLDKADSLMPLSQGLQPDNMQINSNGESEANLANSSDMHGAVAPSVNFSGNEVPNMEISMPNTGNDSILSSNSKPDMQNDAQQHIKQTNPFRSIGDALEDWKERARVSADTQDHQPETGKDSSENTTEFRYVPEGEESTSQALGAATADQINYDNQINQSFLEDESCIRNLEHSDERTPDNPEVPYLQTSQALPNKSENANELDGREIQTDASVQNLVERTDHTFQDLVSFKQPPADDKIALIDLTTDRELPSQMDLDITDAETKRSNAVWKNLELATMKLSQELAEQLRLVMEPTLASKLQGDYRTGKRINMKKVIPYIASHFRRDKIWLRRTKPNKRNYQVVIAVDDSRSMSEGKCGKFAIEALVTVCRAMSQLEVGQFAVASFGKKGNVSVLHDFDQIFNSEAGVNVISSLSFEQDNKIEDEPVSDLLTHLNVMLDTAVARARTPSGQNPLQQLILIISDGKFHEKENLRRHVRDVLNRKRMVAYVLLDSPEDSIINLKEACFRVGEKVELKKYMDSFPFPYYVMLQNIEALPRTLADLLRQWFELMQSANE

SEQ ID NO: 59007 - protein, 987 aa, Zea Mays
MRPTTSCHRFPLLLVLLLFLLAGEGRSQPAAGGGPSDRDTLLAVKKAWGSPPQLKSWDPAAAPDHCNWTGVTCATGGVGVVTELILSRQKLTGSVPAPVCALASLTHLDLSYNNLTGAFPGAALYACARLTFLDLSTNQFSGPLPRDIDRLLSRSMEHLNLSTNGFSGEVPPAVAGLPALSSLRLDTNNFTGAYPAAEISNRTGLQTLTLANNAFAPAPVPTEFSKLTNLTFLWMDGMNLTGEIPEAFSSLEQLTLFSMASNNLTGSIPAWVWQHQKLQYIYLFHNVLSGELTRSVTALNLVHIDLSSNQLTGEIPQDFGNLKNLTTLFLYNNQLTGTIPVSIGLLPQLRDIRLFQNELSGELPPELGKHSPLGNLEVCLNNLSGPLRGSLCANGKLFDIVAFNNSFSGELPAALGDCVTLNNLMLYNNNFSGDFPEKVWSFPNLTLVMIQNNSFTGTLPAQISPKLSRIEIGNNMFSGSFPASAAGLKVLHAENNRLGGELPSDMSKLANLTDLSVPGNRIPGSIPTSIKLLQKLNSLDMRGNRLTGAIPQGSIGLLPALTMLDLSDNELSGTIPSDLTNAFNLLNLSSNQLTGEVPAQLQSAAYDRSFLGNRLCARAGSGTNLPTCPGGGRGSHDELSKGLMILFVLLAVIVFGGSIGIAWLLFRHRKESQEATDWKMTAFTQLSFSESDVLGNIREENVIGSGGSGKVYRIHLGSGNGASRDEEGGGGRMVAVKRIWNSRKGDEKLDREFESEVKVLGNIRHNNIVKLLCCISSQEAKLLVYEYMENGSLDRWLHRRDREGAPAPLDWPTRLAIAVDAAKGLSYMHHDCAPPIVHRDVKSSNILLDPDFQAKIADFGLARILARPGEPQSVSAIGGTFGVWVQAKGEREGGRLQLRRRPAGAHNRHGRERQRRGPLPGGVGVAAVPERRAVRRRRRRGHPGAGRRARHPVGVHPRRHLHGREPAGEAVDERGPAPARPVRTDRR

SEQ ID NO: 59008 - protein, 370 aa, Zea Mays
MGARCSKLSVCWWPPHFKSPMLGETNPLSWAMRMRAALYVAQALDYCSSKGRALYHDLHAYRVVFDVDGNPRLSCFGLMKNSRDGKSYSTNLAFTPPEYLKTGRVSPESVVYSFGTVLLDLLSGKHIPPSHALDLIRGKNFLVLMDSCLEGHVSNSDGTDLMRLASRCLQYEARDRPNLKTVVSGLTSLQKDAYTPSHTLLGIQHDKNNSGQVSLSAIGKAFARADLNEVHEILLHDGYNEDDEANAELSLQSWNGDISESFVVKRRADNAFRSKEYTTAIECYSRFLDSGAVVAPTMLGRRCFAHVVAGNPQEGLEDAKRAEIIASDWPMGHYLQALALHKLGREAESQEALKNGTALEAARNSRARTV

SEQ ID NO: 59009 - protein, 651 aa, Zea Mays
MEELSNKALAPSLLSLCLDAVADRLISDNAAAGGGVGRTGSSGGCSGGGGLAGFSEDDGGEADEDRLHPQELAEGLPWELLHRLASRLPPVVLESLHHAAHARYCSAETTSGLGVQDGERRGVKRSRCEDFNSTWQLLFKLRWPLGGNTGHNNLVTVDWQQKYWEKHLQECLNEAAEHAFLPFFCGSIGELSISAKIMNSIYQSMGTSQQHSRLAYQCSKFGCYVRSLRLQGVLCTAETYVLLQQCKLERLMFIRIISDLEVNGACLLLSWHAETLLSLEFIHCQLYPTVMDKICMSVYLKGSQSHGIQQFSIKSSQICETKPLTISSGLFKILSSGKSLHLLSLRDIKMQSPFARMIIHTLLESSCDLHTLEISENNIAGWLSELNKCSTNLLALKSDIFMNSLSVLNLRENNLQKDDVVDLHKILIKMPNLRDLDISGNPVMDEGIRSLIPFISWSIQKENPLLRLTVENCELSSIGVIILLECLTNAKQLLDVLSIADNHLGSSVAAALARFLGSHVRALNATDIGLGTVGFQILEETLPTEVALSHINISKNRGGIRAAYFVSRLICRAPDLVSVNAAGNLLPPESLEVICNSLKQGTCNLERVDLTGNMHLSSNIFPAFLEFKKHGKPILVVPPNLSTSAPYDDDP

SEQ ID NO: 59010 - protein, 349 aa, Zea Mays
MKDVCSAGMNIDQSFHAPANEALHTGVSSRRTDKMSGKDKDAHSLRDDLYLKQGHQTDLLEALELRRRTMIDNGMSTSGVVSLEEDTHFEPRNATCKEIKAIGVQTDNTSDNEHLDCKKLLVERISGNLRAMWGMSPNSLSSRNLISKINVSCSEEILSLLQHTRLSDNCEPSSQAISSMNEAISQLYDTFIKMNSGKMSIQTFLEALLNLCAFDDAAIVSRTLRVFLKVLQHLLQHGAKSSERNNVSVEPYVNVLMENNHKDCSTLLRPVDAEDSLRLHNMFLPFTFWSSLFTGMLQIGVKYSQETIRTDALSIMILIVRTTDPIEERQKKRTDCLLRSILCVYFSCF

SEQ ID NO: 59011 - protein, 1438 aa, Zea Mays
MAGAAGGFVTRAFEAMLKECAANRGKFAALQQSIQSYLDSIKGATAEGAVITEALASAGRVLDGPQAELVLQPLRLAVETKHVKLVEPALDCLHKLIAYDHLEGDPGLEGGKNSPIFTDILNMVCGCVDNTSSDSTVLQVLKVLLNAVASNRFRVHGEPLLGVIRVCYNIALNSKSPVNQATSKAMLTQMISIVFRRMESEQVSVLPASSVVKDTPSSITNESENGEISTDGQDEEKVTPGDALSMNRPSEAPPTSVEELQNLAGGADIKVLHWFHLITRDLLQGLEAVLDKAVELEDGKKVSRGIDLDTVNIIQRDALLLFRTLCKMSMKEESDEVATKTRLLSLELLQGLLEGVSNAFTKNFHFIDSVKAYLSYALLRASVTSSPVVFQYACGIFSVLLLRFRESLKGEIGVFFPLIVLRSLDSSDSSLSQKASVLRMLEKVCKDPQMLADVFVNYDCDLEGPNLFERTVSALSRIAQGSQIADTNSIVSSQTVSVKGSSLQCLVSILKSLAVWEQLRRYSLKQGSIVESHEGDASRSVTTDEMKSQEDVRNQFERAKAHKSTLEAAISEFNRKPTKGIEYLLSNKLIENKASSVAQFLKSNPGLDKVMIGEYLGQHEEFPLAVMHAYVDSMKFSGLKFDAAIREFLKGFRLPGEAQKIDRIMEKFAERYCADNPELFKNADTAYVLAYAVIMLNTDAHNPMVWPKMSKSDFVRMNTASDAEECAPKELLEEIYDSIVKEEIKIKDDSHDTSKTTKRPETEETGRLVNILNLALPRLKSASDTKAESEKIIKQTQALFRNQGQKKGVFHVAQQVELVRPMLEAVGWPLLATFSVTMEEGDSKPRVVSCMEGFRAGIHLTRVLGMDTMRYAFLTSLVRFTFLHAPKEMRSKNVEALKTLLGLADTDMDALQDTWNAVLECVSRLEYITSNPSISATVMLGSNQISRDSVVQSLKELAGKPAEQIFVNSVKLPSDSIVEFFTALCGVSAEELKQTPARVFSLQKLVEISYYNMARIRLVWARIWSVLAQHFIAAGSHHEEKVAMYAIDSLRQLGMKYLERAELNNFTFQSDILKPFVILMRNSHNSKIRGLIVDCIVQLIKSKVGSIKSGWRCVFMIFTAAADDEDESIVESAFENVEQVILEHFDQVVGDCFMDCVNCLIGFANNKCTPRISLKAIALLRICEDRLAEGFIPGGAVKPIDVVPEANFDVSEHYWFPMLAGLSDLTLDSRPEVRHCALEVLFDLLNERGHKFSSPFWESIFHRVLFPIFDHVRHAGRDGLSSSGDDWLRDTSIHSLQLICNLFNTFYKEVSFMLPPLLSLLLECAKKTDQTVVSIALGALVHLIEVGGHQFSDGDWDTLLKSIRDASYTTQPLELLNSLRFQKSKHQQLLSREESNAQGNSYLDSQGEPSISDSNNGEHNHPEADWNMKGLQNLCIYL

SEQ ID NO: 59012 - protein, 951 aa, Zea Mays
MLQPREADLPALFLVFIVLPVVAYFLLGRWHDAASKKARVSVLAQRAAEEAYREETMACPDIILPGSSLRTMPYFRPMPALRQEYHECATCHAPAKTRCSRCKAVRYCSGKCQIVHWRQGHKETCQKWLGSGSSSFGGSSTEATEQMPFLTNLNSPLPGGDIHLRDLNFDTLSEPSFPTTDGYNLDTDPFLADRSNMNKSNQGIHMSENGAVGVSFEKNNYNADDEIHSPENLSRNKVSNNYFGSDAISGNGDAIYPAKSNAQQPSSCAPDMRKQPKASITVYQPDIGVYLTSDMVSSCEGSYASASEPLQRSLSSGRTIGKANAVNKRPPYPSSKVVSAQKPQDRVSTSYQNDGHEKNPCNKNDQRSTPKCESSQSTSSNLQKFGASKVEVLKKPSKFLKTSLVGLINDNKRNKVLFPYEDLVKFFQYEARGISPRGLFNCGNSCYANAVLQCLMCTKPLMIYLLLRLHSKDCSSKKWCLMCELEQYASTLRESGGPLSPSRILSNLRNIGCRLGGGTQEDAHEFLRHLVMSMQAACLDGLGGEKHVEPSLQETTLIQQMFGGRLKSKVKCLRCYHESERYENIMDLTLEIHGWVESLQDALTQFTAPEDLDGDNMYKCGSCAAYVKARKQLSVHEVPNILTVVLKRFQSGKYGKINKCVTFPDMLDMVPFVTGSGDNPPLYFLYAVVVHVDTENASFSGHYISYVKDMQGTWLRIDDSEVQVVSVNQVMSEGAYMLFYMRSFPRPPRIYIEKGPTVPSAKRHTSKYSKGSKHEREQTELLLSANDPAYGVYDFRPDGEGYTQDQQAELRSRDFHRADDAFADSVSADFSEATSSEWSLFTSSDESSFTTESTRDSFSVVDYGDNAGLDPISSIFGPSYAPEHHPGPPGSFAACTRLSPSNPQTRYFSESTGFVSDYSSSGIVHRGRDPGEILERGGAAPVEAIPRGPNQ

SEQ ID NO: 59013 - protein, 73 aa, Zea Mays
MFEREIGHLSALFLTMEEGFLALVSSLWESQSNITTAGTCCLVSVMHDKTLFIANLGDSGALLGKKDVKVGWL

SEQ ID NO: 59014 - protein, 331 aa, Zea Mays
MVSYSSSEEEAANDRLSDDQEDCGRVKAEAKEIEMVSAGSLQNMVTANGHSSNVNDKIDLTGIYGIKTKPERRKYLSPVSKRRRLNSCSNEQASRRSFSFSKGGGFEKQKSKPPLISSKPAAVEVGDTFQSKTISSCSTKEKPSEHTADALNSLIDDEQNARMVMEVEAVAEVHSKVIAVQPKFVKERAEFIGPVDLNKLETLHDDKASRSIDTTSLGNLGSMKVDEAPSSSDKNMACDPSGAAGRPVSEAPDPALQVNARRHGTRNRPPTAKALEAVAFGLLGSGKRKGDLKNRATSRPSQRARKSAKDLVPVASSGDAKASCIDAEEQR

SEQ ID NO: 59015 - protein, 476 aa, Zea Mays
MPVSSALRSGREQSIQHKSTAFAPKMPQVRSAVTPSLAPALALPVQPLRVAAEVQSPLRHGQQAPGQGAPPKLSNASNNTRKKQAALPNSTFSPSSIQAAAIAAGGRLATASTAANLLKAAQSKNAVHIRSLGATSLKSSASFDHGTQSGGSQHLESLNASAVNGVSGVSAVNQSGPPAGAETKKALGTTLAPVPCDSEENEDGSEFCAITLDDLFPEDAKQPETVDTKAKQPETTGPKAKQPENADPKAMHQETMDPKSKQPDTLKVGILDPKDKDMLEFDQYVASQGAHLNTDDLNKSKCTNSASQAQGLVGSQKNPLKLTPVDGKANPVTAAGRGKPVAAGVASTGKKATIPISHLAAGTPRGIVDTVNANAPIRRTLTRRAAALVPAGCQAPPPKHAIDAKGCQMTNSIATFVSSGVPASSQASTPAKDANKASPPSSSCQPKPDSVAVNGAIRAVKSVAKKGNLPAAAARQ

SEQ ID NO: 59016 - protein, 184 aa, Zea Mays
MSSSEASTQDHGVPALEAQDSTDDHGVPALEAPTPEATDKPDRPDELERVESAGGRVINWKGYRVLGVLATSRSIGDYYMKPFISAEPEVTVTERTHKDEFIILGSDGLWDVMSNEVACKVARNCLCGRAASKYPETVHGSSASDAAAVLVEFAMARGSTDNISVVVVELKRLKWKGGRQNGRT

SEQ ID NO: 59017 - protein, 879 aa, Zea Mays
MDVDSRMTTESDSDSDAAAAAARGGNAGGSGSGSETSSSSAPSTPGTPGTPAAAPNPAPVGAVGPRPAPGYTAVNAVIEKKEDGPGCRCGHTLTAVPAVGEEGAPGYIGPRLILFGGATALEGNSATPPSSAGSAGIRLAGATADVHCYDVSLNKWSRLTPLGEPPSPRAAHVATAVGTMVVIQGGIGPAGLSAEDLHVLDLTQQRPRWHRVVVQGPGPGPRYGHVMALVGQRFLLTIGGNDGKRPLADVWALDTAAKPYEWRKLEPEGEGPPPCMYATASARSDGLLLLCGGRDANSVPLSSAYGLAKHRDGRWEWAIAPGVSPSPRYQHAAVFVNARLHVSGGALGGGRMVEDSSSVAVLDTAAGVWCDTKSVVTTPRTGRFSADAAGGDAAVELTRRCRHAAAAVNDLIFIYGGLRGGVLLDDLLVAEDLAAAETTNAANHAAANAAATNLQAGRTPGKYAYNEQTRQTITESGPDGAVVLGTPVAPPVNGDMYTDISPENAVLQGQRRLSKGVDYLVEASAAEAEAISATLAAVKARQVNGEMEQLPDKEQSPDSTSTSKHSSLIKLDSALSNNLAAPPGVRLHHRAVVVAAETGGALGGMVRQLSIDQFENEGRRVSYGTPENATAARKLLDRQMSINSVPKKLKAPVKIFGDLHGQFGDLMRLFDEYGAPSTAGDIAYIDYLFLGDYVDRGQHSLETITLLLALKVEYPQNVHLIRGNHEAADINALFGFRIECIERMGERDGIWTWHRMNRLFNWLPLAALIEKKIVCMHGGIGRSINHVEQIENLQRPITMEAGSVVLMDLLWSDPTENDSVEGLRPNARGPGLVTFGPDRVMEFCNNNDLQLIVRAHECVMDGFERFAQGHLITPSLTTK

SEQ ID NO: 59018 - protein, 83 aa, Zea Mays
MGKGEDGELGAGQEADARLPERPGEAAAAIAGGVVGYSDSEVFRDASSSSILPGRVEQEAVRQITRLEVTRFLCYQNLLRICA

SEQ ID NO: 59019 - protein, 127 aa, Zea Mays
MSFLEDWSHIEKHHSSALSAAIKALKASTLRLPVVDGAKADALAVKEAVNSAVDVMNTMTSSICNLLSKVEGTSSVVSELSKLATQEQMLLDQSKDLLSTVAAIHVKNCSLQTHMLQRNQKQSPAQL

SEQ ID NO: 59020 - protein, 149 aa, Zea Mays
MLKFLSKVVVEYCPLDPRKAAAVELLAQCNGRKAKDSNPACSVELRRLPSPAPSTDLKSQPTLPPPRVLVTYFTGAEEAIVFAEGATAQGIRDQIVARGRLIDTEKMFRDGGEKWPVVIPEEELGMSFPGIKDSRALEGGLWWRHGVEA

SEQ ID NO: 59021 - protein, 636 aa, Zea Mays
MSVSMKDLDPAFRGSGQKDGLEIWRIENFKPIPAPASSYGKFFMGDSYIILKTTALKNGSLRHDIHYWIGKDTSQDEAGTAAILTVELDAALGGRAVQYREIQGNETEKFLSYFRPCIMPQPGGVASGFNHVEVNEQDYKTHLYVCHGKHVVHVNEVPFARSSLNHDDIFILDTKSKIFQFSGSNSSIQERAKALEVVQYIKDTFHEGKCEIASVEDGRMMADAEAGEFWGFFGGFAPLPRRAPAEGNEKHDETAFKLLCFDQGKLEPVDCQSLAHELLETNKCYFLDCGAELYVWMGRITSLMERKGASEAAEKLLSDSNRTRTHIIKVIEGFETVTFKSKFKEWPQTPELKLSSEDGRGKVAALLKRQGLNVKGLMKAAPTQEEPQSYIDSTGNLQVWRVNDKDKVQLSPSDQSKFYTGDCYIFQYTYPGDDKEECLIGTWFGKKSIEEDRVIAVSLASKMVESAKFQAVQARFYEGKEPIQFFVIFQSFQVFKGGLSSGYKRFIAENGIDDESYSEDGLALFRIQGSGPENMQAIQVEPVASSLNSSYCYILHNGNTVFTWAGNLTTALDQELMERQLDVIKPNTQSRSQKEGSETDQFWSLLGGKSEYSGQKMVRELESDPHLFSCILSKGN

SEQ ID NO: 59022 - protein, 291 aa, Zea Mays
MHLGHKQDILEDIMAPSDNSTFFSPSFVKPVLTIPIKVLPGEDNQTVEKPTSVIRQPAEPEAPPHRVLAVPEAEALVPAPSAERDEWDILKAVVYGGLVESITSLSVVSAAAASGAKTLDIFILGIANLIGGLPVLYHNIADLRNTGDIAESSEQVGHYWLELGRRSKYQLHMVIAILSYILFGLLPPVIYGLSFRTSDNRENKVLVVAAASLLCIALLAIGKAHVKRHRTYLTTLLYYLSIGFSSSGLSYVAGVLLAKVLAHFGIIDQGGASAPAPPGLSFPEAAAWASY

SEQ ID NO: 59023 - protein, 536 aa, Zea Mays
MGSLPNAEESPFGLESLFWQESIHESVEYGAPASATTHTENGFGESKGCHVKSALENTHVSEPFSHHDTEENISKIGGCMHTSQQDNGMEDAIENPLISLSTPGCKHEGALSEEAVHTMKDYAGTCSSNPRVPMQLHDDLAFPGPEKSGDESVNIEVKVHHGSNLSQLGSTDLLDDTELLHQGHNYKDRSNEDMLEQAASEPCTNGDDIVEAAAATKCLESGAMLVPSEERSNLNDRQLTPKLESPDIMESGLNCDKDARNTLDNGSVVAVAGKRTPSGSGHYEHNVYQVSGICATSEAAPVGVVETGIAVETSSLVDDQPNPVLDGDEVEKHSLNCEADTGRILGTGSVTSNTTLVPKDGHTICCQELELPNGLSSFLFPEESGICQYASVSGSGPCLQHVNESTSTQATYNIETLNQQHHEEYDQTARGILASSFPEAVGIEQSGLAPAAEAPVLAVPDGQPNSKLEGNEVDEHSCSYDAEFLNREASNLHKDLFSEDSHRSHLPSLRSPQRSAYFHNGNDSGSESVKAAGEEV

SEQ ID NO: 59024 - protein, 969 aa, Zea Mays
MRSWRMNAGGSGDVGRPKYDSGEIGLTKYDSGEIPRGYIPSVTNSQISGEIPGASPDHHMMSPTGNIGRRAPFPYMNHSSNPSREFSGSVGNVAWKERVDGWKMKQDKGTIPMTNGTSIAPSEGRGVGDIDASTDYNMEDALLNDETRQPLSRKVPLPSSRINPYRMVIVLRLIVLSIFLHYRITNPVRNAYPLWLLSVICEIWFALSWILDQFPKWFPINRETYLDRLALRYDREGEPSQLAAVDIFVSTVDPMKEPPLVTANTVLSILAVDYPVDKVSCYVSDDGAAMLTFDALAETSEFARKWVPFVKKYNIEPRAPEWYFSQKIDYLKDKVHPSFVKDRRAMKREYEEFKIRVNGLVAKAQKVPEEGWIMQDGTPWPGNNTRDHPGMIQVFLGHSGGLDTEGNELPRLVYVSREKRPGFQHHKKAGAMNALVRVSAVLTNGQYMLNLDCDHYINNSKALREAMCFLMDPNLGRSVCYVQFPQRFDGIDRNDRYANRNTVFFDINLRGLDGIQGPVYVGTGCVFNRTALYGYEPPIKQKKGGFLSSLCGGRKKGSKSKKGSDKKKSQKHVDSSVPVFNLEDIEEGVEGAGFDDEKSLLMSQMSLEKRFGQSAAFVASTLMEYGGVPQSATPESLLKEAIHVISCGYEDKTEWGTEIGWIYGSVTEDILTGFKMHARGWRSIYCMPKRPAFKGSAPINLSDRLNQVLRWALGSVEILFSRHCPLWYGYGGRLKFLERFAYINTTIYPLTSLPLLIYCILPAICLLTGKFIIPEISNFASIWFISLFISIFATGILEMRWSGVGIDEWWRNEQFWVIGGISAHLFAVFQGLLKVLAGIDTNFTVTSKASDEDGDFAELYMFKWTTLLIPPTTILIINLVGVVAGISYAINSGYQSWGPLFGKLFFAFWVIVHLYPFLKGLMGRQNRTPTIVVVWAILLASIFSLLWVRIDPFTTRVTGPDTRTCGINC

SEQ ID NO: 59025 - protein, 118 aa, Zea Mays
MELNYHERGFFHWLHREQRIRCTWMGARKRTERQRSRSSGRRRPVRSRRDRAETHHRQHLPPEQQPGKASGARARRLLRRGLVHGARRQDEAGADGRDHSPHLQSRPRGRRSSGPEDP

SEQ ID NO: 59026 - protein, 132 aa, Zea Mays
MAMVIYKQRWVRFGTHKAKRKNVSGKTTVPGTRSLFQPIKGLVQATDMIRPGVVNKTSRLYTIDSLIKGAMQERILHIELMNWPTMEESNCEHCTNGGRFDNWTKSLIKINSRTLSEPAKNPTSLVSLQRTI

SEQ ID NO: 59027 - protein, 754 aa, Zea Mays
MCSGDWYNLEKSKRVKAFRCGEFDACIEKAEATQGTLVKKREKYARREDAVLHALELERKQFASKYQIQGFRPGPSGNISACTKHRKDLGSTRYKSKKSKNCKDVSVPPDVKKEVGQCFLHAGSKRNFSESLTQGNVVSNHMGNFSHLSHSHGGDTLENKESTIVKKNRSDGSDFEDSLVSKSDRRRPISQVLQSSENLLPHLKQNNDFGALLIKENNNPSLATSRSRRNKYTYMASDSGETQSHSDLPSIKMTATGADFENESYLRHTGYFSEEQTSSDFVEKQVTESSERECSESETEEDAELLQNASVILPIESHAPDPYSVPIYEKFKHVDYGDNEVAYSNYMPQLNESEEEDGSSELGVSQWHMKGKRNNRNATKRSVDMRDGNTWLKNYNGSLKGSLHNTNDGNPRKEGMHTSGEKFFEESIYQIKEEPSYDDSDETNVFEDTSHSEANLYYGKRCTSFLRTTRDLSRRYSYFNDYENDSSNVSPLNKDTEQMYHVDRNAYWDGPSFYQTKLTSRFGGMRPMLFNVNLKVQASYQGEHVPLVSLMSRLNGKAIVGHPIQIEIVEDGSTDHLILCGDSGMQESSAAPPAWPTGRRTAMQRVPRSNPSGALLDGDNEGGLVYSDYEMKPTKLYTSSNHQVKVNKKSSSNTRRSVAKSQKKSSKKTNLSSQKRRVLSSISTAKKHHGEGGRAKAHWRNDILGGLIRSEGVPLVTCVPTKVVFTRILEAVGRPPLSVVHRVRMTSPSVRDPP

SEQ ID NO: 59028 - protein, 214 aa, Zea Mays
MAAGGGRCLLALALAAAWISGAVVAASSSGEQEGGSRTPVKCMPCSRTYIGGAHLDTLTGQLAQRRDIVEMSDSGELCKGLADDVEVPMLSKLRRQLVGKGSHRRLVYSVDFGAHEGAMVNFLDHYDAHLVIFEKLPDGVFADPFELQHFVERKVFVDVAVFGDANLELPTALSNGSSVEIHFDLRRIISINCNLVIEMPLHARYPDGHQTMHA

SEQ ID NO: 59029 - protein, 772 aa, Zea Mays
MENRDSFTRPPAPSYAHGTQTAKGVAVPTGGDTAATNLTSSSGLSSSLTLSPPHFLQQIHAAVKRQRPFGPMQSKLPRATRVLVSGGERANKIGANPSVSKDQERIVTQPQRGMLGPSMLPNVTPDQQKVDSTSKLGSSAPDELMLTAPSMLKSTTDTCAQRVGQQKNKANLLMDTEKSAFDALSSQITSCNALMGESFKKGQLDSVVNPQLTSQSDNICITVDSRMDSMLSYLHSVSLTAGDNFPANQGAQNDHQKNHQELQTVDIAADMDIEYDASNLSRRGIQEARNQNHGKHMIPFSAIGSSVTAMSLHSGPTVQSSQTPQVGGYTSPVQIPESAVESSKGALGHGAQKEHAGATGVGDWNPHNQQVQNLGNGATDKAVSSIGRLRSEGLPANDQSTSARDGGGSRPNKGEKERRKKNYDPNVFFKVNGKLYQKLGKIGSGGSSEVHKVISSDCIIYALKKIKLRGRDYPTAYGFCQEIEYLNKLKGRSNIIQMIDYEVTDKSLLLESTVSPRDGRIKDDHYIYMVLEYGEIDLANMVAQKWKERNNSTMKIDENWLRFYWQQILEAVSTIHEERIVHSDLKPANFMLVRGSLKLIDFGIAKAIMNGTTNIQRDAQVGTLNYMSPEAFMCNDTDSDGNIIKCGLPSDIWSLGCILYQMVYGKTPFADYKTFWDKYKGVTDRNHKIMYEPVDNPWLIDLMQRCLAWDRNERWRTPQLLKHPFLNPPVPRDLPPSDDDPYRLLIERIRVHWDNPMVQKLRSLIEELDGDQ

SEQ ID NO: 59030 - protein, 1125 aa, Zea Mays
MMRGISGGQRKRVTTGEMLVGPARALFMDEISTGLDSSTTYQIVNSLRQTIHILGGTAVISLLQPAPETYNLFDDIILLSDGHVVYQGPREHVLEFFEFMGFRCPARKGVADFLQEVTSRKDQGQYWYRQDRPYRFVPVKKFADAFSIFHVGRSTQNELSEPFDRTRSHPAALATSKFGASRMELLKATIDRELLLMKRNAFMYIFKAVNLTVMSFIVMTTFFRTNMKRDASYGNIYMGALFFALDTIMFNGFAELAMTVMKLPVFFKQRDLFFFPAWAYTIPSWIVQIPITFLEVGVYVFTTYYVIGFDPNVFRFLKQYLLLLALNQMSSALFRFIAGIGRDMVVSHTFGPLALLAFQALGGFILARPDVKKWWIWGYWISPLSYAQNAISTNEFLGHSWSKIQNGTTVGIGVLQSRGVFTEAKWYWIGLGVLVGYALLFNLLYTVALAVLSPFTDSHGSMSEEELKEKHANLTGEVIEVRKEKTSRRQELELSHSVGQNSVHSSEDSSQNRKGMALPFPPLSLTFNDIRYSVDMPEAMKAQGVTEDRLLLLKGVSGSFRPGVLTALMGVSGAGKTTLMDVLAGRKTGGYIEGDITISGYPKKQETFARISGYCEQNDIHSPHVTVYESLLFSAWLRLPSGINLETRKMFIEEVMDLVELTSLRGALVGLPGVSGLSTEQRKRLTIAVELVANPSIIFMDEPTSGLDARAAAIVMRTVRNTVNTGRTVVCTIHQPSIDIFEAFDELFLMKRGGEEIYVGPVGQNSSKLIEYFEGIEGISQIKDGYNPATWMLEVSSSSQEEILGVDFSEIYRQSELYQRNKALIEELSTPPPGSSDLNFPTQYSRSFFTQCLACFWKQKKSYWRNPTYTAVRLLFTVVIALMFGTMFWDLGRKTNKQQDLFNAMGSMYAAVVYIGMQNSGSVQPVVVVERTVFYRERAAGMYSAFPYAFGQVAIEIPYIFVQTLLYGVLVYSMIGFEWTVAKFLWYLFFMYFTLLYFTFYGMMAVGLTPNETIAVITSSAFYNVWNLFSGYLIPRPKLPVWWRWYSWICPVAWTLYGLVASQFGDIAHPLEDSPTGQTVAQFITDYFGFHHDFLWVVAGVHVGLTVLFAFLFSFAIMKFNFQNR

SEQ ID NO: 59031 - protein, 53 aa, Zea Mays
MIEAIGNLPKQIGAACSGSHAGCLGWVRAGGVLRPPARVRIESSPICKAVPFI

SEQ ID NO: 59032 - protein, 736 aa, Zea Mays
MASISEDSGEETPLQVRLNGVATFIGMVGLSVALAVLVVLLARYFTGHTYNPDGSVQYVKGKMGVGQTIRGVVRIFTVAVTIVVVAVPEGLPLAVTLTLAFSMRKMMKDKALVRRLSACETMGSATTICSDKTGTLTLNQMTVVEAYFGGKKMDSPDNAQMLSADVTSLIVEGIAQNTSGSIFEPEGGQEPEVTGSPTEKAILSWGLKLGMKFNETRLKSSILHVFPFNSEKKRGGVAVHLDGPEVHIHWKGAAEIILDSCTSWLDTDGSKHSMTPEKIAEFKKFIEDMAVASLRCVAFAYITHEMDDVPNEDQRAEWKLPEDNLIMLGIVGIKDPCRPGVRDSVRLCQAAGIKVRMVTGDNLQTARAIALECGILDDPNVLEPVIIEGKAFRVLSDLEREEAAEKISVMGRSSPNDKLLLVKALRARGHVVAVTGDGTNDAPALHEADIGLSMGIQGTEVAKESSDIIILDDNFASVVRVVRWGRSVYANIQKFIQFQLTVNVAALIINVVAAVSSGNVPLNAVQLLWVNLIMDTLGALALATEPPTNHLMERPPVGRREPLITNIMWRNLIIMALFQVSVLLTLNFKGISLLQLKNDDPAHADKVKNTFIFNTFVLCQVFNEFNSRKPDELNIFKGISGNHLFIGIIAITVVLQALIVEFLGKFASTVRLSWQLWLVSIGLAFFGWPLAFVGKLIPVPKRPLGEFFACCCICKGSKQAPDDATSNDKEDNKPEP

SEQ ID NO: 59033 - protein, 95 aa, Zea Mays
MGHLAWADAFVITADSISMLSEAGSTGKPVYVIGTEHCKWKFSAFHKTLRERGVVRPFTGLEDISNSWSYPPLNDAIEVATRVREVIAERGWTVG

SEQ ID NO: 59034 - protein, 140 aa, Zea Mays
MCNCLVCIPVEGTRRFRIVRSWDQDGYRVAEVEWLKDIPLPEGSQGRRELMELANGASELARAYIRHARDTVRTARRTRHLDLEGMPGPQDPEKFSFWLANLISLRPSDRLDTLRLRDTRERISSSISLLRDSEQGCRVQ

SEQ ID NO: 59035 - protein, 695 aa, Zea Mays
MGSEEVLTVLSLESTAGLESVRCMSRTDLKLDGSFADMILIPDTGVPDKSRTSALFILTNPGQLNFYDGGSLFSVQNSKEGTPLPEAQKFPVAIPTLDPNITVTGLYSLTESEFPNISLKKFCARKNAGHFISENMKWPLTGGVPNEMSLDEDHAVERIYIAGYQDGSVRIWDATFPVLMPMFVLDGNVADVNLDGANASVSSLAFCSLSMTLAVGTTSGLVRIYKLREHTGGSSFHFVSEFKQEVHVVHHGKGFHCYVAFLSANSSVLSLLFMASGGLLAAGYQNGQVAMLDPSQLSILFTVDGASGTNSPVVSLGIYSVAASAAKADQSKKDNPQNATLSRDVLLSLTKDARVTVLDCTTESDETQTQLSEDKIPSQGQTGKDGNDLDKIQTQGIEKHLKNASQLSQNGGSDSLLVVCCEDVLLLLSLASLIQGSSKHLQKTKLAKPCCWSAVFKNMDDKVCGLILAYQTGTIEMRFGPDLAIVAETSLMSLLRWSYKTGMEKSTSSSNGQVTLVNGSEFAIISLMASENDLRIPESLPCLHDKVLAAAAEAAMSFSTDQRRKQNPAAGIIGGFIKGMKGKAEENAKMRESLTLRAPSEQLESIFSKEPFAEPSIPDLDDPMEELSIDDIEIDDEVAVALAQAASSTSQGNKRTAVEEERAKLFEGSNSADKPRMRTQQEILTKYRFGGVHCI

SEQ ID NO: 59036 - protein, 321 aa, Zea Mays
MKSCPGGNAVVIGGGYIGMECAAALVTNKIRVTMVFPEKHCMGRLFTPKIAEFYENYYTSKGVTFVKGTVLTSFEKDTTGKVTAVILKDGRHLPADMVVVGIGIRANTSLFEGQLMMSTENGGIKVNGQLQTSDSSVYAVGDVAAFPIKLFDDDIRRLEHVDSARRTGRHAVASILDPSKTRDIDYLPFFYSRVFTLSWQFYGDNVGEVVHFGDFTSSSPRFGAYWVNKGRIAGAFLEGGSREEYEAISIAVRREAVVTDMGELEKQGLALAIQESQKEVPDSGLAVVGKPTYAWHATAGVIAAVSIAAIGYWYGRKRRRW

SEQ ID NO: 59037 - protein, 198 aa, Zea Mays
MSADWHEMLSRREKATNFKPDYDIDIHMKVLAMSGQVSSILTGYKLKMIHGFTCSHFLLMVCAFVVFSDILKRVPDKLHVTKKAVLHVFPAALPQSLRLSCLCPRRQLSGLDVPFHAAPTSTHTPTVVTPCSSTRRSMVSQPVKTFFAITMYGTANSHFTSVVWKASTNSNALFLIAAAHNLLCLKLGKEIGVSIGNP

SEQ ID NO: 59038 - protein, 270 aa, Zea Mays
MLNVDEENYKEAVDSSYKVSVTPGINNEIRQIIDDDSAEVNSSSSDFWILVAALKEFIAKEGNGELPLEGTIPDMTSLTEYYVSLQKIYQAKAEFDCLALEHHVKEILKRIGRDPDSISRAYIKTFCKNSRKLRVSRYRSFEEEFSSPFVPEIQRYFTDEDYSYATNFYILLRAVDRLAANYSRLPGIFDRLKTVAASVASEMGLNGASLSEDLITEMCRFGGAEIHPVAAFVGGVASQEVIKLVTKQFVPLPGTFIFNGIDLKSQVLML

SEQ ID NO: 59039 - protein, 303 aa, Zea Mays
MCPLARALYVLMSLITVLIGFYDLYKNVPMLKATASRLFGPLFDWIETWEMISRLKYLGTMLFLHNFQQAFTWSLKIVGAAKSALSVLTKPIAGPILEVFELTMPIWNLCAETVGYLSSVVMLSVEVSWSVVIDTVEMIVWPFWFVFSTMVSIVNSILYPIIWLLGEILAAPFRLVIGLSSFVVDLFVDIINFLRGSWSTLSALYQVGSVPRSPVLTSDNNIWASLWKDLLYQIFRALRSILYGFVAFFSTCNRHRLSIYNHIQVFLRRISHVPAGARFTAYLDGTRKYSSQNHHKRRKAKTR

SEQ ID NO: 59040 - protein, 84 aa, Zea Mays
MDNASPRVTFSSSWPSVDISPFSESFVIDEGISLTTELPGDTETWNQESKIIPREITSKNHFPTHKIRYAEFFTCSDSILLNTM

SEQ ID NO: 59041 - protein, 233 aa, Zea Mays
MLSMDGTTEKESASSSNDDNGWDGFQSAQPVPSSEKKDSAKPAESKTQSTSGMEDLFKDSPAVPLSSAPAVSQVNAKNDIMSLFEKSNMVSPFAAHQQQLALMSQQQALLMAALKAGNAPQMMIPGTANQLNANGTLPFQNWTNLYQNPGSTPAAAQNGATKVANNNQDFSSGTFGFGTPGVYNISPTVPANGATTAGAINNGTASTASSTLPSQSGKDYDFSSLTQGFFTKR

SEQ ID NO: 59042 - protein, 85 aa, Zea Mays
MTRGPMTCIRCGEKGHRQASSKCPLNGTAKKRKWNQPRRNITKAKPRELCTPHRPTSEEILRDSPGRITRSRLAFLLGEGSSSQT

SEQ ID NO: 59043 - protein, 320 aa, Zea Mays
MGGDGGAAQGGERAAYRRCCRGAARGRGATAGRGWPEQQQRLERGCEACEGLVQRWPMRACGMPRGVKTHRQRQCRPLGALEWTSRLDRKLSKGSNENMDKRKLQPENNLSDGARPLISEGSDGPPSSSYAYEPSSSGQGFKSPETPDLTVSVKHPSKTEHVINSQRPGSSTSSTSERIAANSAASALGLSPSSSIGSLTSEKSTLNPNAKEFKLNPNAKSFTPSASLRPPHPASSDASYYYTNNIPAAPLGPGLPVGMGFPPAYGTQPVMYNAQPGASQQGYMHPVGLQYGQQMMMGGGQNRPVYYYAPEMQQYRGRNF

SEQ ID NO: 59044 - protein, 304 aa, Zea Mays
MAERLTRIAIVSEDKCKPKKCRQECKKSCPVVKTGKLCIEVTSASKLAFISEELCIGCGICVKKCPFDAIEIINLPKDLEKDTTHRYGPNTFKLHRLPVPRPGQVLGLVGTNGIGKSTALKVLAGKLKPNLGRFKNPPDWQEILTYFRGSELQNYFTRILEDNLKAIIKPQYVDHIPKAVQGNVGQVLEQKDERDMKAELCVDLELNQVIDRNVGDLSGGELQRFAIAVVAVQNAEIYMFDEPSSYLDVKQRLKAAQVIRSLLRPNRCLWCGYLAILGPRGYQYFLGWICSNRKSSVPRRISYI

SEQ ID NO: 59045 - protein, 668 aa, Zea Mays
MEELDPEKLGYIELWQLEALLLQRDTYMNYSRPLSTASGAQWSQNLGVGGALTITGGGGDGGCGVDGDHPGPPRERRRSWGVRKAAARVRVAAEENWRRAWVLALWFAAMAALFVWKFVQYRRMAAFQVMGYCLPTAKGAAETLKLNMALVLLPVCRNTLTWLRSSWARFFVPFDDNITFHKMIATAIVVGITLHAGNHLACDFPRVIAASPEEYALVAGAFGADKPTYAGLLSGTEGVTGVAMVVLMTVSFTLATHPFRKGEPKGAGAAAGTSRLPAPLNRLTGFNAFWYSHHLLGIVYALLLAHGYFLFLVRRWYEKTTWMYISVPLLLYVGERMLRALRSNAYTVKILKVCLLPGNVLTITMSKPYGFRYRSGQYIFLQCPIISPFEWHPFSITSAPGDDYLSVHIRTNGDWTQELKRIFVENYFSPHLNRRASFSELGAAEPRSLPKLLVDGPYGAPAQDFRNYDVLLLVGLGIGATPFISILRDLLNNIKIADELMDLAMETSRSEDSANSFSVSTASSNRKRAYRTSRAHFYWVTREAGSFEWFKGVMNEVAEMDKKGIIELHNYLTSVYEERDARTTLLSMVQALNHAKHGVDIVSGTRVRTHFARPNWKEVFTRIASKHPNSTVGVFYCGAPTLAKELKALAHEMSHRTGTRFHFHKEYF

SEQ ID NO: 59046 - protein, 154 aa, Zea Mays
MLVMDSWQYFVHRYMHQNKFLYRHIHSQHHRLIVPYAIGALYNHPLEGLLLDTLGGAISFLVSGMTPRTAMFFFCFAVLKTVDDHCGLWLPYNIFQHLFQNNTAYHDIHHQLQGTKYNYSQPFFSIWDRMLGTHMPYDLVSRKEGGFEARPSRD

SEQ ID NO: 59047 - protein, 228 aa, Zea Mays
MRIGVGRLRKGMTGVHQNGFVLQHQVILFCLGETFTELPPIYPLVDLPINTRASAADFGGSVPKPGLEVNLVDAVPCRIAFERGKERHFCFLAIAHGTSGWILLLEELPLKRERGIVRVMAPLAGSDPRIDTKHGKWLHLRIRPSSVPFLDTEKHKAKTKKYLVDGRWTLAFRDEQSCKVAESMVIEEMKLQRGAVAEQLKPLVEFDMPEDGMQHPQTSHETPSDDGS

SEQ ID NO: 59048 - protein, 133 aa, Zea Mays
MVRAYEYIDGVEDILCCLKKNNYEMHAFTNYPVWYQLIEDKLKLSKYLSWTFCSCRTGKRKPSPEFYLQAADQLNVDPASCVFIDDRMINIEAALSVGMVGLQFKSAEALQKDLCALGVELSPLVCEGEAQVQ

SEQ ID NO: 59049 - protein, 96 aa, Zea Mays
MSFDEDDTEESIDVKVQKALDCPCVADLKNGPCGGQFVDAFSCFLRSREEEKDCIKANPEAFSKEILEEEENDEEADKSNLKVRAPSWSRESKPKV

SEQ ID NO: 59050 - protein, 284 aa, Zea Mays
MKLALSDFGCLFLICIISIVDDTKLVNKIVIQELVKHLKQLIFDKNGRRPLLQLLHPFCSRYLSPNDLACLNYNVPSLSSTEVETSESAIGVITENKLDDVTAQDPNGLEGKQIVFESKKDPLQRRHELLIKSELAEALVQSCIENVGELLRTNFGKEVLYEMAVGGKDNVLDGLTDRIHMLHDAIASDAAQPKTEDTEHAFENFFSSRVIRRMVIDCPAFAVTLWRKALQGKCKIWAEGHSSKVVASFLESPSTEVKDLAKPELQPLVDAGILKVPDPKVVQK

SEQ ID NO: 59051 - protein, 560 aa, Zea Mays
MYKETVLPRILEQVVNCKDDLAQFYLMDCIIQVFPDEYHLQTLETLLSAFPQLQPSVDIKTVLSQLMDRLSNYAASSPELLPEFLQVEAFAKFSNAIGKVIEAQPDMPVVGAITLYVSLLTFTLRVHPDRLDYVDQVLGACVKKLSGKAKLEDSRATKQIVALLSAPLEKYSNIVTALELSNYPRVMDYLDNATTKVMAVVIIQSIMKNTTCISTSDKIEALFDLIKGLIKDMDGAQDDELDEEDFKEEQNSVARLIHMLHNDDPEEMLKILCTVQKHILQGGPKRLTFTVPSLVFSSLKLVRRLQGQDGDVTGEDVPATPKKIFQILHQTIEALSCVPSPELALRLYLQCAEAANDCDLEPVAYEFFTQAFILYEEEITDSKAQITAIHLIIGTLQRMNIFGVENRDTLTHKTTGYSAKLLKKPDQCRAVYACSHLFWTDDQDGIMDGERVLLCLKRALRIANAAQQMASATRGSSGSVTLFIEILNKYLYFFEKGIPQITNTVIQDLIELIRTEKQSDNSVADPSTEAFFSSTLRYIEFQKQKGGTIGEKYEQIKTSS

SEQ ID NO: 59052 - protein, 281 aa, Zea Mays
MVVCKCRKATRVYCFVHQVPVCGVCICFPEHQLCVVKNYAEWVVNSEYDWPQHCSSCNSVLEGGTEETTRLGCLHVVHTKCLISHIQSFPTQTAPDGYVCPSCSAPIWPPSSIKDTGSRLHTELKEAIVQTGMEKNVFGNHYVTIAKADTQTPPAFASDPLKTLSNRDDREFNSANAAKDAALPSTLHSGMYSSAVGSETTIHVDPEIVEIEGSSPVSTQFSVQDSNFIRSPSPHGPGAMTRKGANTVDRQNSEISYYADDEDGNRKKYTKRGMSCFTNCA

SEQ ID NO: 59053 - protein, 484 aa, Zea Mays
MGEPKPPRPTQSSRPATLTMPRRAGAAWPCFLLLHIIAHLHLAVNAADADALLTFKSSLDRSDRLPWRPDTAPAFCASWPGVRQCAPAGRVTKLVLEGLNLTGSLTAALLAPLAELRVLSLKSNALTGPIPEALPRALPNLKLLYLADNRLQGRVPATLAMLHRATVIVLSGNRLTGQIPPSLAALPRLTSLLLDRNLLTGAVPPLAQRTLRALNVSANRLSGEIPRSLAARFNASSFLPNAGLCGAPLAVRCVAGGPSPAPLTAATAAFAPLPPPRTKARRGKNAAVVAGATVAGVVVLAILVAAALMASRRGRNKRVAGDVDKGNAGTVAAEAEHQTAQAQQQHIHASSAAPAATTAGGVGGREFSWEREGIGKLVFCGGVAEMYSLEELLRASAETLGRGEVGSTYKAVMETGFIVTVKRMRDPSAGGVGAAEFGRRAEELGRVRHPNAVALRAYFQAKEERLLVYDYYPNGSLFSLVHGQ

SEQ ID NO: 59054 - protein, 1022 aa, Zea Mays
MDIGGSGGIILSPGSEDDKFARRRSRRVSFADTTAVHVFDRDEDFETPPEEREPDSTPAPPSPRRSSVGREVEDDTEEDFNRPPVIFLHDVDSSYPDSAAESIASADDENFFGPVSASFIQTGRPSDSGMSEDDNHDITMDSRTFSLHFRNIAPPDDCTAYSAGSLMTPNTASEGPLKELTASNPARASINGRDTLTDMSLLSGNPRTYGYDKLSPTLNSMMKKIKGSKQTNSPKLEHISMRNPVSTSTDLIQDDNEMIIDVQENSKNCNHDHMDDDPGANNTAEPPAKISPAYKSFMINGDVQSHLVDQSSSKDRPSGSNCTASVSSMCNVDMETHLLDQLPGKDNTYAAQSSSEATAILLMDAEQLRQKNEVMDTETVLHTPRTAGLQLQVPRGSISSLRSKRHKLFTNTVSNSKVARQEGCSSGTEFVHHDKRLSSLKHQELAAASQLQLVEKNELGHRASDMFSNTEDHDSTLSVSSHSVPKLKKTNESFVLGTPRRHGLNESTKVLDTLCHAFTLDSQPSRECNSHVDLNGVGRKRTAEENGYAVQECPEKTTKTARSPRKSRKEIPCVSQPSMIEEKQNGAHDNGKSVDIDWSKVVCTITNATEQVLPASISKYNLQQLDMLSDRLDEIHMARKYKRLSTAVRIKAFCGDKQKRLEEARFLHDKLFYEKAKLQINNMKLVKLQKKAQLCQDGIQECCFLKSKILGAGHMEDSSLPAATTVSAGDRQEELDIISEKRLELKIIQRKVEKLRSSLECFHNIEGGIGSDSVVRYAEEQLMMRNQHRIIHWQAGLCKLNDIVKRGNKCDIILNYHNLLFQRIILNISDTSSIFVNNSLNGNQIGKTFPNLDASLAFNFVFEAEENQRVSDLQSLQKKTMETSLLLGNLIDVLEEIKLSKLELVNLTSAAFVLESQTRKLGLHLSFMSFKSGKKIAFIIDMTDLNRSVYPSEPSELIKVFEAHTTLAQPSIDETMASIRNLQSGRTAILRLCRMVSRLIHGYNDDLITGVQAVGSKHHPDM

SEQ ID NO: 59055 - protein, 861 aa, Zea Mays
MYLNGHKEVLPKGMFRRHNIDITDILHPDGNNLLAVLVHPPDHPGKIPPQGGQGGDHEIGKDVATQYVEGWDWMCPIRDRNTGIWDEVSISISGPVNITDPHLVSTFHDDFKRSYLHCTLQLENKSSWIADCTLKIQVSTELEGNICLVEHLQSYAITVPPQSDIEYTIPSLFFYKPNLWWPNGMGKQSLYNIEISVDVKGFGESDSWSHYFGFRKIESTIDDSTGGRIFKVNGEPIFIRGGNWILSDGLLRLTKKRYMTDIKFHADMNFNMLRCWGGGLAERPDFYHFCDVYGLMVWQEFWITGDVDGRGIPVSNPNGPLDHDLFLLCARDTVKLLRNHASLALWVGGNEQVPPVDINKALKNDLKLHPMFVSYQTSKSEVIYLSEESTDPSKYLDGTRVYVQGSMWDGFANGKGDFTDGPYEIQYPESFFKDSFYKYGFNPEVGSVGVPVAATIRATMPPVGWSIPILKKRIDGYIEEVPNPIWDYHKYIPYSKPGKVHDQIELYGAPKDLDDFCEKAQLVNYVQYRALLEGWTSFMWTKFTGVLIWKTQNPWTGLRGQFYDHLQDQTAGFYGCRCAAQPIHVQLNLVTYFVEVVNTTADELKDMAVEISVWDLDGACPYYKVTEKIVIPPKKVKQIIEMKYPKMKDAKPVYFLLLKLFRLSDNGTISRNFYWLHLPGQDYKSLEQYQQKKIPLKIDSDVSVSGTRHKVRMTVENISKKSVVDSTRSVSAMDLGDASGSHSTRKETTRKGNGSDGLWRKIRSGLGVARPSDNRRTLEVSGTDSGVAFFLHFSVHTSESSTDGEEYNDTRILPVHYSDNYFSLTPGENMAVDISFEAPQGSSPRVVLRGWNHHLDHAVMI

SEQ ID NO: 59056 - protein, 364 aa, Zea Mays
MCGFINRPNMITLTGFSFLVLSALLGYICSPHLDTAPPRWVHLAHGLLLFLYQTFDAVDGKQARRTSSSSPLGELFDHGCDALACAFEALALGSTLMCGGWTLCFWVVAAVPFYLATWEHFFTNTLILPTINGPTEGLMLIYVSHLFTFFTGAEWWAQDFRKSLPFFGWIPLPFLSEIEIPLYVLVLILMIVCAVIPTVRSNVSNVQEVVEARKGSMALALAMFGFATLLLETILPFIVLLAGVAIWCYLSPSSIMRNQPHLLVIGTGFNFGYLVGRMILAHLCDEPKGLKSGMFMSLVFLCFPIANALIAKINDGSPLVDELVLLLLYCAYTVGLYLHLAVSVVHEIKDALGIYCFRITRKEA

SEQ ID NO: 59057 - protein, 888 aa, Zea Mays
MTGEQIQAPSSPRDGEDVAITIGRPKESGPKFGTMMGVFVPCLQNILGIIYYIRFTWIVGMSGVWQSLVLVSFCGACTFLTSISLSAIATNGAMKGGGPYYLIGRALGPEVGVSIGLCFFLGNAVAGSMYVLGAVETFLDAVPSAGLFQKSVTVVNNTLVNGTETAGTSTISTPSLHDLQVYGVIVTILLCFIVFGGVKIINKVAPAFLIPVLFSLLCIYLGVFIAPRHNAPKGITGLSITTLKDNWGENYQRTNNAGVPDPSGSIYWDFNALVGLFFPAVTGIMAGSNRSASLKDTQRSIPIGTLSATLSTTAMYLFSVLLFGALATREELLTDRLLTATVAWPAPAVIYIGIILSTLGAALQSLTGAPRLLAAIANDDILPVLNYFKVSEGSEPHAATLFTAFICICCVVIGNLDLITPTITMFFLLCYAGVNLSCFLLDLLDAPSWRPRWKFHHWSLSLVGALLCVVIMFLISWSFTVVSLALASLIYYYVSIKGKAGDWGDGFKSAYFQLALRSLRSLGANQVHPKNWYPIPLVFCRPWGKLPENVPCHPKLADFANCMKKKGRGMSIFVSIIDGDYHELAEDAKTACRQLDAYIDYKRCEGVAEIIVAPNMSDGFRSIVQTMGLGNLKPNIVVMRYPEIWRRENLTQIPSTFVSIINDCIIANKAVVIVKGLDEWPNEYQRQYGTIDLYWIVRDGGLMLLLSQLLLTKESFESCKIQVFCISEEDTDAEELKADVKKFLYDLRMQAEVIVVTMKSWESHMESSSNGAQQDNSHEAYTSAQQRIRTYLDEMKETAQTERQLLMENGRQVVNEQKVDKFLYTMFKLNSTILRYSRMAAVVLVSLPPPPLYHPSYFYMEYMDLLVENVPRMLIVRGYTRDVVTFFT

SEQ ID NO: 59058 - protein, 198 aa, Zea Mays
MAMDAAVAVKSGGGGAGSTGVTAAASQSPQAATNGGERRSRFQRICVYCGSAKGRKPSYQDAAVELGKELVERGIDLVYGGGSIGLMGLVSHAVHDGGRHVIGVIPRSLMPREVTGEPVGEVRAVSGMHERKAEMARFADAFIALPGGYGTLEELLEVITWAQLGIHKKPVINPPDNWAIMCAAQNSFFLFLSLLAIL

SEQ ID NO: 59059 - protein, 221 aa, Zea Mays
MTSVYGVTYIGAREQIRRRLKERGVIPNDSELFGASCYAAKVTLTALGEMFQAARSIMNWLGDCAKVIACENEPVRWTTPLGLPVVQPYRKLGRHLIKTSLQVLTLQRETDKVMVKRQRTAFPPNFVHSLDGSHMMMTAVACKRQGLNFAGVHDSYWTHASDVDTMNKILREKFVELYDTPILENLLESFEKSFPKLKFPPLPERGDFDMKEVLESTYFFN

SEQ ID NO: 59060 - protein, 263 aa, Zea Mays
MVQNSRTPGTLVHGGDHPDHAPITIGRVIAGLEYSRPFRPKWSGTLGLIFQHAGARDDKGNPVIRDFYNSQLTASGHDYDDTLLAKFESIYTDSGDHSSTMFVFNIEQGLPVLPEWLSFNRLTARLRQGYEIGPARLLLSASGGHMEGNFPPHEAFAIGGTNSVRGYEEGAVGSGRSYAVGSGEVSCRMFGPLEGVVFGDYGSDLGSGPKVPGDPAGARGKPGSGFGYGVGVRVDSPLGPLRLEYAFNDRQASRFHFGVGYRN

SEQ ID NO: 59061 - protein, 147 aa, Zea Mays
MHSGCTFNHRYVKSNPREVENATWMLTVFHCFGQYFCLHFEAFQLGLAPVYMAFLRFMGDENDSRNYSYSLEVGANGRKMIWEGTPRSIRDSHRKVRDSHDGLIIQRNMALFFSGGDRKELKLRVTGRIWKEQQNPDSGACIPNLFS

SEQ ID NO: 59062 - protein, 442 aa, Zea Mays
MLDIVECKRLKQEGQIVTKEDNHTSAEDFHEYPTYTTCRRSFDSPLSESEDSEDEGVDSPLHFSHAHTYVEDDLWPASFHHALGPFPLRKPVPIGPNHQAELPECRPFCGRTEEGESVKWIRNGVVPMPDTGASSLVLEPVHCKADCECHDEGSIICVKKHVREAREKLKGSVGADTFRELGLNDMGEEVGSRWTEEEEHLFQQVVLSNPASLCRNFWDELPLAFPSKSSKELVSYYFNVFMLRKRAEQNRFDPVNIDSDDDEWQAGDDGEYPITGRTDEYLPTESLTDQDDVACNPVPLERDLYEDSDDEDELDNASGDRHNGAQRAGMLSEGNRVMSVIEHNQQTFKLDAEAQDDSCTSFEAHQVGVEGGTHTDIADDNHYRSDGFGGGAEHGFFGNQCDTKEWDFGLSIGWEKHDFLSTNNVIEEVFGKCCDTADQDLI

SEQ ID NO: 59063 - protein, 605 aa, Zea Mays
MDQYEVLEQIGKGAFGSALLVRHKLERKKYVLKKIRLARQTDRTRRSAHQEMQLIANVRNPFIVEHKDSWVDKGCYVCIVIGYCEGGDMAEAIKRANDTHFSEEKLCQWLVQLLMALDYLHAHHILHRDVKCSNIFLTRDQNIRLGDFGLAKILTADDLAFSIVGTPSYMCPELLADIPYGTKSDIWSLGCCMYEMAALKPAFRAFDMQNLINKITKSIVSPLPTRYSGAFRRLVRSMLRRSPEHRPSAAELLKHPHLQPYVLQLHLKSHLSRSIVPVHQSPSEKRMTFAAEPVCRSKGRRNSLGSERMIAAFSKPSPDRSSVSSIRSVKDDYTATQSVRELSVDESMVEVASKPVASRTSDVMRTPKATPWKMMTTLRNRLEAPQASYDRTSHTEFSRTPVDKRNSRVARRASLPLPVFETPKQRSSMSVLERLESPDVSVNSPRIDRIAEFPLASCEDPLFSTVKPPTPASASASATPPFVDRSITKDKCTAQTLRSAAHDGGNGRSEDGGGLSSGRTTTTAASSGGTSGSLQPKGRFDTTSYQQRAEALEGLLEFSAQLLQQERYEELGVLLRPFGPDEMVSPRETAIWLTKSFKEAMATGL

SEQ ID NO: 59064 - protein, 173 aa, Zea Mays
MEWNINGVRGLMLDTYDFDNDVWLCHSFQGKCYNFTAFQPAINVFKEIQTFLDANPSQVVTIFLEDYTAVGSLPRVFNASGLTKYWFPVAKMPKSGGDWPLLKDMISQNQRLLVFTSKRAKEASEGIAYEWNYVVENQYGDEGMVAGKCPQPRRVSGHGFQRPVACPDELLHD

SEQ ID NO: 59065 - protein, 814 aa, Zea Mays
MSVDFHPFGEFFASGSLDTNLKIWDIRRKNCIHTYKGHTRGVNTIRFTPDGRWVVSGGEDNIVKLWDLTAGKLLHEFKCHEGQIQCIDFHPHEFLLATGSADKTVKFWDLETFELIGSTGPETTGVRSMTFNPDGRSLLCGLHESLKVFSWEPIRCHDTVDVGWSRLADLNVHEGKLLGCSFNQSCVGIWVVDLTRLEPYTMGTSTKVNGHSELKTVSSGTLPLQNDSGSRANIGRSSVLQNTENNLKTTSGRLSASQNSDSAPKETNSAPSSGLIPSTPHRAGVGSHNRSVGNSAFQSGGTTLKRSSLRNNSASNVHNFSKADVVPVIVPRTSSGGELATDSRSDAADVAPVLPKVTRRVEPATDSRKESNDVELVVPRASSRMEIADLAPISSSKSGRRLESAPDSKEESADTAPVVVSNPRANVRMEIVSDSAPALSKSNRKLDSGTNSKKESADAVIVPRTNSRMEMISDSRREPSAGRISPFRIQSRYAEPRKLAHARTDSNKVDSRSKITETEDFNCQIFLPRRNSVFQTISSEEPREDVKCGPVDRVGFSNSSEPNASVRNENYVPRMRKPGDNCYIEVSRAGRARSSVSNWEGRDQPPSHEEPTTSSSTLAPTGHPYSSRGSNQASEAPIIASDEDVLSLIMERHDLFLSSTKSRLMKLQIIHQMWERNDIRGVLSAMDRMGDHAVCADMASVLMEKSETITLDLCTSILPVVTDLLESKIDRHLVVALELLVKLVRTFGPMIHSTVSSGPCVGVDLEAEQRRERCNLCFIELEKAKNKLPSLTRRKGAVANAAQELALVFQEIMS

SEQ ID NO: 59066 - protein, 498 aa, Zea Mays
MLEDGIKRDPLNAGKLKLFASVDVAQETTSFVLHFTKPPKVTLPYRIENYLSESSILYFQKDSVDSDVLHPQESEQYAWDDLSSPRKLVVRIVDTPALREIKIDKISPWKPFLKMRQNSRLNLDFSFSGGLNSRKQRFDESFGLRVFKIGYEVYADGLTRVLRICEHADNPKIEKIQWPIANIQFRISYVCIHLLDKDQNGENVQLPSTILAARLQHVSSDSVVTNRFKQVSVAIHSLNVDEKWEGASIGTILRRNKLQDATLDENILRMIFVLNSTDSSVKQIQYCAIILQPVDLKIDEETLMKLVPFWRASLAPSGTTSTQFYFRRFEVHPIKIIASFRPGGRRTTYSSAQEALRALLHSVIKVPEISNSAVELNGVLLNHALVTFRELLLKCAQHYSWYVLRAIYVTKGSKLLPPSFASIFDDSASSVLDVFFDPSDGSLNVPGLTIGMFKFISKNMKSGGFSGTKRLKLQVRTLSLLLSQKFQIVLLEERKQMV

SEQ ID NO: 59067 - protein, 211 aa, Zea Mays
MQPPQSNDPNQQGAQAVTKFLPLLIGYFALSVPSGLRLYWLTNNILSTAQQVWLQKLGGAKNPVKEYIDKLSREETTTVQKNDSTVQSEPLSKHSKPQPSQEPKPSGPQRGERFRKLKEEESMRKEVMGQGKQSEQSSSESRVTDGTQNSDVSSGDQKDQQGSHENGPVVASINGGVNHIRNEKTQNLSSEKLKIDGIRVERDENCCTARR

SEQ ID NO: 59068 - protein, 861 aa, Zea Mays
MAAAAVAAAGSSNVEFIRARSDKREYRRVVLANALEILLISDPDTDKAAACMEVEVGSFSDPEGLEGLAHFLEHMLFYASEKYPGEHEYTKYIIEHGGSYNAYTSSETTNFFFDVNVDNFEEALDRFAQFFIKPLMSQDAVLREIKAVDSEHKKNLLSDGWRMYQLQKHFASKDHPYHKFSTGSWETLETKPKARGLDIRLELLKFYKNYSANVMHLVVYGKENLDCIQGLVERMFSDIKNTDQRSLKCPSHPLSEEHLQLLVKALPIVEGDYLRIIWPITPSIQFYKEAPCHYLSHLIGHEGEGSIFHIIKELGWAMNLMAGECSDSNEYSFFSVSMRLTDAGHERMEDIVGLIFKYLHLLKEDGVHEWIFNELAAINEMEFHYQDKVRPINYVMRTVSTMRLFPPEEWLVGAALPSKYASQRINMILNQLIPETVRIFWESKKFEGSTSSAEPWYNTPFSVENVTPSVIQEWIEKAPTEKLHLPKPNIFIPKDLSLKEVHEKVTFPTVLRKSPLSQLWYKPDMLFSTPKVHIIIDFHCPLSSHSPEAVVATELFVDLLVDYLNAYAYDAQIAGLFYSIYVTSAGFQVSLGGYNDKMRVLLNAILVQIVKFEVKPNRFSALKETSVKDYQNFNFRQPYSQASYYVSLILGDKKWPVAEKLEALSKLESDYFAKFVPHLLSKTFLECYVQGNIEPSEAKSIVEEIENTIFTTPNSLFKSMSPSEYLIKRVIMLENDLKCYYQTEGLNQKNENSSVIQYIQVHQDDAILNIKLELFSLIAKQPAFNQLRTVEQLGYITSLSLRSDYGVLALQVVIQSTVKDPSYLDVRVDEFFKMFESKIYELSDKDFKDLLDQKDGKLWVK

SEQ ID NO: 59069 - protein, 63 aa, Zea Mays
MPVVKIGYPHAPNWLPRWLPTIRMVYNRTPAQETLISPWNRHFCILLSATTDRLPDCNPGRSC

SEQ ID NO: 59070 - protein, 571 aa, Zea Mays
MARTPADAGSGPHADSAPLHPERISSCRARSSPNRHPPRVQGALPAGVARRREVPEPRAPPPIKLQPFSPGSRIPLAARALSVSSPPPHKKPLNCSVGVMCGILAVLGCSDCSQARRARILACSRRLKHRGPDWSGLYQHEGNFLAQQRLAIVSPLSGDQPLFNEDRTVVVVANGEIYNHKNVRKQFTGAHSFSTGSDCEVIIPLYEKYGENFVDMLDGVFAFVLYDTRDRTYVAARDAIGVNPLYIGWGSDGSVWMSSEMKALNEDCVRFEIFPPGHLYSSAAGGFRRWYTPHWFQEQVPRTPYQPLVLREAFEKAVIKRLMTDVPFGVLLSGGLDSSLVASVTKRHLVKTDAAGKFGTELHSFVVGLEGSPDLKAAREVADYLGTTHHEFHFTVQDGIDAIEEVIYHDETYDVTTIRASTPMFLMARKIKSLGVKMVLSGEGSDELLGGYLYFHFAPNREELHRETCRKVKALHQYDCLRANKATSAWGLEVRVPFLDKEFVDVAMGMDPEWKMYDKNLGRIEKWVLRKAFDDEEHPYLPEHILYRQKEQFSDGVGYNWIDGLKAFTEQ

SEQ ID NO: 59071 - protein, 375 aa, Zea Mays
MPACEDDFFEYLRSIDCSDVEVYAIPEGYAVFPKVPLMRIEGPVAVVQLLETPFLSLVNYASLVTTNAARHRLVAGKSKNLLEFGLRRAQGPDGGISASRYCYMGGFDATSNVAAGRLFGIPIRGTHSHAFVSSFMGLDEITDKTLTSSDGSNTCEDFISLVQNWLIRIQDSSSLHGTFGETSQSELAAFTSYALAFPNSFLALVDTYDVMRSGVPNFCAVALALNDMGYKAVGIRLDSGDLAYLSVEARKFFHAVEKEFVVVGFGKTSITASNDLNEETIDALNKQGHEVDAFGIGTYLVTCYAQAALGCVFKLVEINKQPRIKLSEDVMKVSIPCKKKCYRLYGKEGYPLVDIMTGEDEPGPKMVGFMIYHSF

SEQ ID NO: 59072 - protein, 449 aa, Zea Mays
MAGKGKEVYVAAIDQGTTSTRFIVYDRHAKPVASHQLEFKQHYPEAGRLENELSGGRTHFVETCGLPISTYFSALKLLWLMENVDAVKDAVRTGDALFGTIDTWLIWNLTGGVAGGQHVTDCSNASRTMLMNLKTLDWDKPTLAVLGVPVEILPKIISNSEKIGVVAKEFPFAGVPISGCLGDQHAAMLGQLCQKGEAKSTYGTGAFILLNTGEEPTQSSHGLLSTIAYKLGPAAPTNYALEGSIAIAGAAVQWLRDSLGIIQSAAEIEKLAETVPDSGGVYFVPAFNGLFAPWWRDDARGICIGITRFTNKGHIARAVLESMCFQVNDVLSSMHKDAGEAGEVKSAEGEFLLRVDGGATVNNLLMQIQADLLGSPVVRPADIETTALGAAYAAGLAAGVWTKEKVFAGLHKENTTVFRPKLDEAHRKKRADSWYKAVSRSFDLADLSL

SEQ ID NO: 59073 - protein, 924 aa, Zea Mays
MVLSIPEYNYAIGFSPLMDYNSQLLPHHHYDNGQRITVVVGNIPSSDSSGRLILLPKASAQYSSLSDSKRAKKKSGYKIGSLVEAEIIDIKPLELLLKFGGNLHGRIHITEILEEDSAEHPFSELRIGQKLTARIVSEAEPSGKSGKKFKWELSIRPCIVNGEFAQKEQNHTTNGIVRAYVVKVDKEWVWLTVSRNVMAHLFLLDSSSEPSELKEFQQRFSVGQAVKGRVISVNQEKRLLRLKALDNQCTQPNIDETQEPKSSVFGQTKQGDIIGGRVQKILPGVGGLVVQIGPHLHGRVHYTEIVDSWVSEPLSGFHEGQFVKCKVLSVSRSSEGSLRVDLSLRSSNLIRDSNNSRLDDLETCTSRIEKIKDLLPGTEIKGYVKNVNSKGCFIMLSRMVDARITLSNLSDEYVENPQKDFPVGMLVHGRILSTDPSSGRVEASLRKTTGSKLEKLDDISYSDLHVGDIVDGQVKRVESFGLFVTIRRSELVGLCHVSELSDEPVVDINSCYKAGDMVKAKILKIDETRHRVSLGMKKSYFDSDLTADTNDDESALMDISVAPQMVEYHNRNLVHRKAEPRASVLPLQVSLDESEGSDLEDNISNTCLEIANGTEANAKKSDKQLKKEARKQRELEISAMEERALQEDIPQTPDDFEKLVRSSPNSSFIWIKYMATLLDLADVEKARAVAERALKTIIPREEEEKLNVWVAYFNLENEYGSPREDAVKKVFQRALQYCDPKKLHLALLAMYERTEQYELADELLDRMTKRFKTSCKIWLCRIQFALKQGKDVEYIKAIVNRALLSLPHRKRIKFLSQTAILEFKCGVPEEGRSRFELILREYPKRTDLWSVYLDQEIRLGDVEVIRALFERVTCLTLPPKKMQFLFKKYLNFEKSLGKDNERIQLVQQKAIEYVQSSLPSQDNS

SEQ ID NO: 59074 - protein, 264 aa, Zea Mays
MKHRDKVLVVERVIDSLDLQGTRNSLVGTVEKRGISGGQRKRVNVGIEMVMEPSLLILDEPTSGLDSSSSQLLLRALRHEALEGVNVCAVVHQPSYTLYNMFDDLMLLAKGGLVVYNGPVKTVEEYFTTTLGIHVPDRVNPPDHYIDILEGIVKPESAGIIKAKHLPVHWMLHNGYEVPSDMQDDAKEIGEQTPQLRSGSSVSAGSTPHCLPLRNAFAEERDRLEQHLSKPKDLSSRKTAGILMQYKYYLGSGCVKLGCSWLIS

SEQ ID NO: 59075 - protein, 859 aa, Zea Mays
MEPSGSDKPTATDANESVVGLDGEDTLSERESVGAKDGPALPNGSGKEAHASSPSAANKRKHNDLGSNQMELNEPGTPSSSSGDSTWSINGLDDCHQLSLSRNKNDDSEHSVTSAGVTVIRQPRGVLRLRKLAQNVSTESWTGGHNTSQANGVPRSSQHPRRNNKRESIPSQENRVSGDEPVSCLRTENGTCDQDTGTKFCSKTEFLAEKQSHLSGEPPKAVHVDKGVYDYVKDDDGDSLEENAAWMLCSLSDNKCAGSPRKGTDRLSKRSFSQNSNHFKNSYEKIKDICSPARLLRKRDGKVPFLKRRQRRHFYEVSPSDVDPFCIVKERIRVFWPLDETWYFGMVKEYNPVTRLHHVRYDGKDEEWINLQNERIKLLFLPAEAPNKSKCTNSRSAFESKHEQGDREDMHRSGSNTESFESGPISSWLARSNQAKSAALCDINKQDHSHSNTVPVSFDQKQCRASDAKESIDSAPCSSLANGGVEVLKDRTIPEDGRFHFVYSRKRFCRKKNDFLSISEQHSNCQRRASSMVLASCPDMKSSIATGASVTYVIPALSLPLKPVYKLLCEACCVSVSNAFFLLQCGTMVALWPVVHLDILLIDSALGLKRFLLDTCMRSAVSLFCLLAGSFKQCSRQRTTKESRIPCTSVRFQISGGHGRSQVVFMFFSFVGVEKWKWEHLQGKLQYQCSKRELSKDSTKCTGRRALPSMGLFSKGFDVQESVFLPESNYSDIKPAICCLDDRCKFTQSFLDMTTAPSVLLWHHRKMLMESNSTNGSQQSMSCALDEDHQQLVTEHASDTVCHAPLQVCSLNLGSSPYSPLDMVSASCANPSSSTSREPKITERNISPECNDNSIDDAI

SEQ ID NO: 59076 - protein, 348 aa, Zea Mays
MKTLSDLDAIDVRTHGFSRDGIPEAGDTVRIDVFGGFVLQRITKERSFFRAIANMDIKLDFVPPWLINFMSRQLIGSGHKLYQKAVSTVASHDDDYRKALRGPLYVRIREYQDSDDKAKVAATEENATEAPPDNATTQNRLSLTNTVSNSEIVEESEQNTSVTVDSLPTSQQPYVPVEQAWQVGNRPYTSPEVERALCILDTSIALLRGDDKAGNVTTLQNLLSYDASLEASTAAGSVTCQTNVLNADSLPNGHPVAAAPQDSREKASDSAAEEEDAGDENSLKNPTASTVTKSVSMTLRSAIRVHGEESLDTDGFFHQNGFSNSKESRRARKSKKRWPCCLIPTTMG

SEQ ID NO: 59077 - protein, 153 aa, Zea Mays
MHGGLSPEWTSLDQIKDIERPAEIPDYGLLCDLLWSDPSPDGEGWGESDRGVSCTFGADKLVEFLEKNDLDLICRAHQVVEDGYEFFAQRRLVTIFSAPNYCGEFDNAGALLSIDESLMCSFQILKPTDMGPPHARKQIPNKVYDLKASKLIT

SEQ ID NO: 59078 - protein, 148 aa, Zea Mays
MGGKVSCMITHGPWVLIGIPKFVEALNTKTGMKLRFQGPSSLVCSMAITNEMLFAGTGDGRIMAWRFPAKDSNTEPVLILSGHQRPVISLSILARRLYSGSLDKSIKAWDLTTRQCVQTLSEHKASVTSVLCWDEKLLSCSLDKTVKL

SEQ ID NO: 59079 - protein, 63 aa, Zea Mays
MILLPNHSRAPTNKRAGLQNYCPQRSCIRRGRQVVFSTRSSARNKRSFKSKRKYPMYKMTWPS

SEQ ID NO: 59080 - protein, 913 aa, Zea Mays
MEESGGSCGKREDAAPPWRPSDSTAFGRFAAAASPPEASPSASANGAAARVSSLHGVRRKPSVARLTAGIIQTYLQCDPEFKYSEVLNPKRFLTNPSTPAHNDGLDNANWDLILYVNLELVNKMSNRRFIVKEMLGQGTFGQVVKCWDTETNDYVAVKVIKNQPAFYHQAIMEVSLLRTKFDPDDQHNIVRMLDYLSFQNHLCIAFEMLGQNLYELLKRNHLRGLKLKYVQAFSKQILDAMVVMREAGIIHCDLKPENILLAPSVTTAAEVKVIDFGSACLEGKTVYSYIQSRYYRSPEVLLGYPYTTAIDMWSFGCIVAELFLGLPLFPGASEYDVLQRMMKILGGQPPDELLREAKNTARFFKHVGSIYPGNEAPTGLCSAYKSLSEEDVEVRDSKKPQMGKWYFPHLKLDKLICTYPWNNSELTETEKMDRLGLVDFLKGLLEFDPNKRWSPLQALYHPFITGKSFTGPYEPVPETTRIPVVRAAAIDHNPGGGHWLHSGLSPQVGSVNRYLPSNNAYPPKVPFSYGSSYGSFGSHGSYTANAGFGNSYGSIGDVNAINMYYSPLSSSGLTQIGSSPDVRLRMLLPHDRGIRLSPGSLGPMSLGASPSQFTPPNYQMQIPANSVGKHGSGSPASGGIHGSPLGKSAGVGPYNMRRNLPMPPHDYVSQHGHGRCGDGVSFSHFDACARGHTGHSHSAAGPSSYHSGWRPQIGSRSGISLEASSSHVLSQAPSQSFDFSPSSALDPANWDPNYSDESLLQDNSLSAELSSNLHFGDATGQGSGSIRSANFQGHVFATSNPVPTNQRADQLFHVSSQGLSAHSSVPVNYGGYNPPNYPPQNLRPRRGQPILHQRYNQATSSPMRPMGSHHSGQPAWPSFGMGDGVPWGGTGGHSFTTSGLSSSLARKDYGSIF

SEQ ID NO: 59081 - protein, 546 aa, Zea Mays
MFYRHITASQDSDMPRYLLNLIDTPGHVDFSYEVSRSLAACQGALLVVDAAQGVQAQTIANFYLAFESNLSIIPVINKIDQPTADPDNVKDQLKRLFDIDPSEALLTSAKTGRGLEQVLPAVIERIPSPPGKCDAPVRMLLLDSYYDEYRGVICHVAVVDGALRKGDKIASAATSRAYEVLDVGIMHPELTPTGVLYTGQVGYVISGMRSTKEARIGDTLHQAKSTVEPLPGFKPVKHMVFSGLYPADGSDFEALSHAIEKLTCNDASVSVTKETSNALGMGFRCGFLGLLHMDVFHQRLEQEYGAQVISTIPTVPYIFEYGDGSKVQVENPAALASNPGKRVAACWEPTVIATIIIPSEYVGPVIMLCSERRGEQLEYTFIDAQRALLKYRLPLKEIIVDFYNELKGITSGYATFDYEDSEYQQADLVKMDILLNGQPVDAMATIVHNQKAQRVGKDLVEKLKKFIERQMFEITIQAAIGSKVIARETLSAMRKNVLAKCYGGDITRKKKLLEKQKEGKKRMKRVGSVDIPQEAFHELLKVSNSK

SEQ ID NO: 59082 - protein, 697 aa, Zea Mays
MGTLPYLLLVVLSSLSLVPRAAAYSEYSCNGTTGNFTAASAFGANLARLVAALPANASSSPSLFASAAVGAAPDTAYGLALCRGDVTDAGVCSACLADAFGRLRRLCGADRDATFYADLCTARYSGGDFLARPDDNSPVINALDVNGSTYYGWDARNATSRTLFLSLVGTLFGEMAMYAAYNSSAARMFASAAMYVNPQLPTVYGFVQCTPDLSRAQCWDCFQVLQDQNRRWYDGREGGRILGVRCSFRYEAYHFFGGMPEVRIGLKGDPSSPAAETEIHGSNHRVVLIVAVIVSITAFSAMMAAGLVIIRARRRKGAEKKRKLQLEAQSRNSSTTEDALKLWRIEESSSEFTLYDFAELAAATGGFSDENLLGRGGFGPVYKGKLPDGAEIAVKRLAAHSGQGLEEFKNEIQLIAKLQHTNLVRLVGCCVQEEEKLLVYEYMPNRSLNCFIFDQQRGPLLDWEKRRRIIEGVAQGLLYLHKHSRVRIIHRDLKASNILLDKDLNPKISDFGMARIFGSNMTEANTNRVVGTYGYMAPEYASEGIFSVKSDVYSFGVLLLEIVSGKRNTGHHNYGDFVNLLGYAWQLWRDGRVFELIDPTLGERGDVATIVRCVKVALLCVQESATDRPTMADVTAMLATAGDAASAGPLPDPKRPPHFSLRVATTSGSDDDCGSRTRFTTSCSTNDLTITSIHEGR

SEQ ID NO: 59083 - protein, 343 aa, Zea Mays
MVLGNVAIVIGSGIVGSVLTGGEFGLPDFRDAISGAFKFLTKSAKPGKDGPSTSSPHTAELFSQVNHLREELQMLSKSNHVSIVTVDGRPGPGAYGITAVVIGGAIGYLFIRWKGWKLSDMMFVTKRGLSDACNVVGKQVDQVSESVNVAKKHLAGRIDRVDCSLDECQEITEATKEEVTIIHGDLSAFQKEMETVHLVVRSLDRTTRGIYDLCEFTKRLDQSPKADTRQVTSSTSRPAIESSERIVRVASLPLALEPESPRIEAPKVVRSSTVMSASGLSLLAGTTIPPKRDQPGVYSRASSMKEGSSELPSGVRNSAEPSPRRSGASTLFGGLGFLRNYTS

SEQ ID NO: 59084 - protein, 363 aa, Zea Mays
MFIVNAGPGFRLLWNTVKSFLDPKTTAKIHVLGNKYQSKLLEIIDASELPEFLGGTCTCPEYGGCLKAEKGPWKDPNILKIVQSGEVHCARQIVTISNGEEKIITYAKPKHHSMRGSDTSTAESGSEADDAISPKALRSYIQHPKLTPVREEVKIVRATSFSTRLPEYDVPVVDKAVDATWRREQPRKIPFMPQDADSSVKTMSRPSDSSWDKIVATLMACLMAIVMLVRSVKDLVTRRLPYKGGSEEIHSTLYPDPIQKEEFRPPSPIPGFAEADLFAVVLQRLGELEEKVQMLQEKPSEMPCEKEELLNAAVRRVDALEAELIVTKKALHEALIRQEELLAYIDRKEIAKAQRKKKAMLCY

SEQ ID NO: 59085 - protein, 626 aa, Zea Mays
MPHCYTALEELIYTFGGPWLFGLFLSGLLILLALVLSVARMKFVGTDELPGPAPTHQGSQIDHSFPFLESLNEVIETNRAEESQGHVHRMYFMGPNTFSEPWHLPHSPPEQITEIVYEDAFNRFVDEINTLAAYQWWEGSIYSILCILAYPLAWSWQQWRRRKKLQRLREFVRSEYDHSCLKSCRSRALYEGLKVTATPDLMLGYLDFFLGGDEKRPDLPPRLRQRFPMSLIFGGDGSYMAPFSLNSDSVLTSLMSQAVPSWIWHRLVAGLNAQLRLVRGGNLKVTFLPVINWLESHANPSLAENGIRVDLAWFQATALGYCQLGLLVYAVEGEAALTEPDGSPRVKIEQHTPTQNMLADTQLSQSRIKDALMRKRITGGVLNSNSLRTLKDRRDLFYPFSHILHNSKPVGHQDLVGLVISILLLADFSLVLLTFLQLYSYSMVDVLLVLFILPLGILSPFPAGINALFSHGPRRSAGLARVYALWNITSLVNVVVAFICGFVHYKLSTKTHPSVQPWNLGTDESGWWLFPTGLMLLKCIQARLVDWHVANLEIQDRAMGKTIILLTCSMVFADSKAGKAVRNRCGLGDVPFAALQFIEGCKNLLTYLTLCHLQTCSGGWMAKWVT

SEQ ID NO: 59086 - protein, 434 aa, Zea Mays
MLWNTLSGLEVADSWRSLENFTMFKNSNGETDTIRLAVRVEDTGIGITKDAQMRIFTPFMQADSSTSRTYGGTGIGLSITKRLVELMGGEIGFTSKSGVGSTFSFTAIFKENRGCPGDMKRYYSEPTPLDFQGMRALIIDGRSARAEVTMYHLRRLGIQCSLVATSESESASSALMKACTSSKNNPDMVLVDTEAWGKGSGLAFYHRFVDCQLKGAHKFSQPMPKTILLGSSISPVESDYLRLTGFGDCIRKPLRLSTIVACLRKTLGVGVTRQQSRDQSLVLQSVLTGKQILVVDDNAVNRKVAAGSLKKYGSKVTCVDSGSDAIDMLKPPHTFDACFMDVQMPEMDGFEATRLIRSIEKKINDMIMMGEISANNYGNKAHWHVPILAMTADVIQATFEKCMQCGMDGYVSKPFEEQQLYFAVAHFLETDETE

SEQ ID NO: 59087 - protein, 206 aa, Zea Mays
MLFLFYHKRGDCHNTKGEKNMCVVGAINNYTAALKDSSSPFDPTESLMFLAHFVGDVHQPLHCGHTDDLGGNTIVVHWYRRKTNLHHVWDVNVIETAMKDFYGNDQSTMIQAIQQNITEEWADEEKKWEACRSRTKTCADKYAAESAKLACTAYEGVDQDSTLEDDYFFAALPVVQKRIAQGGVRLAAILNRIFGGNSRSGFRAVD

SEQ ID NO: 59088 - protein, 1164 aa, Zea Mays
MRLRNTDRAPRSSGRRNNVLSWISEVKDTSNVGVRKKRGRRAPPSAKRLRDKRVDKAIESDGAVDSDSDDTDGQVDKNQPSAHIEEHVDGRTGDDLATAGHSGNSSNGPSSASEEQDHSTNSKDKLQKASSQNTKKVFGNSTNGKQGASNLEQECANEDGSHVLVAAVYKDIDNERSSQKIRDDVSDAQLDTASSDDKSSEEVEDVKVCDICGDVGEEEKLAVCSRCNDGAEHTYCMRVMMEEVPDSEWLCEDCQTAVESENENRLQKSQVKAGTSKELSLEGEINKPAIAAKGRSSSDCELKAGNIENKESNTTNERNGTVKTRTEEDAVTTSSTRDIFSETGGLYMGADSRKRMEPSHETFVSDADKGKQPSHQVSTSLVVNALKNQAPQSRGQLSKSTSFNNSKVPKVKQLLNEVPQKPKFLKESWSSIINKKEGPISMTTKSATFKKPKPCEPTNKAKSSVLSPVEEPRVPNQLASHNVTNGQCSILGPPSATSSMVAPVLRTDSTTQLLSTRNNTVDSNNLGSVHLQGNSELKKPRLAKVPGSMMLSNAERSAGGILGSGAHREVIQNSDPSHRDAKIKDQTGFRQGASSSNRTIRCQRCNEYGHSTHFCEVEKLRLSSGKPLSERNLKDASAKRNKTSEVSTLASSEKTPSREPEHVVKCAINQNLINGPNDGIPAPFSHVKKHSLSPRANVSIPGSGVDCSKPKFKNNDPSLSGTAGIFVHNGRIMPNDHRDEPAQGFSAGDEPTSSTVPELGWIWQGGFELQRTGSSPELCDGFQAHLSCSASQLVLDAVKKFPSKVQLEEVPRKNSWPTQFQKNGPTYDNIGLFFFARDVQSYENHYSKLVENMLKNDLVLRGSVGTVELLIFPSNILSKNFQRWNMLYFLWGLFRVSKKDSSNLPSYLSTSRVERNFNDDLQAMDWMPSTHSFSQNRSDLAEPDPDLLKSTNFEPSLEASREVCLDGENSLNQLVRRRALDDHLDSDAKACSTISNGAMGSSAMSMQRKHQKPDYPEHQDKKRDTFGGNVSERDFDVNTVPVTCSVSLTHLQEEPGKLSTAIDLMDIDHGVSAGALDRSHASGGAGKRSFETAEVAAEVPEHKKTKLDNNVVPISSGPRENACTNDGNSDKLMPGSSSSDGKRVFPLDLNAVGDEDIVNIPAFR

SEQ ID NO: 59089 - protein, 83 aa, Zea Mays
MYEKHLCGMTWDGVNDAPTLKKADIGIAIADSTDAARGASDIVLNEPGLSVINRVVLMSRAIFQRVKNYTISQYCSFFSVSSG

SEQ ID NO: 59090 - protein, 184 aa, Zea Mays
MLAEINTGKDRIKMLQHELSCTTALLKVKDSELDRKKNAGNVQQKGVKSQVLKTKASTVAVEAHHVGDSVTSGVEHHVVESQSAVSSNTVCQEPPQDGKQKRMPQRRRSSRLNQGSCEIRGVSQNTLHENPVVPVAPSTLSLEKQYGQTTGKHMKSLQNECSATVHEVIMASEFEVLYVYVAVF

SEQ ID NO: 59091 - protein, 190 aa, Zea Mays
MAKDGKSLCMHDLLNSQLWTFKYRYWFNNKSRMYVLENTGDYVKAHDLQQGDFIVIYKDDENNRFVIGAKKAGDEQTATVPQVHEHMHISAALPAPQAFHDYAGPVAAEAGMLAIVPQGDEIFDGILNSLPEIPVANVRYSDFFDPFGDSMDMANPLSSSNNPSVNLATHFHDERIGSCSFPYPKSGPQM

SEQ ID NO: 59092 - protein, 263 aa, Zea Mays
MVHLFAALPAVDGERVEVKRIHNCRRLSHECLTFISVKGIYYQAEVQGQKITWLTPHALQQVLTDDVDFNVMLSFLEFYETLLGFVNFKIYHSINVNYPPILDPRLEALAVELYALCRYMSAGSRRMIGNSQTDEVMEDKDEKSKAEEVIEEEKVVKNKASSKADESEFRLAQLQHQLPTNEPGALMNLVEESTADDADDDDTKDCKGLFKNLKFYLSREVPRESLLFIIPAFGGTVSWEGEGAPFKEIDEDITHQLKTCPTH

SEQ ID NO: 59093 - protein, 294 aa, Zea Mays
MARYLLAPTSTSSSTFLPKDGVKNSPTSRPLRLRALGSRTSKARHIMAVASEQAAPPARYPKVAAPTTGPIPAAELLGVIEAAAKAGADVIMEAVNKPRNIHYKGVADLVTDTDKLSESVILEVVTKNFKDHLILGEEGGLVGDSLSEYLWCIDPLDGTTNFAHGYPSFSVSISVLFRGKPAASTVVEFCGGPMCWSTRTISASAGGGAYCNGQKIHVSQTDKVEQSLLVTGFGYEHDDAWTTNMNLFKEFTDISRGVRRLGSAAADMSHIGLGITEAYWEYRLKPWDMAAGVL

SEQ ID NO: 59094 - protein, 474 aa, Zea Mays
MEQEEYTKEEIDWSYIQFVDNQEILDLIEKKPGGIIALLDETCMLRNSTHEIFAEKLYQKFKGNLHFSRPKFSRSDFTIHHYAGNVTYQTDLFLDKNIDYAVNEHQVLLHASRCSFVSSLFPHEVSAKSTKFTSIGSSFKQQLQALLETLSATEPHYIRCIKPNNVLKPAIFENSNVLQQLRCGGVLEAIRISCLGYPTRRRFDEFVDRFGVLLPEVLGESYDEVTATNMLLDKVNLTGYQIGKTKVFLRAGQMAELDAMRTEVLGCSASKIQRKVRSYLARKKFIQLRISATHLQAICRGQIARHYYDDLRREAASLTIQTCYRMYFARKNYINLCTASTTIQSGLRGMAARKKLQFRQHTKAAVTIQSFWRSYVARSRFMSLKKAAIATQCAWRGRVARKELRKLKMAAKETGALQAAKNKLEKQVEELTWRLQLEKRMREYNMLISTDDQEVIWEIRYISQPENHVNREIR

SEQ ID NO: 59095 - protein, 262 aa, Zea Mays
MPDRSRCFCVRDRLQPLGGRAEETHGGADVGAPGAADIGAGAPPAGGDGTQQLRAPVQDQGGGGQRGRVLRHVGLVEDPRREVLSLDRRVPAVGSPQDPEPAAGAAGGGAAHAGGRPAAHVGAGGGRAVAGHGEAAAEPRGDPDGRGRPVRAPRPLHAADGHRGGHTERARQLRDPGGPSPADDAAADAQDPDAAAGGQGPPGARRLLPAPPHAQLDVGGAPAGGGGQLDAPAAWQAKSSLTGEATVPKNTTPTTTKTKDEW

SEQ ID NO: 59096 - protein, 145 aa, Zea Mays
MQTSRYWLYAAIKLNCLLVTNDEMRDHIFELLGPSFFPKWKQRHRVKYTFNKGKAVLVMPPPYSSELQESEMGSWHIPIEEKSGNERGRIWLCIGRGGSCKEHGEVPSTNGAVHKVPQTEASNVVQQGLTENKDESITGKRKDRD

SEQ ID NO: 59097 - protein, 95 aa, Zea Mays
MSYLSARAQAVMKSFSVSGSDPSKQEKFLAYMAPAPHELTRDLDDENDDIQYSWLREYHWEVRGDDKDDPTTYLVTFDKKDGAKYLVISDVHSVL

SEQ ID NO: 59098 - protein, 71 aa, Zea Mays
MIKMCFPNLATACCLIISSFSISDNALTAAECHATGHRHLLHSEGSCPDAVEVREVHEEKLWPLPRERATS

SEQ ID NO: 59099 - protein, 1082 aa, Zea Mays
MRFEREREELGMKVESRVQKAENNRMQLMHDRLKRQAALEERTKRYFMQRLTWENKYRERVQSAIQKCNAAEKRRLGLLESEKRRAQSRLLQVQLAVKTASNQRETERSKLNEQLEEKLQKAEQQRADYLKQRGNPHSSMHSSSVKNGEFLSRKLARCWRRFRTSRKTTVVLARAFDALGINQRSVVSMPFEELALCIESPAVLQTTKALLDRLESRFVFSQSSTSSKPENIDHLLKHLGSPKRKIPLSNVGTSEATLKNAVGNYDSSTLSRYSQRIALCAYMILGHPKSVLSGQGEQEKFLMESATIFVKEFELLVKTVLDALDGACILSWSVIDDATPVRSSYEESSSIVADLKKFRTQLLAFDKAWCAYLYHFVAWKAKDAKSLEDELIRAACKLELSMIQTCKITEGESDNLGGDLKAIRKQVAEDQKLLRESIQHLGGEAGIGMMESALFETRSKFFQAKEKRSSIATTVANVASPSVTCSSGQSNDSETGIGMMESALFETRSKFFQAKEKRSSIATTVANVASPSVTCYSGQSNDSDTGENCNMDAEKASRVVQSLFGALSSRYENSKGGKLMSNAAPEKMPTENEQIVNEILHDIHGSFADISDGAGTVEGDFKVKVKETMEKAFWDVVADSMRGDMPDYCYLVSLVKEIREALEELSPTGWKEEISDNINLEILTQLLESGSQDRQYLGQILQYSLDKLRKLSSPVKEHEMKKSHDTLLGELVEDSKSNYKDPNSFVLCVIKGLRFTMEELQALKTEVTRARIQLLEPLIKGSGGVEYLQKSFAGRCGSPSDALASLPSTARWIFSLKDVVEEQWNEHVSSLSILPEADHVQTLVATLRTGHAVAGVQSVIPAADNTGLPECRGEILGKLIRIGLLQLISSMEGVERESVPETFMLNWLRLRSVQSKFQQVIVIATSMLVLHQVLASENPKITSSELENATSELFNVLTRLLDNFPDVGTEKIIEAMMYSSTSRSLSDHERMNARKEILTRVFLRSLQTDDTVFKKVSQSVYCAFRAVTLGGSGEKGRMLADASLRRVGATKLTARLVKAAEVLIKAAMVSEQVHGPWYTQLL

SEQ ID NO: 59100 - protein, 976 aa, Zea Mays
MQCSNTEVGAGTMNPLTFLRVLGPEPWNVAYVEPSIRPDDSRYGDNPNRLQRHTQFQVILKPDPGNSQDLFLHSLSAIGINIHEHDIRFVEDNWESPVLGAWGLGWEVWMDGMEITQFTYFQQSGSLPLQPVSVEITYGLERILMSLQEVDHFKNILYTEGITYGELFLENEKEMSAYYLEHADVSHIQKHFDNFEEEARSLLSLGLPIPAYDQVLKASHAFNILDSRGFVGVTERARYFGRMRSLARQCAQLWVETRENLGHPLGAYEEDNLIYPHVSKKTHREEVLVQPRAFVLEIGTEELPPRDVVEATEQLEKSLVNTLEKRRLTHGKVHTYGTPRRLAIVVENLSMKQTEVEVELRGPPVAKAFDEEGNPTKAAEGFCRKNNVSVDHLYRRIDGKTEYIYARVRESARFADEVLTEDLPTIVSGISFPKSMRWNSNIVFSRPIRWILALHGDFVVPFYFAGISSGNQSCGLRNSSLANFKVETAESYLGTVEKAGILINMQERKEKVLHASTVLAQGVGGDFIAPDSLLQEVVNLVEAPVPILGRYDDSFLELPKDVLITVMQKHQKYFAVISKSTGDLLPYFIAVANGAISKEVVRKGNEAVLRARYEDAKFFYKMDTQKKFSEFRGQLSGILFHEKLGTMLDKMTRVENTVAELALILGINERTVPIIKDAAALAMSDLATSIVTEFTSLAGIMARHYALRDSIPEEIAEALFEITLPRSSGDVFPRTDAGIVLAVADRLDSLVGLFGAGCQPSSTNDPFGLRRVSYGLVQILVENKKSFDLRRALTLLAGVQPIAIESDVIDEAVQFVTRRLEQLLVDEGINCEIVRSVLMERANCPYLAAQTATEMEAFSRTETFQKIVEAYSRPTRIIRGKEIESALEVDPHVFEKDEEKVLWSAYLEVADKIHPGVDIKTFVDASLILIQPLEDFFNSVFVMAEDERVRNNRLTLLRKIESLPKGIADLSVLPGF

SEQ ID NO: 59101 - protein, 734 aa, Zea Mays
MDNAQSENRIDTKQDDDVRQIKHDDEEARLEEYKKIIDQKTSLRRSNLNPERPDANYLRTLDSSIKRNTTVIKKLKTINDEQKDGLMDELKSVNLSKFVSEAVSYICEAKLRSADIQAAVQVCSLLHQRYKDFSPCLIQGLLKVFFPGKSVDDLDADKNSRAMKKRSTLKLLIELYFVGIVEDASIFVNIIKDLTSAEHLKDREGTQTNLSLLSTFARQGKFFLGLQPHGQEAYDEFFKELNVTAEQKKFFKKALNSYYDTVAELLQSEHVSLRLMEAENAKVLSAKGELSDENTASYEKLRKSFDQLLRGVSSLAESLDMQPPVMPDDGNTTRVTTRTDALPSSGKDSSALEPIWDDEDTKAFYESLPDLRAFVPAVLLGEVEPKSNEQHAKGREQSSESTSEQETELHDDFQTSATEHQLEVKLDGGVKESDDKDKEKGKDGEKEKSKEKDLDKKNDREKEKGRAMDGASLDNILQRLPGCVSRDLIDQLTVEFCYLNSKANRKKLARALFNVNRTSLELLPYYSRLVATLSTCMKDVPSMLLSMLEEEFNFLINKKDQINIETKIKNIRFIGELCKFKMAPPALVFSCLKSCLDDFSHHNIDVACNLLETCGRFLYRSPETTIRMANMLEILMRLKNVKNLDPRHSTLVENAYYLCKPPERSARISKVRPPLHQYIRKLLFSDLDKSSVEHVLRQLRKVTLGRMSTIPSEVLSKGSQRKVQPSSSDCSSHC

SEQ ID NO: 59102 - protein, 147 aa, Zea Mays
MLGVKRTERVLPTGTSLTVVGEAIKDDVGTIRIQRPHKGPFYASSKSIDQLIVNLGKWAKLYRIASMGFATFGVFLLAKRALQHFLERRRRHELQKRVLNAAAQRQAREAEGSKGTSDAEPNSKKDQLVLDICVICLEQEYNAVFVP

SEQ ID NO: 59103 - protein, 358 aa, Zea Mays
MGLRSAPRLALRRPGAVSGHRSRTGRGKFPVASTSLDDYLPMRSTEVKNRTLTGDITSLRLITAVKTPYLPDGRFDLEAYDSLINMQIEGGSEGVIVGGTTGEGHLMSWDEHIMLIGHTVNCFGTRIKVIGNTGSNSTREAVHATEQGFAVGMHAALHINPYYGKVSTEGLISHFEAVLPMGPTIIYNVPSRSGQDIPPQVIETLSGYPNMAGVKECVGHERVKCYTDKGITVWSGNDDECHDSRWKYGATGVISVASNLVPGLMRSLMYEGENALLNEKLLPLTKWLFCLPNPIALNTALAQLGVARPVFRLPYVPLPLEKRIEFVRIVEAIGRGNFVGQQEARVLDDDDFVLISRY

SEQ ID NO: 59104 - protein, 312 aa, Zea Mays
MDYIFRVPEAYQREEVHDFNHIPAETALYSDGNLEKYKDKHFCLYLGPEDGEMGQCNGPEAFANFFGLLDSLPHNGSKPNGSHSFGNTIDFRYKLKRRFDRGSYGEVWLAFHWNCSEDTDVHKEPPHFTNISQSEMYNCTSSGRMSSDEDHGSGTVNGDLFILKRIMVERGNAAYLSGLREKYFGELFSNASRTLEGLSRIESSTISVDMLYDPDIHLEKNLSATEEPLKHVARFIESFESESREIWLVYHNEGHSLSKLIYTAEETKLVTGNNNERVRHIQVLHPSKWWHWLRTTKAGLKQMQNLLWQLRT

SEQ ID NO: 59105 - protein, 326 aa, Zea Mays
MILAADSSASDLIRGIATECGVDFDEDPEAMVIDHINYAAMDVEGDHTLIVGDDLIQSDVILGSKKIEAPVLFRGIGHTANPSNSLVLKVLSASPSAYSANPKTKLSLPPSLTGSAISLVSVMQARNNARVLLSGSLDLFSNRFLKSGVQKAGSKTRYERAGNEQFVTETSKWVFHERGHLKAVNVKHHKVGETNEPGMYRINDDLEYSVEIYEWSGTSWKPYVADDVQLQFFMMSPYVLKTMSNDNKGLYSTSFKVPDVYGVFQFKVEYQRLGYTGLSFTKQIPVRPYRHNEYERFITSAYPYYTASFSTMCAFFIFSLVYLYHK

SEQ ID NO: 59106 - protein, 490 aa, Zea Mays
MSEDNSQQLKDGDGDRVTQGLGTVWSLILGRPPLRHVCLDIALKCAAHSQDEVRGKAVRLVAKRLYDLTYATEKIEQFAIESLVGVANEHTVDTDINSKSLKESTAEIEVGSQGTSVSGSQIPDTEFSENGPFKTSSVSTKQSAVSVSEAKRRTSLFFALCTKRSSLLQHLFNAYGRSPKVVKQCIHWHMPNLIRNLGPSCPELLNIIHNPPEGSEHLITLTLQTLTEDSNPSADLVAAVKQLYNTKLKDASILIPLLPSFPKEEVLPIFPRLVDLPLERFQDVLARILQGTAHTGPALTPAEVLIAIHDINPEKDKVALKKVTDACTACFEQRTVFTQQVLEKSLNQLVDRIPIPLLFMRTVIQALDAFPALVDFVMGILSRLIDKQIWKMPKLWVGFLKLSFQTQPRSFDVLLQLPPPQLEFMLNKYPNLRTPLSSFVNQRNMHNTLPRQILNILGIFSETQQAPMAFVTATLQTADATTSLPGATLM

SEQ ID NO: 59107 - protein, 842 aa, Zea Mays
MEESDAAEGVAVQLIDGEGEFAAAAAERFMAAAGVAGCGLSYAVVSIMGPQSSGKSTLLNQLFGTNFREMDAFRGRSQTTKGIWIARCVGVEPCTVVLDLEGTDGRERGEDDTAFEKQSSLFALAISDIVLINMWCHDIGREQAANKPLLKTVFQVMMRLFSPRKTTLLFVIRDKTRTPLEHLEPVLREDIQKIWNSVAKPEAHKDTPISEFFNVQVTALSSFEEKEEQFREQVQQLRQRFSNSIAPGGLAGDRRGVVPASGFLFSSQQIWKVIRENKDLDLPAHKVMVATVRCDEIANEKFGCITSDTEWLDVESAVQSGPVPGFGKKLSNIVEVHLQEYDKEAFYFDEAVRKGKRQHLESRILNKMLTHLRMKALEKFKAGLNSSLESGKEFAISARDNTECSLKDFEQGCADAIIKQANWDCSKILEKVRRDIEDHALSIRERKLSELTTHAKEKLRKALAEPVESLFDAADQTTWTSIRNIYKRETEAILPEFLKTICGFEMEYAQAEEMVSKLRDYARSVVQSKAKEESSKVLIHMKERFTTVFSHDKDSIPRVWTGKEDVHAIAKEARAAALKLLSVMAAIRWDDEPDRIESIITSTLLEGSVVSKIASAASADPLASTTWEQIPPEHTMITPSQCKLLWKQFKSETEFTITQAVSTQQAHRRGNSKLPPPWAIVAIAILGFNEIMTLLRNPIYVFLLFVGYLMVKALAVQLDVSREFQNGVVPGIISVSAKLLPTIQNLVNKVAAEQQDEHRHPHQQHPQVAEPLQPQMQPPPLLLSPRSPMSELRRLHMPSSPRKVASSSSSPSSSSSSAVSSPRHVGEDQKPRPGAAAPENQS

SEQ ID NO: 59108 - protein, 134 aa, Zea Mays
MREFIGWPAHDSPVSSVLFGPAETSIFSLGSDGKILEWSLHNQGQILWSRDCSRFCNPESFKTRMHEIALDSNGKRLLVTSGLVRAPIYQVQGHESELRTLPHSSSITSVDWHPTLPMYITGSADHSVRVTSIL

SEQ ID NO: 59109 - protein, 490 aa, Zea Mays
MDDSSVKAEDQTMLLEEGGQAMAAKPAYTSLTSQILRLIFMDQLLLLENRLTLRALSEFGGYLLYFYICDRTNLLGESAKNYSRDLFLFLYFLLIIVAAMTSFKVHQDKSSFTGKSVLYLNRHQTEEWKGWMQVLFLMYHYFNAKEIYNAIRVFIAAYVWMTGFGNFSYYYVRKDFSLGRFAQMMWRLNFFVIFCCIVLNNDYTLYYICPMHTLFTLMVYGALGILNKYNEIRSVMAMKFVACFLVVVLVWEVPGVFDIVWSPFTFLLGYTDPSKPDLPRLHEWQFRSGLDRYIWIVGMIYAYYHPTVEKWLEKLEETEMRTKLYIKTSIVTVSMMAGYLWYEYIYKLDKITYNKLHPYTSWIPITVYICLRNFTQEFRGFSLTLFAWLGKITLETYISQFHIWLRSSVPNGQPKWLLSIIPNYPLLNFMLTTAIYVAVSHRLFELTNTLKMVFVPNRDNKRLSYNFVAGTAISAALYFVSFVLIGIAGY

SEQ ID NO: 59110 - protein, 167 aa, Zea Mays
MALLAPSPRALRVRETAAAALPHSSATAACSTVGGGAARRALWLWDNGGGTGTGRRKEHRERVRPEAYCWDVSRPVEMEEIDSIEKLDDALRWSVENNQPVVIDWMAGWCRKCIYLMPRMEKMAGEYPEVRFYFIDVNKVPQGVVKRGNVTRMPTIHYGRMESGKRK

SEQ ID NO: 59111 - protein, 2398 aa, Zea Mays
MARQTSVTEADLEFMLIDENAKPKPLPYSLLEKITNGFSGAHIIGYGGSADVYEGFIGNHKIAVKRLRIPYQHEKEFSQEIECLMKVKHINVVRFIGYCSDTQGQAEKYEDNHVMADSQERLICFEFLPACLDKYIKDPSCSLEWRQRYQIINGVCQGLHQLHEHEILHLDLNPRNILLDDDMVPKISDFGISKCLKKNQGHFYTETISGTPIYMSPERGKHGPITTKSDLFSLGVTVIEIMTGNKENIDQATVEDVFASCIKIFNDKSLTAAQVRQIMVCAEIGIKCRNSEPDKRPSNTKEIIDKLEEEARTEESQESGKLLKVLPTLLLFDLHPGKLIPCSLQLTNDTDEHMAYKLSITESVDWSKYFTTKLPLYGIVQARSTYTVILTVLLECDAPVINRSCYMTLQSCTLAYEYIWKFNNTLEFEDFLEVKKTENAVKEVKLKAFLCEEGRSISKQTRPRVKLLSIVKPQTPLLSLDAHPTKPWVITGHAFGHVRIWNHETQKLLYSFKLSLGPVYSVKFIARKQWFVSSSAEGLIHVYSMETKMQKVKSYRAHDGVSISLAVHPTLPYVLSWPCSGPHEKKLWNWEKGWDCTQTFEREYVARNFVCQVAFDPKETNRFASASNYRVKVWSVDLPKCNYNLPGFFNEVNFLEFFTRDDQQYLIITVSHDKTAKIWDMRNKKYVYDSMEQNLMSPVSSVFSHPNLPILLTRSIDGTSHFWSPKDFRFEAVLDCRYGGHVWGIACLMGSKRRFVIGQETALTILDVGDQECQDMRQEGTSSEVITPGSSELLLDVHPLTLHFPFHAHKLIPCTLHLTNKTDEHVAFNLSIEDGMESWQQIFVRMPLSGIVPPKSTYTLVVTMRELTYLPTQNFNLTLQSNICEDRYIYSFMSLSESDQFFEDLKEIRNVAPPQVKLKAVFSLQGQTTFENGSSTGENLVQPLINIWTLFNPAKDFSSMLISLDADPTESWVITGHRHGDVALWKHGMQKMMSLINISGEASLPRNSLNTQHDVYSVKFIARKRWFVAGTCDGFIHVYKYETRIMDCIKRFRAYSSGIIDWGICSSRALIVHPTQPYLLSTCEEMKLWDWDDDWKCIQKFGREHTDSILQVAFSPNDSFASVSSDHTIKLWCLKSPTSECTLHGHSDKVNCLDFVTHDGQQYLISGSQDCTAKAWALKEKECVQTMDVFMSPVVSVISLPDTPYITTGSADGTIHLWSSANFRLERILSLGLCGPVWDLRLIGPTRIVIQPNNYEISVIMDIDTGSEASSSAPSNELIQVDPKELRFPVAQEVSSTLEIRNVTDHHVAFCMWSLNHTANYIPVPNIEVLSPQSMRQVVITRIARREPVPADPVDDIVYVKGTTVVQGTTSADVTYDMFDGTRTGQILQPAMELNVVLVADSEIIHKARLPWALDVHPTMPWIMMAQGDYQIRIWNYKTRIEKPIAIKGREVTSAKFIMHKQWILAGCSSGLVYVYRYEPEKKKSVEKIRVLQGHSNAINSLAVHSTKPCVLSASKDGKILIWDYENEWELMKTFDVKSPVQHVAFSPKDSNMFASAQDKTVKIWDWHSGNCKSTLSGHSDLVLCLDYFSQGDQLYLITGSRDKTAKIWDCKTRSCVRTLEGHTDVVNVACCHPDLLILITGSLNGSVRLWDLNRSTTFRYELIFDLGEVYAIASLKGTRIVIGHEIGLALVDIDLEGKKDGYVKSNVAIMDSKNDTDQNMKELSPTASSSEVQKVSSIIALETLYKMKSSESSIDVHPTETWMVITSDKYVHIWDYHTREVKQMMDTKGAKVRLAKFIARKQWVIAGATSGFIFVYDYDSKKEIIHVLCNHTEPIKSLAIHGTEPLVLSASVDGKILLWDYANDWHLIKTFDARSQRLVQVAFNPKDTNMFASAQGKTVKIWDRQHDECQYKLDGHSHQIECFDYFSGGDFDKLYIVTGSQDKTAKIWDCENAGCVQTLEGHAGPVRAVCYHQNLSLLITGCSDGSIHLWNSTTFRLEHKLNFADFGLLSSVACLKGSKRIAIRSREGLALVDIDIEDKKDSDVESITTTASMNDTGPITEENGVAADHISDDHLAQGVVYVHTEIIGKVNSACTIDVHPTKPWMVITQANKFVHVWDYHTKVVEWTIQIKGAKVSSAKFIASQDWIVAGTTRGFLHVYDCESRKEIRRLCEHPKSITSLAVDDDALELVLSASIDGKILIWSYWHYYHARRRSTWHLEKTFDAGSQCLKQVAFIAPSVHRSSSTIIATARDGTVKIWDPDRSDGCREFTLAADSGQIVECFDWFSRGTDIYLVTGSRDNTAKIWDIEDGSCVRTLEGHADHVTVVCYHPDLSMLITGSRDGSIRLWNSTTFRFEHELNFDLGSLSSLACIKGSTRIAIGYERGLVLADICTQEHRA

SEQ ID NO: 59112 - protein, 176 aa, Zea Mays
MCNNCNLPGHFAAECTLQTVCWNCKESGHIASECKNEALCHACNKTGHLARDCPTSGANVKLCNKCFKSGHIAVDCTNERACNNCRQPGHIARECKNDPVCNLCNVSGHVARVCPKTTLASVIQGGPFRDILCRICGQPGHISRNCMATIICDTCGGRGHMSYECPSARIFGLRRL

SEQ ID NO: 59113 - protein, 807 aa, Zea Mays
MEPAVATAGEGQRFKRIPRQAWSGNLELGPLLNESLDHWPHLNELVQCYKADFVKDDCKYGHYESVASPSFQNQIFEGPDTDIETELQLCNARHSKSEDATEDDTPSTSGRQIYETESSGSSSKVHCSLSPLPAYEAAFDWENERSLIFGQRVPESIPAISNSGLKITVKVLSLSFQAGLVEPFSGTICLYNRDRRERLSEDFYFHMLPTDMQVDQGSLDRRGVFSLDAPSPSVCLLIQLEKAATEEGGVTPSVYSRKEPVHLAEKEKQKLQVWSRIMPYKESFAWAMIPLFESNRAGGLSDAASPSSPLAPSLSGSSSQDSIVDPISKLALDGKVNHYSSGSSVIVEISNLNKVKESYIEDSLQDPKRKVHKPVKGVLRLEVEKLHDDHNDVDNASEGGSMANDLNDAGDINNGRSNRSSFDGIHSSVNSIAIAKKDAHHNGHTSNAENVDNFQAFDFRVLTRSEPFSQLFHCLYVYPLTVSLSRKRNLFVRVELRKDDSDIRKPPLEAVHPRERNTMLQKWGHTQIAVGTRMASYHDEVKISLPALLTPQHHLVFTFFHVDLQMKLEAPKPVIIGYSVLPLSTHIQLLSDVSLPILRELVPHYLQESGKERMDYLEDGKTVFRLRLRLCSSLFPINERIRDFFVEYDRHTLHTSPPWGSELLEAINSLKNVESTALLQFLQPILNMLLHLIGDGGETLQVAAFRAMVNILTRVQQESSDGAERNRFLINYVDFAFDDFGDRQAPVYPGLTTVWGSLARSKESCTSIILKRKKVQSGPSTRRPYGGQNLEYRNTHTVKKTQQTPQH

SEQ ID NO: 59114 - protein, 98 aa, Zea Mays
MARFYIWMATTMVETYLILYINHNNPLILWEVKSAYLFILPLASLCGLQLGNLCLLIPASSCRHRHNGSQDPLGQIHQGVYPSRSVEQDPVHASLSFQ

SEQ ID NO: 59115 - protein, 502 aa, Zea Mays
MPLIEQNLARTDDNSWKERETAVLCLGAIAEGCIGGLYPHLPQIVAFLIPLLDDKFPLIRSITCWTLSRYSKFIVQSLDHPNGREQFDKILMGLLRRILDTNKRVQEAACSAFATLEEEASEELVPHLEVILQHLMCAYGKYQRRNLRILYDALGTLADAVGAELNQAKYLDIFMPPLITKWQQLSNSDKDLFPLLECFTSIAQALGPGFAQFAEPVFQRCINLIQSQQLAKIDPTAAGAVYDREFIVCSLDLLSGLAEGLGAGIESLVAQSSLRDLLLQCCMDEAADVRQSALALLGDLSRVCPIHLHPRLQEFLTVAAKQLNPQSVKDAVSVANNACWAIGELAIKIGKEIAPVVITVVSCLITILKSPEGLNKSLVENSAITLGRLSWVCPDIVAPHMEHFMQAWCSALCTIRDDFEKEDAFHGLCAMVAANPTGAAGSLAYICQACASWTEIKSEGLHNEVCQILNGYKQLLGNNGGWEQCMAALKPDVVQKLARYGV

SEQ ID NO: 59116 - protein, 127 aa, Zea Mays
MTLQDAATERPEAYKAFMSHKRNQQVPGGGESLDQLSERCVSFLYDIVGKHKGERVILVSHGGTIRELYRHVSPTKPLHGKIHNTSVSVILVSDATGRCIVKMCGDVSHLQETGVLENAFGGDKTSA

SEQ ID NO: 59117 - protein, 71 aa, Zea Mays
MHKNVVDHSLFVPRTRDFSSGISLSSRSSFLSRIRSDVQSSSYRTNTRYMFMVSLCSHLEDCTLFQHHVHA

SEQ ID NO: 59118 - protein, 100 aa, Zea Mays
MIGTSTGRPGTRASRRPHARARTPGRQTDRGCAAQGRTAPAGHHPSGWAMDCNVRVWAILLGGSRSGGQRNRQAEMGVWRGSVDSSSNVELDRVGKKKTL

SEQ ID NO: 59119 - protein, 114 aa, Zea Mays
MQQGPRSPYSSWTSSSSSYSSSSAVASWYCWYSDTRSFMLLSASVNSISSMPSPVYQCKKAFLLNIAVNCSLTRRNISWMEVELPMKVEACPPWMWRISLMAGSWLDLKVATYR

SEQ ID NO: 59120 - protein, 57 aa, Zea Mays
MTHPTKKCWQRIVNTRICSIRNRFRAGCIIVGQTHASQYSANHITVVYNKAVTKKPW

SEQ ID NO: 59121 - protein, 118 aa, Zea Mays
MEGNFPPHEAFAIGGTNSVRGYEEGAVGSGRSYAVGSGEVSCRMFGPLEGVVFGDYGSDLGSGPKVPGDPAGARGKPGSGFGYGVGVRVDSPLGPLRLEYAFNDRQASRFHFGVGYRN

SEQ ID NO: 59122 - protein, 481 aa, Zea Mays
MILVIHQGMKDDKVVMQRKQHARHIDVISPSKSRMAVSSFSSVSPVKKQPNLSHQPKFLLESTNSSNHRASEVSGAVTATTTAGASSTLAAQLVSNKGPVSSAATRNEKPVLVTNKPLQVLVPSKSEAQKQASLTGSASTQVVSVSRPLSAPQVPAAKQSVPATTAQNAPLLSRSVSAVGRLGNEPSANAPSFIPRSRTYRNAMMEKSSGGVSSLTHQQGSSEQAVAPSQSMFTSQPSILSSETLSMKEETSLRPGFTFGTVKPESLNPYQGREENSLQASSSSSSDCTPSSSNIRSEIAKLSLNGRSRSKQLLSEISTRFTPYQPQGLVADEFPHLDIINDLLDEEQSDRRRVLQPGFVQQFSVHNGVSAPDYGLFSEPYLFDRSEQYFDEEPPRFYSPLSSAPRRMRDRSYSHFDLPSYSRSSQLDGLLMSQWPPYSRADLAMPGFGSDTGGYSYQPQGFPSPASAASRYPSYRPANGH

SEQ ID NO: 59123 - protein, 564 aa, Zea Mays
MTESEGYHQEVEDEYGDEYYDQDEYEEEGSGAGDGYAEEEEPTEGQKEILELRERLKEQIRRKAKAAAACTAGRSSSSQIPQARDKFGSFFGPSKPVISRRVIEERKSLKELHSTVAREPRPSGVHKDIPSSSKVQSRVNGHQHKQKIVNQVKKKAEALKDNRDYSFLLSDDADLSSSPKEKPAARSSLTQRADREVTQSTVKRKAPTSQPARLSNGYGPKNTMSTQRHAEGKVNSMRREDFSNTERVVSRDNERMYERVVSRDNERMHSIARNGSNQASTSKTTIQKHPSRGPIANKQPSKDSNDATLRKSSVASKHHPLEIDRPKSSQSQRMQSAGQRPQHSSHGQTPHQSMQHRTQQSLQSRRPQQMTQGQKPQQSLQSQRTQQSLQNRRPQQSSHIQKSQSSQAHRPQSLSNRSQALQGQRPLSSQGQYPEQRRVHASDRVKQAERQIRPPSKSMPSRPVSSNGIRDDHAKRKQVAKRRFDEDDEDPLAMIRNMFGYDPSRYAGRDEDVSDMEADFATIEMEEKRSARIARQEDEEQLRLIEEEERREQERKRRKMARGR

SEQ ID NO: 59124 - protein, 1145 aa, Zea Mays
MITGERQAARIRNLYLKTILRQEIAFFDKYTSTGEVVGRMSGDTVLIQDAMGEKVGKFVQLLVTFFGGFIVAFAQGWLLTLVMMATIPPLVLAGAVMSNVVTKMASLGQAAYAESSVVVEQTIGSIRTVASFTGEKRAVDKYNMSLKNAYKSGVREGLATGLGMGTVMVLLFCGYSLGIWYGAKLILEKGYTGAKVMNVIFAVLTGSLALGQASPSMKAFAGGQAAAHKMFETINRTPEIDAYSTTGRKLEDVRGDIEFRDVYFSYPTRPNEQIFKGFSLAIPSGTTIALVGQSGSGKSTVISLIERFYDPQLGDVLIDGVNLKEFQLRWIRSKIGLVSQEPVLFAASIKENIAYGKDNATDQEIRAAAELANAAKFIDKMPQGFDTSVGEHGTQLSGGQKQRIAIARAILKDPRILLLDEATSALDAESERIVQEALDRVMTNRTTVIVAHRLSTVRNADTIAVIHQGTLVEKGPHSELLRDPEGAYSQLIRLQEANQQNNGKVDANARPGKQISINKSASRRSSRDNSSHHSFSVPFGMPHGIDIQDGSSNKLCDEMPQEVPLSRLASLNKAEIPVLILGSIASVISGVIFPIFAILLSNVIKAFYEPPHLLRRDSQFWASMFLVFGAVYFLSLPVSSYLFSIAGCRLIRRIRLMTFEKVVNMEVEWFDHPENSSGAIGARLSADAAKVRGLVGDALQLVVQNSSTLVAGLVIAFVSNWELSLIILALIPLIGLNGWIQMKFIHGFSADAKMMYEEASQVANDAVGSIRTVASFSAEEKVMDLYKKKCEGPLRTGIRTGIISGIGFGVSFFLLFGVYAASFYAGARLVEDRKTTFPKVFRVFLALAMAAIGVSQSSTLTSDSSKAKSAASSIFAIVDRKSRIDPSEDAGVTVEALQGNIVFQHVSFKYPTRPDVQIFRDLCLTIHAGKTVALVGESGSGKSTAISLLQRFYDPDVGHILLDGVDIQKFQLRWLRQQMGLVSQEPALFNDTIRANIAYGKDGQATESEIISAAELANAHKFISSALQGYDTVVGERGAQLSGGQKQRVAIARAIVKDPRILLLDEATSALDAESERIVQDALDRVMVNRTTVIVAHRLSTIQNADLIAVVRNGVIIEKGKHDALINIKDGAYASLVALHSAASS

SEQ ID NO: 59125 - protein, 431 aa, Zea Mays
MFREIPSTVPVEPLEPSDLKPENSRYDAQISVFGAKLQKKLEQSKIFMVGSGALGCEFLKNLALMGISCSQNGKLTVTDDDVIEKSNLSRQFLFRDWNIGQPKSTVAATAAMAINPKLHVEALQNRASPETENVFNDAFWESLDAVVNALDNVTARMYIDSRCVYFQKPLLESGTLGAKCNTQMVIPHLTENYGASRDPPEKQAPMCTVHSFPHNIDHCLTWARSEFEGLLEKTPTEVNAFLSNPGGYATAARTAGDAQARDQLERVIECLETDKCETFQDCITWARLKFEDYFSNRVKQLTFTFPEDAMTSSGAPFWSAPKRFPRPLEFSSSDSSHLNFLLAASVLRAETFGIHIPDWAKNPKKLAEAVDKVIVPDFQPKQGVKIETDEKATSLSSASVDDAAVIEELIAKLEEIFKTLPPRFHMNPIQF

SEQ ID NO: 59126 - protein, 280 aa, Zea Mays
MASTASPPVFERVAGIRAIAESGRFKAWLLDQFGVLHDGKKPYPGAILALEKLAENGAKMVIISNSSRRSSVTMKKLKSLGFDTSCFLATITSGELTHQHLQKRDDPWFAALGRKCIHITWDDRGAISLEGLGLQVVNNVDDAEFILAHEKRLPMVVANPDYVTVEARDLRVMPGTLAAKYESLGGEVKWMGKPDKVIYTSAMSLAGVDARECIMVGDSLHHDIKGANASGMASAFVTGGVHADELGLGEFGETAGEDAVSSLCSKHGSYPSYVLPSFAW

SEQ ID NO: 59127 - protein, 518 aa, Zea Mays
MAVAGAIVGAAFGGWMNDKFGRRPSIILADALFFGGAVIMAFSPTPRVIIVGRVFVGLGVGMASMTAPLYISEASPARIRGALVSTNGLLITGGQFLAYLINLAFTKVPGTWRWMLGIAGVPALVQFVLMLMLPESPRWLYRKGRKEEAAAILHKIYPANEVEEEIDSMRRSVEEEVLLEGSIGESGFMGKLRKAMGSKVVRRGLTAGVIVQVAQQFVGINTVMYYSPTIVQLAGYASNNTAMALSLITSGLNAIGSIVSMFFVDRAGRRRLMLISLVGIVVWLAVLGGTFLGAAHHAPPVSDLETRLLANQNQTQTQTCPEFNPNVRWSCMDCLKAASTCGFCAHQGDKLLPGACLALNNASRHACRADHREFYTEGCPNNFGWLALIGLGAYIVSYSPGMGTVPWIVNSEIYPLRFRGICGGIAAVANWVSNLIVTQTFLSLTKALGTSATFFLFCAVSLLALVIVFLTVPETKGLQFEEVERMLEREDYKPWKRYHGGSSSIEPAKNSDIGLTPP

SEQ ID NO: 59128 - protein, 671 aa, Zea Mays
MEQFPDGAHVRLRSRVHAGYLHADEDGVGVSLRRWRRRSMNVAWKVHRILHDGSTSVLLHSAAYGRYLAASHDPAPPGHLGLRVDLGDYDQDVDPILWKAVGSGDAGYVLLRHVSNRLLRANGRYRLWHRGVSVDDVDNQSTMMHWKVETIPTSPRPPALPAPTRRNRGSFRGLFLLHEEPVVLQRTVRFVRADNYGNFPDNWGTLQFQGRSVFELRAEMARRLNYALFFFRLLMCVRGGRYGRLTPLLIDLPRNEETLDIIVLFIGTQGPENCITCVLIAEALHMILLTDSPMRPHVDMSTRTTAFTITYTATPSPNLPTPAAVPMETAAPARVQALAEAGVSRLPAQYIQPPEHRPTPSPSPIAAALSVPVVDLSTSTADDAVRAACADWGAFHVVGHGVPVDLLDAVRAAGLAFFRAPMEDKLRFACDPARGAASEGYGSRMLANDDSVLDWRDYFDHHTLPESRCDPARWPDFVPGYRDTIAKYSNSMKDLAQKLLCIISENLSLPPSYIQEAVGEVFQNITISYYSPCPQPDLALGLQSHSDMGAITLLIQDDVGGLEVLKDGMWIPVPALRDGILVILADQTEIITNGRYKSSVHRAVVNAEHARLSVATFYDPSKSRKICTAPQLVSENEPQKYRDVIYGDYVSSWYSKGPEGKRNIDALLIQH

SEQ ID NO: 59129 - protein, 669 aa, Zea Mays
METAHEVAIYIDRFHNLDLFQQGWYRVKISALWEDDENRAPISPARVTQYEAIDIGVKSSFGFWKIDDVDNSFYTQPFLVKYSRQDIYLSVMVSFYIPNSEDEGPATSSVILKFELIYIPTLGNAWTDVQDSSDDTDLIPVHEFRIPHRALLGLHSYCPVHFDALHSALVDLTIHIVYLKAAVTKSSLKPLEQSFGSKSYGIVKASLISREILLEEVKKISNAVGSTLEDLDRTDLTLGKYETVQPSKSASPSYSYGQGTPTKCSPQMTGILRDFLESSGVVVGSTDDILLYTLSEEELFELFQIVSSQLSFIWNEFLKFHRTHKDKVMGYLHDMWDINRKAEWSIWIIHSKIEIPHRYLRSMNDDSPRHLIRISSSRKPIQNSMSQAELHRKSIAQMKINTPSVQDMHIYADPSCIPVVRIEQHVMVIPQHCSSKDFLTDASEPARTIVPPPLLQGQSLGEETCGFKSGRILRAVIFVHGFQGHHLDLRLVKNQWLLLDPGAECLLSQINEDRTSGDFKEMGRRLANEVVAFLKRKVDKYSRNGGCKEIKLSFVGHSIGNIILRSALTEPKLQPFLKNLYTYMSISGPHLGYWYSPNSLFNSGLWLMKRLKGMQCMHQLTFSDDHDPQNTFFYKLCKLKTLENFKNIILVSSPQVLQMYAQRSFFCQA

SEQ ID NO: 59130 - protein, 453 aa, Zea Mays
MWGAIFGGDLSSNTLSGSVPHSLDKLSKLTLFNVSMNFLTGAIPSSGSLVNFNETSFVGNLGLCGKQINLVCKDALQSSSNGLQSPSPDDMINKRNGKNSTRLVISAVATVGALLLVALMCFWGCFLYKNFGKKDMRGFRVELCGGSSVVMFHGDLPYSSKDILKKLETIDEENIIGAGGFGTVYKLAMDDGNVFALKRIVKTNEGLDRFFDRELEILGSVKHRYLVNLRGYCNSPSSKLLIYDYLQGGSLDEVLHEKSEQLDWDARINIILGAAKGLSYLHHDCSPRIIHRDIKSSNILLDGSFEARVSDFGLAKLLEDEESHITTIVAGTFGYLAPEYMQFGRATEKTDVYSFGVLVLEILSGKRPTDASFIEKGLNIVGWLNFLASENREREIVDLNCEGVQTETLDALLSLAKQCVSSSPEERPTMHRVVHMLESDVITPCPSDFYDSE

SEQ ID NO: 59131 - protein, 467 aa, Zea Mays
MATAVASQPCHLPLSAGGDPRCAASTSNVHTLEKVYGFRFICRSIVDVKTHKFHSRISKRKCYLRNSLSECDRTIHSGRWLEFRRHKGVFQRTRRMVHIIPLASDGDGNHISVNGALQVGSTSNIDEIKLKLNKALQSEDISNGLVQSIHDAARSIELALIEHSKLPKSSWFPKTWLGVENNAWIKSLSYQAAVDSLLKAVIDVSSRGNDRDRDINVFVQRSLSRLLTPLESVIKNELSKREPALYEWYSSDQNPLVVRQFVNIFENDPMFYSATAICLEGEPMNTSESDLSLLMLGLICLAAITKFGSAKVSCQQFSSMVPDIIGRFMDMLLEFAPLSKAYNLAKDIGLRREFLYNFGPRAAVPKLGNDHGLEISFWIELVQKQLLWALDREKIWSRLTTSESIEVLEKDLAIFGFFVALGRSTQGYLSFKGLTDLDDSLNGIVRYLIGGSVLYYPQLSSISSYQL

SEQ ID NO: 59132 - protein, 160 aa, Zea Mays
MEEREKLVCLAKLAEQAERYDDMVEFMKNLARMDVDMSAEERHLFSVGFKNTIGAKRASWRIICSHEQKVAADRQTGVMIDAYKKKVEEELRKVCNEVLSVIAIHCLPLASTGENIVFFYKMKGDYYRYLAEFSTGTEKKAASDQSLMAYQSLPSGKTSI

SEQ ID NO: 59133 - protein, 118 aa, Zea Mays
MQFDRYEEYRYLLAIVSLGLLYSLAQAVRRAYRMRGGADPVSSASGRLLDFVGDQVVAYLLMSALSAAVPITNRMRSAVVNNFTDATAAAISMAFFAFVALALSAVVSGYKLSKQTYM

SEQ ID NO: 59134 - protein, 317 aa, Zea Mays
MTWVEIPRAEKKPLPTDDCIQIGWFPKDCMQIGQRLGYRRARRTVCRSDSGWGTGVQIGWFKKVLEKQSRESRAPSCRAGTDGRPGRKKRGRRAGRGVDDGWVDSVTLSKRFCRLGYRFGSLWIHAVLQTKHAIAEKHNFLIFEDRKFADIGNTVTMQYEGGIFRILDWADIVNAHIVPGPGIVDGLKLKGSPKGRGLLLLAEMSSAGNLAHGDYTAAAVKIAEQHSDFVMGFISVNPASWSVTPSSPAFIHATPGVQMAAGGDDLGQQYNNPESVINYRGSDIIIVGRGIIKASDPLKTACEYRVQGWQAYKNSLL

SEQ ID NO: 59135 - protein, 450 aa, Zea Mays
MEPAAEDAAAAAPDSWETADIDGPMSRLILSARRVSSSPDFADDQDPPQPPPTLQPQGAPSAPSDAREDVVAQVDQFLREALEKPRERLSVLRMEQEILKFIHDPSRTEYEFNGLPTSYLRLAAHRLAQHYFLQSIAIPDNSLPDGTGSRIILRKTTFDCRLPAVRLADIPVNLPQEDISVAKVAIKQRPQKNLHGMNSSSAHSSRDNLQKSVEERKEEYNKARARIFNNSNSSTATDERSAEEVTLPSTLHRSTSLELNSSNRIGQGAEITLERSLTTTSASSRSNRSKIDKEPAVNRNKQNNRVAIFRDRESERKDPDYDRSYDRYMQRFDPGFGFSGGPYTIQPLYAPAVNYNTEFPQLGSAHRSPVAVEQQPRPIAQHMPASWSVAQASNAIGYGPDGVMGPYSPGAPVRSSVFMHASQQYAIPSRPGVPFAHPQESMGPFAQIFL

SEQ ID NO: 59136 - protein, 342 aa, Zea Mays
MAAAADSASDQNPKDAERHVLTAESDADFSEEDYDEDGEEEYEEEEELDGPAAAAAERERMQSVLRRLSSDPVGIRVHDVIIKGNTKTQDELIEAEVAELLRAAPTVQDLLRAASVATARLHDLDIFDAVKITLDAGPPELPGTTNVVIEVVEVANPLTGTAGVYSKPEARSWSLEGSLKLKNLFGYGDIWDASGSFGWDQTTEVGVGVCLPRFKSIPTPLMARASLSSQDWLKFSSYKERLLGLSFGLLSTRNHDLSYNLAWRTLTDPSRVSSKAIRRQLGHNLLSALKYTYKIDKRDSHLRPTKGYAFQSTSQVGGLWNSKGLRYFRQERVSFYRLQGDS

SEQ ID NO: 59137 - protein, 209 aa, Zea Mays
MGLGAAMALGDPPADYASIAAVGLFVALMCVGIIVGHLLEENRWMNESITTLFIVLSQDETPFLYSLVFGEGVVNDTTSVVLFNAIQNFDPGNISGAKLLNFISSFLYLFGSSTILGVASGLLSAYTIKKLYFGSPVKSIALSNTILALVLVSRAAFVFPLSFLSNLTKKTPNGKISFRQQCEAFWEGHHHAQLEVVRDHNSERGGVHG

SEQ ID NO: 59138 - protein, 1906 aa, Zea Mays
MEEDHSVILISEGAIKSIKLSLSTGEEICTYSINECPVTHPSQLGNPFLGLPLEAGKCESCGASENDKCEGHFGYIELPVPIYHPCHVTELRQLLSLICLKCLRIKKGKVKQSNGKGNAAPTLCSYCRDIPALSLKEIKTTDGAIRLELRAPHNKHMTERSWNFLDKYGFHHGGCSHHRTLLPEEALNILKKVPDDTRRKLAARGYIVQTGYVMKYLPVPPNCLYIPEFTDGQSIMSYDISIALLKKVLQKIEQIKRSRSGSPNFESHDAESCDLQLAIGQYIRLRGTTRGPQDNTKRFTVGSADSAALSTKQWLEKMRTLFISKGSGFSSRSVLTGDPYIGLGVVGLPSEVAKRMTFEEQVTDININRLQDVVDKGLCLTYRDGQATYAITVGSKGYTTLKVGQTISRRIVDGDVVFLNRPPSTHKHSLQAFYAYVHDDHTVKINPLMCGPFSADFDGDCVHIYYPQSLAAKAEALELFSVERQLISSHSGKVNLQLGNDSLVAMKAMSHTTMLHKELANQLAMFVPFSLLAPAVIKPVPSWTISQIVQGAFPANLTCQGDTHLVRDSTIIRLDLGKESVQDSFPDLVSSILREKGPKEALQFLNVLEPLLMEFLLLDGLSISLRDFNVPKALLEEAQKDIRNQSLILEQSRCSTSQFVEFRVENNLKNVKQQISDSVGKFSDLGLLIDPKKEASMSKVVQQVGFVGLQLYREGKLYSRRLVEDCFTNFVNKHLAIGDEYPPEAYGLVQSSYFHGLNPYEELIHAISTREAMIRSSRGLSEPGTLFKNLMAILRDVVICYDGTVRNICSNSIIQLKYGEDDETDSSSVVPPGEPVGVLAATAISNPAYKAVLDSSQSNNASWESMKEILQTRTSYKNDVKDRKVVLFLNDCSCAKKFCKERAALAVQSCLKRVTLGDCATDICIEHQKQINLDGTSEAAPTLVGHIHLDKGHLERINISTQDILQKCQEVSGRFGKKKGHLCHIFKKITFATCDCSFTQMPIDGKLHKVPCVQFAFSDDIVLSESIERAVNVIADSVCSVLLDTIIKGDPRIQAAKVIWVESDAASWVKHTRKVSKGESALEIIVEKDDAVSNGDAWRTAIDACLPVLNLIDTRRSIPYGIQQVRELIGISCAFDQVVQRLSTTVKMVNKGVLKDHLILVANSMTCTGNLIGFNIAGYKATFRSLKVQVPFTESTLFTPMKCFEKAAEKCDSDSLGCVVSSSAWGKHAAVGTGSSFQILWNENQLKSNKEYGDGLYDFLALVRTDQEKTDYMFLDDVDYLVEENAADDMCLSPEPDGTLGKPTFEDNFEEQNIQKGSSWEIGITTNSSWEQNASVANDSGDWGGWSSGGGAAAKPADQDNSWEVHAKVQDNSTTDWGGWSVEKPTGDGNWEKSSTPEASKKNDSSENTWDKRKGDGGDGAWGNRSDDGHGNWEHPSNWNGQSLDVDQDTWGNARGKKKADGNYCQWEEQPSNYKQKKTNADHDSSYNNVMPSSEIAWNAGDGTGRPNAKSNAESSWGEEDKMESDDHPKVPKESDTWNTGRSNESPWDNTDALQDSWVKSAARNNNTQDGSWDKVVSMKDLDSLQDSWSKATIQTNDAQNDSWDNVAKNAPDSAAEDSWGAATPAETTDSGNKEWKSDGWGAKSGNWSSQRNNPGRPPRRPDERGPPPPRQRFELTVAEKNILLEVEPIKLRVRSIFREACDGVRLNPEDEKFILEKVLEHHPEKQSKVSGEIDYLTVNKHQTFQDTRCFFVVSTDGSQADFSYLKCLENFVRKSYTEDADTFCMKYLRPRRRQAPPADVGTASGAPDEVPPSTAAETEQGTPPAPQAEVPQETWGSPAVPLEGGTHIAGPDSTGDAVILGEQHDLTPASPAVAPQVASEPDTTDGTGLLGKAPQADWGPRFDAD

SEQ ID NO: 59139 - protein, 97 aa, Zea Mays
MICWAFSIYLEAVAILPQLVLLQRSRNVDNLTGQYVFFLGAYRAFYILNWIYRYFTEGHRSRWIPWLAGLVQTALYADFFYYYFLSWKNNVKLELPA

SEQ ID NO: 59140 - protein, 79 aa, Zea Mays
MKMLAIESNQSRYKRGDPCHDKDFEVCIRTKNNAWVIAKISQGRELYMALEKGGETLLYASTAVEKFSNRYCEGAFSTD

SEQ ID NO: 59141 - protein, 52 aa, Zea Mays
MGGGNAQKSKMARERNAEKNKGGKGSQLEANKKAMNIQIQPRRDSRTLIVNH

SEQ ID NO: 59142 - protein, 100 aa, Zea Mays
MPVAANIPPPETQASGWFSPLWVAFAILIGGLLLDVLISVSLGVSALPVNIIIGVLIVLGLGTALRLALECCQEWGSRRNVGNMPRLENIPPTGYHPAVV

SEQ ID NO: 59143 - protein, 61 aa, Zea Mays
MATPLIAGLAVAAAALAGRYSIQAWNAYKARPVVPRMRKFYEGGFQPTMTRREAALILGVS

SEQ ID NO: 59144 - protein, 523 aa, Zea Mays
MAGGGVAALGVKTERAAQYKGRMTLAVATTCLVAAVGGAIFGYDIGISGGVTSMDPFLEKFFPVVFHRKNSGGKNNYCKYDNQGLAAFTSSLYLAGLVASLVASPVTRNYGRKASIVCGGVSFLIGAALNVAAVNLAMLILGRIMLGVGIGFGNQAVPLYLSEMAPAHLRGGLNMMFQLATTLGIFTANLINYGTQNIKPWGWRLSLGLAAVPALLMTLGGLFLPETPNSLIERGRVEEGRRVLERIRGTADVDAEFTDMVEASELANTVEHPFRNILQPRNRPQLVMAVCMPAFQILTGINSILFYAPVLFQSMGFGGNASLYSSVLTGAVLFSSTLISIGIVDRLGRRKLLISGGIQMIVCQVIVAVILGVKFGAEKQLARSYSVAVVVVICLFVLAFGWSWGPLGWTVPSEIFPLETRSAGQSITVAVNLLFTFAIAQAFLSLLCAFKFGIFLFFAGWITVMTVFVYVFLPETKGVPIEEMVLLWRKHWFWKKVMPDMPLEDGWGAAEGHAAPASNNHKG

SEQ ID NO: 59145 - protein, 522 aa, Zea Mays
MPAIKSSDYNIRNTTFALVIVIQYVIRMYLIIPLSNQIIKAVGVVAKSAWGGAAYNLLLYMLASHITGAIYYLLSIERQITCWDQQCVAEYNDTHCNFSFISCENNGSNDYSVWANKTKVFANCDATNSSISFNYGMFSSALSKGAVSSPFLEKYFFCLWWGLLQLSSSGNPLVTSAFITENAFAIAIGAISLILFAQLIGKMQTYLQSISKRLEEWRLRQRDMDEWMRHHQLPSHLQERVRRFVQVKWLATRGVEEESILQALPADIRRDVQRHLCLDLVRRVPFFSEMDNQLLDAICERLVSFLCPENTYISREGDPVNEMLFIIRGKLESSTTNGGRSNFFNSIILRPGDFAGEELLTWALLPKTNVHFPLSTRTVRSHTEVEAFALRAEDLKFVANQFRRLHSKKLQHTFRFYSHHWRTWAACFIQAAWRQHQRRKLAESLSRWESYSWWSAEDHPTGDKPRQEGTSSGGGGTRTIAEGAIAHMHKLASASRRFRTEDVAIRRLQKPDEPDFSADHFD

SEQ ID NO: 59146 - protein, 523 aa, Zea Mays
MGRRIMKSGRRTTMQPRPALLLLVLVLGVSLRGCIAQGGGGGGGLTRGSFPKGFVFGTAAAAYQYEGAVKTDGRGQTIWDTFAHTFGKISDFSNADVAVDQYHRFEEDVQLMADMGMDAYRFSIAWSRILPNGTGQVNQAGIDHYNKVINALLSKGIQPYVTLYHWDLPQALEDRYNGWLDRQIVNDFAAYAETCFKAFGDRVKHWITLNEPHTVAVQGYDAGLHAPGRCSVLLHLYCRTGNSGTEPYIVAHNFILAHATVSDMYRRKYKAAQNGELGIAFDVIWYEPMTNSTIDIEATKRAQEFQLGWFADPFFFGDYPATMRARVGERLPKFTADEAALVKGALDFMGINHYTTFYTRHNDTNIIGRLLNDTLADTGTISLPFDKNGKPIGDRANSIWLYIVPSGIRKLMNYVKERYNSPTVYITENGMDDGNSPFTSLQNALKDSKRIKYHNGYLNNVAASIKEDGCDVRGYFAWSLLDNWEWAAGYTSRFGLYFVDYKDNLKRHPKNSVQWFKTLLSSS

SEQ ID NO: 59147 - protein, 345 aa, Zea Mays
MISAKDEPDTELPPAVDGLLRVHRRITDGLETETDQPQRATVNTGPTRLLVPASQAGSLIGKQGATIKSIQDASKCVLRIVENVPPVALNDDRVVEIQGEPHDSHKAVELIASHLRKFLVDRSVLPLFETQIKAHNMHREQPMPPPQAWGPPPPSPWGHPPPNLPPGGPGYVGNPHYMPPRPQENYYPPPDVPPVEKQPHYGISSYGRDAPPSAPPGNQNQAHGSSQVTHSMQVPLSYADAVIGAAGASISYIRRHSGATISIQEGAPGEMTVEITGSASQVQTAQQLIKGPPAPGPHGQPVDTGYGSYPPYGGASYGSPPGAPAPAPHNGGSYGAAPYSSSYGY

SEQ ID NO: 59148 - protein, 67 aa, Zea Mays
MLCFEWWSFEILILVSGILPNPELQTSVLSICLTTITLMYTIPYGLGAAASTRVANELGGGNPEGAR

SEQ ID NO: 59149 - protein, 1202 aa, Zea Mays
MSHCPRASLSLAPPSPFLFPHCPSPRRRRRPRGRSLHLTSRPLLTLARFDPPRLFRLKVSDSSASPGEAAHAHAHHSNHRAHAHHSPAPSLLPWPRALIGSLAPVWREGLFLVRCSVFAAVVSVAGALSWFAQLRARSFVEARLLPAACSALSEYLQREVRLGKVRSISPIGITLQTCSIGPHEEEFSCAEVPVMKIRVRPFASLRRGRVVVDAVLSEPSALVAQKKDFSWLGIPAPSEGTVKRHSGEEGIDYRTKTRRLAREKAAEQWNEERDKAAREAAEKGYTIPSGQSVPLSSNEILEADGPTEIGKSSPPLCADQMHKNDHHLATGIDSGSKHADLEKSFGFKSPIPGINLWSRVISSPSRLRYMRKAPSKVIPDVDNSSQQRILRRSADAAVSYFQNTGHINIDDSSPGPGKGSSDGGHANVGGSGINSNDETVSNSKTASTSLAESPSHSQLSSQCSSSNLDNLLLWHNLEDLQIGQAKNPSGNKPVPHQENIFGNFGSCTHAHNWVPFWPFQLKSCPVSFNSPWASLDLQIEKLKSQFAIGPGDFSAELTEGVSEIHPGGVQNALPITLDSVYFNGGNLMLLGYGDQEPREMKHASGHVKFKNNYNRVHVHVTGNCMEWRQDRSSQGGGYLSTDVFVDIAEETWHANLNIVDAFAPLFERILEIPVVWHKGRATGEVHICMSKGDSFPSIHGQLDVKGLAFQILDAPSSFSDIVAKLSFRGQRVFLHNASGWFGDAPVEASGDLGLNPEDGEFHLMCQVPSVEVNALMRTMKMKPLMFPLAGSVTAVFNCQGPLDAPVFVGSGIVSRKSFSVSGMPPSAASEAVMQNKEAGAVAAFDHIPFSHVSANFTFNLDNSVADLYGIRACLLDGGEIRGAGNAWICPEGEGDDSAMDINLSGTILLDKVLHRYIPGGIQLIPLKIGELNGETRLSGSLIRPKFDIKWAAPNAEDSFSDARGNIVIAHDYIMVNSSSVSFDLNSRVQTSYINDYLLNKETYQMKKIMPLIVEGVDLDLRMRGFEFAHIASSIPFDSPRPLHLKASGRVKFQGKIMKSSNIADGNINGVLQSNIDQNKLETNASKLVGDISLSGIKLNQLMLAPQSTGFLSISRDSMMLNATGRPDENFSIEVNGPLLFTSNEVIQDVRLLSIFLQKGQLRSNICYHPENLTSLEVRNLTLDELEFASLRGFVQKSLNLQV

SEQ ID NO: 59150 - protein, 155 aa, Zea Mays
MSHARARRADAQQPISCSKFSSCPKLLLSRSRATAPGFFSRSACENRSLCSSPKFQTISYQRREDLGSMAPLQQTSRSWHPNPCGSPAIRVPCVLGWSSRVVAVEIAICSRASRNRRTSFSDQEIELFEFYEAEDSEHLFGEGKCPLTYYIPFTL

SEQ ID NO: 59151 - protein, 1270 aa, Zea Mays
MIIDAIDWLVLSTTEKVRNIYDDLFEVPSKVMQTAITPRDATSSINFYWNSKGSSLGYIPVFHFSEVLQAGAGVVRQFNININGKRFTSHDYYTPRHLESGYVYGTRPYTNQIRYNVSIVKTDTSTLPPIINADEIFIVISTTNVGTDSEDGTWDGLTCSYAISDPPKITALNMSFSGLTGDISSAFANLKAVQSLDLSHNNLTGSIPSSLSQLPSLTTLDLTGNQLSGPIPSSLLKRIQDGSLNLIYADNPDLCTNAGDSCQTAPQGKSKLVIYYVAVPMALIVVALAVLLCCLLRRRKTRGLADVSVKPRDKTPTSLASMAADEHRLSSLRLENRRFTYEDLEMITDSFKRVIGRGGFGYVYEGFLEDGTQVAVKMRSQSSNQGAKEFLTEAQILTRIHHKNLVSMVGYCKDGVYMALVYEYMSEGSLQEHIAGKRLTWGQRLRIALESAQGLEYLHRGCNPPLIHRDVKTSNILLNAKLEAKVADFGMSKALDRDTYASTNTLVGTPGYVDPEYLETMQPSTKSDVYSFGVVLLELVTGRPPILHSPQPTSVIQWARQHLARGDIEVVVDASMGGNHDVNSVWKAAEVALQCTEQASAQRPTMGDVVAQLLECLDLEKGRSANESFCDGDDSGSATASLSHSSAFVTGRIFGTVPMVETGPATRRALVCVSLSPLSPLPRARLPSAPPWDESAFLAMAASHLPPAATLVKKYPTLLHPFGAKPHAQRLIFRCRATSSEGADDGWASFVDELKRSLQVDPSDAVISNAGAGLTSNNDLVTALPLEPSAGPAAGDATTAAAGAVSELLGVDASGAVATPDRLLSSLLHLDASNPVASVAGGALSRLDALTSGLSDAQRWALFGFLAATWLYLTARPGVLSGAVDMYVLAPLQLALDSVLGRRSLKMSDFVVGERIGEGSFGVVYAGAVVPKNGAVVEERSGKAKTSLQNDDRYKEKVILKKIKVMTVGAKECGDYEEWFNYRVSRAAPESCADFLGSFVADKNKAEFVKGGKWLVWKFEGDRTLANYLSERGFPSNLERLMFGRVLQGLGPLEREALVVKQVMRQLITSLKRIHATGIVHRDIKPSNLVVTRRGQVKLIDFGAATDLRIGKNYVPDRALLDPDYCPPELYVLPEETPEPPPEPIAAILSPILWQLNSPDLFDMYSAGIVLMQMAIPTLRTQSGLKNFNAELRSAGYDLNRWRQSARRRPDLQILDLDSGRGWDLATKLISERGANGGGRLSAAAALRHPYFLLGGDQAAAVLSKFSLSK

SEQ ID NO: 59152 - protein, 172 aa, Zea Mays
MSIAELEVEVAAGTFLKQSQVKIMAAVASIQDDQKTRVTIYLVPLREQFDTYTASLISDRFMEKKVQINSSIFGDYKVINISYHGLQSPPSSLPGGSDPSGTEEYPITAEVPDQKKKHNKSDILVIVVVLGSSLGLLMTCAVLLILLVRWKKLGRLHEAMTPATIPAVNRRY

SEQ ID NO: 59153 - protein, 277 aa, Zea Mays
MPPSPIVLPATALPAARLARVVAASESGGATPPRASPRRGRRGKPGFSRRSAIKKSFHQEQVVFSTPVSTDPTVAVIGGGASGLSCATSLAARGVRSVVFDTGMHGLGGRMATRFVDGGKQLVFDHAAQFFTASDERFQRLVNEWLDRGLVREWSGLIGELEAGGCFRPIPSLTPRYIGVNGMRPLADAMLPETDMIKVLRPCWISKLEPFNGLWRLFENEKPRGEYDAVVIAHNGKCANRLLSTSGLPLLTKQMKHLKILFRFHFLIPMQHLKEHL

SEQ ID NO: 59154 - protein, 659 aa, Zea Mays
MPPELGMSSRTVAGAVVNRRPRRLFGRSSERKNPLNLQFERQVARLEARQQQQRCVIVTVIPFNFCYDFKSLSLTESASEDPSSRPTSPEENPETSSSPSILFLHLNAQDVSHRRWQDNSSRLLEDKPTTSNSMSDSDFLVNSFTKPSDNARPSRRKSKKKSKKHRQRCRKPTDGSEAKFREGNGAASAADVGDCEDSTLSPKHVGDIRFEETSPSSSVKEASEEAPESDDDEYHCCSGGSVSSASYCDEMELSKSTTSCPALCGQCPSSNLQYLDNTQNSAPTGPSQETCYAGSKANCNHDTKSLFIFRNERGSDPCEATEFCSSSSGFDENWIEKFDYDSGICSPKSVGTYGGDQAAHLCSDTTGDNDFCLVISRKRARKEKKMSLWKSYGAHASTPALDRNKKYVGHSSMQMTNEFNSNDWSHRQNHVSRIHPQHGNALKSSTKNFMQRPSIGCRETQYGFPAKESKLGASLNHSTGPREKTCGKLTGGFDKTAQQLYLDRDLSNALNSSESIRCETRSISSSEPTTPKSLKGNYTSESGESTDITIGALPMQKRRLQDLVRTDDASETISGRSSPCSESSTTELIAGHSTDSSIEGNHGCQGLCNSRTHLAQMLRVVNDACKVQFWCAREGITDIIKYCKLYELSSCACKSAYTA
